United States Patent Application Publication US 2007/0192889 A1 - sequence listing, part 13

SEQ ID NO: 27163 - DNA, 1303 bp, Glycine max
  Clone ID: TF_GmC1650_2
atttcttctaaaactttattttctctttgcatcattcataaagtaataagccagcagatggctcgagtaaagccattccacaaacgaactaaaacattctttcttgcactaaagagcagctgcagacaaacaagtaggttggattagctagtgagatcctccatggaagatatcggtccgaactcatgcacgaggcaagtggcagagaagaaagcaagacctcaagagcaattgaattgtccaaggtgcagttcaaccaacacaaagttctgttattacaacaactatagcctcacacagcccagatacatctgcaagacttgtagaaggtattggacagaaggagggtctctcagaaacgttcccgttggaggtggctctaggaaaaacaagagggtcacctcatcaaaggttcctcctgacttgaatccaccaagcctctcatcagtctcagctatttcttcccaaaaccctaaaatgcaaggagtccatgaccttaatctagcttttcctacagctatagacaattatcatggcatgtctccatatgttgagatgccaaaacttgaaattggtggtgatcacagtactagtcatagtcaccaccatagcccttctgctgttgagctactacggtctggcatggcttctaggggtttgaatccttatgctcctaattccatgatgtcaacctcagatcattccctttatacaactggctatcccatgcaggaaattaaaccaaaccttagcttttcagttgatgatgggtttggaaatagatcatatggggttcaagagaatggtggtgggaggcttttgttcccttttggagacatcaagcacctttctgcgggtgttgaagtggaacacaataaagaacgaggaaacaattcaactggatattggactggttggtgaagggtcttcatggcaaggaaattatgagaagaaatattgagaggacatataaaccttcactgttttctttatcttcactgtttcgatctatcctttctcacatggatcattatgatctatctgcttgaagttgttcagatcactaacaatagggttactctgttttgtatacattattattattactacatttctattcgaacaatagcaatgtgagggttttacagctcatcttggttgcttttaatgtttagagagatagatagaagaagaggtgaatatagggtctgcttttgttcaagtcatgcaatggcatgtatttatgaattcttctgtcaggagtagatacatatctatctatcacctttattgatgtatgcat

SEQ ID NO: 27164 - DNA, 855 bp, Glycine max
  Clone ID: TF_GmC1387_1
cgccaaccaaaaccttctccgttaagaataactctctctctctctctctgaaatgggcgaggaatctcaagggattaagctgtttggtgcgctgattacattgaagggtggggaagtaaagaaaggagaaaaaggaagcgaatatgagagggtggagaagagagcagagaagataataccctgcccgagatgcaagagcatggaaactaaattctgttacttcaacaactacaacgttaatcagccgaggcatttttgcaagagctgccagaggtactggacggctggtggggccctccgaaacgtcgcggtcggcgccgggcgccggaaggctaagtcaccgtgccatggagccggtgacttcatggatgggcgtgcctatgaaacttctgaagatgaaaacaggtttgagatgaatcagggacacgttgccatgcccaacactcatttccgccagatttttcaggccaagcgccagagaatcacctcaggagctcagcatcaaggtcaatgaaatcatgtacgaaaacacaacttggaattattatgaacaagaaattaaggacttcagcagcgagggaccaaagcgtgtcttgagaattaagatgtgaacacacctaaaaaaatgatgatgttcaactatgaggagacgtgagatgctgagattggttttttttcctcgaagctcatgtccattgtccataagcaggttaattttaaggcatgaatatagactgcggataattggttaagtgggttacacattatagctgtgacataagattgcgatccacgaaattgatgtatgcagatatagatgaaatattagtcaatggacaaagagatagaggattg

SEQ ID NO: 27165 - DNA, 830 bp, Glycine max
  unsure (1)..(830): unsure at all n locations
  Clone ID: TF_LIB5119-021-A1-PF1-F7
gatactaatatttcctccctcaacgccaaccaaaaccttctcagttaagaataactctctctccctctctctgaaatggccgaggagtctcaagggattaagctgtttggtgcaatgattacattgaaccgtggggaagtaaacaaaggagaaaagggaagcgaatatgagagggtggagaagagagcagagaagataataccctgtccgagatgcaagagcatggaaactaagttctgttacttcaataactacaacgttaatcagccaaggcatttctgcaagagctgccagaggtactggacggctggtggggccctccgaaacgtcgcggtgggcgccggtcgccggaaggttaagtcaccgtgccatggagccggtgtctatgaaagtacttctgaagatgaaaacaagtttgagatgggtcagggacacgttgccatgcccaacactggtttccggcagatttttcaggccaagcggcagaggatcacctcagctcagcatcaaggtcaataaaatcatctacgaaaacacaacttggaattatcatgaaacaagaagaaaagacctgagcaacgacggaccaaagcgtgccttgagaaattatgatgtgaacacctaaaaaaatgccgcggctaatcaatatcgatgatgttcgactatgagaagacgtgagatatatatgccgagattagttttttcctggaaactcaagtccattggtcataagcagggttattttaaggcatgataattggnntagtgggttacacattagctgtgacatgattgcgatccacgaaaatgatgtatatatatatgcagat

SEQ ID NO: 27166 - DNA, 592 bp, Glycine max
  Clone ID: TF_GmC52517_1
ccacgcgtccgcccacgcgtccgtacggctgcgagaagacgacagaaggggacactcaagcccctcactccaaaacaaaacctaaacattttactcttttcggttttttttttttgtttcacacatgccgtcgtcgaattccggcgagagtcgccgagcgagcaagccgcagagctcgggcggagcggcgccgccgccgccggagcaggaaaacccgccgtgcccgcgatgcgactccaccaacaccaagttctgctactacaacaactacaactactcccagccacgccacttctgcaagtcctgccgccgctactggacccacggcggcactctccgcgacattcccgtcggcggcggcagccgcaagaacgccaagcgctcccgcacccaccacgtcgccgccacatcatcctcctccacctcgtgcaccatgacgtcagcacaggaacaccacgcacacactttattggcccccgtcgcctccacgcactacggagtacttgacggcgacgttaaacagactagcaacggcaacggtaacgtgtgcgggagcttcacttcgttgctgaacaacacccatggctccggg

SEQ ID NO: 27167 - DNA, 1950 bp, Glycine max
  Clone ID: TF_GmC108_2
ctccttttatcctttagattgatttctcttctcacatctcgatcaaacggataaaattttccaaattgccaccttttttctcatcttattgcatagaaaaagaaactattgttttctggttacaagtgctttcaaggggtgtcttttaagatatgggtttgagttctaagcaggtttctaatagaggacttgattggaaccaaaccttgttgcaggctcaaaacttggaactcccaaatcctcctcctatgaggaaacaacaacaaactcagccatcagagcctttgaagtgtccaagatgtgattctattaacaccaaattttgttactacaacaactacaacaagtctcaacctcgacattactgcagagcttgcaagaggcattggactaaaggtggaactctacgcaatgttcctgttggtggtggaaggaagaataagcgagtcaagaaatcaaccactccagcgatagccaccacttctattagtaccagcacctcaaatgccaacatggatggtgagttgaataaccccatcaccattccttctctagcagtggatgatcacaaaaccacaccttcctctctctatcaatatgtgtgcctgccccaacagatgatgatgagtaccaaagactcagaagaaggcaaagactttggtattggtaatggcatctttctgagttcaactgtgccttttcctcaaagccaaagccttctgttccccttcacaacatcaaactcctttgacccaaacctatgtgcaatatcatcctcttttcgatcctccagtgtgtataactatggtgaagagtttaaaataatggaggagccaaccctcaacagcataatgcccaacactagtggaagcaccaacacacaaccatgggagatagctgcaacaagttctggcatggaaatgtcaaattattggacttgggaggacattgattcgtttgtgtcaactgatccaaatgttccttgggatgattctgatatcaaaccctgacaaaagaaaagaagaaaaaaatgaaaatagtaacccatgtccttagattagttattaattaattgtggcgttttgtgtttcacacggattagtaagtgttcttgttttcagatggatcatatttcgatattatgccacactttgatggtttgaggagatatctgcaaatcacaaagccatgagaggaagtggcagatggatcatatcatattatccattgatctttctgcacttgtaagtcttgcaaagagaagtatttggagctgtcttattttagtttcagcttcagattcaagcaagggggtccaaatccaattaactgtaacccaatgagttttcctgttcatctctctatcataatttcctgtaataaaatgttacattaatgttgtatccaagtagtttagcattattcacaagtatagggaatttttttttgtttgttttgtagtatttctttaatggtttctgagtgccttgtgatggggattactattgagacatggggtctgctccagcacagctgaactgacagaatgtgatggaagattcttgtggatatgtatatatatgcatgtgttggaaattggaatgatatagcatggatttgattggccaagattcatccccaccacttgttgagaatcattctttgcttttgggccataaggaattctggttccagagtagtttattgatgttatgatattctgttactattatattcctcaaggatcgtttatctttgggcttatacttcacatggtgctttaatatttgttcctgtttaatacaacagtgtgtgtatctttggccccccgtattttcagtgtttgtttatgcttgtcgtttcttctatgattgcatggccatggaccaacagtagaaccctttattgtatgaatttttgccaatcatagaagatatcctcagggttttg

SEQ ID NO: 27168 - DNA, 457 bp, Glycine max
  Clone ID: TF_LIB3242-248-Q1-J1-F9
attctcaaaccctaaaataaattcagcaaatcacaaaagagaactatttattcctattccttgtatgcaatcttgctgaatataccagaattgttttcattattactactcaacaatttctttctttctttctttcttttggttttgcagcaacaaaatcaacaccaagcaaatggaagtaacagtcctcatgagctgcttccgccgctgcctcagccgccacaggcccctcacgtgggggttgaatccgagcaaatccggtccggtctgatggcggatcgggccaagattccggcaccggaaggagttctgaagtgtcctcggtgtgaatccaccaacacaaagttttgctacttcaacaattacagcctctctcagccaaggcacttctgcaagacatgtaggcgttattggacaagaggtggtgctctcaggaacgttcctgttggtggaggat

SEQ ID NO: 27169 - DNA, 498 bp, Glycine max
  unsure (1)..(498): unsure at all n locations
  Clone ID: TF_GmC52517_2
cnctgttttctctctctctctctcgcactctgttctcccataaaacccccccctcacccacccaacattcacactcaagcccctcactccaaaacaaaacctaaacattttactcttttcggttttttttttttgtttcacacatgccgtcgtcgaattccggcgagagtcgccgagcgagcaagccgcagagctcgggcggagcggcgccgccgccgccggagcaggaaaacctgccgtgcccgcgatgcgactccaccaacaccaagttctgctactacaacaactacaactactcccagccacgccacttctgcaagtcttgccgccgctactggacccacggcggcactctccgcgacattcccgtcggcggcggcagccgcaagaacgccaagcgctcccgcacccaccacgtcgccgacacatcatcctcctccacctcgtccaccatgacgtcagcacaggaacaccacgcacacactttattggcccccg

SEQ ID NO: 27170 - DNA, 594 bp, Glycine max
  unsure (1)..(594): unsure at all n locations
  Clone ID: TF_GmC154178_1
tacggctgcgagaagacgacagaagggggtatagagacacatctttctttattccattggatctgaaaaagaccagttacccaacctcatacatcattttattagttcccaatcaccctctttgatgaggatcacaggtgcccatcaaagacacacaggaccctcccttcctttccttccttctatttcttttcctcatgcatgaaatcattcaattggtgagtatctttgcctctgcaaaaggaaactggaaactgaagaaactagctaactttcccgccccacaaggccaaaaaacttaactttctttcacctctctcaccactttttcctctctcaaaagatgtcacccgatgacacaccacctccaaagcctgccacagcaaaagaccaagagactcaaagttccggtggtggcagaaaaagctcctccacaaggccccaagagcaaggtctcaagtgtccacgatgtgactcacctaacaccaaattctgctactacaacaactacagcctcacacagccaaggcatttctgcaagacatgtagaagatactggacaaaaggtggggctntgcgcaacgtccctattgg

SEQ ID NO: 27171 - DNA, 1907 bp, Glycine max
  unsure (1)..(1907): unsure at all n locations
  Clone ID: TF_GmC196_1
cgtcaaaaacccaacacaagtaacgaagaagtcactgccatctcgcaagtttcgatccccagaaggaaaataaaaatgcacgaaattagagaccctgcaattcggctcttcggtcagaagatccctttccctgaagatgttgacaaagaagaagagagtgctgaggatagagaacaagagatggaagaacatgaagacgaaggagacaaggatactagagttgaaaatgttactaaggaagagctagaagctgatcctcctctagatgctgaagagactaagatttcaggcacatcccctgaggctattgtgaaccccaaaacaccttccatagaagaagaaacagcaaaatcaaaaggtggcaaatcagagaaggaacaaggcgatgcagccaactcacaagagaaaaccctgaagaagcctgataaagtgctaccatgcccccgctgcaaaagcatggacactaaattctgttactacaacaactacaatgtcaaccagccgcgttatttctgcaaagacggctgcgagaagacgacagaagggggcaccatgaggaatgttcctgtgggggcaggacggcgaaagaacaagaactctacctcgcattatcgccacatcactatctccgaggcccttcaagcagcaagaattgatgctcaaaatggaactcatcttccaactttgaaaggcaatggtagagtcctcagctttggattagatgcacatgcacctatttgtgattccatggcatctctcatgaatcttggagagaaaaaggctcttaatggcacaagaaatgggtttcatcatggctttgaggatcaaagactccccgttccttgcaaaagtggggaaaatggtgatgactcttcaactacatcctccattacaatttcaagtcccaagggagaaaataacaaaagcaccttccaacaacaaccattgccccaaaatcatggtttccttcctcaagttccatgcattcctggtgttccttggccctatacatggaattctccagttcctccacctgctttgtgtccttcaggatttcccctaccattctatcctgctacattttggaattgtggcatgcctgggaattggaatgttccatggttttcctcaagttcacctgcttcaaacctcaagtctccaagctccagtcccaattctccaactttggggaagcactcgcgggacagtgacatgattaagcaagactctttgcacaaagaagaagcttcaacgccaagaaacgggagtgttttggtcccaaaaacgttgagaattgatgatccaagtgaggctgcaaagagttctatatgggcaactctaggaattaagaatgagtcagtgagtgggggagctatgtttaaggccttccaatcgaagaagggtgaaaagaatcatgttgaagcctctccaatgttgatggctaaccctgcagctttatctagatccctcaattttcatgaaaactcctgaattagtggcactggtgaaaagtccttacagcaaagttagtcacttcttgagttatttgtctagctagcaagagacggtgaccatctttgagtgacattgaccttgtatagaagaagcgaaagggtggtagtctctgatttcctcggcacaagtgagacgacgaggactaattctgtctttaatttcattcgacaatattaaaatagagtatataggttttttttcatgtgcttagtttgatgagtgagttcatgtatatgtacatatataaaaatatgtgaaatactgatctttagcctagagagacggaaaagatcttttactttcttgtagtataaaataaaaatcctgactgtagaaaagtaaataattttctttngagnataaaatangaaatnnnnnnnnnnnnnnnnnag

SEQ ID NO: 27172 - DNA, 453 bp, Glycine max
  Clone ID: TF_GmC128906_1
cctgcatgctcctccaagccaccaccaaccgctacctatagtttctagtatatatacacaaaacaacacaccccacaaacatcacagacacagacacacaaaagtcaaaagggtcgcgatggagcaaggagtcgaagaaggaggtggcatgaataagatacctcgggattcaagagtgaaggagataagacaaggtgatgcacaaattcaggttcaggctcctcagcaaccccaaaagtgtcctcgatgcgactctctcaacaccaaattttgctattacaacaactatagcctctcacagcctcgttacttttgcaaaacatgcaggaggtactggactcaaggtggaaccttgaggaacgttcctgttggtggcggttgccgcaaggggaagcgcgccaagagttctaactcatcttcttcggagaatatgaattcttcttccagatcact

SEQ ID NO: 27173 - DNA, 820 bp, Glycine max
  unsure (1)..(820): unsure at all n locations
  Clone ID: TF_GmC261506_1
gtccggnaatctcccgggtacgacccacgcgtccgcaaaacccaaacctcaataaaaccgaaactcacaaacacttaaacagaggaagtaacgaaccaaccaacctgacacagccgccacaaccataaacattagcataaacaaaaaaccgttaatctcgcgcgttcttttttgttgttgtgtcgtgtcccttttggatctccagaaaatgcaggagaataaggatccagcaattaagctcttcggccagaagattgccttcgccggagaagtcgaccctccggccatttccgccggcgaaattgactcgccgccggcgatggatgtcgacaaggacgaagaagacgactttggtgactcagagactgaagatgagaaagacaaggatccccgagctgaaaaagttagtgagaaaacgaaagaagctgatcctcctccaaatgctgcagactcaaagaagaccccagagggtattcagaacccaaacacaccttccatagacgaagaatctgcaaagtcaaaaaccaacaagtcagagaacaacaacaacaacaaaacactgaagaagccggacaaaattttgccatgtccgcgctgcaacagcatggacacaaagttctgctactacaacaactacaacgtcaaccaaccacgctatttctgcaaggcgtgccaaaggtactggactgctggcggcaccatgcggaacgtgccggtgggagcggggcgaagaaagaacaagaactcagcctcgcactaccgccacatcacaatctctgaagctcttcaagcggccagaattgatgcccccaacggaact

SEQ ID NO: 27174 - DNA, 1224 bp, Glycine max
  unsure (1)..(1224): unsure at all n locations
  Clone ID: TF_GmC433_2
aataaggatttttttttttcggttttaaattttcttctttttaatggaagntagtaaatctaaccaacccaccccaagaaaaagaaaaagtagcagaaaaaaagaaaccaaaacctaagcttgaaggaccaaaagatgcaccttaattaaacgagggagagagtactttcttcttcatatatagctttttgaaaaagatgcttcatctttttttctagatcagagaagtgactgaaggaccaatgttaggttgatcactccaagcacccaaacccgttgcagtgttccaataaagcgaattaggatcagacaaacccacatgctccatctggttttgaccaccaccaccattgttgttgttgttgttattattattgctccactcaaacctgttttgtccttcacctttcacttcttttgagccaatattattattactatccccttccactcgcaacccttgtagcggtgccaagccatggaaagtattgtcaccttgatcatgatcacgacccttcaccccaccaccaccaccacccattaaattttgttgcagaagagttgaactcagcaaggaagccataacaggagttgaaggtgcacaagttgaggaagaagaagaaccaaacatagagttataagcagaaaaaaagctgttgttatttgaagtactaaacccattctcactaaccccagttgaaaaacctaacccaagagcattcaattgagaatgaagattaaaccttgggaaaggaacactactcatcacatcaccaccataaaagaaagggctgatattatttatatggttcgtggtggagctagaggcaataatattatcgaggtggggctgtgaaggagggtttgaattggacgaagaaggagagttagcagcagaagaagaagaatcaccgtgatttgttggacgcttcacacgcttgttttttctgcagccaccaccaacgggaacgtttctgagagtgccacctcttgtccagtaacgcttgcaggctttgcaaaagtgcctaggctgtgacaagctgtagttgttgtagtagcagaacttggtgtttgaagactcgcagcgagggcactttagggcttgttgttgctgctgaagaagatcttggcttggtttttccatgactcttcccatcattggggccttgtgatcatctatctgagataataaacaagagaaagaagaagataactgatgagcta

SEQ ID NO: 27175 - DNA, 2013 bp, Glycine max
  Clone ID: TF_GmC1650_1
gttcgcgtccggcagctgcagacaaacgcggtgagttctctttacatatccatctttgttgcttttgactgtcttttcttctccgaaatattcatgcatggctactaccgctcactgggcaaacatggtgttcaatttttttctcttgtcttttctgtggtgcacaaattccaagcttttcatactgaggtttggtttggtttagttagaccctaacacaaataaaaacttccacaaggtattagatttaattgtatcttcttttaaattttctagttatatctagcacatataagatatacgtggcaaacttattaaaggtctcgatccaccggatattggcctcctatctttcccttttgtaccaaaaatattaataaccataatcccaaacactcaaagcactgccacaactttaacctacactctttaacaaccttcttggccgtttgatgattattatcatatatataacaggaaaaagaaaaggattaattattgatttgttattattgttgattcttaaagtttactcattcctcttgttttgactgtcttgtaaattacctccttaatctgttcgcgtaatgaagttaattattaccaagtcatatgcaataggtcttgaaattttaatttttatctgtgtggattcttatcacgctaaagagcagcttacgaaaataaagcctcttttggggttggattagctggtgagatccatggaagatataggtccgaattcatgcacaaggccagtgacagagaagaaagcaagaccccaagaacaattgaattgtccaaggtgcagttcaaccaacacaaagttctgttattacaacaactacagcctcacacagccaagatacttctgcaagacttgtagaaggtattggacagaaggagggtctctgagaaacgttcccgttggaggtggctctaggaaaaacaagagggtcacctcatcaaaggttcctgacttgaatccaccaattagcctctcatcagtctcagccatttcttcccaaaaccctaaaatgcaaggagtccatgaccttaatctggcttttcctgcagctatggacaagtatcatcatggcacgtctccgtatgttgagatgccaaaacttgaaattggtggtgatcacagtactagtcatcatagtcaccaccatagccatagcccttcttctgcagttgagctactacggtctggcatggattctaggggtttgaatccttatgctcctaattccttgatgtcaggctcagatcattccctttatacacctggctatcccatgcaggaaattaaaccaaaccttagcttttcagttgatgatggatttggaaatagatcatatggggttcaagagaatggtggagggaggcttttgttcccttttggagacatcaagcacctttctgcaggtcttgaagtggaacacaataaagaacaaggaaataattcaactggatattggactggttggtgaagggtcttcatggtaaggaaagaaaagaaatattgggagaacataaatatcaacctgcattgttttctttctcttcactgtttctatctatccgcttgaagttgttcagatcactaacaataggatacacatggttactctattttgtatacattattattattattacatttctattcgagcaatgtgaggattttacagctcatcttggttatttttaatatgtttagagagagagagatagaagaagaggtgaatatagggtctgcttttgtccaagtcatgcaatgcaatgacctgtattcatgaattcttctgtcaaggagtagatacatatctatcgatcacctttattgatgtatgcatgctttcaaagatttggtacaaaatgacttttgatgattaaggaaagagtcagatattcaagtttgtaaccataattatacatgtattggattggtttgtgtgttctttcctattacaaaaatttctatctatgtcgatctatgcaaaaccc

SEQ ID NO: 27176 - DNA, 1231 bp, Glycine max
  unsure (1)..(1231): unsure at all n locations
  Clone ID: TF_GmC2047_1
agcncggagggggctcgagggatgcaagacccaacagcattccaaggagtgaagccaccccagtttcctgaacaagaacaactcaagtgtccacgttgtgactccaacaacaccaaattctgctactataacaactacaacctctcgcagccacgccacttttgcaagaactgcagaaggtactggactaaaggtggcgctttgagaaacatccctgttgggggtggaagcagaaagaccacaaaacgttcttcatcaaccttatcaaaacgctcttctgcaccatcttcttcctctgcagtttcggatcctgacccgacccggatttgcaccaacccggttgatcaagaccaaagggtgctcaacattggtggtggcagtttcagttcccttctagcttcatctgggcacttcggaaccctcttggagggtctgaatccatctgggtcgggtctcaaaatgggtgaatttgtggagggcgtgagttctgacccgggtctgaatctggattcgggtctaaacccggatttgcaggttcagagcaatgagaattcagagagttttctaggtttgcagaatggtgattcaagctgttggaatggtactcatggttggtctgatcttgcaatatacacacctggcccaagttttcaatagaagcttagtgataaaagtttgagactttttggcttaatccagcttctcgattatggtgattggtcttatatatataatatatacttaaatactattgttgtgttttttcctggttatagaaaagtttagtggagtttgatcttgggaaattcataacaggtttcaccgttcaaaaagcacttaatgtacaggatattcaaattcacattcttgtgaaatatgaattctatcttgtcaactggatcaatcttcgttcatatttactatatgattatgtaaagagttatataatttgatcaagcctatggagagcatgctatggaggatcatacatacaccagaatgtcactgaagcagcatcctttaggtaaagatttttttttctttcaatagtttatatgctcgtgattggtgtttttcaaacttaccacttgtgaaaatttggggaaaaaaaaggcattttttttgtgaggatggctcggaggatgtgagatgttattatcatatgtaatttggtatgtgtttttgcatagcttttgaagtgtcctcggatatatggaagtttacattgaca

SEQ ID NO: 27177 - DNA, 390 bp, Glycine max
  Clone ID: TF_uC-gmrominsoy244h03b1
attttctttagtgcgattctacctccaccttctgggtggagtcttataaaactttgggagggataaaaaaaaagaagaaaaaaacaaaaacaaacacaaaaggattgaagcaccatggttttctcttctattccagtctattcagatcctcccaattggcagcagcaacaacaaaatcaacaccaagcaaatggaattaacagtcctcagctgctttcgccgctacctcagccgccacaggctcctcacgtgggggttgaagccggccaaacccggtccggtcctatggcggatcgggccaagattcctgcccaggaaggagttctgaagtgtcctctgtgtgaatccaccaacacaaagttttgctacttcaacaattacagcctctct

SEQ ID NO: 27178 - DNA, 226 bp, Glycine max
  Clone ID: TF_15814345
tctgcaatccctagagcggcctctctgccagtcttacaacaccgagttctgctactacatctactacatcttgtcacagcctaagcacttttgccaagcctgctttcgttactggactgcaggcggcactctctcacacgttcccggtggtggcgcctgcaaaacgaacaagcgtgcgaatcgccctcctcttcacggagattcttcttcttctgctgctatgctc

SEQ ID NO: 27179 - DNA, 1605 bp, Glycine max
  Clone ID: TF_GmC384_2
ggctccaggtttacacactgacacactccttcatccaactccaacagaacaagaaaacatagtacacaccacacagtgaaaaagagagaaactccatcttctttctttctttctcactcaccacagaacacaaaaaaacatttccaaatttcaggtttgggaaatgcacgaaacacattccatcggcggcggcaggttctacggcggcggcgaccggaggctgaggccgcaccaccagcagcagcagccgccgccgctaaagtgcccacgttgtgactcactcaacaccaagttctgttactacaacaactacaacctttcccagccgcgccatttctgcaagaactgccgccgctactggaccaagggtggcgtcctccgcaacgtccccgtcggtggcggttgccggaaatctaaacgctccaacaaacccaaaacaaccaccaccaccaccaccagcaacactaataacaaccgttcttctttctcggcaaccgcaccggccaccgcaccaacgccaccggcaccagagctggagcatcattctcattctcactccagcagtgaaagctccactttaaccgtgaccgcgacggaggagatgtcggcgccgccgccgacgacatcaaacgctccgtcgaagaacagtttattacttgacaacgaccaccgtgaggcgaagatgttcgctaaccctaaccctaacccctctttggatagtggtggcattttctctgagataggaaacttcaccagcctcatcaatttaaacaacaacgaagcgtttgggtttgggaacaataaaaataacaacagcatcctcgatgcgacgtcgtttcgtttcggtattagtgttactaatcaggtgcaggcggcagcaggtggaggccatggtcagtggcagcagcagaatcatcaggagttcggtacggcgtcgtttctcgatcacactgtgccgcttgagttttcttcgctgcagcataagactgggcatcagggagggtttggatcgttggattggcaacccggtgcggatcaaggtttgtttgatcttcctaacaccgttgatcagccttactggacccacgctcattggtctgatcaagataatacttcttctctctttcatcttccttgaaaatacttaagaaatttctctcttttttctttttgttttttatgacctgagagggaaagagtaaagaatatctggaatctaaaccaaagtataaagaaataaaaataaaaattgaaagagaacctggaaggaactcgtaattaagatatgtaaatttttggttttttacttttctgttttttcggagaggtgattgggcttgatcataagtagtgatgttcatgtgcaactaacatccatgttagtttttttttcttttttatgttttattttatgtatgtatttggaatttgatttattagggggggaaacataggagcggtgttttatattaatatatagtggggattggtgctataacaattgtttgttgttttgttgggtgtttgggattgtaatcttattttggcgtgtttgagatgctatttcatccgcactattaatggctaagaatttgaaaatgacgc

SEQ ID NO: 27180 - DNA, 904 bp, Glycine max
  Clone ID: TF_GmC503638_1
catgatcgagaaatggtggaaggctaataatgttgagatttcaccaaattgtcctaggtgtggttctaccaataccaagttctgctactacaataactacagttcaactcaaccacggtacttttgcaagggctgcagaagatactggaccaaaggaggatccctccgcaacgtgccggttggtggtggctgccgcaaaagtagaagcgctaagtataataagaccttcagacaagccaataactcagttggctattctgatgatttaatggcctcacctaattcagtggtgtcagatgctccaagtattgatctagcacaagtttatgcgagttttctcaaccagaagccagatcaagccgtccaaacagttcgctatcctaacgaaccagattattattcatgcctattgaacactactgattttggccatagtgctctctctgaagaagaacttggtctcactgattgtttgcattttcatgaacaatccacagaatcacatttcggtgagagtttccaaatgtatcttttcgggttcaactctatccataatcatcaagaatattacagtagcagttatgataccacaaataatacaaattttgagttgccacagttgcctggtgaagagacagaaatctcacacggtgatatgttgtggtccaaatccaattctgagatgatgctcgatcatgctttgcaagcctcccaaccgcccctttttggacctcaatctcatgatgcagacttcattatgggaaattgttggagccacttcgatttgccaagggatgcttctttttccacgctttgataatatgtatgattcttcaatactattgcctcaatttgttttgcttcttatatgtaatttatagtttatgtataggttcggtcaaat

SEQ ID NO: 27181 - DNA, 1584 bp, Glycine max
  Clone ID: TF_GmC684_1
attctcaaaccctaaaataaattcagcaaatcacaaaagagaactatttattcctattccttgtatgcaatcttcctgaatataccagaattgttttcattattactactcaacaatttctttctttctttctttcttttggttttgcagcaacaaaatcaacaccggctcgagatacaaggaataggaataaatagttctcttttgtgcaatcttcctgaatataccagaattgttgtgattattactactcaacaatttctttctttctttctttcttttggttttgcagcaacaaaatcaacaccaagcaaatggaagtaacagtcctcatgagctgcttccgccgctgcctcagccgccacaggcccctcacgtgggggttgaatccgagcaaatccggtccggtctgatggcggatcgggccaagattccggcaccggaaggagttctgaagtgtcctcggtgtgaatccaccaacacaaagttttgctacttcaacaattacagcctctctcagccaaggcacttctgcaagacatgtaggcgttattggacaagaggtggtgctctcaggaacgttcctgttggtggaggatgccgtaggaacaaaaagaacaaaaggtctcgctccaaatctccggtttctactgagaaaccatcacttcccaataatacaagtgcaatccctgagcttattggtcgtttcccacaacctttcatggcctctcttcagagtatgaaccgctatggtgtagggattaacacaggtgttaacttgcgtgagattcaagcacagaacgcttctcaaatggagtttcaaattggaggtcttggcaatggttcaagcgttgctactgcaggaggaggaggaggaggaggagtggagcagtggcggtttcagcagtttcctttcttgaatggttttgagtcaacttcagctgcttctaattcctacccttttcaaagtgaaattgttgaaggtttggttggagatattaatgccacaagttctaggattactcagctgccagcacgggttaaaatggaatataacggtggcttgaatttgtcaagatctcctttgaatgtctcagaaaatagtaaccatttctattcatggacggatttatctggtcttgcatcttcttcagcgagtcatctcttgtaactttgacctctcatatgggttagtagccacaaaaatttaagggttttggtgctgttattttttgatcaataattgaatgagtttccattttatgaagctctctctctccctttctcttggcatgtttaaactcatttatttatcgatccaaaaaatatttgtaccaataaactcttagatttatatatccgggttagaatgacagctctccaatgtcgttccaccgtcttcacgcgtcagtgttgttaacagaaatccaatcaggctggtagaatttaatcttcaattgtatatttttcttatcattggtttgtttatgtttctccatcgagtcaagtttcttttgtgttctttttggctttctttgaacaacagtgtgtgcatgtatatgttttgtttgtttatgcgatatc

SEQ ID NO: 27182 - DNA, 1770 bp, Glycine max
  Clone ID: TF_GmC384_1
gccgccatgtcccccccgccgcccactgccgcacccccccaccaccgcccaaacacacctaggccacccaattcggctcgagctcttctctttcacgctattccccgaaaccttgtttccacactgacacacactccttcacccaacaccaacagaacaataaaacatagtacactacacagtgaaaaagagagagaactctctcttctttctttctttctttctttctcagtcacataacacaaaaaacattactaaacttcaggtttccgtttgtggccggaaatgcttgaaatacactccatcggcggcggaaggttcttcggcggcggcggcgaccggaggctgaggccgcaccaccagaaccaccaccagcagccgccgataaaatgcccccgctgcgactcactcaacaccaagttctgctactacaacaactacaacctctcccagccgcgccatttctgcaagaactgccgtcgctactggaccaaaggcggcgtcctccgcaacgtccccgttggcggcggttgccggaaatcaaaacgctccaacaagcccaaaaccaccacctcagccgccgccaccaccagcagcaacaataacaataacaacccttcctcttcctcggaaaccgctgcggcaaccgcaccaacgccaccacaacaaccgcctccgccacttgagctagagcataattctcactctcactccagcagcgaaagctccacttataccgtcgctgccacggaggccatgtcagcgccgacaacgaatgcggtgtcgaacaacaatttattacttgacaacaaccgtgagtcgaagatgttcgctaaccctaacccctatttagagcagagtcgtagtggtggccttttctctgacatagagagcttcagcagcctcgtcaatttaaacaaccaagcattggggtttgggtttgggaacaataatagcaacatcagcatcctcgatgcgacgtcgtttcggtttggtgttagtgttactaatccgcacgggaatgatcaggtgcttgcggcaccaggtggaggccatggtcagtggcaacaacaacagcagaatcatcatgagttcggtacggcgtcgtttcttgatcacaccgtgccgcttgagttttcttcgctgcagcataaagctgggcatcagggagggtttggaccgttggattggcaacccggtggggatcaaggtttgtttgatcttcctaacactgttgatcaaccttactggacacaccacactcattggtctgatcaagataatccttcttctctctttcatcttccctgaaagtactcaagaaatttctctttttttttgttttttatgacctgagaggaaaagcgtaaaagaatatttgtttggagtctaaagcaacgtagaaaaacaaattggaagagaacctggaaggaacttctaattaaaatatgtaaatttctggtttttttacttttctttttttggggaggtgattgggcttgatcataagtagtgatgttctaatgttcatgtgaaactaacatccatgttagtttttttttgcttatgttttattttatgtacttattatttggaatttatttactaggggggaaaacataggagcgttttactttttaatatatactggggattggtgctgtaacaattgttgtttggttgcgtgtttgggattgtaatcttattctggcgtgtttgagatgctattttcatccgcactattgatggctatgaatttgaaaatgactc

SEQ ID NO: 27183 - DNA, 1523 bp, Glycine max
  Clone ID: TF_GmC245668_1
agacgttaaaagttcacaaaatttatataaatggagagcaacactcttattgcattgtctactagtatttgatgcaccatggatgccatggaactatgctcactaaaccgttgcaatgaaattttccatcatcttctcattgaacagacttttttgtaactaggatccgcctctacaatcatagaccacttcatttcgcagctgctactacaacaactgcaacctcttccggaccaaactacttctgcaagagaagccagtgatgatggaccaatggcattgtcctccgtaatgtccctaaaggcaacaattaccactgaactccaattctaatggcatgaggatgtccacgttgttgattcaatcaaaccttggtttataggcgggtgcactggaacaaggagcaagggatcactatggtgatcatcatcaccatgaagaatcaaaggatatttgggaggccttaagcagctcatccatcaactaattgaaacagtccatgtttctttgtccccaagaatcattaccactgagggtcaagatatgttttgacaattatttttgttctgaccatggacattgcattttgaatacatcaatgaagtgttggtcctctctagtttgtttgactttgttggtatcatttctctttttgtcctccaaatggtgccatagaaagactaatagttattagctatatttcttctcatttaatgagcattaccatttcaccatacttctccattaatggcagaaaatcatttgacaggacaactaaatgcttctctagtaggcattttattagaccatcatgcattgcacattaggtattttaaattgctgtgatgtaattagtattgagctaataagccaatttggtgaaaatcaggaaacaattgtgtattttccttacaaactaaggcagtcaagtctggataaactacttcatcaatcaactctgtcaccagtaatctctgcaagaacaaaatccatctttgaacgagtggaagcggcttctatctctcacaatgacttctactttataaacttaagaaatcagcttcatcacagtatggcagtccccacaaaccctcaggttcttcacaattcttaaaatccttcccttgggaagttttgctattccaaaagcagcagcaagcttctcactgtgcttagaaactgaatcttctttttcttcctcttcaatatcatgcaggacactccttagctgtggtgcataacctgcttctgttctgagtctcaacattatttccctcagtttttcatgagcctcctccgtaacctcattaggcttttcaccagcaacaaaaccataaatgaccttgtcaatttcaatcatgctccaaccaggagtttttttcatgctatgttcagtcatcgttcttcttatgctggaaacatccttccatttccctgcaacggcataaacatttgagagcagtacatgatcaccggagctgtctggatccagttcgatggcaagccttgctttcacaagctct

SEQ ID NO: 27184 - DNA, 335 bp, Glycine max
  unsure (1)..(335): unsure at all n locations
  Clone ID: TF_jC-gmXLIB3563P006Da01d1
tagctcatcaggtatcttcttctttctcttgttcattatctcaaatagatgatcacaaggccccaatgatgggaagagtcatggaagaaccaagccaagatcttcttcagcagtaacaacaagccctatagcgccctcgctgcgagacttcaaacaccaagttctgctgctgcaacaactacagctgtgcacagcctaggcacttttgcagagcctgcacgcgatactgaacaagaggtggccctctcagaaacattcccgatggtggcggctgcagaaaaaacacgcgtgtgaagcgaacaacanatcacggtgattcttctgcttcctgctgc

SEQ ID NO: 27185 - DNA, 1476 bp, Glycine max
  Clone ID: TF_GmC593_1
aattcggctcgagcaagcccccatcaagatttcatcatcctcttcttccatgaaacaattcaattgctctaagaaaccaaaactgatttaaccttaatttcccaacctacacagttcactccctctctctctgtctttctttctttctctatgttctctcaatggtgccgccaccagagaacatggcaacaccaaaagaccaagatgccacacaaggccgaaaaatcaccaccacaacaacaaggccagcgccggaacaaggcgtaaagtgcccgcgatgcgactcatccaacacaaagttctgctactacaacaactacagcctcacccagcccaggcacttctgcaagacctgcagaaggtactggaccaacggcggagccttgcgcagcgtcccgataggcggcggctgcaggaagaacaaaagggccgtcgtcaagccctcttcctcttcgtcatcttcatcaccaagactttcaacctcggcgcgttgcccttcccctcgaggctcaacacaaaccaccacattccaacaatcataaacacagggttgttcaacaacaaccagttgtcgcctttcctggacgttaaatcagctttgtttcaacttgacgctcctccagctgctctgtcaaactccttgatgggcattgccccgcccagcgcccagaacaacaacttctgggcgctgggtcggtctcaaagctcgacactgtctgatccattaaacagtacaatgcagtccatgcagcaatctctgaatgttcatagcagccttgcttcttcaattgagtcactgagctgcgtcaaccgggacttgcacctgaagatgcagcagcagcgttacgcgacaatgatgtccggtggggacacccaccacaagggtgatgaaaacagtggcgtttcgtttcctcaaacggttaatgggttcgagaatcaaaaactggtgatgaaccccgttatgtttcagaagccagtagagagcttgccagccggcagtgccgtaacagaaggcccaagtggggcttcagttacaacagtggcaccacccaccgaatggttctttgggaattcttcttttccctcaacaggtaatggtggtggcaatggcaacaacaacattaacattaatattaatgatgcaaacaacaattggagtgatgcccttgcttgggggaattttcagcagcagcaacaacaatacagtgctttgccctagatttgactaaaaaaggagaattaagagagaggaattagatatcgaggtagagatagctagtttttcttaatcttggaaggaaaaaaatggaagaaattataattattaactaggacaaatctataattgtctaaaccccttttaattaggtctatgttaattacttaattagttagtttcttgttttatgttatgttcgaatgttcaaatgttcaaattgtgatatatatatatatatagaaaggatatttaaagat

SEQ ID NO: 27186 - DNA, 946 bp, Glycine max
  Clone ID: TF_GmC166330_1
ctcactttcacatcatcccattattcctcttccttgtaagcacttcctagctcactatctatccttaattcttaatgatcttgtgcaatgcttttcatgacaaactgcaagtagttgcagtggcactttagtttgacaagatcacatatatatacactgcttgtggttcactgttgttatcacaatcaccagtgaatgggtttatcttctttgcacgtctgcatggattcatcagatcattggttgcagggcacaattcacgaggagtctgggatggattcttcttcttcaccctctggggatatgcttacatgctcaaggcccatgatagagaggaggctaagacccccacatgaccaagctcttaagtgccccaggtgtgactcaacccacaccaagttctgctactacaacaactacagtctttctcagccaaggtacttctgcaagacctgcagaaggtactggacaaaaggaggcactcttcggaacattcctgttggtggtggctgcagaaagaacaaaaaggtctctgccaaaaaatccaatgaccaccaattagttaacaacaataatattaaccaaacacggcccccacaccaccaccaccccaaagaccttcaactctcctccttcccagatgtgcaattttctcacctcagcaacttgcttgggaccaatgcaaaccctagtttcatggagggcaaatatggaattggcatgattgagaaccctaggcctattgacttcatgatggagagcaagctggagggcataattgggagcggtagtagttctaggaataattttgatttttttggaaatagtgacatgtctatgggtatgactagtgttgggctgggagatatgaatagtactcaaaatgggttgccaccaaattttcatcatcatggtctttcagcatttggtggcatgtctatgtcta

SEQ ID NO: 27187 - DNA, 1946 bp, Glycine max
  Clone ID: TF_GmC584_1
ctccgatgtgtgtgttgtaactatgtgtgtgaacatcataccctagaacaacgccaccttaaactgggtctcccttactttgtatatttttattaatttttcttaccctgttcatattttcatcatcagttggatgatcacaaggtcttcctgggttccaacggtggaagtagtaacaacaacaataataaggtattggaaaaaccaggtcaagatcagcttgtgcagcagcagcaacaacaacaagaagcccccaagtgccctcgttgtgactcatcaaacaccaagttctgctactacaacaactacagtttgtctcagccacggcacttctgcaaagcctgcaagcgctattggacaagaggtggaactctcagaaacgttcctgttggtggaggctgcagaagaaacaagcgtgtcaagcgtccattaataacgacaaacccttcttctgctgccattgacactgctgcttctaataattcttctaactcttcttctgctccactacaacccccgatcgacactgcttcaacctcaaatcacatcaaccctttgttttatggcttaccaagtagctctagcgatgtgaatcttccattgttctctaggttcggttctagaatctccagctccgggtttgatcttcagctgaataatgcccttggattaggtttttcatccggggttttgtccaatgaagctagtgataataacggttacagaaactggtttggttcaaacaatacgcttctttcaagttatacatccaccactagtactactactccagctatgtcttctcttttgagctcttctttgcttcaacagaagttcatgacagatggtgttgatagcaccaacactttccagcatggcttaggcttaaccccactagagcagttgcaaatggcaagtgatcatagcagtgaggcagggatggtggccttaaaagacgtgaaagtagaattaggacaaaacaacaggttggagtggaataatggtgctgcttgccaaagccagatccagcatgtgggcttgtacgatccttctctttattggaataattcagcggcaacagctttgggtgtttggaacgatcaagctgctaatattggttcatcagtcacttctctgatctagaaaaatacaaatccaatcgaatcaagaagtatggttttcaagtttgtctcccccttctgtctcgttgctgctactttcttctttttctttttgttcttctttcttttgggccaaaatgggtttttggtttacttaattaattacatcaaaatttaatgaaaagagaggaaaagtgatacttgtaagaaaatgggaaagctaaagcctaaaggtgagaggagtttggatcggagtgatcatgtcagctgcatcctgcaaatatatataaatttctcttcagccctgttggttttatgtgtcaaggtcgttgggaaaagaattgcatatattgctctgagaggaacctcggatcctcttctctcatcgtctcacagttgctgcgcagtagtgttctctatggaaatgctttgtgttgaattgaagttctccatagttaagtaagttggtctttcattttgttatgtacatatgcgatgacatttccttttcttttttcttgtcttgtaatgtactactatctgtgattagctaggtgaggtagaggatttactgggtatgatgctgtccttaaagaaaggaactaatattggtttcatttttgttaactttgtgatgatttttgttttggatagggtgagaatgggaatatattgggcatatctggtataatggtatagaagagagggggattatttacttggctttaggtgattaatgatttaatgtatgtcggtggtttggtgcttatatgtgttcaaccttgttctatctattggttctgagaaactaactttggtccatgc

SEQ ID NO: 27188 - DNA, 1502 bp, Glycine max
  unsure (1)..(1502): unsure at all n locations
  Clone ID: TF_GmC67052_1
tttaataataatgtcattatataaaataaatatttggaaagtaaaaaggaaaaaaaaaaaaaaaactgaaacaatttgaaatctttttcatacataaactcaaaaacgggggganaaagggggaaagaaaaaataatccaagaactgttgtgtggagctagtgctaacctcataacaggagaaagagaaatctggattactaacggaggacgaagcactactactaacaccacccacttcatcttctccttctctatcaccttcttgcacaacaagcataaccacttccaccgccaccgccacctcgtcgaattcagagaaccaaaacttgaggtgccctcgttgtgattcatcaaacacaaagttctgttactacaacaactacaacctcactcagcctcgtcacttctgcaaaacatgtcgccggtactggaccaaaggcggcgctctcaggaatgttcccatcggtggtggctgccggaaaagcaaaagctccggcatgtccaactcggttgccaagcaaaccgccacaaagatgaaagcagtggcatcagagcttggaaggtcgtcgtcacaaggactcttggaccaagagcttccgcaaaccccagcaatcctgtggggttctccacaaaattctcaactgatggctttactaagagctaaccaaaaccataaccctaaccctaaccctagtccaatgtcaattgttgtcaagggagaagggaacttaatgggatctcaccacatggtggctgagccattgctcgcaaatgggttgttgaatcctagaactagtctaggctttgatggtgtgggagaagtacttccttcactgggtctatgcggctctttttggaggaacaatcaagatcagactcagcaacaaaacaacggttttgcacttggagaacatcaaagtagtggagttcaagaactttaccacaagctcaggtcatcgtcatcatcaattaattattgtggcagtgataactcaccagtgtttctaagcaacatggcttcttcttcctcttctttgtccaacattttggagtcatcttcagtttctgggagtgaattcgggtgctggaatccaaccctttcctggtctgatcttcccactaccaatggagcatatccttaattaaccaccgcatgcagtaactactttcctcttttttgttcactgttcaaattatcttttcgagttagatatatagaactccttaatctatagtttatagatgttaatctgtatcctagctagagtcttttctcgtgtttgtttgcttcggggtggtggataaggaatatggatgtgtaggtaccattagatttttttttcccaactcagcagcgtctttctatcatttgcttcttttatttctggttgatggtgtgtttatcttagctttctcaaatgatatttcaagaactaccagagagtttagaatgaatggaaaacacagtgtttaattgtcaaaacggacgcgtgggtcgac

SEQ ID NO: 27189 - DNA, 1719 bp, Glycine max
  Clone ID: TF_GmC494_1
gaccacttcttcccatctctcaaagctttacacgcttttaacactctctagaaaagtggtgttcttttttctttctctgaggactcgttgcttttcctttttcccattctcttcttaaatccatggacacggctcagtgggcacagggtattggagtggttaaacaaccgatggaaggttcaaagcctcctcctcctcctcctcctcctatgttggagagaagggcaaggcctcaaaaggatcaagctttgaactgcccaaggtgcaattcaacaaacaccaaattctgctactacaacaactatagcctctctcagccaaggtacttttgcaagacatgtagaaggtattggactgagggtggttctctcagaaatgttcctgtgggtggtggctctagaaagaacaagagatcaaccccgccagcaccaccatcagcaccagcaccaacaaagaagctttctgatctcgcaacaccaaatttccctcaatctgcttctcaggaccctaagatccaccaaggccaagaccttaacctagcatatccaccagctgaggactacagcactgtctccaagttcattgaggttccttacagcactgaattagacaagggtactactggtcttcatcaaaaccctacttcctcatcaacaacaacatctgcatcttctcagttgtctgccatggagcttctcaagactgggattgcagctgcttcctcaaggggtttgaactccttcatgccaatgtataattcaacccatgggtttcccttgcaggactttaagccaccacatggccttaacttcagccttgaggggtttgaaaatggttatgggggtcttcaggggattcaagagggtcccactggtggtgcaaggatcttgtttcctactgtggaggatttgaagcagcaagttccaagcacaaatgagtttgatcagcagaatagaagtcaagagggttcagctcacgggtattggaatggcatgttaggtggaggatcatggtagatattattagtgaagaaaaaagagaacaaggggttgctgttttagcctttatttttattttattttcttaatggggggagtgtggttgtgtttggagtgtgtgatctgaaccactaacaaaaaataggatacattgcttcttctgttttgcttctctttaatccatttcattttttttggtcttcttttcctttccccagtagtcccactttgatttttagcttttggtcccgaagaatgtggctgtattttgaagctacctttcattttaatttttaggtttaatttcaggagcttcgagtccataacctatagtatatcatatatcataatcaagagtaggactgatttttcatttttggctttcccgtgagaaaaactcttattctcttattcttgggggtttgctaagatctccgcccttattcttggggtttgctaggatctcggcttggggtttgctgctaccacagcaaggaaaggattccccatcaataactattgtcaggtatcaagagagtttggtcggtcttgcataatccttgaaatttaatggccttctaagtataatttatttaggttataaaataaggacactttagaagctagtgcaacaaattaactagtttttagtatttatatctgtaaattccaaacttggatttcgggtaatttatatagtcctgggacataaagtgagttg

SEQ ID NO: 27190 - DNA, 633 bp, Glycine max
  Clone ID: TF_GmC494_3
cggctcttctcctttctttttcccatttttttcctttccaccatctgataaaggataaaggacccaaagaaaaaagttaacatatttgtttgtatcataccactgctgttgtaatcccctctcaaagtgtaataaataaaaacacccttctttgtttgcttgttttgtttgtttccttcctaagactatctttttctcagaagcaaaggttttgaatttcagttatggccttttgctgtctttttgtttttattgttttgaaaaaaattggatattttttcagggtattggagtggttaaacaacctactatggaaggaggttcaaagcctcctcctcctcctatgttggagagaagggcaaggcctcaaaaggatcaagctttgaactgcccaaggtgcaattcaaccaacaccaaattctgctactacaacaactatagcctctctcagccaaggtacttttgcaagacatgtagaaggtattggactgagggtggttctctcagaaatgttcctgtgggtggtggctctagaaagaacaaaagatcaacctcatcagcgccaccaccatcatcagcatcagcacaagcaaagaagcttcctgatctcacaacacctaatttccctcaatc

SEQ ID NO: 27191 - DNA, 869 bp, Glycine max
  unsure (1)..(869): unsure at all n locations
  Clone ID: TF_LIB5118-054-A1-PF1-B4
cggccgctcaggcggcgggcgggttcattctctttcttaatcatggacacagctcagtgggcacagggtattggagtggttaaacaacctactatggaaggaggttcaaagcctcctcctcctcctatgttggagagaagggcaaggcctcaaaaggatcaagctttgaactgtccaaggtgcaattcaaccaacaccaaattctgctactacaacaactatagcctctctcagccaaggtacttttgcaagacatgtagaaggtattggactgagggtggttctctcagaaacgttcctgtcggtggtggctctagaaagaacaaaagatcaaccccatcagcgccaccaccatcatcagcatcagcacaagcaaagaagcttcctgatctcacaacacctaatttccctcaatctgcttcccaggaccctaagatccaccaaggccaagaccttaacctagcatatccaccagctgcagactacaacactgtgtccatgtcaaagctcattgaggttccttacaacactgaattaacaagggtggccttcatcaaaaccctacttcctcatcaacaccaacatctgcatcttctcaccatcagttgtctgccatggagcttctcaagactgngattgctgctgcttcctcaaggngtttgaactccttcatgccaatgtataattcaactcatcatggatttcccttgcaagactttaagccaccacatcatggccttaacttcagtcttgaggggtttgataatggtacttatgggggtcttcatcagggaattcaagaagatcctactactggtggtgcacggatcttgtttcctactggggaggatttgaagcagcaggttcca

SEQ ID NO: 27192 - DNA, 1148 bp, Glycine max
  Clone ID: TF_GmC108_3
cagaatttggaacttccaaagcctaatctgatgaggaaacaacaacaacaacaacaacaacaaactcagccgaattcagagtctttgaagtgtccaagatgtgactctaccaacacaaaattttgttactacaacaactacaacaagtctcagcctcgccatttctgcagggcttgcaagaggcactggaccaaaggtggaactctacgcaatgttccagttggtggtggaaggaagaacaagagggtaagaaaatcaatcactactccaattacaacatcttccaccacaacatcaatcacaaccaccacttctacttgcactgccacagtcacaacctcaattggcaacaacaacaacaacatggatgctatgttgggttgtaatagccacatgacaatccaaactcctcttgcggatgatcacaaaaacatgtcttcctctctctaccaagctctaattcgtccaccacctttgctgctacaacaacagaatctgatgaacaacacaagagacctagaaggcaaagattttggtattggtattggtaatggtaataatggtatctttcctagtttaactttgccttttcctattcatcatcaaagccaaagcctactcttccctttctcaacctcaagcagctcttttgataccaacccttgttcagtagtgtcaacttctcttagatcctccaatgtttataactatggggaggatcagtttaaagcaatagaggaaccaaccatcaatagtactattacaactactactatagtgcctagcaccaacaacacacatcatccatgggagatagcagcagcaacaagtggtgttggcttgggaacttcttcaaattcaaactattggaattgggaggattttgattcattggtctcaactgatctaaaagatccctgggatggttcagatatcaaaccttgagatcaaactatcagaaacacatcatggtagtgtccatagattagttatttaatttaattggggtgttttttgtgtttcatacaggttagtaagtggtcttgtgtttttttcaagatggggcatgagaagtatttggagctgtcatgttttagtttcagcttcagcttcaagcaaaagtgtcccaaaatattcctgattaatag

SEQ ID NO: 27193 - DNA, 1424 bp, Glycine max
  Clone ID: TF_GmC479_1
ttcctaaactcttctcttctacactttgctctctaccctctttctttctctttctttttcccttccctcaagtactatcatacacaaacacaaggtacttcacatacccacatacacacacataagcaaaaactcttacttccctttttcaagttcttaaactcatcactacttaactcaggagtgtgcatattttcgttgtatggatggatccttctagtggacaacaccagcaaatgtctagccagtcattggagaacatgttggcatgttcaaaagcccaccaagagagaaaaccaacgcctcagccagaacaagctctaaagtgccccagatgtgactccaccaacaccaaattctgctactacaacaattacagcctttcccagccaaggtacttctgcaagtcatgcaggagatattggaccaaaggaggtacacttaggaatgtccctgtgggaggagggtgcaggaagaacaaaaggtcatcatcatcatcttcaacatcaaagagagttcaagatcaagcattcacaccaaatgttaaccctctcactggccttccttcattaatgtcttatgactccaatgacctcactcttgcattggcaaggcttcaaaagcagtcatgtgggcaattagggtatgatgatcatgatctttcaatgttggggaaccaccacacaaacaccccatgtggtgataatatccttggcatgcatcaccactcatcatcctcatccacaaacccagggttcttggatgccctcagaagtgggttccttggaacacaaagtaataataatatgcatcagaatatgtactatggatatgggaatggggacatgggggaggtggacaatggtggtggggttggggttagtagtagtggagagatgatgatgatgatgatgccttataataatgatcaagaaatgagtattgcatccacacaggcagtgacagtcaccaccatgaagcaagagatttgcaacggaagggaacaaaaggtgttgtggggttttccatggcaactcaatggagacacaaacatgggtgaacttgactcaggaagagctagtaattggaatggcatcaattcatcatggcatggacttctcaacagtcccctaatgtagacaacaaccacagggcctctactactgataattttatttccttaatttctcatgttttgttttactaaaaatgttattagtctaattaggattttcaatatccttttgagtgctgggttaattaattacaggggtttggttgattcccttgaatcatctcttttctttctttcttgtttttttttcttctctttttgccccttaaattgtcaaattttttgtactactactgtcttttaattggtgaatagactaatgaaatttcagaaaggttgtttgctaacc

SEQ ID NO: 27194 - DNA, 501 bp, Glycine max
  Clone ID: TF_GmC479_2
cttctttgcatgacttcctaaactctctctatactcttctctcttctacactttgctctaccctctttcccttccctcaagtactatcatacacatcacacacacaagcaaaaactcttgctttccttttcaagttcttaaactcatcacttacctcaggagtttgcatattttctttgtatggatggatccttccagtggacaacaccagcaaatgtctagccagtcattggagaacatgttggcatgttcaaaagcacagcaagagaggaagccaaggcctcagccagaacaggctctgaagtgtcccagatgtgactccaccaacaccaaattctgctactacaataattacagcctctcccaaccaaggtatttctgcaagtcctgcaggagatattggaccaaaggaggtacacttaggaatgtccctgtgggaggagggtgcaggaagaacaaaaggtcatcatcatcatcatcttcaacatcaaagagagttca

SEQ ID NO: 27195 - DNA, 564 bp, Glycine max
  unsure (1)..(564): unsure at all n locations
  Clone ID: TF_jC-gmro02910037e01a1
ggctcgagattcatcatataattttatcccaacccaaccacacatacactatattctctctctctctgccccccatttcccgcatacacagagcgatagcaaacctactttagtttctttcgcttttcttccactaacgcaaaaagactcaccagtcatcaccacaccaccccttttgcttttgctttgcgtgtttttggattgttgtagatctaaaagataaagatgattcaagaaatgttgggtggtgctagtgctagccacataccaggagaaagaaaaatctccattaataacggaggacgaggaagagcacttctactaacaccacccacatcatcatcttctccttcttgcacaacaagcataactacttncaccggcaccggcaccgtgaccttatcgaattcagagaaccaaaatttgaggtgccctcgttgtgattcatcaaacacaaagttctgttactacaacaactacaacctcactcagcctcgtcacttctgcaagacgggtcgccgctactggaccaaaagcggcgctcttcagaatgttcccatcggt

SEQ ID NO: 27196 - DNA, 321 bp, Glycine max
  Clone ID: TF_14258423
ggaattcggcacgaggttagcagtgggagcttagatttgaataatttccattgcttaagggagggaatgcttgtgctttgcagattcttgaggttgcccagacatctttagcgttggggttggacgctgatacagctctctgagacgatagatgatcacaaggcccctatgggaagaatcatggaaaaaccaagccaagatctttttcagcagcagcaacaagccctaaagtgccctcgctgcgactcttcaaacaccaagttctgctactataacaactatagtttgtcacaccctaggcatttttgcaaagcttgcaag

SEQ ID NO: 27197 - DNA, 1461 bp, Glycine max
  Clone ID: TF_GmC384_3
taaagggatcgttgggtcaattcacttccctcccaaacccgaaaacataataacattagacgaggaattcccaagaagtacgttgtggccgggcagggatatttgtttctcactctctctcatgttcactcaacaacaacgacgcactcactgacatcaacactagtttcaggtgctatctcatccaccaaatgcagcaaatacactccatgcccggagggaggtttttctccggctccggatccgccgaccggaggctccgaccccaccatcagaaccagcaggccttaaagtgcccccgctgcgactctctcaacaccaagttctgctactacaacaactacaacctctcccagccccgccacttctgcaagaactgccgccgctattggactaaaggcggcgtcctccgcaacgtccccgtcggcggcggttgccgcaaatccaaacgctcctccaagcccaacaaaataacaccctctgaaaccgcttcaccgccaccacccccgcaccccgaccacaacaacaactccaactctcattccagcagcgagagctccagcctcaccgccgccgctgccaccaccaccgaggccgtgtcggcgccggagactttaaactctgattccaacaacaacaacaacatgcaagagtcaaagttgttgatccctgctctggaaactaataattctctggagcagggaacaggggactgcggtggtatcttctctgaaattggtcctttcaccagtttgatcactactactacttccactaatgaacctttagggtcagggttcgggttcggtaactccactctccccgatgcgtcgtcgtttcagtggcactaccagaaggttagcagtaacaacgaagaattgaagttgccggagaactcctttctcgatcacaccgttgatttgtcggggatgcatagtaaaaccagccacgggggaggattcggatcgttggattggcagggcggtgcagatcaaggtttgtttgatcttcctaacaccgttgatcacgcttactggagtcacactcactggtctgaccacgacaattcttcttctctctttcatcttccctgaaaatgttttcacgcctcttctaaatcttatctcacctttttttttatttcttatataaatttaactttaaaagaagaagagtaaaggagattggaaatcaaaaccaaagttttaaaaaaatttgaaagagaagtggaaggacttggtataattaattacgcggtgtatatttttttttgaagttataaatttggggggtgattgagcttgatattaattagtgatgtgcatgcacaactaacttccatgttagtttctacagtatctgatttctttctctcttttttgttttctgagttcaggttttaatatatatgtatgtggaatttgattgattaacagagaaattatagcagggtgttttaat

SEQ ID NO: 27198 - DNA, 874 bp, Glycine max
  Clone ID: TF_GmC730677_1
ttccacaacatcttcaggcatatttgagaatcctaagactccctcagcagaaaccgagacatcaataccgaaatcctccacaaatggagaaaaaagcgagaaaagtgcttctgaagaaaaaacactaaagaaacctgacaaggtacttccatgcccgcgatgcaatagcatggaaaccaaattctgttactacaacaactacaatgtcaaccaacctcgccatttctgcaagaactgccagagatactggacagctggaggtacaatgagaaatgtgccggcaggagccggtcgtcgaaagaacaagaattcctcggcgaccgtgtcacattaccggcacataatgttctctgaagggcttcagggagccacactcaatgcccccaatggattgcataatgctgttatgacctttggtcctgattctcccctttgtgatacgatggcatctatgttgaacattgctgagagagcacaaagttgtgttccaaatgggtttcatgtaactgagccaaatagttttgtttcctatagaaaggaggaggaggaggatggtactagtggtcactctactggagttaattctgttgcaacaacatcaactttaagccatagtggctcacatgaatcattggataaaaaagttgttgaaggtttcactcctcaatttccatactttccaagtgcaccttggccttatcctatccctccttctacatttttcccacaagggtaccctttatcattgtatactacacctgcatattggagttatatgccaccctcttggaataacaatatatcagctatctcacccgaatcttctattaacaactctgtctctaaccctactttggggaaacactcaaaggat

SEQ ID NO: 27199 - DNA, 847 bp, Glycine max
  Clone ID: TF_GmC196_2
cccacgcgtccgcaaaacccaaactcaagtcactgccatctcgcacgtttgaatccccagaaagaaaaaaaaaatgcacgaaattagagaccctgcaattaggcttttcggtcagaagatccctttccctgaagatgttgttgttgacaaagaagaaaaagaaatagaaagtggcgaggaaagagaacaagagatggaaaaatatgaagaccaaggacacaaggatgctggagttgaaaatgttactgaggaagagctagaagttgatcctcctccaaatgctgaagagactaagaattcaggctcatcccctgaggctattgtgaaccccaaaacaccttccatagaagaagaaacagaaaaatcaaaaggtgacaaaacagagaaggaacaaggtgatgcagccaactcacaagagaaaaccctgaagaagccagataaagtgctaccatgcccccgctgcaaaagcatggacactaaattctgttactacaacaactacaatgtcaaccagccgcgttatttctgcaaagcctgtcaaagatactggactgcaggtggcaccatgaggaatgttcctgtgggggcaggacggcgaaagaacaagaactctacctcccattatcgccacatcactatctctgaggcccttcaagcagctagaattgattctcatcttccacctttgaaaggcaatggtagagtcctcagctttggattagatgcacatgcacctatttgtgattccatggcatctgtcaacaatcttggagagaaaaagcctctcaattgcacaagaaatgggtttcatcatggctttgaggatcaaagactcccccccgttcct

SEQ ID NO: 27200 - DNA, 686 bp, Glycine max
  Clone ID: TF_GmC190_1
atttcccctaaaccttcttcaataagaataataatattctctctttgttcctctctctaaaattaatggctgaagcacaaagtggccaagctagtgaagggattaaactgtttggaacaacgattacgttgcatggaagagaaagaaaagaagatagaaatgatagtgaagatgggacagaggagataaagagacctgataagatcataccatgcccaagatgcaagagcatggaaaccaagttttgctacttcaataactacaacgttaatcagcccagacatttctgcaagggatgccagagatactggacggctggtggggcccttcgcaacgtgccagtaggagctggcaggcgaaaggtcaaaccgcagtttggtcaggaggagaggttggctttggatgaatggcatgttgccgccgtggctcatggtgatttccggcagctttttccatctaaaagacggaggatgagctcaggtggtcaacgtcaaccttgttaagccttcacttctttcattcctttctctccccccccccctttttcttgtattgacatagatctccctttgaggttttttaagtaattcttcttaaaaacttaggtatcaattatcattttaaatgtagttttgttgttgtttctcaataaataaaaaaacacaaggtataacagataattgatc

SEQ ID NO: 27201 - DNA, 465 bp, Glycine max
  Clone ID: TF_uC-gmropic043a02b1
ctgacgcgcgggcacgcaatgcgcatgactccgccctgcctaagatgtctgcattctcacccttaatttgcactcatacgctctgcctctcttatagtctatatggcaagccctacgactcagtcactcatacagctacgcccacatataaaagcccgcggttgagattctagtaaccttagagggtcgagcttaggccgatcctgagtgtgtgaatgaatccgagtcggggacggccccagtacaggcctatgcagtcacaggagaagaagccaaagcctcaatgacaacaagctatgaaacgcccaagatgagactccacgaacagaaaattctgctactacgacacggatagtctgactcaggcaggatgtctctgccagtcttgcacgagatatcgcgcacaatgaggaacactgaggaatgtgccactaggtggaggatgcaggaagctgagagcatgct

SEQ ID NO: 27202 - DNA, 701 bp, Glycine max
  unsure (1)..(701): unsure at all n locations
  Clone ID: TF_16343727
gccccccgaaatctgaaacacatacaagcttttaaaattcgaatccaatccaccaaccttgtttcataggacacatatataaatacaaaccaaattataaccccatccacatgataaaaaaaacaaacacacactacactaagttcagatcacagagagacaaagatatggaacaagagggagaaaaagggagagaggagaaaagacaaattcaacaacagcaacctcctcctcagcagcatcagaaatgtccacgctgcgattccatgaacaccaagttctgctacttcaacaactatagcctctcgcagcctcgtcatttctgcaaagcgtgtaaaaggtactggacactcggtggaaccttcaggaacatacccgttggtggcggttcccgcaaagtgaagcgtggcaaaacaaattctccatcttcttcttcttcttcttcttcttgttcaaatttgctctcacagccacagcagaatctgttgatgaggccttctccaccaccactcactactaatactatggttcagtcaactagtccttattattataatcttggtgttggtggaaatgggtatctctcttttcattcttctctgaacaacaacacaccatcacagccttccgatcagtatctgaaagttggtnnnnntgatcatgnnnnnnnntcntctnnnnnntctcctcntnnnnntnnc

SEQ ID NO: 27203 - DNA, 421 bp, Glycine max
  Clone ID: TF_LIB3139-100-P1-N1-D12
ctccttccataccatatattgacatctgtacacacatttcgaccgggcggaataaatcactcaaaaggccaccgttaagctcatgatattgcatataaaaagaaactattgtttccgggatacaaagtgcaccaaggggagtgttttaagaaattggcttgcgttttaagcaagtttgttatacatgaattgaatggaaccaaacctttgggaaaggttcaaaattgggaactcctaagccttccactgataaggaaccaccaccaacctcagccttaaaagcctaggaggggcccaaaaggcgatactattaccaccaaatttggtacctacaacaacaacaacaagtttaaacctggacattactgcaaaattggcaggaggcatgggactaaaggtggaactctacccaatgttcctg

SEQ ID NO: 27204 - DNA, 190 bp, Glycine max
  Clone ID: TF_jC-gmXLIB3563P034ba06d2
ggggaacccaataaacgataaatacgaacgaatttacagcctgaaaatagactgattatataaaccctgcccaactgcaagagcataaaaactaaatcctgttacttcgactactactacgtgaataagaccatgcttttttgcgtgatctcccataagtactgaacagatgctggggcccctcgatact

SEQ ID NO: 27205 - DNA, 391 bp, Glycine max
  Clone ID: TF_jC-gmst02400020dg01d1
gaacaaaccaattttttgtgtctacacatagttaattgtttggttcacgccaacatatcctggatattactatgcatacatatttaatgatcaggagctacaactcagcttaagacaagcgaaccacacacgatgtactgacatgacctatgacagactgtacattatgatccttgtaatagttcaggtttctttactgatcgggctggttaaaaacaaccaaagagggtcgttggggctgttccactagccctgaactttggagtagcaaactttgccttaaagaatggttccctttttagggcccaagtaagggttctttttttttatgcttttaggtggattgagacttttaggcttttaaatcactttccgtattctggagctcttt

SEQ ID NO: 27206 - DNA, 1786 bp, Glycine max
  unsure (1)..(1786): unsure at all n locations
  Clone ID: TF_GmC239_1
ccacgcgtccgctatgtttcttccctctgatggatttttatttattgttgtcgtaacaataaacctttttctgaaaccatgcatattattttggtagtattataatgttcaatggatctgcaattcatttctgcctctgcaactctcagaatttcatgctctcaaataaggatctggagcagaaattgtagatcctgaaattttccctgtgtagagtttgggcctaagttagagtttgtgagagaaaactttgagaatgagatacgtggaggacaaagggtgctacaacaacaatggaccaacacaagagactccaaatagcagtgccatgtactcagagtttcacaaaggaaaagatgctactcgtgtctccaaccaccatcatcgagcaaccatgggaaaaccaaccccttccaagtgggatgatgcacaaaaatggctcgtggggttgtcaaaaggtggagagaaaagccactccaaaagcaagccaagaaactcaaacgcagatgatttgagactcatagctcctgtgccacagaaggagcatgattactcaagtagtgagaaggaagaggaggaaaatgatgcttgccatgatttcatgactaatattattagtgctaatgctattgctgctcaatatgaagctgaagccaaaagggtagaatgtgatgagtcaaattggggaagcaataataataataatgacaacaggttttcaggaaacacaatccaagtgcaaccaatatgtttcagagacatggggactgagatgacaccgattactagccaagagccttcaagaactgggacaccaattagagccacaactcctgctactagaagcccaattcattcagggacttcaactccaatgaggggtcaaaatgggttgcaacaagttgctgagggtggccatggcactactaggaagtgtggagatcaaggatcaacaagcccttgcaagaagactcatgaagatcatcaagctagaaaattgagtcctctagaaagccgtgcaatggcttgggatgaggcagaacgtgccaaatttatggccaggttcaagcgtgaagaggtgaagattcaagcctgggaaaatcaccagataagaaaagctgaaatggaaatgaagaaaatggaggtgaaagctgagaggatgaaagctttggcacaagaaaggtttgcaaataaactggcttcgactaagaggatagctgaagagaaacgagctaatgcacaagtgaagctgaatgacaaagctttgaggactactgaaagggttgagtatataagaaggacaggacatgtgccttcttctttctctttcagctttaagttgccttccatttgctggtagctagtagcaattttgcaaccaatatatgtaatatcttgtgtgaaatataaaaccttttcagtctagcccaacataattgtgctacttctacaaaaatataaaaaaaaatttcttgctcatgaagggaatagaattgaaaaaatatttatatttgaaactcgctcgagttgtcattaatccactgaaattgcacaagggtttttaagtaaagtaagtactctctgtaattgatagcttcaaaccagtactcttctgattcatagttcctatgtggtactgatagaacctcctctaggtagcagacatgcattgctttcacgagtaaggctatggtttgaggcaaaagttacttttcactgcatacaatcgtacaatttacagttttacaactgcacattgcgtccgtttttttattaaatnnnaatg

SEQ ID NO: 27207 - DNA, 479 bp, Glycine max
  Clone ID: TF_uC-gmflLIB3275P059b07b1
gataaaaattgagttgaatttcagcacaagatggaagaggactttgagttgcatgcccttcaaagtccaaagaactcttatgtgatggagtgctgaagtttgagagttgactgatacatttgaataggaaaaccaagatgttggtgttgaaaattaagtagaagttgaaaggatacaaggtaaggcacaagataagctaacgaataaattagcagctgcaaggcataaggccgaggaaaagcgtgcagcagcagaagccaatagaaatcatcaagctgcaaaaactgaagagcaagcagagtatatacgaagaactggtcatgtcccttcctcatatttatcattttcttgctgcaattggtgctcttaaaaaaagccaatctttgccaatgtttattttttgtttctataggtatgaaatgccttttgctgcttacacccaagcatgttaaatatgcctggtgcatttccctcctggt

SEQ ID NO: 27208 - DNA, 742 bp, Glycine max
  Clone ID: TF_GmC356_3
catagggccctattctctggcagaggctcagaaaaagtcgaaagctggaaaaaagaactaagcactcaatcgtcaacttgggacgtttctgaaacgtcaaagcctgcctcaaagacaagaagtgaggaagccaaaatctctgcatgggagaacttgcaaaaggcaaaagcagaagcagcaatacggaaactagagatgaaattggaaaaaaggcgagcatcctctatggataagattatgaacaagcttagattggcccagaaaaaagctcaggaaatgagaagttcagttccacacaaccaaaccgatcgggttgtaagaacttcacacaaggcttcatcatttcttagaaccagccagatgcgttctttgagtggttgtttcacttgccatgtcttttaagcattctttcatgtttgagtgatggtgggtttccgaaggattcaaatgggccacatgttaatgattgaaaggggcacaacagttgacaaaattggtgttgttgcgttttgctatccatggcaccttctttgaaagtctcagatatcataaaatctaagccccatgttcgggagtttggattcaatgggtagcaatatttgtaagtaggccaaattttagaaataagatcttttgtatttttttctctcctcccaacatgattgtgtgctgttcaaaaacttcaaatgtaatctaccttatagttgaacgagaaaagcaaccacaatatcatttcgttctt

SEQ ID NO: 27209 - DNA, 754 bp, Glycine max
  unsure (1)..(754): unsure at all n locations
  Clone ID: TF_GmC356_9
ggctcgaggcaccaatgtgtcccgtgccacttcaaggagggacatggcgacccagatgagcccacagggtagctcacgctcctctcctaatctgaggccttctttctctgcctccaccccatcaaccttgcctgtcacagaattgcggactgctggttcctctaaagtggatattagggatgtgcaagtagatgaacacgttaccgtgacaagatggtccaagaaacatagggccctattcactggcagaggctcagaaaaagtcgaaagctggaaaaaaaaaaatttgcccggagagaactttccacaaaacagggcatttggctgcagaaaagcgaaaaaagaaaaagtaagcactcaatcgtcaacttgggacgtttctgaaacgtcaaaacctgccccaaaggcaaaaagtgaggaagccaaaatctctgcatgggagaacttgcaaaaggcaaaagcggaggcagcaatacggaaactagagatgaaattggaaaagaggcgagcatcctctatggataagattatgaacaagcgtatattggcttagaaaaaagctcaggaaatgagaagttcagtttcacacaaccaaaccgatcgggttgtaagaacttccccccagggttcatgattttttagaaccagccacatgcgttactttgaagtggttgnnnnnnnnnnnnnnnnnnnnnnnnnnnnnnnnnnnnnnnnnnnnnnnnnnnnnnnnnnnnnnnnnnnnnnnnnnnnnnnn

SEQ ID NO: 27210 - DNA, 1033 bp, Glycine max
  Clone ID: TF_GmC356_6
cccacgcgtccgcgggtgtattcctgatgataagtttggtgggttcaaagatgtgggcaccaatgtgtcttgtgttgtttcaaggagggacatggcaacccagatgagcccacaggggatgtgcaggtagatgaacacttaccgtgacaagatggtccaagaaacatagggccttattcactggctgaggctcagaacaagtcaaaagctggaaaaaagaaaaagtaagcactcaattgtcaacttgggatgtttctgaaacgccaaaacctgccccaaaggcaaaaagtgaggaagccaaaatctctgcatgggagaacttgcaaaaggcaaaagcggaggcagcaatacggaaactagagatgaaattggaaaagaggcgagcatcctctatggataagattatgaacaagcgtatattggcttagagaaaagctcaggaaatgagaagttcagttccacacaaccaaactgatcgggttgtaagaacttcacacaaggcttcatgatttcttagaaccagccagatgcgttctttgagtggttgtttgacttgccatgccttttaagcattctttcattggtttgctgagaggtggattatcagccctgtttcggcagatacagagtcagtcatcatcaatgcccctccaaggacaagaggtgaggaacccaaaatctctgcatgggagaacttgcaaaaggcaaaagcggaagcagcaatacggaagctagagttgatttaagttactgagacaaaagcaatggtgactgagatgaaacgtcgattttgattagagtatgatacggagaatatctaaggtgcaggctgtattattactcttgggagcacaagaaatgacaaatagtgcccccacctgacttttttttgcagcaaaactatcatgacattatagtatttctttaggaattgcttttctctttgatatattttatcaataattgctattttgacatattattaagtgttctaaaacttgttattgtatgccaggaaataaatgatcattcc

SEQ ID NO: 27211 - DNA, 2382 bp, Glycine max
  unsure (1)..(2382): unsure at all n locations
  Clone ID: TF_GmC44078_1
tctgcgccatattacggctgcgagaaggcgacagaaggggagtgtgagtgtgagtgtgagtgtgttgttctctctgcgaaatgcgaatgtgattcgaagaagctcgatgagaatgcgagagttagggtttcaggaacgaaggtcgtggaggcggagaggcggcgacaccagccccgactccgtcatcttcactctcgaatccaacttgagcctcttctcctccgcctccgccagcgtcgaccgctgctccttcgcctccgacgcgcacgaccacgactccttagcctccgaaatctcactccatttggcagcacaggatcatgacggtgatttcgctcatagcgaaagctggagcggtccagatccggatctggatccgaataaacgacaacaacaacgacatgcagatacagattcagatgcagcacacacgaagcatcgccgaaatcgtttctccgggaaaggagagaaagcgaaagttcaaaaggaagaagacagtgacggtggtgacactgaggacggaaatcaacacttggaatttgattcggccagaaactctttctctctggctctcaaagaatgccaggatcggaggtcaagatctgaggcgttattcaagaagcacgatcggcgaaggcctgcttcgttagatctgaacaatgccattggcaatggcaatgtttcttcgcctcatttgggattaagtgctatgaagaagagcacgctttgttctagaaggtctggctctggcacttttccgagtcctggaacgcctaattatcttcacgccactgttgctatgcaaaagggttggagttcggagcgagttcctttgcacaccagtgctgcacgcaagcaggttggtgcggctctgttgcctttcaacaacggccgaactttgccgtccaaatgggaagatgctgagaggtggattcttagtcctgtttccggtgacggcggcaccgggagggcctcgctcccggcgccgcagaggaggcccaagtcgaagagtgggcctcttggcccccctggagttgctgctgttgcgtattattccatgtattcccctgcggtgcctttgtttgaaggtgcgaattcaaggagctttatggcggcatctccgttttctgctgctgttagtgtcccagctgctgctgctgatgggttaactgccagttccggtggcagttgtggggtgctctcaaccagaactgatccttgcatggctcgctcggttagtgtccatggttgctctcagatgcatagtcagtcatcactgcctgcccaaggggagaagtttgatggtttcaaagatgcgggcaccaatgtatctcctgctctttcaaggagggatatggccacccagatgagcccagagggtagctcatgctcctctcccagtttgaggccttctttctctgcctccactccaccttcccttcctctctcagagttcacgagtttgcctttctctaaaatggatatcagggatgtgccagtagatgaacatgtaaccatgacaaggtggtccaagaaacacagggccctattctctggcagaggctcagaaaatgttgacagctggaaaattaaggaatcaagtagtcgatcttcatcttgggacatttctgaagggtcaaagactgtttcaaaggccaaaagggtggaagccaaaatcaatgcatgggagaacttgcaaaaggcaaaagctgaggctgcaatacagaaactggagatgaagttggaaaagaagcgagcatcatctatggataagattatgaacaagctgagattggctcagaaaaaagctcaggaaatgagaagttcagctttagccaaccagcctcatcatgttcccagaactcctcacaaggctatattatttagtagagccagtcagatgggttccttaagtggttgtttcacctgtcatgccttttaagcttgaagtttgggtttcataattcagaaagatttaaatgtgccccatgttaatgaattttcggtggataaaagagagagcagcttactatgttgacactaaattggtgtcatcttggttgtgcaatgcatgaaatagcagcgccttctgaaggcatccgataaaatcttaagtcccttgtgccctcacccttgggagtttggattcaatgataaataatatgtgtatgtacgtaggccaaactttagaaataagcttcatttttattttatttttttcctttcctaaacagtttgctgttcagaagtaatatgctatctatcttcagtagaacgataaattaaccacaaatctgcaatttagtttttccttcgcaaaatcaccctcagttcagttcgttgtctgaaaaaaaaaaaaaaaaaaaaaaaaaaaaaagancg

SEQ ID NO: 27212 - DNA, 493 bp, Glycine max
  Clone ID: TF_jC-gmXLIB3563P059ca07d2
ttttgttttttttttttgttttttcttgaaaaagagtcgaatgactatctggcgaaagaaaactcatacactgattgaataattaaattcctttttgcctccaatccactgggtatacacacgccagaaagccgtttttgacgcataaaaagggaacatatatctttatggccaacgtaataaactgaaaacactcttgcatcggggacagttaaaaaccaactactcgcatgaaaataaagccttttttttttgtctcccacggagccaaaaaataaaggctattttaatactaccgaggatttggttatgtaaccttcaccaattgctctatgctttgaagttagctgctgtgcattaagaacatgttccttttttttggccgaaaacatagctgttgtttcttaaatacccttgaggatggggacaaagaagttatatatttcaatcggagcttatgccttttgcttctcgaggtcttcgtccaactttt

SEQ ID NO: 27213 - DNA, 351 bp, Glycine max
  Clone ID: TF_LIB3242-386-Q1-K1-A4
gggggaagagagaaaaaatcttttgcttggggaataaaatgattttgttttggaaaaaccaaatgaataacccgcttaaaccccttttttttaacaaaaaaatctaaaggctgttttgtttgtcacaaacttcatagggcccccctttccttttcgcccccccataacccccttttaaaaaccaaccttgaaatttttttagccaaaattttcttttttgctttgacctcgggcccaaagcccccccccccaaaaaagggattaaaattttaaaaccctcccaaggccttttttggagaggttccagttgcccggggttttgcaactttttcctctgccttgaaaattttt

SEQ ID NO: 27214 - DNA, 232 bp, Glycine max
  Clone ID: TF_4276934
aacaaccaaggagtttttttggagctggtccagttgctttatactttgcagcttgtccctctgccttaaaaaaatcttcccctttctttgcctaaataattgctcttctttcttcaacttccttggggattgcagcaattttgctttttatcttttctgcagcttctgccttttttttctccagttctttttaaatcttattaaggtcagcctcaaaaagagcttttttggc

SEQ ID NO: 27215 - DNA, 465 bp, Glycine max
  unsure (1)..(465): unsure at all n locations
  Clone ID: TF_uC-gmflLIB3260P014a10a1
atccacgcgttcgcccacgctttcgtctacgcgttcgcccacgcagtacacaactttacaacaaggcatcggttatggcaaatctgcgatcgaagtctgaaactgcttgtgatccggctccggttgaggctgtggtgccatggaactacgacgttgtttagaaagcttctgaaacaggggaatacaaagctatggtttctgtatcctagaagacaccggttcctgcagacaagcatttctcaagaggatcctttgatagaaaaatctctctggctgacttggataaagagaaagagttgttctatgtgaatgcatgggaagaaagggacaacgccaaatcagataacagaccttataaacatctctcatttatcgatgcttgggaaaacagttaaaaggcagcttttgaaactgagcttaaaaaattggacgaacaactggagaaaaagaaagcagaatttggng

SEQ ID NO: 27216 - DNA, 253 bp, Glycine max
  Clone ID: TF_uC-gmflLIB3260P018a07b1
ggcggacccgacaaagattgaagaagaactggagaagaacaaggcagaggctgcagagaaaatagaaaacaaagttgctacaatccacaaggaggctgaagaaagaagaacaataattgaggcaaagaagggtgaagatctgcttaaggcagaggagcaagctggagagtatggagcaactggaacagctacaaagaaactccttggttgcttctaatgctttaaatcttaagcattgcgggaaacagaacaa

SEQ ID NO: 27217 - DNA, 2681 bp, Glycine max
  Clone ID: TF_GmC356_4
ttcccacgcgtccgcgggtgtattcctgatgataagtttggtgggttcaaagatgtgggcaccaatgtgtcttgtgttgtttcaaggagggacatggcaacccagatgagcccacaggggatgtgcaggtagatgaacacttaccgtgacaagatggtccaagaaacatagggccttattcactggctgaggctcagaacaagtcaaaagctggaaaaaagaaaaagtaagcactcaattgtcaacttgggatgtttctgaaacgccaaaacctgccccaaaggcaaaaagtgaggaagccaaaatctctgcatgggagaacttgcaaaaggcaaaagcggaggcagcaatacggaaactagagatgaaattggaaaagaggcgagcatcctctatggataagattatgaacaagcgtatattggcttagagaaaagctcaggaaatgagaagttcagttccacacaaccaaactgatcgggttgtaagaacttgtgtgtgtagtgcggtggtggtggcataataataataataatggtgagagaattgagtaggagtacatgttgttggtgtactgtttaggaataatgaggttaggtttttgagtgtaatgatgtgagactgaaaggtcgaatctaaggttgaaaaaagatttgaggttggtccattgttgtggaatttttcgcagcagcatttggcagggcgtgagcgtgagggcgattttgctcacaccgatatctagagtggtccagctccaaacccgaacgaggctgcagtacgcaacaagaagaagcacagtcgtttagggagaaagagagaaaaaaaggctaaaggtacacctacatacactactacacctcatctagtttttttttttttcgttgggaaggaaaagattacaaacacgccacgagggcttttaatttcggaaaaattgacgctgatattcaagaacccgtggagttggattctgccagaaactctttctcttccacgcgtccgggtacccctgaaaagtgaaaggtcttgctcccatttctttaacggcttgttttttattttttaataatcccatcgtaattatcgctttttctcgttgtccactaagaatgtcaagacaggagatcaagatctgaagccttgttgaagaggctgcttctttggatctgaacaatgcctctggctctggatctttgccgcgccttcaaacattgaaaaagacttccatttcttctcgaaggtctggtactgccactttccctagtcctggtacactcaattatcgcgttgcaatgcacaagggatggagctccgagcgagttcccttgcatgcaggtgctacccggaagcacgttttgccgttcaacaatgggaaaacattgccgtcaaagtgggaagatgctgagaggtggattctcagccctgtttcggcagatggcactgggagggcctcgcttaatgcaccccaaaggaggccaaagtccaagagcggtcctcttggaccccctggtgttgcgtatcattctatgtactcgccggccgcgccggtgtttgaagtggggaatggggggagttttatggaaggttctccgtttacaggtgatgggttaataatctgcacgagctctttgcatgcgctgtgctcggcactgggagggcctcgcttaacagagtcagtcatcatcaatgcccctccaagaggataagtttggtgggttcaaagatgtgggcaccaatgtgtcccgtgccacttcaaggagggacatggcgacccagatgagcccacagggtagctcacgctcctctcctaatctgaggccttctttctctgcctccaccccatcaaccttgcctgtcacagaattgcggactgttggttcctctaaagtggatattagggatgtgcaggtagatgaacacgttaccgtgacaagatggtccaagaaacatagggccctattcactggcagaggctcagaaaaagtcgaaagctggaaaaaagaactaagcactcaatcgtcaacttgggacgtttctgaaacgtcaaagcctgcctcaaagacaagaagtgaggaagccaaaatctctgcatgggagaacttgcaaaaggcaaaagcagaagcagcaatacggaaactagaggttacttcctagttcctagtgaatagtgattactttattttgagaattccgaataagtaattttctaaaaatgtttactctgaagaaaaataatcattataatgattatggggattattcttcctttgtaataaatatttagatttaggagttcagcttttggaattcacccttttttcttgagttgctgaaatttttcccctgtcgctcagtttcatttggttatcctcagttagctgtatgtcccttagagtgcttaagaaatgcctcttattttttgtgtgtaaaaaaagcctttttttatttgacaaaacttagatacagtattctaatgctgttctctaatcaaaacatttcatcttgaaaattgcggttgatttaagtcacagagacaagaacaatggtgactgaaatgaaatgtcgattttgattggagtatgatactgagaatatctatgatgctcattttaagttttattcttttttattatgatgcaccaatcatacattatttggaccatattatcatccatttaaat

SEQ ID NO: 27218 - DNA, 1323 bp, Glycine max
  Clone ID: TF_GmC17975_1
aattcggctcgagtagaaagagggttagaacaacttaacacagatgggtcaaaatcaaaacatgttgttcagctttccattttcgtagtgggattcttctcttcttgctttctccagtgtcatgaagaagagttcttcatcatcattccagaacttgggatctttcccaagtccaggggcaccctattatagggagagaaacattaggagccaaaagggttggtgctcagagagagtttcaaattcaaagctttcaactagtgctagtagcataagcagaagacacactatggcagggttaataacaacacccttttgtggtggaagaacactgccatctaaatgggatgaagctgagaggtggatttgtagcccagtttctgcgtatgctgagagcagaagttgttcacatgcacagcttcagcgaaggccaaagtcaataagtggccctattgtgcctcctggtgtggcttctttctactcaaatcagggtttggttgtgagaaacttggtggtgggttcacccttctcaactggggtgttggcacctgttgctgtttctgttcaccactttgatgcacatgatggcaatgtttttggctatgacttggacagtggaatgcagttttctaggccctgttatcaatgagaatggcatggtgctttcttctttgtccactgctgaaccacgtgctctgacaccagatgagaagcatgacggaacgatgaatggggaaaacgtagcatctcattcctcaaggtgtgacaaaggtacccaaatgagtccaggagagatagagaatgattcacattcctctccaaaatcttgtgccacttcaattgtggatcaacaacaatgccattcttctaaattagaggtcagagatgtggaagttgacagccaagctacaattgtcaggtggtccaagaggcatgcaaccaaattggccaaaaaagacactctacacagcaaagatttaagagagattagtgcagaagcccaagcatcatgggatattgacgagtcaaacattgacacttccaagttacagagagaggaagccaaaatcattgcgtgggagaatttgcagaaagcaaaagctgaaactgcaatacggaaacttgagatgaaattggaaaagaagagatcatcatcaacggataaaattctaaacaagctaagaagggcacagttgaaagctgagaatatgagaagctcaattcctgtacaacagagccatcaggtttccaagtgcagaatagttcgtgaaaatcgtctttgaatcagtactaaaaaaagacatcactgcgtgacctttcctt

SEQ ID NO: 27219 - DNA, 1824 bp, Glycine max
  Clone ID: TF_GmC3689_1
gttctttttaggatactatatcaacctaaagcatatttgcccttttggagacttgcgctttttctttgttatttcttctttgttccagaatcatcatcaccaatattttccagcaacacatttaccaagctacataagtagaaacaggattttccatatttgaagtgccacggtgcttccccgagaggcttggcaacttaaagtagatcaaaagtgatgaagaagagttctggttcctcccagaaacttggttcatttctaagtccaggggcaccaaactacagtgagaaaagcattgggagccaaaaggggtggagctcagagagggtgttgttgcagccttcaagcagcaacataaggaatgctagtgtagctaacttgacaccctttaacagtggaagaacaataccttcaaaatgggatgatgctgagagatggatttgtagccccgtttcaggctattctaacaacaaaaccaattcctatgcacaacttcagcagcggcgaccgaaatcaaaaagtggtccaattatgcctccaggaacaggctactactccaattactcacccacaattccactgcgccaaggtttggtagtgaagaacttcatgatgggtggttctcctttttcaacgggagtgttggcaccggatgctatttctcttcaccattattattcacatgaggctgttttcggtcaccgttatgactttgacaatagtatgcaatgctctagtccattgctcaatgaaaatagtgtagccctcccatcagtgtctagtgcacccatgtggtcagaactgctatgcgacccttcttcgcctaattctcaagatgagaaacgaaaagaaactaagaatgcggacgacgtgacatctctctcaaaatgtgacaaaggcactcaaatgagccctcctgagactgagaatgatgcaccaaaatcttcacccaattcgaccatggatcaacaaaattacctttctgcaaagttagaggtcagagatgtagagatagaccgtgaggctactactgttaggtggtctaagagccatgtacccaagctgagcttgctacctggtatacactcaaggaaaagtagtagaacggaagccaaagcttcaggtttggatattgcagactcaacgttggactcttccaagattcagagggaggaagccaaaatcgttgcatgggagagtttgcagaaagcgaaggctgaagctgaaatacgaaaactagagatgaaattggaaaagaaaaaatcgtcatcaatggataagattctaaacaagctgagaagggcgcagatgaaggctgaaaagatgagaaaccaaataactgtacaagagggtcagcaggtttccaatactcgcaaagtattttcattccacaaatatgcccagatatggtctccaaggagctgcttcggcactcatgctctccatgattaattaataatttaatatttaatcccatacccacgccctgaaatcactaaggtttagtcccgaaaaatgcaggaataatcatatttcaagtcataggccatttttgtttgccttttgtacttcccaacaatgttaatagtgaattactaatacattgtcttacagccatttgatatgtttggcattatgtacgagacctaatcgggattatttctggatgcttgcctttctttttaccgtttattttcttctcccctctttattactaagagcatcgttggaggagcacaagtagttcaagaattggagcgttttccatgaccaccatcagcaaatttgcattgtaaataatattcaaaatatttcacttctttc

SEQ ID NO: 27220 - DNA, 586 bp, Glycine max
  Clone ID: TF_LIB4390-036-R1-N1-B12
aaaaaaaaaaatctaaagggtgttttgtttggaaaaaactttataggggccccctttccttttgggccccccataaacaacttttaaaaaacaaacgggaaaatattaaagttttttttttcattatgggtaggacctcgggcccaaaagcccacccccaaaaaagggaataaaattttaaaagcctccaagggccttttttggagaggttccagttgcccggggttttgcaactttttcctcggccttgaaaattttttcaccacgctggggttaaaccatgggtcttttcccctcgggtgggtggggaacaaagggtattttgtttttaatttttacaccaaattcgggtttttttttctttagggggcccggcttaaacccgagagttttaaaaagaggaaggccatcctttttaagggctgggatgtttttaggggggattcaagggtgagtcccatttttggaatatcaaaaaaaaatttaattggagggccctcttgattaaaaaataaaaacaacttacccttgcgggcaattataatcaaaactttgggaaaaaaaaccagagcaatttttataaaaa

SEQ ID NO: 27221 - DNA, 358 bp, Glycine max
  Clone ID: TF_uC-gmrominsoy183f05b1
gcgaatgatatccagacgaggatatacaaatgagggggggcgtcattgagtaccaggggaaagcatccaagcacttaatgagtaccgctttcatctgggtaatacactcgggtctaagcaggaacaacaagagaaatggaaagcagaccatggcgacaaaaagaaaaccagcctcccctgagttaacacgcaagcagaggagaggagagcattggttgaagccaagcgcgcagaacaaattcgcaaggcaaaggaaagagctgctaaagaccgagcagctggaagctctacaaagaaggcctctggctgcttttgaaggctgatgccttaatacgttgttctgcttgtgtgcctgatg

SEQ ID NO: 27222 - DNA, 351 bp, Glycine max
  Clone ID: TF_LIB3108-040-QI-K1-C4
cccacgcgtccgcccacgcgtccgcagagactcaagaagttgccgaagtgaaaccaactgagggctctgtcaaccgagatgcagtgcttgcaagagttgcaactgagaagagattgtcactaatcaaagcatgggaagaaagtgaaaaatcaaaagctgaaaacaagtaagagtctacactctttggttcagaagctagaatcttcaattgaatcaccttaatcatggtgattaatcgacctaacatcaagctttatctaaaaatgctcaatctaacatcaagctttatctgaaaatttattggttggtttccttgtttatcttgtgctgatctttgatattttttgcaca

SEQ ID NO: 27223 - DNA, 1120 bp, Glycine max
  unsure (1)..(1120): unsure at all n locations
  Clone ID: TF_GmC302979_1
ctttgttgaagcagataagaacgaaattaactggtgcagaggagaagaataaagctgatctgggtggcagcagggatcagaaagttacacacagaaaaccccatccttcaaagataagaaaaaggctcagaattggtttcagagacaattttcaagaaccatgagtcatgattatgacgcagaaatggagcttgccacattttttgctgctgctgcattcgcaattttttcactagagggttcactaattccacagcaaaagaaaaagagggagacacctttgaccagaggcaaaagcaaagtggatgatacaaaacctccaatttctcagtttggtggcacatcaaggcagttctcagtggatttgaagaggcctgaaaaaaccatgacccctgcaccatcaatgaggaggagttcaacttttggtgaaaaggtgaagagtagcactgatggtaaaaaacctgagatccaagccccaaaaaggactacaacttttggtgatgagcactcggtgaacactggtgaaataaaacctgagaccccactaccaagagttgctccaccagttcatcagcaaatgcctttaaggccaccgccacctccattgccaccaccgccaccgccaccaatcaggcagacttcagcaagaccaggtaccaatggaacaaaagcagatgcctgggagagggaggagttggaaaagatcaaagaaaggtacgagaagttgttggaaacgatagattcatgggaaaagaggaagaaggcgaaagcaatacgcaagctaaataagcatcagcatagtgaaagtgaacggaaaagggcgaaagtgttgaagaaatatcaagataagatgagctatattagtcaaattgcagggggagcaagagctcaagcagaggaaagacgaaggagttaagtgctcaaagcaaaagagaaaaaaaatataattagaacaacgggcaaaattccagggccatgctcttgcttctaacaacaccaattatatatatgtacatattacataacatcactaattaaagtttgggtataacaaaaagaatatgtaattaattatctgttttacaattctgtgaaaaanaaaaaaaaaaaagagaaaaat

SEQ ID NO: 27224 - DNA, 258 bp, Glycine max
  Clone ID: TF_701100625H1
tagctgtagctccgcgctcgagaagaaagcggtggcggtgccacacctgttccggctgcggcagaggaaaccaaagctcttgttattgtggagaaggagaaggagaatgagaagataccagaacctgtaaaaaagaaaggcttaaggtgaatccctgataggaaaattgtcttggaggaattagagaaagagaaacgattgtctaatgtgaaggcttgggaagaaagtgaaaaatccaaagcagagattaaagcccaa

SEQ ID NO: 27225 - DNA, 2096 bp, Glycine max
  Clone ID: TF_GmC1419_1
attatgcttaagtcggtggtattactcattttacaaatcaaaattacccctataagttttttttttttttttggttgaatacctctataaggttttcgaagggtatatatacttttttgttaaattaaattttcatgtcacaagttttaaattgatttaactgataaaatacatatttaaccactgagttggaatcgattaacatgaattattcaaatttactagtgataacaagtttaagtataaccatcttacatattagtatttgaagatatattttattaggcagctcaaacactttccgtgtgatttgtaccaaaaacttaacattacttaatttgttgatcaagtaatgcaaaatcattacagtttaacggctggaggttttgagtttgagtgaaaaatattaggttaaattaacaattaaaactatagtcaaagatatcatttaattgtatgtattattatatactaatactaacataagtttcacttactaatttgattatgtatcatatactaatatgagcgatgatgttaattacatgtatgatggcacagtaatttcactatttatccgtttgattttcgcgacactttaaaatcaaagccactttgtgttgaagggccaactccaaaagaagcatcatcttgtcatcacgtgtccgacagcacaacttgtttatcggaacgttgctataaacgttgttgttttcagataaacacgtgactcactatctatctatcaatcgatatctccgagttcaaccgaaccaaactccgaagctatggcagagctccaaaccaaggttgaacctgttacggtcccggctccggctccggtggatcccgagccaccgctagctgaggctccgccgctcgagaagaaagcggtggcggtgccaccacctgttccggctgcggcagaggaaaccaaagctcttgttgttgtggagaaggagaatgagaagataccagaacctgtaaaaaagaacgcctcaggtggatcccttgatagagacattgctcttgcagaaatagagaaagagaaacgattgtctaatgtgaaggcttgggaagaaagtgaaaaatccaaagcagagaataaagcccaaaagcagctctctgctgttgctgcttgggaaaacagcaagaaagcagctcttgaagctcagctgagaaaaattgaggaacaactagagaaaaagaaagcagaatatggtgaaaaaatgaaaaacaaaatagccttagttcacaagcaagcagaggagaagagagcaatggttgaagccaagcgtggtgaagaaattctcaaggcagaggaaatagctgcaaaacaccgtgcaactggaacctctccaaagaaggcctttggatgcttttaaatttttattcctttttttgttgttgtgcttttgtgcctgatgtcatagcaataatgaaatttttgtctataatattttcatgtttgttttttaaatgttgtttatgtgtgtacgaaatggaaagggggacactatgaagtttgtgacatacagaacagcctctagatctttttgttaagatgaagtgttctatgctgtttattcatttgttttttccataacagaatcattctattcactgggaagaaagtgaaaaatccaaagcagagaataaagcccaaaagcagctctctgctgttgctgcttgggaaaacagcaagatagcagctcttgaagctcagctgagaaaaattgaggaacactggagaaaaagaaagcagaatatggtgaaaaaatgaaaaacaaatagtcttagttcacaagcagcgagaagagagcatgtttgttctttcatgttcaaattgccaaacttttgctttgattgaatcatgggttaccgtgaaaactcaaattatacaattacatgctagctagtagcttggatgctttttctatagtgccgactcgtttttttggagtatccatggtatcatgatgagagctggatccaataactttgttcagtaataggaattattttgcatagctgtgtaaacacctgtatgagaaatccttgatcaaaagtaatttattcattcgcccgttaatcat

SEQ ID NO: 27226 - DNA, 2288 bp, Glycine max
  unsure (1)..(2288): unsure at all n locations
  Clone ID: TF_GmC682_1
gatttaaatgcgaattgaatttgtagcatgaggggccactgtgatggcgtggcgagatgatagatagatacaatatctcccgtactgcagaggaacccaacttgaacactttcttgagcaagcaaacacctgtttctgctcttgttctggctgcatcaacattcattcataatctcactctccctttctctctcatgtgttatcgttatctctcattcacaatcacaactcaccactcataactacttcttccaagccaagctgcaaaattcaactttttccccttccacttctgcatgaactaccttccaacttagacagtcagagatctaatggagtacgagaggatagagaaagttcaggctggaataatttcccccagtaaactgaggatgaagttattaggacctctccatcataggaagaaagatggatccaacagtaactcatccagaacttccccttcaaggattgaggatgctgaatttgtgaatagcttacttggctcaaaaaatgacaaccttgatgatgaagttacatctccaagcttggatgttctgtcattaaagccgtcgagtgatgctgtgctggaccggagacaaaatggccagatttcctatgaaccaaaggagacaatgcctaaggaaaacagcgacacggggcgtgtaaagatgcagcattttcagaaggttgacacgcgaagttcaagcgcaattcatgcggtgagagcaatagaagatgaaaatcttgattatgacagcaatgctagctcgtccagttttgagtttgataaaggggagagaccagggaacaatcctgccactagaccctattcagacctattccttctaagtggaatgatgccgagaaatggataatgaataggcaaaatatacaggctaatcactcaaaaaagaatacttgtcataaccaagcaaatcgcatgccaacaaatatggggagggttgcaccagagtctggtaattatgatcacaaactcccaacaggcaaggccacagaaacaaagcgagtcgatttctgtcagcctacgtcacatatgggatttgagaaattctcttttgttccctccgatgctcattcggtttcaggtcaagcacacggaagaaatccagttgtggagtctcttccccaaagcaaagatctaaaagatgtcaatgaattgggtttatgttgctcaagaagtacagatgatcagtcagtgatgcctgggataagatctgttgccatgagagacatgggaactgaaatgacccctgtgcccagtcaagaaccttcgcggactgctactcctgttgggtctgcgacaccactacggagccctgtttcctcaatgccgtcgactcctaggacgggtgcacctgctccgacacctttggacaacacgaccaatgaggattcccagtttccagttgaaaatggcaaaaggcatttgtctgaagaagaaatgaagatcaagacaaggagagagattgcagcccttggggtgcagcttggtaagatgaatattgctgcatgggcaagcaaagatgagcaggaaaagaacaaatcttctccccgggacatgagtgtgcaagaacaggagagaattgaatttgaaaaacgtgcagctctgtgggaggaagctgagaaatctaaacatactgcaagatttaagcgagaggaaatcaaaattcaagcatgggaaagtcagcaaaaggcaaaattagaagcagaaatgagaagaattgaggccaaagttgagcaaatgagagcccagacacatgcaaaaatggtaaaaaagattgctatggcgaggcaaagatcggaagaaaaacgtgcagcagctgaagctagaaaaaatcgagaagcagaaagaactgtggctcaaacagaatacattcgccaaacaggacgattgccctcttccaattacatttgttgtggttggctgtgatatataccttaaacactgcttttagaagaaaatgcaccttactacaagattgctaatctttcttaccgtggatgatatgggtcatcaaaacttggcatatcatcttatacgttacttgaaaccttgtaattttcaaacacctgagtgctacattaaattgattgctgagtgatgtttacaagtcacaaaactgtctttttttttcaaaaaaaaaaggaaagaaatgtttgttgtgatgtacctggccttttttattttgctctaatgtaaattttcatgtgatcttgctttcagtttatcatatttttttgatactcctgttgngtctgcgacc

SEQ ID NO: 27227 - DNA, 1917 bp, Glycine max
  Clone ID: TF_GmC1419_2
cttgtaggtataaaatcaagttacattccaaaaaagaatcctcacttgaaaatagacaatctagcgaattagttctatgttgatacggtttgcatgacacaataacccaacaagtcaaaacccttcataagttcatatgcttcaagatcagatgaggcctatatttaagatgtggcttaccaaaaaaaaaatatttaagacttttgttatctgtaggccaatatgttaaggaaggaatatttccacaaatttaaaacgtcatttaattatttttgtttttttattgtgtgtgtctttatgttaagaaattattgttttctgttaacagagcccaaaagcagctctctgctgttgctgcttgggaaaacagcaagaaagcagctcttgaagctcagctgagaaaaattgaggtattatttgttgctcagttattggttgatacaatgacatagttttttctattattcatgatgcatgtttggcctagttctgaacattataatcaagataagaaagacaaaataatgtaagaatttatgttgtcctgtgttagatggaataatatacatgattctgttaacacaaaaaatatctagattttttatccaataaattcttttttcctcacccttgtcacattcttacaagacatgtggaacctttatccaattactctcttgcttttgtcaaaatggtatcaaatacctatggagtccctaattgagtccatttactaaaagaattatgcttttattaatgaaatgaacagctacagtctggaacgtactaaagttgatacttctttaataaatagattttgtccatatccatttaacaggtgagctatctctttctatcataagaatacaaaatagtgttattttaactccaattttgacagcagaagttaaacatggcttctcctcggagggacccccttttctccttcctttccgttcaaaaggataaggaacaaattctttaacacaacttttttagtttaattttgtcacagtcaatataaatatttttacattattaatcaattaaaatccattctaaatatcactcaagtaattattataaatattgctctagttattattacaaaagttatgatgataattgcatgctagtgtatgttgtttttattttttaatcaagagtgcactctaattaaatttatttatgatattcaaataatggaactcaacattgaataccacataaaaacatacaagcacttaaagagtattgcattcatctttttaatactctcgagtctaagcaggaacaactagagaaaaagaaagcagaatatggtgaaaaaatgaaaaacaaaatagccttagttcacaagcaagcagaggagaagagagcaatggttgaagccaagcgtggtgaagaaattctcaaggcagaggaaataaatgcaaaacaccgtgcaactggaacctctccaaagaaggcctttggatgcttttaaatttttattcctttttttgttgttgtgcttttgtgcctgatgtcatagcaataatgaaatttttgtctataatattttcatgtttgttttttaaatgttgtttatgtgtgtacgaaatggaaagggggacactatgaagtttgtgacatacagaacagcctctagatctttttgttaagatgaagtgttctatgctgtttattcatttgttttttccataacagaatcattctattcaccaagcaatagattttctctctcttcaaaaaaaaaaaaaaaaaaaaaaaaaaaaaaaaaaaaaaaaaaaaaaaaaaaaaaaaaaaaaaaaaaaaaaaaaaaaaaaaaaaaaaaaaaaaaaaaaaaaaaaggggggggccgttttaaaggatccaagtttacttacgcgtgcttgcaacgtaatagcttttttt

SEQ ID NO: 27228 - DNA, 884 bp, Glycine max
  Clone ID: TF_GmC129326_1
ataccaggtttctcaattcaactttccaacaagccaacggcaatgccagagcggcatgtgttctctgtttctcaattcaactttccaacaaggcaacggcaatggcagagctgcaatcgaagtctgaaactgcccctgctccggctccggttgtggctgaggtgccatcgaacgacgccgttgcaaagaaagcttctgaaacaggggaatccaaagctattgtttctgtatccgagaagacaccagttcctgcaaacaagcaaagctcaagaggatccattgatagagatatcgctctggctgaagtagagaaagagaaaaagttgtcctatgtgaaggcatgggaagaaagtgagaaggccaaagcagagaacagagctcaaaaacatctctcagctatcgctgcttgggaaaacagcaaaaaggcagctcttgaagctgagcttaaaaaattggaggaacaactggagaaaaagaaagcagaatatggtgaaaaaatgaagaacaaggtggccttagttcacaaggaagcaggggagaagagggcaatgattgaagccaagcgtggtgaagagattctgcagacagaggaaatggctgcaaaataccgagcaacaggaaccactccaaagaagactataggatgcttttgatttttttgcattttgggtctgatttccaaaataatttgtaattgcccattttgtccgtggtttctaatgttttgttctcaatgttttctatgtctaagaaatagtccaaataaaacaaaattttgtaaatgtcttttgttttgatcatctagcttgggcgaaatgttctatgcaaaggtggtttttcctaagagtactactctaatatcaactaattgagtttctctttat

SEQ ID NO: 27229 - DNA, 570 bp, Glycine max
  Clone ID: TF_GmC708611_1
tttacaataataagcattatattattaatgtacaaaacttttaatcagcacaaccaaccaaatgatcattcatgtctataaattaattctaatgcactaatcaatcactcaaaaacactccaattggtttctatataatatataatataataacatatacacctcatatcttctttttctttatacactgctagccctctttaatcctttaaattaaattcaaaaggaaaagggactcttatcacactatgtcatctattatgctcaaactttttcactctatgtttctctttttggttacttttctctacaaatgtggtttcaaaacataacattcattttatataatttaaaagaaagatcttttggtaggtgctcttccaactgctctcatgaggttggcaatctccagaaccctggctactttagttccccttttagcctctgccgatgcctttctctcctcatcttttctttgtgcttttgctacatcattttgcattttctccagtgctcttgctcttttctcctccagcttcctctcaactttcttcatccatgaagatgctt

SEQ ID NO: 27230 - DNA, 441 bp, Glycine max
  Clone ID: TF_5820122
aggcaaggaagtggaggacggagacacttcaagcggtgttagacaagagtatgcaatttctccactcaatctatttcttaccactaggacgggttcaaaggaatcagttgacagaggtttgaatcagagaaaagactggctttaataagagcatgggaagaaagtgagaagacaaaagcagagaacagggcatataaaaggcacaatgctgttgtattgtgggagaatagtaagaagcatctgcgaagcacatcttaaaaggattgaggaaaaattggacagaaacaaagccaagtgtgtagaaaaaatgcaaaataaagttgcagaaattcatcgaacagcagaagagaaaagggcaatgatagaagcctacaagggagaagaattcctagaaatagaggagaaagcagcaaagtttcgtacccgtggctattcacccaa

SEQ ID NO: 27231 - DNA, 1045 bp, Glycine max
  Clone ID: TF_GmC1744_1
gaggccacttgtacctaccacagtcacccactcagctaagcttttagaatttgagttaagttaccttccttcaaccataatacccctgccagctctgtcctgttcctcaatctctctacatatctatctatctttctatcatcacaggatccttaataagtcagaactttgtcacaactttttcccatcactttgtggaaagatattcattctaagggaaaaatgacagaggagcaatccaaaaaggtggctgagactgagagttttccctctaatcctgcacctgaacctgttgttgttccaaaggaggatgtggcagaggagaaatctgtaattccacaaccctctccctctcctgctgatgagtccaaagctcttgtcatagttgagaagactagtgaagttgctgaagagaaaccgattgaggggtctgtgaaccgagatgctgtgcttgcaagagttgcaaccgagaagaggctgtcactaatcaaagcatgggaagaaagtgaaaagtccaaagcagataacaagtctcacaaaaagctttcagccatttcagcatgggaaaacagcaagaaagctgcagcggaggcagaattgagaaagattgaagaacaactggagaagaaaaaagcagaatatggagagaaattgaaaaacaaaatagctacaatccaccgagaagctgaagaaaagagagcatttattgaggcccaaaaaggggaagaattcttgaaggcagaggagactgctgcaaagtacagggcaactggaacagccccaacgaaactctttggttgtttctaacaagcctgatcattaaaaaatgctgtactattattattattattttgtattttctttgatagttcatgtcagtacatcgtgtgtggtttggttgtcttttgctgagttgtagttcatgttcatttattatgtttgcatagtgatatcactgatatgttggtgtgaatataacaatttactttgtgtatacacaagaaattgaattattcaatttgggtattacgaaaaagaaagaatg

SEQ ID NO: 27232 - DNA, 455 bp, Glycine max
  Clone ID: TF_jC-gmXLIB3564P117ab02a1
ggaggagggcaatgacttcaagcgacaaggaactaatacccagattggataatttaatttctttatccacaaaggagttgggatataccccccaacatggcgggttttacccctaataaatgaacctgaacctaatctcccacctttaaaccaaaaacccccttggattggtgaaaggtaataacccaagattcctaataaaaattaaccctttttttttggttcccaaaatggttaaaaattaaaggcttaaaaaccacccaggggtttttttggaaccggtccaagtggtttattctttggaagttggttctttggcctaaaaaaaaccttccctttttttggcctaattattggttttttttttttaagttccctggggaatggaacaaatttggtttttaattttttttgaagttttggccttttttttttcaagttcttcttaattcttt

SEQ ID NO: 27233 - DNA, 529 bp, Glycine max
  Clone ID: TF_jC-gmst02400020g01a1
ggctcgagctactcataggaggccacttggacctaccacagacacccgctcagctaagctggtataaggtgagttaagctacctttcttgaaccataggattccaaccaactctggcctgttactcaggctctctacatatgctatctatatgtctatcatcacatgagtccttaataagctggaacttggtcacagctgggtcccatcactgtgaggagagatattcatcctgagggaaaaatgacagaggagcaatccaggaaggtggctgagactgaccagtagaccctctaatcctgcgcctgaacctgctgtatgtgcaaaggaggatgtggcagaggagaaatctgctattgacacacccctctccctcttctgctgatgagatcaacgctgttgtgatagctgccaagactagtgtagccgctgaaaagaaaccgattgaggggtctgcgcaccgagatgctgcgcttgcgagagatgcaaccgagtagaggctgtcactcatcaaagcatgggaagaaagt

SEQ ID NO: 27234 - DNA, 994 bp, Glycine max
  Clone ID: TF_GmC1351_1
atctcgtaattcgcctggaggtggaggacagaaatttttagtctcagccagcacaatttatctcttgcaatccaaaatgaaacaacatttgttcctcccccttcaacagctcggtctgtgtcaatgagagatatgggtaccgaaatgacccctattgctagccaggagccatcaagaacaggtaccccagtgagggcaacaacaccaatgcgcagccctaattcttcccggccttctactccccccagagcctcccctgcatctactttaactgatctacatagtgacaatctgaatctcaacatgaatgagttgtccgaaaaggagctacaaatgaaaacaaggcgagaaataatggttctcgggacacaactaggtaaaatgaacattgctgcctgggctagcaaagaagaggaggataaggatgcatccacttccctgaaaacaaaagcagaattacctaagagtgtcgttgaagcacgtgcagcagcatgggaggaggctgagaaggccaagtacatggccaggtttaggcgtgaggagatgaaaattcaagcatgggaaaatcaccagaaagcaaaaacagaagccaagatgagaaaaattgaggtagaagttgaaaggatacaaggtaaggcacaagataagctaacgaataaattagcagctgcaaggcataaggccgaggaaaagcgtgcagcagcagaagccaatagaaatcatcaagctgcaaaaactgaagagcaagcagagtatatacgaagaactggtcatgtcccttcctcatatttatcattttcttgctgcaattggtgctcttaaaaaaagccaatctttgtcaatgtttattttttgtttctataggtatgaaatgccttttgctgcttacacccaagcatgttaaatatgcctgttgcatttccctcctggtgtaaaatgttacattgttctgaagaataattgcaatttgaaagtgctttgctatttgttcagt

SEQ ID NO: 27235 - DNA, 208 bp, Glycine max
  unsure (1)..(208): unsure at all n locations
  Clone ID: TF_9565963
ttccagttgctctatactttacagcttattcctctaccttaaaaagatcttcccctttctttacctgaattattactgttgtttctgcancttccttataaattgcggcaattgtggttgttatcttgtctacaacgtggacctttttctgctgcagtgcttctgcgatctgttgcaagtcagcctgcacatcagctggcttggcttt

SEQ ID NO: 27236 - DNA, 613 bp, Glycine max
  Clone ID: TF_GmC239_2
atgggtcacaacatgttgctgagactactaggaaatgtggaaatggagaaggatcaacaagcccttgcaagaggactcatgaagatcatcaagctagaaagttgagtcctctagaaagccgagcaatggcttgggatgaggccgaacgtgccaaatatatggccaggttcaagcgtgaagaggtgaagattcaagcctgggaaaatcatcagataagaaaagctgaaatggaaatgaagaaaatggaggtgaaggctgagagaatgaaagcattggcacaagaaaggtttacaaataaactagcttcgactaagaggatagctgaagagaaacgagctaatgcacaagtgaagctgaatgacaaagctttgagggctactgaaagggttgagtatataagaaggacaggacatgtgccttcttctttctctttaagctttaagttgccttccatttgctggtagtagcaattttgcaaccaatatatgtaatatcttgtcgtgtgaaatataaaaccttcagtacaattggtaaaatttatcatgaagctgttgacatatataaggtaatgtttcattaaattacacttgggtgcatttcaaatgtaaattta

SEQ ID NO: 27237 - DNA, 441 bp, Glycine max
  Clone ID: TF_LIB3242-271-Q1-J1-H11
aactgaaccttttttattgtctgtcatgggagaagaggtgtctagcaaaaccgaaccagagctacactgtgtggactctgttcctgaagagcataattcctctgttcaggaaaaagaattggagaaacctgaacctccaaacgacaaggtcactcctccttctccagctgctgctcaagaggttgcagatcatgctagtaaaaaggacacagaggagtcacttgacaaagatgctatgcttgcaagagttgtaacagagaaaaggttggctttagttaaagcatgggaagaaagtgaaaagacaaatgcagagaacagggcatacaagagactctctgctgttggattttgggaggatagcaagaaagcatcagtagaggcacaactcaagaaaatcgaggaaaacttggaaaaaaagaaagccgaatatgttgagaaaat

SEQ ID NO: 27238 - DNA, 799 bp, Glycine max
  Clone ID: TF_GmC989_1
gaacctttgctattgtctgccatgggagaagaagtgtcctacaaaaccgaaccagagtcagagctacactctgttccccaagagcataattcctctgctcaggaaaaagaattggagaaacctgaacctccaaacgacaaggtcactcctccttctccagttgctgctcaagaggttgcagatcatgctagtaaaaaggatacagaggagtcagtcgacaaagatgctatgcttgcaaaagttttaacggagaaaagattggctttaatcaaagcatgggaagaaagtgaaaagacaaaagcagagaacagggcatacaagaagcactctgctgttggattgtgggaggatagcaagaaagcatccgtagaggcacaactcaagaaaattgaggaaagcatggaaaaaaagaaggccgaatatgttgaaaaaatgaagaataaaattgctgaaatccaccggttagcagaagagaaaaaagcaattgttgaggctcagaaaagggaagaatttatcgacctagaggagactgcttcaaagtttcgtagccgtggagatgtgccaaggaaattttttgcatgctttggtggctaagcttttacatgaatatcggggaccaaattctcgctggatttgttatatgttgttacatatacatttaaattttgcttggtgtgttgttttttcctatatgctatttgaatcaaatctcaacagttgatttgaagtgcacaaatttctgtataaataagtgaagaaattttgtctacatacttataattgttctatattgactatt

SEQ ID NO: 27239 - DNA, 1109 bp, Glycine max
  Clone ID: TF_GmC80032_1
aattcggctcgagggaccccatctctatcatgtgtgtggtctacactcacccctccattctcattcattaataacaacctcacaaaaacaaaagcacacacacacacctatgctcgctcgatcatcgaatgaaaaaaccaaccaaaaaccctttctttcactttggttgtctcttctacaccactttcccttcaccttccgttctccactcactactactaacataaattaaaaacacgccatgaacaacaacccaacaacaatcatcggttccactacccacggatcagaagaagaagatgaacacatcactgaaataagggaaatccacgcgttaaccccgccgccgccacgtggcagagcctgggagacagtgcatacccacaggtcaagctctctctccgtagcttctgaaggcggcgcctcttccagcgagaacttcagcatgagcagagagttcagcgctctggttctcgcagggtccagcatcgaccacgacaacagcaacaacaacaacagcaacagtcccatgaacgaaaacaacaatagtaacagcttgttggggaggatcagagaagaggacttgatggaagagacgaaccctttggcgatcgtgccggataaccaccctctggacccggttccgtcgtcgtcgtctcagggagtaaggggtggcggcgctgcacgtgaggagcacgtgtcggttcagcgggtgaagaaggaggaggttgatgccaagatatcggcgtggcagaacgctaaggttgcgaagattaacaacagattcaagagagaagacgctgtgatcaatgggtgggagagcgagcaggttcagaaagcttcctcctggatgaagaaagttgagaggaagctggaggagaaaagggcaagaccaatggagtaaatgctaaacgtcatagcaaaagctcatagaaaagcagaggagagaagggcatcggcaaaggccaaaaggggatccaaagtggcgagggtgttggagattgctagtctcatgagagcagaggaaagacctccggccaaaaaatcgttcttgtaataagctgttcaatatttcatatgttcagcttattgtacacatttctacacaa

SEQ ID NO: 27240 - DNA, 933 bp, Glycine max
  Clone ID: TF_GmC1419_3
cggggcggcgggggcgtccgcccacgcgtccgtacggctgcgagaagacgacagaaggggacagcacaacttgtttatcggagcggggctataaacgttggtggtttcagataaacacgtgactcactatctatctatcaatcgatatctccgagttcagccgaaccaaactccgaagctatggcagagctccaaaccaagggtgaacctgttacggtcccggctccggtggatcccgagccaccgctagctgaggctccgccgctcgagaagaaagcggtggcggtgccaccgcctgttccggctgcggcagaggaaaccaaagctcttgttattgtggagaaggagaaggagaatgagaagataccagaacctgtaaaaaagaacgcctcaggtggatcccttgatagagacattgctcttgcagaaatagagaaagagaaacgattgtctaatgtgaaggcttgggaagaaagtgaaaaagaaagcagaatatggtgaaaaaaatgaaaaacaaaatagccttagttcacaagcaagcagaggagaagagagcaatggttgaagccaagcgtggtgaagaaattctcaaggcagaggaaatagctgcaaaacaccgtgcaactggaacctctccaaagaaggcctttggatgcttttaaatttttattcctttttttgttgttgtgcttttgtgcctgatgtcatagcaataatgaaatttttgtctataatattttcatgtttgttttttaaatgttgtttatgtgtgtacgaaatggaaagggggacactatgaagtttgtgacatacagaacagcatagaacacttcatcttaacaaaaagatctagaggctgttctgtatgttaagatgaagtgttctatgctgtttattcatttgttttttccataacagaatcattctattcac

SEQ ID NO: 27241 - DNA, 430 bp, Glycine max
  Clone ID: TF_uC-gmroLIB3259008h06a1
gaataaaaccagaaacaattaaaaaattttggtttatttggaccaatttttggacatagaccaccaaccttgggaaccaaacaggaaaaaccccattccaaattggccattagaaattattttgggacttaaaaccaaaattttttaaaaatggaaagccttccaatattctttttggaaggggtccttgtgcttaggaatttggcacccttttcctttggctggagaatttttacaccacgctgggcttaaataatggccctttactcctatgcttcttagagaactaaggccactttgttcttcattttttcaccatatgctgctttctttttctccagtagatcctccaattttttaagctcagctacaagagctgcctttgtgctgatttcccaagcagcgatagctgagagatgttattgcggac

SEQ ID NO: 27242 - DNA, 1235 bp, Glycine max
  Clone ID: TF_GmC6783_1
ccacgcgtccgattgttactgtgccaacgcattgtgaggccacaagtacctaacacccagctaagcttttggaacttagagttaagcagttaccttcctccaactataatatctcaaccaatcaaaatcctttttctcaattctctctctctctctctctgactctctccacaataagtgttgattttttcctaaataagtgaaagtgtagttacacctttttttagtgttttaccacttttgagtgccacagagttctgagtttcataggagaaaaaaatgacagaagaacaaaccaaaacggctgagtcagaatcagtaacaccaccacctgctgctgctccttcacaggctcctccagctgctgaggctgaacatgttcctgaggctccaaaggatgtgactgaggagaaatctgtaattccagtgccttcttctgatgacaaacctgatgagtccaaggctcttgtcttagttgagaagactcaagaagttgccgaagtgaaaccaactgagggctctatcaaccgagatgcagtgcttgcaagagttgcaactgagaagagattgtcactaatcaaagcatgggaagaaagtgaaaaatcaaaagctgaaaacaaggctcacaaaaagctttcatccgtttctgcatgggaaaacagcaagaaagctgcagtggaggctgacctgaaaaagattgaagaagaactggagaagaaaaaggcagaagctgcagaaaagataaaaaacaaaattgctgcaatccacaaggaagctgaagaaagaagagcaataattgaggcaaagaaaggggaagatcttcttaaggcagaggaacaagctgcaaagtatagagcaactggaacagctccaaagaaactccttggttgtttctaatgcttcaaatctcaagcattgtggggaaagaaaaagttattttttattgtgtatctttggttattaaatatcattaatacaagtgtggttttagtttacatgttggagatttagcccatgttcatttattatgtgtgcaaacctgacacattggcgtgtatataccaactactttgtggataaagaaattaaattattcaatctgtgtattagttacttgtcgcttgaagtcattgacctacttcagcctctctgcactagttagttctttttcattatccgaagaattatgtaatgatataaaattctattgagttgtatttacatgtaagaataat

SEQ ID NO: 27243 - DNA, 172 bp, Glycine max
  Clone ID: TF_19271195
catccatggtcagaggttatatatgactatggagcagaggaggtattttagggaggagtatggaattgagacctggacttttattcagaagttacgagatgctgtttttatgcgagttggtttggctctctatgtgataaatcaggatggctgtatcaaggcggcactggag

SEQ ID NO: 27244 - DNA, 580 bp, Glycine max
  Clone ID: TF_LIB4167-010-Q1-N1-C2
agagaaaataaaccatttacttaacattcatttcttcgtgttcggaaccccgacttaacaagttcaaagttaaataatcaaattgcaagtagatatcgacctggttatgtacatgtactgctgaattacatgttcattgctactctacttatccttcaagcttctccaaatcgtctgcagccttgcgtaatgcatagagacacattttcttcaccccaagtttgtcttcctttgctttatggtttttgggaagagaacgaaattcctcagtcagacgaatacactcttgaatattttcaggagagacaaaatctagagcaaccttaatgcacgactttaagtttctaacttgatggggacacccggcaggtataaaaacagcctcaccaaggttttgtataaaagtccaaggttcaactcctgtaaaaggttcctcaaatgcataaatacaaagatggtgaaattctatcaaggccacaaattaaatatagataaagtactaaccaaattcttgcttgagcttacttttatgataagaagtcagataaaaaacttgatcatgaatggggtgaaaaaccta

SEQ ID NO: 27245 - DNA, 439 bp, Glycine max
  Clone ID: TF_jC-gmXLIB3563P024bc05d1
ttagtttttaactttgtatatattacattgggtcttttccacattttgaaataaaatacagatttgaagttttgctattatatgattctctaacgtaactattatacacatttaaatgattacctaggtatttgatcaaaactaccctgaatagcaacccataaaatattactcaaatacaactattgtacacaatccaccccccccccccccccttctggattcaatgaccaaactgaatgtggacgttcaagcacaagtaatctgcctccggttaaccatcttctcgtaattctcagaaaccattgcagtcaaaataggggctccatatacaatctctgcgccaacttttggggcaagtacaagtttttgaacctttttgatgggtgaacttgctgcataaagagatattttcccaaccttcaaaacttgaagcttt

SEQ ID NO: 27246 - DNA, 488 bp, Glycine max
  Clone ID: TF_uC-gmflminsoy058h11b1
tttggtccaaaaacatatattgcatatgggattaaagaagagcttggttgaggagactctgtaacaaagcttcattgtgatatgtcagatgcggtgaatattttgacccatacagctgaggtgatattaactgatgagcagcactttactatatcaaagttgaaagaagcacacagggcacaaaatgagagagaacagtgtgcccaagagagggttgctgaccacctggaggatcgaccttacaaagacaacaaagaacatatagaaaataaggaagttcttgaagccaaaagcatgaagaaacaacctattgaaattgatggaaacatctttccaaataatgtgcttgagaggtacacttctcctgctacagagaatgaatcaatggaaactggtagtgccctatgggatatctttcagagagaggattctgaaaagttagaaacatatcttaaaaaacactcaaaagaatttagacatacttactg

SEQ ID NO: 27247 - DNA, 1071 bp, Glycine max
  Clone ID: TF_GmC385_1
ttgctactgaggggccacaggaacagaaattgaatggaataccattattgcatggtccagaaacagagcgaaaaggctcacggagtatggttgaaggaatgaactttttccggagagtcaatagaacatcttgcatctcaactgaagctaaaaaagtttctagtcagagcatggacagcaatggggaatgtgatttcatttctgattctgattctggatctgctttacttctccttgggactgttcaaactgctgaattgtcagaacacgataatcctagaaatccctttaaaagctcaaaaagacataaaaataagtttactgagcatttgggtgcccagtgggatgtctttcgcagacaagatgttccaaagctcatcgaataccttgaaagacactatgatgaattttcttatacccatgactatcacaagaagatggttcatccaattctagatcagagcatttttctagacagtactcacaaaatgagactaaaggaggaatttaagattgaaccatggacttttcagcaacatgttggacaagctgtcgtcattcctgctggatgtccataccagatcaggaattctaagtctagtgttcatgcggtattggaatttgtgtcccctgaaaatgttaccgagggtatccagttgttcgatgaggtccgactattgcctgaagaccataaagcaaaagcagacatgctggaggttaagaaaatggcgcttcatagcatgaatacagcaattaaagaagtacgtcaacttacaagcaaaacatgattgcaccagctaaaatatacttacatgcctctgagcctctagagatctcatgtctcaacctgacttccatatcttcattcttgtatatagattaatgctcggacaaatttatatctagtaaggtacttattaaattgattaattttcgcctctattttcttttcttctgtgaagtttatgccctaccggaatttgaaataaatcttatggtctgtatatatatttctttagtttatttgaagtaaaatttgatatgaacttttgctagttttaaatgctatca

SEQ ID NO: 27248 - DNA, 648 bp, Glycine max
  unsure (1)..(648): unsure at all n locations
  Clone ID: TF_LIB4366-001-Q1-K1-C4
cattccttgtccaaaagtcaatgatgaatgtaaccatggttttcttgaactgagaagcatattgggtcaacattttgtctctgagttagtgtgtaaagcaaaagaactagtgcaagcatacaagcttcaaaatgtagttaagaccgcagacaacttctgttcatgtttgaagcttgatagaaacacagatgttagctatagtaatatgaggaaggctgcttctcgagaagatttgactgacaactatttatactgtcctaaagctgtagatcttcagtacaaggatttaaggcattttcagtggcattgggaaaagggggagcctgtcattgtcagcaatgtgcttgaatgtacatctggtttaagctgggaaccacttgtcatgtggcgtgcattacgtcatgtaactaataccaagcgtggccaacatttggctgagaaaacaattgattgcttagattggactgagggggaaattaatatccaccaattttttactggcntatacaaatggtcgtaaggattggcttgcttggccacagatattgaaattaaaagattggcctccttctaatttatttgaggaacaattgcctcgtcattgtggctgagttcatatcttccttacccttcaaggaaatnactgat

SEQ ID NO: 27249 - DNA, 908 bp, Glycine max
  Clone ID: TF_GmC713485_1
cccacgcgtccgtgtgcattcactaattgatgatgatgaccgtgtttattgtgacaactgcaatacatcaattgtcaatttccacagaagttgtcccaatcctaattgtcagtatgatctctgtctcacttgttgcatggaactaagaaatgaacttcattgtgaagaaattcctgctagtggaaatgaaagaacagatgatacaccacctgttactgcttggagagcagagctaaatggtgggattccttgccctccaaaagctagggggggttgcggtactactattctttctctgaggcgtctttttgaagctaattgggttcacaaattgattaagaacgtggaggaacttactgtcaaatatcaaccacctaatattgatctatctctaggatgttcaatgtgccatagttttgaggaagatgcagtacagaattctgtaaggaaggcagcttcgagagagaccagtcatggtaactttttgtactgcccagatgctatcaaaatggaagacacagaatttgagcattttcaaagacactggataagaggtgaacctgttatagttaggaatgtttttgaaaagggtagcggcctaagctggcatccaatggggatggggagggctcttttttctcttttgggccttcaccacctcatacctaccttcagccatcgctgatttcgtgctcgataatgaaggtaaccctcttgaaaatggtggcacatattatatcttgtcagacataacagcatttggtggaataagagcagccccaacgggaaatgaatgatgccctctcactgtggtgctatctcgcactgagctcgacaaaggcattggaacaatcatctcgtcctcatatcgaatacgttttatcgccgaatgccatgctttgagccta

SEQ ID NO: 27250 - DNA, 1139 bp, Glycine max
  Clone ID: TF_GmC139142_1
ggctcgaggaagctaaattactaggaaaatctgctcctcttgactttgttcatgacaaattcaagaggagcagattgaagctaaattactaggaaaatcttcttttgagattgagatacaccaaagtctttgtggcgatggtgaacgtgtctattgtgaccattgtgctacttcaattattgaccttcatagaagctgccccaactgttcctatgaactctgccttagttgttgccaagaaatacgtgatggaagcattacaccccgggctgagctgaagttcccatatgtaaataggggctatgattatatgcatggtggggaccctctacctgtgccttgtgatttagagacatcagaaggtcatattgagccgtctactgtgtggaatgctaagagtgatggaagcattagttgtgcgccaaaggagttggggggttgcggtagtgctgtattggagctgagacgcatcctcccagatgggtggatatctgacttggaagccaaagctcgcaatatgctgaaaatttgggaaattgagcacacaactcttcagcaaaaagaagcagtatcaagcttcacctttttgagaaaggaagctattagagaaggcataaatgacaataacatatactatccagagtcaagtaacactcaaaaagaagggctgctgcttttccaaaagcattgggctaatggtgaaccaattatagtccgtgatgtccttaaacagggaacaggtctgagctgggagccaatggtaatgtggcgagcattatgtgaaaatatggtttcagaaatcagttcaaaaatgtcagaagtgaaagccatcgattgcctagctaattgtgaggtttggtctcgctgtccctttggtgctgagtttgaacatttggtctaattagagtattatgtctctaaatttgtagtgttttcccttttccaaatccctcatctgttgtggattggctgtgatctctaatttttttaaggatgcaaaaagaatgctttagtaactacttttctgcccagtatcattataagaaagataactaacttttggtataaggcatgtcatcttgactacactactgtaatataccacatccatcgccaacatgccttattgtgctttagat

SEQ ID NO: 27251 - DNA, 261 bp, Glycine max
  Clone ID: TF_LIB3051-035-Q1-K1-F2
gtcagactggcagacgcacttcgctgcgtacctaatgaacatgaagcaaagcttcaagtggtggaggttgagaagatctccctttatgcatccagttcatccatcactgaacttcagaaacttgtacttgacccaacacttgtcgcccagatcggttcttgagatcctaatgagactgcagtgtggtcctagaattactcgacgatggttaacctgaggcatattacttgcgctcgaacttacacactccgtcattgaatc

SEQ ID NO: 27252 - DNA, 1423 bp, Glycine max
  Clone ID: TF_GmC484_2
ggctcgaggtttgcttatgtatttatcatgttcttcccatattaatatatgcaggttgatatttgtacctcattaccaattgtcaataataagtgctatgcatattcaaatgtcagatgtttacccaaactctgctacatactgtgcatttgtgtttaatattttaaagttctctctctcttccctgttatcttgtctagagtgaaataatggaattttgatttatttgaagaaaaggaaagaaagggggctatgagtaagtaacaaatagttaatttaccgagtttcaacaggtgtaccttttggttcatacaaatgaagtaaagctgaaggactggcagagaactaaaattgaaatgatgcaaaaagctaaagctaataaggaatttgaggcaaaagaatcacatggggatcctcaaatatcttcaagggggagttcacctgattcctcacttggtacaaaaagtagtggactggaaatagactcaaaccagaataagtcaattatggatcaagggtttgaaatttattctagtgctgaaggtaatacggccaattgtaaacttccattcaatcaaaatggagacgtctctgagaaaacacatcctggagttctttgggatgtttttcgtcggcaggatgttccaatattgactaaatatttgaaaatacattggaaggaatttgggaagtcagatgatcttggaaatgaatttgttgaatggcctctttatgatggagctatttttcttgacaaacaccataaaagaaagttgaaggaagaatttggagtggagccttggtcatttgaacagaatttgggggaagctatttttgttcctgctggttgccctttccaagcaaggaatgttcagtccaatgttcagttaggccttgatttcttatctccggaaagcgtgggtgatgctgtaagattggcagaggaaattcgctgtgtacctaatgaacatgaagcaaagcttcaagttttggaggttgggaagatctccctttatgcagcaagttcagccatcaaagaagttcaaaaacttgtacttgacccaaaacttggcgcccagatcggttatggagatcctaatttgactgcaatggtttccgagaattatgagaagatggttaagcggaggcagattacttgtgcttgaacttccacactcggtcattgaatccggaaagaggggggattgtgtacattagttgtatttgagcaatattttatgggttggtattttcagtgtagttttgatcaaatacctaggtaatcatttaaatgtgtataatagttacgttagagaatcatgtaatgaccaacttcaaatctgattttatttcaaaatgtggaaaagaaacaatgtaatatatacaaagctaaaaatttgtgtctgctgccctttaagttaag

SEQ ID NO: 27253 - DNA, 919 bp, Glycine max
  Clone ID: TF_GmC4885_8
tatcaatgaaggaattgaagcatttttttttttaataattttgctgttttaggtaaatgtgttgactcatattgctgaagtgaaactggattctgatcaacttactgtcattgagaagttgaagcaaaagcatctcgagcaagagaaaagggagctacttggtgatgatcaggatggagaagctaatgttgacatgcttaatataattcatcttctacaataaatgctttggacaggcaaagtagtgttgaagtcatggaacaagaaggtggattatgtgatgggaaagaagttgatcagtttcatcaaccgtctggtagtaatgaggttgccattgctaatgaggatggtatttcatatggatcagagctcatagaggttgacaaagtaaaagtaaatcaaggtgatttgttgtttggggggttgcttcagatggtgctctctgggatattttttggagacaggatgtccctaagttgcaggaatatctgaagaagaatttcagagagtttaggcatgtccattgctgtcgtttaaagcagggtaaattattaaaatgattcagttatctgtctgagtactccttatcaacctgagtcatttataacaaatattttcacctttaggttatgtcatagatccatgtcatagagattcgacaaagtttaacgttggctgtcgaaagcctaacacaaccctctccttttatccgggcttgggaccggctaagaatagcaaagctaccctaggcaggattcacctttaggttatatttttaaattttaatatttggagctttgcacccttataacattgacattctcccattcccttattttattctgataaaaatttcattaaatatgcatgtcataaaggattgggtgaaggatcaagctgctaataaatagttatttag

SEQ ID NO: 27254 - DNA, 404 bp, Glycine max
  Clone ID: TF_LIB3139-086-P1-N1-A7
gagaaggtttttcattttattcatgatcaagtttattatggggacggcttatcataaaagagttgaaccttggacttttatacaaaaccttggtgaggctgtttttatacctgccgggtgtccccatctagagcaaccttaatgcacgacctcgagccgcaccattctttcttctcctttcgaagcactgccaaataaaaatggagtggcctgcgtgtacggacgaatacgaaaagctcataattcggatgaacactcccagggttgtcattgacaattccgttttctcctcagctacgctagtcaaggttgacagcgccagaaggcatggtattctattggatgctgtagaagtgctagctgacctgaacctttcaattaagaaagcgtatatttctgctgat

SEQ ID NO: 27255 - DNA, 3251 bp, Glycine max
  Clone ID: TF_GmC484_1
gacaacacaactgtctccattcccgcgctaaccgacgcacaaagttgaagaaacagccgccgtaacctccatcttcgaacaaatctcttacttcaagtctaaattactgactttcctcgcctatcttctaccatattacaaataattgtaaactagggtattattccgttcgcatctcttccccagttctcaaacgcccgatcagctaacgtcgactacaatgccctcagaataccggacgatttgcgatacaagaggttcgacgggatgcctttgcggtgcacgtcgatgtcggtgacggacaagaccgtctgcgagaagcactacatccaggcaaagaagcgcgccccgaattccggtatgagagcaaatatccataaagccaagaggaagtcgcagtcactgtggctgaaatagtccgattatgtttatatggagagcaagggcgatgttttctatgttactctctcctccattggcctcactcagaagaagctctccaagaaccagttccgctacgagccggagcgcgacgcgccgcgaagaggctcgtccgcgagacgctcttcgaacctcaacgacgatgatgatgatgacgatgacgacgacgtggatggggatgcggatgctgatgtggcgctctatgaggaagagaattgggtctcctgtgactcgccgccggattcttcgcgcaagaggtcgcggaggagcttggaagctaatgctaccactgaatattcggacggaacctccgccggttcttccgacgaggacaccggcgggcagacttgtcaccagtgccggaggaatgaccgcgaccgagttacttggtgtcaacggtgtgataggaggggatattgtgatagctgtttatcaacatggtactcggacatttcattggatgaaattcagaggatatgtcctgcttgccggggtatatgtaattgcaagacttgtttgcgaagtgataattcaattaaggttcggatacgcgagatacctgttctagataagttacagtatctccatgtgctgctgtcgtctgtgctacctgtggtaaagcagatccactgtgaacagagttttgaagttgaacttgaaaagaagttgcgtggtgctgaaatagatcttccaaggataaaattgaactcagatgagcagatgtgctgcaatttctgtaggatacctattactgattatcatcgacgctgtccaagttgttcatatgatttgtgccttagttgctgtcgagatcttcgagaagcaactgcagatcacaataaagaaccccaaacagagcaagcaaaaacttctgatcgaaatatattaagtaaatttcctcattggagatccaatgacaatggaagtattccatgtccccctaaggagtgtggtggctgtggttattcttcactaaatttaagccggattttcaagatgaactgggttgcaaagttggtgaaaaatgtagaggaaatggttagtggctgcagaattagtaatgccgatggtccaccggaaaccgggctgaatgatctgaaactttgccaatattctcacagagaagccagtgatgataattatctttattgcccagcatccgacgatatcaaaactgatgggattgacaattttagaaagcattggaaaactggtgagcccattattgttaagcaagtatttgatgggtcatccatttcaagctgggatccaatggtcatatggagagggattctagagacaatagatgagaaagcgaaagatgaaaaccggatggttaaggccatagattgcttagatgggtctgagattgatattgagcttgctcagttcatgaaaggatactttgaagggcttattcttgaaaatggttggccacagttattgaaattgaaagattggccttcacctagtgcttctgaagaatttctgttgtaccaaagacctgagtttatcagcaaactacctttacttcagtatattcactccaagtggggccttctcaatgttgcagctaaattgcctcattactccttgcagaatgatgtaggacccaagatatatatatcttatgggattagtgatgaacttggtagaggtgattcagtgacaaatctccacttcaatatgcgtgacatggtgtaccttttggttcatacaaatgaagtaaagctgaaggactggcagagaactaaaattgaaatgatgcaaaaagctaaagctaataaggaatttgaggcaaaagaatcacatggggatcctcaaatatcttcaagggggagttcacctgattcctcacttggtacaaaaagtagtggactggaaatagactcaaaccagaataagtcaattatggatcaagggtttgaaatttattctagtgctgaaggtaatacggccaattgtaaacttccattcaatcaaaatggagacgtctctgagaaaacacatcctggagttctttgggatgtttttcgtcggcaggatgttccaatattgactaaatatttgaaaatacattggaaggaatttgggaagtcagatgatcttggaaatgaatttgttgaatggcctctttatgatggagctatttttcttgacaaacaccataaaagaaagttgaaggaagaatttggagtggagccttggtcatttgaacagaatttgggggaagctatttttgttcctgctggttgccctttccaagcaaggaatgttcagtccaatgttcagttaggccttgatttcttatctccggaaagcgtgggtgatgctgtaagattggcagaggaaattcgctgtgtacctaatgaacatgaagcaaagcttcaagttttggaggttgggaagatctccctttatgcagcaagttcagccatcaaagaagttcaaaaacttgtacttgacccaaaacttggcgcccagatcggttatggagatcctaatttgactgcaatggtttccgagaattatgagaagatggttaagcggaggcagattacttgtgcttgaacttccacactcggtcattgaatccggaaagaggggggattgtgtacattagttgtatttgagcaatattttatgggttggtattttcagtgtagttttgatcaaatacctaggtaatcatttaaatgtgtataatagttacgttagagaatcatgtaatgaccaacttcaaatctgattttatttcaaaatgtggaaaagaaacaatgtaatatatacaaagctaaaaatttgtgtct

SEQ ID NO: 27256 - DNA, 2726 bp, Glycine max
  Clone ID: TF_GmC484_3
gcgagtacgcgcttcgaacctcaacgatgatgatgatgatgatgatgatgatgttgtcgtggatgtggatggggatggggatggggatgcggcgctctatgaggaagagaattgggtctcctatgattccccgccggattcttcacgcaagaggtctcggaggagctcggaagctaatgctgattcggacggaacctccgccggttcttccgacgaggacaccggcgggcagacttgtcaccagtgccggaggaatgaccgcgaccgagttacttggtgtcaacggtgtgataggaggggatattgtgatagctgtttatcaacatggtactcggacatttcattggatgaaattcagaggatatgtcctgcttgccggggtatatgtaattgcaagacttgtttgcgaagtgataattcaattaaggttcggatacgcgagatacctgttctagataagttacagtatctccatgtgctgctgtcgtctgtgctacctgtggtaaagcagatccactgtgaacagagttttgaagttgaacttgaaaagaagttgcgtggtgctgaaatagatcttccaaggataaaattgaactcagatgagcagatgtgctgcaatttctgtaggatacctattactgattatcatcgacgctgtccaagttgttcatatgatttgtgccttagttgctgtcgagatcttcgagaagcaactgcagatcacaataaagaaccccaaacagagcaagcaaaaacttctgatcgaaatatattaagtaaatttcctcattggagatccaatgacaatggaagtattccatgtccccctaaggagtgtggtggctgtggttattcttcactaaatttaagccggattttcaagatgaactgggttgcaaagttggtgaaaaatgtagaggaaatggttagtggctgcagaattagtaatgccgatggtccaccggaaaccgggctgaatgatctgaaactttgccaatattctcacagagaagccagtgatgataattatctttattgcccagcatccgacgatatcaaaactgatgggattgacaattttagaaagcattggaaaactggtgagcccattattgttaagcaagtatttgatgggtcatccatttcaagctgggatccaatggtcatatggagagggattctagagacaatagatgagaaagcgaaagatgaaaaccggatggttaaggccatagattgcttagatgggtctgagattgatattgagcttgctcagttcatgaaaggatactttgaagggcttattcttgaaaatggttggccacagttattgaaattgaaagattggccttcacctagtgcttctgaagaatttctgttgtaccaaagacctgagtttatcagcaaactacctttacttcagtatattcactccaagtggggccttctcaatgttgcagctaaattgcctcattactccttgcagaatgatgtaggacccaagatatatatatcttatgggattagtgatgaacttggtagaggtgattcagtgacaaatctccacttcaatatgcgtgacatggtgtaccttttggttcatacaaatgaagtaaagctgaaggactggcagagaactaaaattgaaatgatgcaaaaagctaaagctaataaggaatttgaggcaaaagaatcacatggggatcctcaaatatcttcaagggggagttcacctgattcctcacttggtacaaaaagtagtggactggaaatagactcaaaccagaataagtcaattatggatcaagggtttgaaatttattctagtgctgaaggtaatacggccaattgtaaacttccattcaatcaaaatggagacgtctctgagaaaacacatcctggagttctttgggatgtttttcgtcggcaggatgttccaatattgactaaatatttgaaaatacattggaaggaatttgggaagtcagatgatcttggaaatgaatttgttgaatggcctctttatgatggagctatttttcttgacaaacaccataaaagaaagttgaaggaagaatttggagtggagccttggtcatttgaacagaatttgggggaagctatttttgttcctgctggttgccctttccaagcaaggaatgttcagtccaatgttcagttaggccttgatttcttatctccggaaagcgtgggtgatgctgtaagattggcagaggaaattcgctgtgtacctaatgaacatgaagcaaagcttcaagttttggaggttgggaagatctccctttatgcagcaagttcagccatcaaagaagttcaaaaacttgtacttgacccaaagtatgcaaatttcagacttgtcttggcaattgcattaacttggcgcccagatcggttatggagatcctaatttgactgcaatggtttccgagaattatgagaagatggttaagcggaggcagattacttgtgcttgaacttccacactcggtcattgaatccggaaagaggggggattgtgtacattagttgtatttgagcaatattttatgggttggtattttcagtgtagttttgatcaaatacctaggtaatcatttaaatgtgtataatagttacgttagagaatcatgtaatgaccaacttcaaatctgattttatttcaaaatgtggaaaagaaacaatgtaatatatacaaagcttggggg

SEQ ID NO: 27257 - DNA, 1206 bp, Glycine max
  Clone ID: TF_GmC4885_4
tcggctctagtccttctctacttttcaagaagcccattattcgcttcaagattctctagaccagctgtagatcctcagtacaaggatttaaggcattttcagtggcattgggaaaagggggagcctgtcattgtcagcaatgtgcttgaatgtacatctggtttaagctgggaaccgcttgtcatgtggcgtgcattacgtcatgtaactaataccaagcatggccaacatttggcggagaaaacaattgattgcttagattggactgaggtattggttaaatgcagggggaaattaatatccaccaactttttactggctatacaaatggtcgtagtgattggcttgcttggccacagatattgaaattaaaagattggcctccttctaatttatttgaggaacaattgcctcgtcattgtgctgagttcatatcttccttacccttcaaggaatatactgatcctcacaaaggttctcttaaccttgctgtgaagttgcctaatggttctctaaagccagacctggggccaaaaacatatattgcttatggatttcctcaggagcttggacgtggtgattcagtgactaagctccattgtgatatgtctgatgcagtaaatgcgttgactcatattgctgaagtgaaactggattctgatcaacttactgtcattgagaagttgaagcaaaagcatctcgagcaagagaaaagggagctacttggtgatgatcaaggatggagaaactaatgttgacatgcttaatataattcatcttctacaataaatgctttggacaggcaaactagtgttgaagtcatggaacaagaaggtggattatgtgatgggaaagaagttgatcagtttcatcaaccgtctggtagtaatgaggttgccattgctaatgaggatggtatttcatatggatcagagctcatagaggttgacaaagtaaaagtaaatcaaggtgatttgttgtttgggggggatgcttcagatggtgctctctgggatattttttggagacaggatgtccctaagttgcaggaatatctgaagaagaatttcagagagtttaggcatgtccattgctgtcgtttaaagcagggatgattgacttttggatgtataggtctttacgcctttatcttattttgcaatggctctgttagagaggaagaataaaagggaatggaagtttggg

SEQ ID NO: 27258 - DNA, 609 bp, Glycine max
  unsure (1)..(609): unsure at all n locations
  Clone ID: TF_GmC4885_7
ggttggcctggctggtccagtctaagttttataacactgcacacaagatcccttgggtcttgaatcacagacagtgcattgccccatttaccttgggctgaaattcaaccttttattaaaagaccgaagacagcacgttttgaaccggacgcgtgggcggacgcgtgggcagatggtgctctctgggatattttttggagacaggatgtccctaagttgcaggaatatctgaagaagaatttcagagagtttaggatgattgacttttggatgtataggtctttgcgcctttatcttattctgcaatgactctgtgagagaggaagaataaaagggaatggaagtttggaaaattttagactagaagaaagccaacttagagttgagctttttaagaacaaattctatctcaaaatcaattataagatgaacaagatttttaaaatttaaataaccaaatggtctagatctaaaaataagctctatttcacctagatatctagctttgatggttgccaccttagattttgggaaatttaattcatgtgccatangaaaaagaagaaaattattcatttgccaggttatttctaggtggtatgtttatct

SEQ ID NO: 27259 - DNA, 318 bp, Glycine max
  Clone ID: TF_jC-gmXLIB3563P053dh04a1
ctataaagcaggttattaacctcatccatgagcagaccttctatctgactatggagcattataacaagcttaaggaggatttaggaattcagccctggacttttgctcagaagcgtggatatgctgttgttaatgcatctgggtgtcctataccaaggcagaaatcggatgtcatgtattaaggttgctttgaattgtgtctcttccataaatgttggggagtgctttagtttgactgaggaacttcacccaatttcaatgaaccacaggtctactgatgactatttggaggtgaagaataagtcactatatgctgtg

SEQ ID NO: 27260 - DNA, 1279 bp, Glycine max
  Clone ID: TF_GmC19373_1
ccagaaatgctcaagttaaaagactgccccctcccgataatttgaagatctttggcccggccattgtgatgagtttattcgctccttgccatttcaagagtacagcgatcctcggactggaattctcaatcttgctgtgaagttgccagcccacgtcctgaaacctgacatgggtccaaaaacatatattgcatatgggattaaagaagagcttggtagaggagactctgtaacaaagcttcattgtgatatgtcagatgcggtgaatattttgacccatacagctgaggtgatattaactgatgagcagcactttactatatcaaagttgaaagaagcacacagggcacaaaatgagagagaacagtgtgcccaagagagggttgctgaccacctggaggatcgaccttacaaagacaacaaagaacatatagaaaataaggaagttcttgaagccaaaagcatgaagaaacaacctattgaaattgatggaaacatctttccaaataatgtgcttgagtgattgtacatccaattcatgaccgatgtttttatttgacatgggaacataataagaagctgaacaaggagcttggtgtagagccatggacttttgaacagaaacttggggaggcagtatttattcctgctggatgtccacatcaagtcaggaatctcaagtcatgcacaaaagttgctgtagactttgtgtccccagaaaatatccatgagtgcctgcgttttaactaaaaagttccgccagcttcccaagaaccacaaggctagagaagataagctggagataaagaagatgatagtttatgccgttgatcaagctgtcaaagacttaaaagatttactgaagtgttcttgattggcttgcagaaagctcattttgccgtggttgatgatacactagatttctgtgaatataaacagtgtccagatagaaaattgtgaagtgtgaatgtttattgtaggattagagtccggatagaaaattgtgaagtaggaatctttattggaagatcagaggcactcataattgagtgttttccattttggtattaacatagtgatttaattgttaatacttacattttagacaacagtttcagaaagttcggtaaacagataacggccacaagaattaatgaaaatattgtattcatggccaaagagataaaaaaaaaaaaaaaaacacgtgtattttttatattataacatttcagtatttagggaaaaaagactctgagttcagttagaaaggaagtaaagt

SEQ ID NO: 27261 - DNA, 1687 bp, Glycine max
  unsure (1)..(1687): unsure at all n locations
  Clone ID: TF_GmC2494_1
cggctcgaggctcatcatcaggtgaaggaatttctttaccagaacatatgcagtttaagacatgcacaaatgatgattatgaaaaaggaagaatttctgctatgcacctaatgaaagataagttttgctctatctatgaccaatctgatacacgttctgtatttgatgatttgaacctccccactccacaagccagggtaaatcaggaacatcagaaaaattacattgaacaatccaggttcaaaagcaggtgcatacattttgaggagttaccctactactctgggaagaatgtttctgatttactcttcccgcaggagcagttttctcaacactatttttctgtttgtgggaatggggttgacaacactgttttgcaagatgtgacagatacaggtggtgacttccctcttgatgaatcatatggacaagatcctgataatgatattggaggatatccaaacaccagtgaaagccatctgccttgtacttcaacagaagatactaaatttgtcaatggattgaattctttagacacaccatgttcagacatcaatgttgaaaaaatagagtctgttaaaaatgacacatcaagcaacaatttctgtcaaaatgatgatcatttggagactcaatatgggagtgctgtgtgggacatattccggaggcaggatgtacccaagctaacagagtacctaaagaaacaccacagagagtttcgccacataaataatcttccagtaaactctgtgattcatcccattcatgatcagatcctttatttaaatgagaagcataaaaagcaattaaagcaggagtttggtgttgaaccttggacatttgagcaacaccttggggatgctgttttcgtacctgctggatgcccacatcaagtgagaaatagaaagtcttgcatcaaagtggctctggacttcgtttcacctgagaatgttcaagaatgcattcgattgacagaagaatttcggttacttcccaaaggccatagatccaaggaagataaattggagataaagaagatggcactatatgctgcggatgttgcaataaccgaagccactaaactgatgagaggaaatgatatgtcagatgaagccaaggaagtcccccagcaacacatttttactaaatgactctcaacgaaaggcttctagtttatttactcttgatttacaaagagcatagcttgtattctgttctgttttgcactgtatccttggcaactccatggaagtttgaaatgaatgttggttgttgcactagcactacacaccagcgagatatagattaatgctaagtacttgtaacaacaatggaaaatactaggtagtcgctataatattggcataataaattgacatgcattttgactttcatgaatgagtgcatcatatcatttttatctcatcaaaaaaaaaaaaaaaaaaaaaaaaaaaaaaaaaaaaaaaaaaaaataaaaaaaaaaaaaaaaaaaaaaaaaaaaaaaaggagaaaaaaaaaaaaaaaaaggggcaaaaaaagngaaaggaaatgagaaaaaaattataaaagaggggaaaggaaaaaannnnnaaatggataaaaaattaaaaaagttgagaaatgataaatatttttgtcagctggaataataggggggtggttttaaaagaattccccttcccaccgt

SEQ ID NO: 27262 - DNA, 537 bp, Glycine max
  Clone ID: TF_jC-gmXLIB3563P073dg09a1
tggaaatggactcaaaccagaataagtcaatcatggatcaagggtttgaaatttattctagtgctgaaggtaatacggccaattgtaaacttccgttcacacaaaatggagatgtctttgagaaaacacatcctggagttctttgggatgtttttcgccggcaggatgttccaatattgactaaatatttgaaaaaggtccatttttgagattggaaacacagacccattggcacagttgaggaatccctgaaaccagaatcatatttggacaatggggtttagatgggcatgtgccaatgtgttcttatccaagaggattttgagtgcataagagatctagtgtttaagttgattcagggtctgaaaataggctgcagaaaaatctgtcaaggattttggttgtgaacagtgtttttctctttaaatctctgcgaagttgctggaaggtcacagatatatattggcagtggcaaatggcatccgatctaaattcggggttgtcccaggaaacgtctgtttttgggttgaaagcatg

SEQ ID NO: 27263 - DNA, 1109 bp, Glycine max
  Clone ID: TF_GmC1074_1
tacggctgcgagaagacgacagaagggcaagcaaaattgtgtacaagtcatggaaaatggaggtaacttatgtgatgggaaagaagttgatcagttttatcaaccctctggtggtattgaggttgtcgttgctaatgaggatggtctttcgtgcggatcagatctgaaagagattgacaaagtaaaaattatacaagaaagtgatttgtttaggggggatgcttcagaaggtgctctctgggatatttttcggagacaggatgtacctaaattgcaggaatatctgaagaagcacttcagagagtttaggcatattcattgctgtcctttaaagcaggttattcaccccatccatgaccagaccttctatctgactatggagcataagaagaagcttaaggaggagtatggaattgagccctggacttttactcagaagttaggagatgctgttttcattccagctggttgtcctcaccaagtcagaaatctgaagtcatgtattaaggttgctttggattttgtctctcctgaaaatgttggggagtgctttcgtttgacggaggagtttcgcacacttccaataaaccacaggtctactgaggacaaattggaggtgaagaagatgacaatatatgctatgcaagaagtgataacaaaattagagaaagcaaggtccaggcaaaccatagttccaaagtagatatatctttaacagatcaaagccaattgaaagtgtaaatttttttagtcaagcttttatacaggtgtgatgatgggttctgtatatcgtgactgtaagaacggttccatattttgttttcgccaacacctggatggttttttttttttggaaatcatatatgacttgaacggtgtacatataaatatataattgtcaccatttgatacttaggatctcataatctatacattcggaagctcaaaaaataactccaaaattgagattaatgaactcacgttgtttacgaattttgagcttctgaatagaggtgttgacaatcgaattaaaccaagcataatattgaaaattgttgaaaaatcaacgtttttggatataaaaaaaaccataattggtccattttttt

SEQ ID NO: 27264 - DNA, 421 bp, Glycine max
  Clone ID: TF_uC-gmroLIB3259142b10a1
ctggggccaggaaaacatttttttaattaattttgggggccggtatctggttaaaaaaactttttggaaacggtggtctaaatgggaggttttaacaaaaaaatttctttgggaaacccaaaagggaaaaccctcatttttgagggcctttgattttcaaataaagattcctacttaaaaattttttatccggactttaatcctacaataaactttcaaactttacatttttttatcgggaccctgtttattttcacagaaatttagggtttcttcacccccggcaaattgaaggggctttctgcaagccaatcaaaaacatttaagaaaatttttaaagtctttgacagtttgatcaacggcataaactattattttttttatctccagcttattttttttagccttggggttctgggga

SEQ ID NO: 27265 - DNA, 618 bp, Glycine max
  Clone ID: TF_GmC28720_5
gttggggagaacatgcagcctaatgtcatatcatcgaagtcatcttcagattctgagaattttgctgagtctcaacttgttcccaagatgccaaaacaagcttctgaggagcctaagaagaaaaagaaagtgaagctgccacttccattagttccagctgataacaatcaaaatgcctcacaacctgttaggaaatgcatgcattgtgagataaccaagacaccacagtggagggcagggccaatgggaccaaaaacactatgcaatgcttgggtgttcgttacaagaccggccggctcttcccgagtaccggcctgctgcaagtcactttttgcccatctggcactaaatctcataaaaaggcctggaaatgagatgcaggggcattgacaaatccggtttgcaatcaattcagctgcctcacccaactatccaaacactaacagcagcctgccctggatacatgtgattgaaggatgatcctttgtggaaatttctctttcattgctgccctttaagtcatgtcttatgttatttcttattgatatttcatttctttggttcattggtttttgtacagggtttgactgggggaataggagccataaatgatgatga

SEQ ID NO: 27266 - DNA, 606 bp, Glycine max
  unsure (1)..(606): unsure at all n locations
  Clone ID: TF_GmC138242_1
gaccccgcagtggcggaccgggcccatgggcccgaagactnnctgcaacgcttgtggcgtgaggtacaagtcgggccggctggtgcccgagtacaggcccgcggcaagcccaacatttgttctgactaagcactccaactcgcaccgcaaggtgnnngagctgcgaaggcagaaggaaatggtgcggtcccagcaacaccaccaccagcatcaacaacagtttctacaacaccacccacnnnnaccatcaccactatcaacatcaccagaacatgatgtttgatgtatccaacggtgacgattacttgantccaccaacccgtgggccccgatttcaggcagcttatctagtaggtgctagtgtaggacagctgcggtggagcctcgggtaattttaatttgtagcggagttattatataccttcattagagagttctccttgttcattatttgtttctttctttcttttccattcctgtttggggagggtttgtcgccccgtctcatggggtctctggttatgtcgtctggccgtttttgtctaggccatattttggtagactcgatcgagaggttaattaattactcaaaaattcaaaatttcc

SEQ ID NO: 27267 - DNA, 386 bp, Glycine max
  Clone ID: TF_LIB3242-054-Q1-J1-C5
ctgtccgttgttccgagcaaacaatggtatgtaccgaaccggatcccagaccgggctcggtccataccattccagctgttccaagaaagccgtgaaccggttagactagatagcccaacgctcgcgtctggtcctagatgtcggctttgtggtcttcggtgacggccaagacacagaagatttaggtcgaggccctaaacggaggggcccattctctgcgacggagcagtcactgccaggtgcattacacgccgcagtggataaccggcccactagggcccaatacactttggaacgctggaggagttcggctcaagtccggtcgactttttcgagagtgtagaccatcctgtggcccaactgtttgtgacgatcttcactgcaac

SEQ ID NO: 27268 - DNA, 363 bp, Glycine max
  Clone ID: TF_18848585
ctgaacccccgccgctcgtttaccccaagacgaggaccacaacaaaccacaccgtcaccaacctcgttctggtgtcacgaggttttgctgggatctgctccattccaatcacaacaacaacaacatcacgcaatctcaaggcaagtctagcatcacaggaagcaacaacaacaacgactctctcctcgctcgtcgttgcgctaactgcgacaccacttccactcccctctggaggaacggtcctcgtggcccaaaggtatatcaccatattcaatccagttatctctaattcatgagtaacttttgtaaaatgcttctaattgctaaacttggtgaaaatttcattaaaatcacactatgttc

SEQ ID NO: 27269 - DNA, 169 bp, Glycine max
  Clone ID: TF_15201384
tgccaatggggatgattgcctgctttgtgccacggacaataccccacagtggctgaacgcgcccatgggcccgaaaacgctctgcaactctcgtggtgggctcgtccagactggactgctggtgccacatgacacgaccgccgcaaggccaaccttagttctgacaaaa

SEQ ID NO: 27270 - DNA, 478 bp, Glycine max
  Clone ID: TF_GmC1320_6
gtactatttcggtgattcattcagttaatggtgttgggttgcttcattgataaataataaaattgtggtgttgcttgcagattgatcgagtgaataatattggaaatgatggatctgaatgtgaatgagaaaaagaaatgttgcgctgattgcaaaaccaccaagacaccactctggagaggaggaccagctggacccaaggtataggaagagaagggcttgttcgaggaagcgagaggagcagaggtggaagatgttgggggaagaggaacaggccgcggtgtgcttgatggccttgtcctctggttttgttttcgcttgattgcaaagcattccttaatttagtaatccacgacaatcctttttgatgtcgcatacctaaccttgtaaaggtcaagcctctgtttataacatggtgttcttctctggtctcttggttccctaattctctaagttcacggttattggtgcaaggatc

SEQ ID NO: 27271 - DNA, 1760 bp, Glycine max
  Clone ID: TF_GmC1320_1
tgagtgcaggtagagtgaaacaataggcgatccgcaacttacgttagctgctgaacggagcacgctccctctctgtgctaactcctaatctctctcgcacacacacagtagctattttggtgcatgcgagtgaggggctttgtaaattaatttgttctagtattggtacggtagctaatagtagtatttctgtgattggtgttgcagattgatcaagtgaatataatattggtaatgatggatctgaaggaatggtcatcatcttctgaggaattgaatgtgaacaggaaatgttgcgctgattgcaaaaccaccaagaccccactctggagaggaggaccagctggacccaagactctatgcaacgcttgtggaattaggtatcggaagagaagggcatgttggaggaagggagagttgaagaaacagaaacagaaacagaaacagaggtggaagatgctgggggaagaggaacaagcggcggtgtgtttgatggccctgtcctgtggttttgttttcgcttgagcattccttaatttagctcattcgaggttgtagctgctgactcattggatgaagaattcttgatcaaataactcgtcataattgaattcaaatgaagacaggctccatgattttttcattgttgcatgtacctagatttagaatacaaagcttagctaattgctggggtgaaaccttccacggtttcagtacaacttgtggaaacaattctaacgtcaggctgcttggttctagaatttatggtcttcagggaggacagagaaagaaatggacaagacctataactacaaatatagaaggcaaggggagcaccaaatccaaaagtatcaagcatgagattttgagtgaaaccattttagcaaatgctacagtaaatgtaaataaaacacagctagataaatcccaagaaattcagtattgtgacatacaacaagagattgctgagaataaagacttgtcgagctatactgttattgtttttgatatcgagaccacagggtttagcagagagaatgaaagaatcattgaaattgcacttcgagatcttcagggtggcgagaacagcacttttcagactcttgtaaaccctcaatgcaaagttcctaattcacatattcatggcattactactcatatggtcaaccaacctggtgttccaaggatggaggacctaattcccattttattgcaatacgttcgaagtcgtgagaagcctgggggagatgttatatttgtagctcataatgctcgctgttttgacgtgcccttcatcattaatgagttacgacgttattctgtagagattcctcctaattggttgtttttggacacccttcctttagcgcgggaactaatgaagtccggaggaacaacactttcttcaacatccctagctgcccttcgtgacctctacggaattaaagtggatggatcagctcacagggctatggtagatgtgaacgcattgtccttgattctttccaggttgacctctgatctgaagttgaccctatctgaccttgtcaaaaaatcattcacagaatcagatattatcaactctaagaataaaaagaagaactagactagttttctgactgtattttgcattgatgttgtgacaaaagaattattttgtaacgaaaatttgaactctaaatttttagttgaagtagaaaagaaacgggttgttctcaataaaatcttacaattatgtaatatgtaccaagttctgagct

SEQ ID NO: 27272 - DNA, 664 bp, Glycine max
  Clone ID: TF_GmC1320_3
attttggtgcatgcgagtgaggggctttgtaaattaatttgttctagtaatagtacggtagctaatagtagtatttctgtgattggtgttgcagattgatcaagtgaatataatattggtaatgatggatctgaaggaatggtcatcatcttctgaggaattgaatgtgaacaggaaatgttgcgctgattgcaaaaccaccaagaccccactctggagaggaggaccagctggacccaagactctatgcaacgcttgtggaattaggtatcggaagagaagggcatgttggaggaagggagagttgaagaaacagaaacagaaacagaaacagaggtggaagatgctgggggaagaggaacaagcggcggtgtgtttgatggccctgtcctgtggttttgttttcgcttgagcattccttaatttagctcattcgaggtaacctaagacaatcctttttgatgtcgtacgtatagtatagctaacccttttgggagttgtaaagctcaaaatgtgaaacgtagtgtagcctttgtttctttttaggcttttcccctttctttgtttatagaggatgatatgatattataggttcagttagttagtgatgtaagtatttcagattaatgggtgattattacaatatagtgttctctgttccttt

SEQ ID NO: 27273 - DNA, 2493 bp, Glycine max
  Clone ID: TF_GmC1115_1
gctgcgagaagacgacagaaggggaatacaacaagaggtcacatacacataccttcctctctctctttctgtctctctccattgcaccttcccttcttccccttcttcttcttttctgtcatttgtgagattccttcacttgttttatctattccattggattgtacagattcctagctaaaacacccagatgtcaatctctgtaattctatttgatttgtgggtgtttctgtgaaaaaaagaattttttttaaggactgtcaaacccaaaactttttttttgggtcttttggtttctgcttcttttatttttgcaaactggcttctgggtttgctgcagaataaagccttcaatacccactaatacacaaggcttcaaaaacaaactgtttatattttcagcaaagttccaatcttttttccttctttttgtcaataaattattttatttttgcccccttttttctgcaattttggttttcttcttcttccctttactagaggaaaagattgagtcatgggcaagcaagggccttgctatcactgtggagttacaagcacaccactttggcgtaatgggccacctgagaagccagtactatgcaatgcatgtggatctcgatggaggacaaagggaacacttgcaaattatacccctttgcacgcccgggcagaaaatattgattatgaggatcaaaaggtttccagggtaaagagcatatcattaaataagaacacagaagtgaaattggtcaaacgaaagcaaaactatgataatgctgcatctggagggtttgttcctgattatagtcaaggataccaaaaagttgtggatgaagatacaagcaatagatcaagctcagggtcagctgtctctaactcagagagctgtgctcaatttggtggccctgatgctagtgatttgacaggtcctgctcagtcagtggtctgggatgccatggtgccttccaaaaagaggacatgtgcaggtcgtccgaagccctcatctgttgagaagctcacaagagacctgtgcactattcttcatgaacaacagtcttatttttctgcatcttctgaagaggatcttctttttgaaagtgatacaccaatggtctctgttgagataggacatggaagcattctcatcaggcatcctagctctatagctcgtgatgaagagtctgaggctagctctctctcagttgataataaacaatgcctaatgaatgaagcatattcattttctagtaccattcctatgtacagtgatcgcagtggcatgaacttctcatctcacggagttgaaaagatcaaaaactcagctggccaaatcatgcaacaagagaagcttgaaagggacaagtctcagcttgaaaaactacaagttcatggaaatcatgattcaccattgtgctcaatagatttaaatgatgtagtcaactacgaggagtttatgagaaacttgacaaatgaacagcagcagcaattactgaagtatctcccagtggttgatactgctaaatttcctgatagccttagaaacatgttcaatagcttccaattcaaggagaacttaatctattttcagcaacttctcggggaaggagtctttaacatctctttgttgggggcaaaacctgaagaatggaagacattagaaaggcttgcattatctaatctgtcaaagtcgaaatgggtagaacactataattttcttaagaaatgtgaaaacaaatctggaaaatctattggtttgggttctactgctatggaatcaagtaatgttacaactggcaaaagaatgcgtgagcatgacagccgaaatcaaaatattccagaattgaagacaacgatgaggagccccaaaagggtgatcataaagcctcctagctgtgaggtcaaagaagttgtagaagaaggctctagcttcagtccaaaaagcttatttgctttaccccatggtgttggtggcttgcacatgctggattctttcaactttgttggtgagagttctgaggatctgcttttagaggtgccttctaacagttcttttccacaggctgagctcctgcacccatctttaagctatggtgctcgtcaggtcagcaccactagtagctcagtacactcacctgttactcatccttaactaatctttactaggttacttggatgggtatggacacaatattttgtcataatagggtccacatgttttgcatctgaaacaccaaagttcatgtacaagagatatgatgatgattgtgtttttgtttccttgcaaccttgagcttggattgccaaaggatggaagttgaatgggcttttttttttttttcttgtatagattggtaatagattgtaacatatagcatgaaattcggagtgatcatctccggagtttttgtatgcaattgtagtttatgttttgtgaatgattcacacccttttatttcccaataggtttaaatcataactctccaaactctt

SEQ ID NO: 27274 - DNA, 1270 bp, Glycine max
  Clone ID: TF_GmC5880_1
aattcggctcgagcttgaaaaaccaattttggctctctctatttctctttcttctctttcttctctttcatttcccctctcttgttggggcaaattactctctctctgtctgtctctctctccgcacgcagcgagtgttgagttgtgtgacatgtaacaccaaactcactcaaacctacctttgtttttctccttctttttcttctcagtttcattctcttgctcatggacatggatgtttgccgaaatatatcagtttcttcaagtgagtgtcagcaagagcttcccacccttgatgaccttttctgtcatcagaacacggaagtggattttggcatggaatggttatcagtgtttgtggaagactgtttctctagtaggccaagttgcctcttgccaccctctggtggtggtgttcaaaccacaagcactagcaccaagccttcttcaggcacaataatgcaaagaccccaacaaagtcatcactgtcctttgcagaattttgctgtgccagggaaggcaaggagcaaaaggaagaggctttcagccccaagaaccaacaaagaccctctaagcatatggtcacaccatttgaatcctcaaaatgagtccttgtgttctgaccctcctcttctcaaacaggcttattggttggctgacagtgagctcatcatgccaaagccaaaggatgaggagcaagaagaggtggtgaccaaagaggatgaaaaagtgattaatgaggtgagcaaggaaatagctttggggactctgagcttgatgagggtagcaatggtcaacaacaaccaatgccaagaaggtgcacacattgcttggctcagaggaccccacagtggagggcaggaccattaggtccaaagacactatgcaatgcatgtggagtgaggtacaagtctggtaggttgctaccagagtataggccagccaagagtcctacttttgtgagctacttgcactccaattcccacaagaaagtcatggagatgaggatgtctgtttactccatttctagtgagcagtagtagtggtggttgttagaggtatatttttatgtaaaaaaaattgcaaattttaggaaaaaaactatttggcaaacagagagatactgttaaggggagtgattagtgctatgattgattataggcacatttatttacatgacttgttatccactttcattttgttcttctcttccttcgagctatttgctttgcactttcacttagtaaagtactaaagagcctatttggat

SEQ ID NO: 27275 - DNA, 1424 bp, Glycine max
  Clone ID: TF_GmC332_1
atttctgtttacattcaagagagagaagaagaagcagagcattggcagcaaagacagagagcgcaaaatacgagagataaagttaaagaaattaaatagcaccaatttcgcccacgaaaccctctctcttgtctcgtcgcttcaaactcctctgcggtttccccttcttgttcttcttcacagaaatggaggtagcagtggccaaagcgttgaaaccgagtttaaggagagagttcatcgttcagcaaatgctctgcgaggatattttcagcctgaacgccaacaccgtcgccgccggcgaagatttctccgtcgacgacctatttgacttctctaacggctctcttcacaacgaacaacaacaagaatacgacgaagggaaacaaagtttatcggcttcagaggaccgcggagaagacgattgcaactccaattccaccggcgtttcctatgattcacttttctccaccgaattagccgttccggccggtgatttggaggacctagaatgggtttcacactttgtggacgattcactcccggagctgtcacttctatacccggttcgttcggaggaagcaaaccggtttgttgaaccggaaccctcagcgaagaaaacgccttgttttccgtgggaaatgaaaataacgaccaaggcgagaaccgtacggaataggaagcccagcaacagtcgcatgtggtcgttgggtagcccgttgctctcgctgccgtcttcgccgtcttcgccgtcgtcgtgttcttcttcggtgagggagccgccggctaagaagcagaagaagcaagcccaggtccagcccgttggggcccagattcagcggcggtgcagtcactgccaggtgcagaagacgccgcagtggaggaccggcccactgggcgccaaaaccctttgcaacgcgtgcggggttcggtacaagtcgggtcggttattttcggagtatagaccggcgtgtagtcccaccttctgcagcgatattcactccaatagtcaccgtaaagtgttagagattcggaagaggaaagaggtggctgaaccggataccggcttggcccagactcaaatggttcccacctgctgatattttattagagttagggaaaaatttgcagtttaggaatacaaacccggtttgaaccggttcggtttttgtatgatatttagttagttttagttagtgctaggcagtagtcacaagtcaggtaaccaaccataatattaggaattactagtaattaggcattgattgtttgtatttgtaaggttgtattgtattgtatcccatttacttagtgttgttgattttatttaatttaatacaatagtttaagttaactggaggaagcgcggtgtaattattttgattatttaaagtttgggcattaagttaaattaaaaaaaaaaaaga

SEQ ID NO: 27276 - DNA, 1148 bp, Glycine max
  unsure (1)..(1148): unsure at all n locations
  Clone ID: TF_GmC332_2
attnncggctcgnagnctcgaagccctgaaatcggctcgagaaaatttaaaaagatagaggaacagagatcctgataagatagaacgaaaagcggacgcgtgggcggacgcgtgggcggacgcgtgggcgcccacgaaagcctctctctcgttcgttgcttcaaacttcaaacttcaaactcctccgcggcttcccttctcgttcttcttcacagaaatggaggtagcagtggccaaagcgttgaaaccgagtttaaggagtgagttcatcgttcagaaaatgcactgcgaggatattttcagcctgaacgcgaacaccgtcgccgtcggcgaagatttctccgtggacgacctatttgacttctctaacggctctctgcacaacgaacaccaacaagagtgcgacgaagagaaacaaagtttatctgcttcgtcgcagtcacaggaccgtggagaagacgatagcaactccaattccaccggcgtttcctatgattcacttttctccaccgaattagccgttccggccggtgacttggaggacctagagtgggtttcacacttcgtggacgattcactcccggagctgtcacttttatacccggttcgttcggaggaagcgaaccggtttgttgaaccggaaccctcagtgaagaaaacgcctcgttttccgtgggaaatgaaaataacgagcaaggcgagaagcgtacggaataggaagcccaacactcgcgtgtggtcattgggcagcacgttgctctcgctcccgtcttcgccgcccacgaagaagcagaagaagcgggccgaggcccaggtccagcccgttggagtccagattcagcggcggtgcagtcactgccaggtgcagaagacgccgcagtggaggaccggcccactgggcgccaaaaccctttgcaacgcgtgcggggttcggtacaagtcaggtcggttattttcggagtatagaccggcgtgtagtcccaccttctgcagcgatattcactccaatagtcaccgtaaagtgttagagattcngaagaggaaagaggtggctgaaccggataccggcttggcccagactcaaatggttcccacctgctgatattttattagagtctagggaaaaatttgcagtttaggaatacaaa

SEQ ID NO: 27277 - DNA, 1356 bp, Glycine max
  Clone ID: TF_GmC246_1
gatgaagaattaaaataataacaaaggaatcttctctttctctctctctctctctctttgagttgagtttcgagttgcgccattttcacctgtcctctctctctctctctctctctgtcaccgtgttgcaagtatgaaggactgttggttttttgacaacaatttcaatggtctgtcggatgagagtcttgatgatgtgatggacatggagcttttggatttgccccttgactttgaggatgtggaaactgatgctgtggaagaacaagattgggatgctcagctcaaactccttgaagacccaccaccaccacttggagttttcccactacaacaatcctctgcattctgtggacaaactcggaatgagaatgcgaaactcggcagcaagagtttctctgcttctctagcgaagactgtcagacctgcatatggcaaaactattcctgtccagaaagtctctttaaaaggaaaagatttgctccaattccaaaccaacagcccagtttctgtttttgaaagcagtagtagttctccctcggttgagaactccaactttgagttacctgtcatcccaacaaagcgtccccgtaccaaacgccggcgtctctcaaacatcagcctgctttactctattccttttatccttacttcaccggcttttcaaaaatttcagaggatggatttctccaaatcagatatacaaacacagccttctggggaattattatgcaagttcaaaaagaagcagaggaaaaaggatattcccctgccgactaacaaaattgagatgaagagatcctcatcacaggagtcagttgcacccagaaaatgcttgcattgtgaggtgacaaagacgccgcaatggagagaaggaccaatgggtcctaagaccctatgcaatgcctgtggggttcgataccggtctggccggctctttgctgaataccggcctgcatctagccccacttttgtagcatcactgcactcaaactctcacaagaaggtcttagaaattaggaacagagccacccaggtgactgttagataaaccttcgttgaaattctctagattagtattgttttagattttattgagtgcttgtgctaaacaggattgtccttgattattgttctccttttttatggactaatcttaatcttatattgcttagctagttagcatcaaaggcggtatgtaaattgaagctcgagttttctgccctcatttcatgcctcaatgaatggatgccttttggggggttgactattttgttccaccgtgttgtcccgttgcctaattaagaggggaaacctcggaattttacttcaatccttctgtctgttcttcgcagc

SEQ ID NO: 27278 - DNA, 1344 bp, Glycine max
  Clone ID: TF_GmC38139_1
ccacaatttggtatgctagggtttcggctcgatgcagcgcttagtggcgcagaaaaataaaacctaatttaccaaattcagacacagagattctcattcctcaagatcttctcatttcttgtctcaaattaatcctcaaacttgcctctctctgtctctctacaatgtgctccatttcctcactccaccaaaaccatgtctaaggatattgctaacatgaaggactcttggtttttcgacaataactttaatggtctgtcagatgagatttttgatgatgtcatcaacttttttgatttcccgatggaagacgtgtatgcttatggtgtggaagaagactgggatgctcgaagacgatgccttgaatgccgtcgatttgatgtgggatgatcaattaaaatgccttgaagacccgcgtgttgatgtttatacagcatcatcagctgggttgtgtgccaaaactcaaaatgaaaagccccaataaaacagctggcaaaagctcctgggaaatgatatggaaagaataatcccgctgggaaagtcacttggaccagtatatggaaagaccattactcaccctaaagccacatccaatggaaggtttttgaaagtagcagttcgtcctcagttgagaattccaccttcgatcgacctgtcatcccagtgaagcgggctcgtagtaaacgtcagcgtccttcaaacttcagtcctctattttcaattcctctcatcgttaatttgccggctgtgcgaaaagatcaaaggacagcagcctctgactcagcttttggaacaaatgttgctgggaatctatcaaacaaagtaaaaaagcagaagaaaaaggatttgtccctgctatcagatgttgagatgacgagatcctcatcacctgagtcaggttcccccagaaaatgcatgcattgtgaggtgacaaaaaccccacaatggagagagggacctatgggtcccaaaacactgtgcaatgcttgtggtgttcgatacaggtctggccgcctctttcctgaaaaccggccggcagctagcccgacttttgtagcatcgctgcactcaaactgccacaagaaggttgtggagatgagaagcagagtcatccaggagcctgttaggtgttctatgttggcttcatcaaatctccatggaaattctgtaggataatttttatgtttgattacatttgaggaagaaacggtagtcttaaacaggatccttcttgtttgttgttttcattatagtctaatgttatattgcttagcattatttgtttaattaatgtaaattgattggtgaaataaaaaggtagtagcaggttagtgcttgcccagg

SEQ ID NO: 27279 - DNA, 1438 bp, Glycine max
  Clone ID: TF_GmC5694_2
gttaacttgagaagtagtacctaggctcactgccttaaccttatcacaatggataataactaactcctactaatacttgtcctttatttgttcttaaaggagaaacaactttccattcacgacacgctcacgccgtcaaaccaacttgagtgcgttccaggaaacacatcccctctccatttcattcacttctctgctctctctttctcccacgaattcccaaacttattttcacgcttccaatttccgtcacgtaaaccatgcatcaccgcctcccaaattagggtttccgacaggcgcgtggaggaatcgatggcgaccgtgaatccgcagcctctgcagttcgaggaccctgctatacccgtcgacgacgatgacgacgacgacgacgacgacggcggtgatgatgacgctatggatgacttggaggatgcgaatgttaattcagtgaacgttgctgctaatgccgcggcgagtgtaaatcatgaagcggtagtggctatgccttccagaactagcgagctcactctttctttcgagggcgaggtttatgtctttcccgctatcactcctcagaaggtgcaagctgtcttgctgcttttgggaggacgtgatgtgcaggcaagggtgcctgctgttgaacaaccatttgaccaaagtaacaggggcatgggtgatactccaaagcgttcaaacctttcacgaagaatagcatccttagtcaggttccgtgagaaacgcaaggaaagatgttttgacaagaaaattaggtattccgtcagaaaagaggtggcacagaggatgcatcggaagaatgggcagtttgcttccttgaaggaaagcccaggttcatctaattgggattctgcacagagttctggtcaagatggcacttctcattctgaatctgtgtgagttttaaagcttgaatttcctacatatatattattttatcctaatgttgtggttcttttgcgtgtatgatttaattgcatttctgtaaatattatccacattgctttttcatgccttctagacgtagatgtcaccattgtggtgtcagtgaaaataatactcctgcaatgcgtcgggggccagctggaccaaggactttatgtaatgcatgcggccttatgtgggctaacaagggcacacttagagatctcagtaagggcggaaggaatctttctgttgagcaaagtgatctggacactcctattgatgtcaagcctacttctgttcttgaaggggaattgccaggcatccatgatgagcaaggtagttctgaagatccttccaagtccaatgcagcggatggttctagtaatcatgctgtaaaccccagtgatgaggaattgcctgaaactgcagaacactttacgaacgttctgccactgggaattgggcattcttcaacaaatgagaatgaacaggaacc

SEQ ID NO: 27280 - DNA, 613 bp, Glycine max
  Clone ID: TF_GmC166087_1
tgacacacttgttatgattcccttccctagctagctacccaccctatccctcggtactgtccactgtccattatttttgcctaattattaacaacacatacagttctctctttttctctccatccatgactccttattctctgaacccaccaggcccttccatacaagctggtcaaacccaactcttcaatatttctcctaataatcaggattgccgtaccatttttaacatatttgatccaaggaaaaccaggatagaaattggagggttaagagataattatcatcaacaggatgacaagatgatggtattgcatgatggatcatcaagcaacagcaacaagtcgtccttcaataataatatttgatgagaccgagtatcagtccaaccactgacaaagcaatcaattcaagcccaagattccaaaatcatcaagggctcgaaagcagaaggtacagccaaagaagccctcgtaacaacaacggcagtagcacccctagggtttgttcggattgcaatacaagcactaccccactttggaggactggcccctagggtcccaagtctctttgcaatgcctgtggcattagacagaggaaagcaagaaaggca

SEQ ID NO: 27281 - DNA, 1475 bp, Glycine max
  Clone ID: TF_GmC1014_1
ccgccggcgtcccttccactccgcccccccgtcctcggcgtagacccttgtcctgggacccacctcccgattcccaagctccccaaccgcaaaagcgaagaggtaaggcggcacggactgttccatgacgaactcctcgacaatcctcccttgagcacaccacgattccccgtccggcaaaacgacatgaacggcgtcgtcgtgtttgggcgagcgacgctccacgtggcgggcagccatgacggcggataactgagaaggaacgttgaggagggcggagtattgtattctgagggcgggggtgtcttggcaggggaagacggagcgtgcatgaatggattggcactgggtgtagacgaaggggtgggaggattggggagggaggagccattggagtgcggaggaggaaggggaggtggagtaagagatgaggaaggaggagtggttcgagagagtgaaggtgatcctagggagcctttgatggggtgcgggtccagggggagaaagaagaggatagagatcatggggatttggggtggatgcaaggaggtcaatggggagggagcgagtggccagagagcaggggccgctgtggggggtttggagactgaagagtgccgaggcgtggatggtggatgagggcaagtccaggtagagacttagggctacgtgccttgtccttgcttgccttgagctcgagcagcgcgtgtgtctgcgttgcgagtgtcgtcgttttgattcccctctctctctctctctctccaccttcactcactctgcatgcttcttcttcttctctcactctgattccgcgaaatcaaatcaaaatcagcttctcggaatcgaatctcagatctcggagatcagaaatggtggatccaactggaaaaggatcggagattgaagtcgaggactcaaactcaaaccctaacgctccttcctcagggaacagtccaagcagcaacaatgagcagaagaaaacctgcgccgattgcggcaccaccaagactcctctctggaggggtggtcctgcaggacccaagtctctgtgcaacgcgtgcgggatcagaagcaggaagaagaagagagcgatcttgggaataaacaaggggagcaacgaggacggaaggaaaggaaagaggaccggcggcgctttggggaaggaggtgttgttgcaccgatcgcattggaagaagctcggagaggaagagaaagctgcggtcttgttgatgtcgctctcttatggatccgtttatgcctgaactgaaccagaattaatcaattattattattattctagttctagatgaacaattattgaggagaattctagattttgttttaggatgttccttcccctaaccctttcccgaagtgtatatgtttagttttttttttttctctgttgaatgagtgtgtgggttggatgtcaacaacagttgtaagaaatgaaattattcaagtccaattttggt

SEQ ID NO: 27282 - DNA, 1284 bp, Glycine max
  Clone ID: TF_GmC1014_2
gtattgtattctgagggcgggggtgtcttggcaggggaagacggagcgtgcatgaatggattggcactgggtgtagacgaaggggtgggaggattggggagggaggagccattggagtgcggaggaggaaggggaggtggagtaagagatgaggaaggaggagtggtcggagagagtgaaggagaggagggagcctttgatggggtcagggtcagagagagagaaggggataggggtctgggttttggggtggatgacggagtgaatggtgagggagcgggtgtccagatagaaggggccgctgtggggggtttggagactgaagagtgccgaggcgtggatggtggatgagggcaagtccaggtagagactcagggctacgtgccttgtccttgcttgccttgagtccgtgaacgagtgaggatcaactgctgccatcttcctaaactctctctctctctctctataaacttctctctaagaccctctttccttctcactctctctctctctcaccccactcactcactctcttactctctgcatgcttctgcttcttctctcgctctgattccgcggaatcaattcaaatcagcttctgggaatcgaatctcagatctcggagatcagaatggtggatccaactggaaaaggatcggaggttgaagttgaggactcaaactcaaaccctaacgctccttcctcagggaacagtccgagcagcaacaatgagcagaagaaaacctgcgccgattgcggcaccaccaagacccctctctggaggggtggtcctgcaggacctaagtctctgtgcaacgcgtgcgggatcagaagcaggaagaagaagagagcgatcctgggaatcaacaaggggagcaccgaggacggaaggaaaggaaagaggaccggcggaggcggcggaattggcggaattggcggtggcgcgttgggaggggaagtgttgttgccccgatcgcattggaagaagctaggagaggaagagaaggcggcggtgttgttgatgtcgctctcttatggatccgtttatgcctgaacccaattaatcaatccttttaattattattattattattatcattattctagttctagatgaacaattattgaggagaattctagattttgttttaggatgttccttcccctaaaccagtcccaaagggtatatgtttagttttttttttctctgttgaatgagtgtgtgggttggatgtcacccccagttgtaagaaaatgagaaattattcaagtccaattttggtt

SEQ ID NO: 27283 - DNA, 2084 bp, Glycine max
  Clone ID: TF_GmC5231_1
gggattcggcacgtggcccgcatccctgcttcctggtgacctcctcctttctccctgatctgtgcctccccccctccccctgccgtagccggctggtcgtttttcctcctcgtcattgatcgtgccgcttggtgttttcctctcttgtgccttgttggggacttcccagctgctgctcttgacccgtcgtctagccgcgttcctggaggcatgggatttcctgggtttttggtctcctctgtgatggatttcctctgcgatctgtcctgttccgggcgctccgacctggcccttcctctcccccgtgggcccgtttgcaccgattcacctgaacccatgccttcccgcttctccggtcccaggcattcttctgcgtcctggggggcacatggtgcgggtccaattctccttacatagccgactggtggttattcgtgcacattatttaatttgccaattgtagatatcctcatttgtgccatttagtggagtttcaagctgaagctcttgaccgattgacaagtgatgacatattctaagagacgagccagtggcatagctttatgagcttgggaagttgggtgcacaagcatggaaatgagtatttcgcccaaaaggaccggttctccattgaggagtttttatggcgtcacaatgactacatcttctctcccagggcctagcttcctgggcccgctgctgctcccccagctctttgcatccctccccccctgggtcgtgctcaggctatcatctttgcacctcgccattggccgcgccgcgatccttctgggatcttgtataatgaagccgaatgctacaaactgaaatgatgcttgcgctgtgacatggcccaactttaccgatgtatacccttttgcaccgattgaccaagacttgacggttgctgcatctcgagccgaatcggctcgagggatgctggtttgagaacttgggtggaccaaatgggaaatgtacatggtcgtgttgatggagctaaagctttattgattggatctcacatggtacatgcataggctaaaatcaaaagatctctcaatatgccacaatatgatcctactgggatcttgtataatgaagccgaatgctacaaactgaaatgatgcttgcgctgtgacatggcccaactttaccgatgtatacccttttgcaccgattgaccaaaactaaaggttatcaggaaatgttcaacaatttgagtgaactgttgctggacaaattctccttacatagccgactggtggttattcgtgcacattatttaatttgccaattgtagatatcctcatttgtgccatttagtggagtttcaagctgaagctcttgaccgattgacaagtgatgatcctggaggaaaggtatttcaagtttatatgttgtgcattaaaatgaaagaatgcacgtcagaaggaaaaaaaaaactagatttattttattctattattcttatgggaaacaagatcaaattaattaggacccaaacctaagtttactgcatcttagactactaggaaaataatttataattttctgcaaatccttgtggattgtttaagcaagaatatgatttaattattcttactaatgtatgtaatgttagtacaatatatgtaaaaataggattctacagaaatgcttctttcattcttttgtgcgtgtgggcccctaacgacggcggtggatataacttccctgccttgaatcgtataccacaagcattgcacagagtatttcgcccaaaaggaccggttctccattgaggagtttttatggcgtcacaatgactacatcttctctcccagatcctagcatccttgtgaccacatcttttctcccagatcttagcatccctcccactctgtgtcgaattcagaaaatcaattttgcacttggacaatgatcgagccgctatgttttttgttttcaagatcttagtttgagacttctcagcagctaaatttgactcgtcgtctagccgcgttaatagagacatatgattagcttggttatttgacacatcagtgaatgatttcctctccgttttatccttttcaggttgttcc

SEQ ID NO: 27284 - DNA, 870 bp, Glycine max
  Clone ID: TF_GmC5231_2
catattctaagagacgagccagtggcaaggctttatgagcttgggaagttgggtggaccaaatgggaaatgtacatggtcgtgttgatggagctaaagctttattgattggatctcacatggtacatgcataggctaaaatcaaaagatctctcaatatgccacaatatgatcctactgggatcttgtataatgaagccgaatgctacaaactgaaatgatgcttgcgctgtgacatggcccaactttaccgatgtatacccttttgcaccgattgaccaaaactaaaggttatcagcatatctggtattaggaaatgttcaacaatttgagtgaactgttgctggacaaattctccttacatagccgactggtggttattcgtgcacattatttaatttgccaattgtagatatcctcatttgtgccatttagtggagtttcaagctgaagctcttgaccgattgacaagtgatgatcctggaggaaaggtctatactctggatataacttccctgccttgaatcgtataccacaagcattgcacagagtatttcgcccaaaaggaccggttctccattgaggagtttttatggcgtcacaatgactacatcttctctcccagatcctagcatccttgtgaccacatcttttctcccagatcttagcatccctcccactctgtgtcgaattcagaaaatcaattttgcacttggacaatgatcgagccgctatgttttttgttttcaagatcttagtttgagacttctcagcagctaaatttgactcgtcgtctagccgcgttaatagagacatatgattagcttggttatttgacacatcagtgaatgatttcctctccgttttatcc

SEQ ID NO: 27285 - DNA, 622 bp, Glycine max
  Clone ID: TF_GmC588513_1
attcggctcgagctttcttcttcccacttcccatttcaaaccttctataattacaatgcatatttctctctcgctttaagctcggggacacccaagaggagattgatcgatcgaattaatcgggcaagggaaatgatgcatcattgttgtggaagctcccaggggcacgtgatgggcacgtgcacatgcggcatgtatcacagcgaaaccagcgcttatggctcgatgctgttttccgtgcccaacaacagcgaatatgacatgtattcgtccttcacgccctctccttcctccgtggactgcacgctctccctcggaacaccctccacgcgtttaacccaagacgacgaccatgacaacgacaacaaacgacacccccaccaacgtcgttctggagtcgccaatttttgctgggacctgctccattccaaacacaacaacaacaacacgcaatctcaaagcaagtctagtagcagaggaagcagcagcaacaacaacaacaacaacgaccctctcctcgctcgtcgttgcgccaactgcgacaccacttccacacccttatggaggaacggtcctcgtggtcctaagtcactatgcaatgcttgcgggatcagattcaaga

SEQ ID NO: 27286 - DNA, 869 bp, Glycine max
  unsure (1)..(869): unsure at all n locations
  Clone ID: TF_GmC225547_1
cccgaattcccgggtcgacccacgcgtccgcttgttctctcactccctctcaactctcttctctctctctctctctgctgctgcaactcaaagtacacaaaacgtgaaaagctgggatggaaaccattggttctgtggatgacctcttggatttttcatcagacataggcgaggaagatgattacgatgacaaacctaggaaagcctgtccttcacttaactcaaaatgcgccggcccatcgttgtttaacccattggtccaggagtttgcagaagaggagcttgaatggctatccaacaaagatgcatttccttctgttgaaacgtttgtcgacctatcatctattcaacccggcacaaccaagaaccaaaaatcagccccagtacttgagtgtagcacaggcagtagcaacagtaataacagcactaacagtatttccctcctaaacagctgtgatcacctgaaggtcccagtccgtgcacggagcaagagtcgcagtaggcatcgccctggccttgctgagaattctagtcagcaagtctggtggagacagccaagtaatggaacttccaaagcagatgaagggatgaaaatctcatccatcggtagaaaatgtcagcactgtggagctgaaaaaactccacaatggcgggcaggtccctctggtccaaaaacactntgtaatgcatgtggngttaggttcaagtctgggcggcttgtgcctgaataccgtnnctgcagtagcccaacttttcatagtgatttgcattctaattccacnagaagaagtagagatgaggaggcagaacaaatgggaatggataaatgcaagtagtagtgagcagtatttttagcattcagcatgcta

SEQ ID NO: 27287 - DNA, 1154 bp, Glycine max
  Clone ID: TF_GmC5880_2
acggctgcgagaagacgacagaagggggagttggaataccaattttggcgctctctctgtatttctcttccttctctttcatttcccctctcttgttggttcaaaattatactctctctaagttttaaccttatgaatatggatatgtgccaaaatgtatcagtttccggtgagtgccaacaagtgcaggtttttgccccttcttgctcaagcagccttgatgacctcttctctgctcagaacacggaagtggatgttgagttggagtggctttcagagtttgttgaagactgtttttcaagccctccaagctgtgtcttggtacctattggtgtcaagactacaagcacaagcaccaacctttcttcaggcacattgaagagaccccaacaacaaaatgagtcacctttgcaaaactttgctgtgccagggaaagcaaggagcaagagaaagagaaagaggctttcagcccctagaacaacaaaacacaccctaagcacatggtcgcaacatttcagcacacagaatgatggggtgagttctgaccctcctcttttgaaacaagcttattggttggctgatagtgaactcattgtgcctaagaagaaggatgttgagcaagaagaggaggaaggggttgttgtggttgtgaagaaggagaaattgggggattattgtgatgatgatgagggtgatgaaattaacaataataatagtaataatgatgataatgtgcagcacccaattccaagaaggtgcacacattgtctagctcagaggaccccacagtggagggcaggaccattgggtccaaagacactatgcaatgcatgtggggtgaggtacaagtctggaaggttgttgccagagtataggccagccaagagccctacttttgtaagctatttgcattccaattcacacaagaaagtcatggagatgagaatgggtgttggtgttgctgttctttctacagacaagaagtagtgaaaatcatgtgttactaaggttttaaatatcggtcgcagtcgcatgcgatttgttgacatcatggaaaatcacagataaatgtgactgatgcgatctcgactgcgatcatcaacaattaaaaaatattgatgttgtgatccaaatctaagtcgtgggcctttttt

SEQ ID NO: 27288 - DNA, 574 bp, Glycine max
  Clone ID: TF_jC-gmXLIB3563P070ae11d1
gagtataatagccatgagtaaaaatggtgaaattaaaaaacaaaatttcttccttgtatattacaagctataatctgcacttgtattagtacttttgaaataaatgaaaagtatatatcatggttttaaattgtaagcaagaaaaacctttacattgtagacaattacgggaaagtgcgactgatgtggtcatgatgcgatagcagagtgtcaaaatagcctgagttgtaatcacaattatggttgcggactgcaatttaaaaaccatggtatatagtaacacatgaactttcactacttgttgttgtctgtagaaaaaacaccaacaacacccattctcatctccatgactttcttgtgtgaattggaatgcaaatagcttacaaaagtagggctcttggctggcctatactctggcaacaaccttccagacttgaacctcaccccacatgcattgcatagtgtctttggacccaatggtcctgccctccactgtggggtcctctgagccagacaatgtgtgcaccttcttggaattgggtgctgcacattatcatcattattactattatta

SEQ ID NO: 27289 - DNA, 694 bp, Glycine max
  unsure (1)..(694): unsure at all n locations
  Clone ID: TF_GmC103141_1
ggctcgaggttctagatcgcgagcggccgcccttttttttttttttttacacacatttataatttcatcaaattttcataaaaagtaaaattgttcttcaatattaagtctcctaagtcctaattaataataacattatagtaataagtaatgtctaacaactaacattaacacctaccacaaccaacgacggttaaaattaaaaggaaaaaaaatgtacacactaactccgggccccactgaaacaggtccatttggtccaacctcttctctaactatgactcttttttttttctaacctgaaaaaaaaattcaaaaaccgggaagcgacggtggcgaagcggtgtcgggctcaggcacgtcctccttcttccgccgcatctcgaggacctttcggtggtggttggagtgcaactcgctggagaaagtagggctacaggcgggtctatattcgggtaataaccgacccgacttgtagcggaccccacacgcgttgcacagagtcttagccccgagcggtccgggggcgccactgcggcgttttctgaacgccacagtggctgcaccgtcgcgccgcgccgccgtccgaagcggtccgcttcttccccctggagttntttattttctttgccataagctttttttggaaagaaggcaatcttgttcttcaaaagattttcccaagccttcccac

SEQ ID NO: 27290 - DNA, 237 bp, Glycine max
  Clone ID: TF_700678225H1
gctagctattctttggcaaagcagcaatggctttagtaggtgaacaaaagcattcactcatggtgaagaaaggtccatgttcgcattgtggagttactcatactccactttggcatgatggaccaactgagaaaccagtgttgtgtagcgattgtggatcacaatacaagttaaaaggaaatttagacaattattttcccaagaatcccgttgttcagtcattccacaataagttta

SEQ ID NO: 27291 - DNA, 1467 bp, Glycine max
  unsure (1)..(1467): unsure at all n locations
  Clone ID: TF_GmC767_1
gtccggnattcccgggtcgacccacgcgtccggagagatttagataacacaacaccaatgcgggaactcaaacgcctgtttcgcctaaccaaaggaagctccactgcggtttccgtttcctctctgccttcaccactctcttttttttctcaacaggaacaaagaaaaatggaagttgcggcagcgaaagccctgaaaccaagccttcggacagagttcattttccctcaagcaatttacgacgagattttgtgttttaacgccaacaacgttgttgccggcgaagatttctccgtggacgacctactcgacttctccaacggcgaatttcaagtcgggaaagatttcgatgactacgaggaagacgaagacgaagaaaaaggcagcacctccggttccttgcagtcgcaggacagaaccgaagacgacagcaactctaattccaccgccggaggcggcggagactccgttttcgccggcgagttgtcagttccggcggatgacgtggcagacttggaatgggtttctcactttgtggacgattctctcccggagttatctctattgtacccagtccgttgttccgagcaaacaagggtatgtaccgaaccggaacccagaccgggctcggtccaaaccattccagcagttccaagaaagccgagaaccggaaagactagaaagcccaacgctcgtgtctggtcctcgatgtcgtctttgtgttcttcggtgacggccaagaaacagaagaaaaaggtcgaggcccaaaacggtggggcccagtctctgcgacggtgcagccactgccaggtgcaaaaaacgccacagtggagaaccggcccactagggcccaaaacactttgcaacgcttgtggagttcggttcaagtccggtcgactttttccagagtatagaccagcctgtagcccaactttttctgacgatattcactccaacagccatcgtaaagtgttggagatgagacgaaaaaaggagatagttgaatcggaccggattcaattgatcccaagttgttaatttttgttagactgaatttagatgcagttcattaagtatttctagtagagtagtattgtttttttccgttagaattaaagtttgacctcattaatatgcatataaaagtttgcataattgagataaaattataattctaacaaggctatctaaggatttatgtttttagattccaataggttatagatcagaaataggtcaacgaatcggtctgagctggtttggtatttgttccatagttagtgatttaaattagtgctagtcaggtaaggaagaactaagtgataacggacattaggagagcattgatagtttgtatcccattttcctagcgcagttgatttaattaatgagatgtagttaagttgaggaaaaaaaactaaattatttatgaggacatctttctatatatattcaagttgggttgat

SEQ ID NO: 27292 - DNA, 558 bp, Glycine max
  Clone ID: TF_LIB4390-045-R1-K2-C5
ctgacagtgagctcatcatgccaaagccaaaggatgaggagcaagaagaggtggtgaccaaagaggatgaaaaagtgattaatgtgatgagcaaggaaagctttggggactctgagcttgaggagggtagcaatggtcaacaaccaatgccaacaaggaggtgcagccattgcttggctcagaggaccccgcagtggagggtaggaccattaggtccaaagacactatgcaatgcatgtggagtgaggtacaagtctggtaggttgctaccagagtataggccagccaagagtcctacttttgttagctacttgcactccaattcccacaagaaagtcatggagatgaggatggctgttttctccaccatttctagtgagcagtagtagtggttgttacttattagaggtatatttctatgtaaaaaaaaaaaatcaaacttcaaattttaggaacaaaaaactatttggcaaacagagagatactgttaaggggagagtgcttaatgctatgattgattataggcacatttatttatatgacttattatccagtttc

SEQ ID NO: 27293 - DNA, 542 bp, Glycine max
  unsure (1)..(542): unsure at all n locations
  Clone ID: TF_GmC241333_1
aaaaataaagggtaaaaggacttgcattacatatcaaagtctcctaatgggttacaaaagctaacacataccgcactcaatacaagggaaaaaaatgtacactaactcgggtcccattgaaccgggtctaaagtctgcgctacctttctctaatctgagtaatcaatcactacagcacctagtttttttttttcttttcttttcttatgtaataaaaagaatcagaaactgggaacaacatgagcaggggcaaaaccagtctcatccacagaaactgtctccttcttttgccgcatctcgagcactttacgatgatggttcgagtgtaattcacttgaaaatgttgggctacaagcaggcctgtattcgggtaaaagccggcccgacttgaagcggaccccacacgcgttgcatagtgtttttgggcctagcggcccagttctccactgaggggttttctgcacgccgcaatgactgcaccttcgcggcgccagggtacgtgggcggacgctttggttcatttttttggnatttggctcgga

SEQ ID NO: 27294 - DNA, 1230 bp, Glycine max
  Clone ID: TF_GmC161373_1
ggaaaaccacaactttgtcacactttgtgtctccaactccctatactttctcgcttcaccctccccggtaacgttttcgcttcagcccacaacgagccatggaagcacaagagtttttccagaacaccttctgtccccaattcccctcagacagcaacatcactccctccaacgccaacccctccgccgccaccaccgaccacttcctcgtagaagacttcttcgacttctccaacgacgacgacgccaccttcgactccctccccaccgacgtcgactcccccaccgttacccctgtcgacaccaccaccaactccaatttccccgcctccgcagacgcccatttccccggtgacctctccgtcccgtatgatgatcttgcggaattggaatggctgtcgaaatttgcggacgaatcgttttcgagcgaggatttgcagaagctgcagctgataacgggtgtgagagcgcaaaacgatgctgcatcgtctgaaacgcgtgacccaaacccggttatgttcaacccgcaagtgtcggttcggggcaaggctcggagcaagcggacacgtggacccccatgcaactggacctctcgcctcgttgtgctctccccgaacacgaagtcgtcgtcgtcttctcactccggcgcggaaggcggcagcgaggggcggaagtgcctgcattgcgcaacggacaagaccccacagtggcggactgggcccatgggcccaaaaacgctctgcaacgcgtgcggcgtgaggtacaagtctgggcggctggtgccagagtacaggcccgccgcgagcccaacgtttgttctgacgaagcactcgaattcgcaccgcaaggtgctggagctgcggcggcagaaggaaatggtgaaggtccagcaccagcagcatcagtttctccaattgcagcatcagcagaacatgatgttcgatgtcccatcatccaacggtgaggatttcctcatccatcagcacgtgggcccaaatttcacgcacctcatctagagtaggaaacttccgctacttaatttgtagttagctcagttatttcttctcttctcttttcttttcttgcctaattttgttaggaatttgtttaatttctttttcagtttatgctatatgtagactggtctcatgtttctttcttcaagtcattttgaccgacttgaaaacccacaaactctaaattttcctaatgcattattcttttcttttc

SEQ ID NO: 27295 - DNA, 1493 bp, Glycine max
  Clone ID: TF_GmC5042_1
gagtggctctcccagttcgtgaacgacgaggcgacgtcgtttcacaacatcccaccacccgcatccattggatcccacacgacgccgtttctttccaacaataacaggaacgataataataacgaatatcccaaatcatcatcatcttcaccggtgttggcgggaaaatcgagagcaagaagggaagggtcggtgaccggcgacggcgtgcggcgctgcagccactgtgcgacggataagaccccgcagtggcgcacgggaccgttggggccgaagacgctctgcaacgcgtgcggcgtgcggttcaagtcggaaacaaacacaactctctctatcaacaaaaccaaccaacacaagaaagaaagaaaaacaatggacttgtacggttccttttccaccccttcagattgcttacatattgatgattttctagatttctccaacatcaccaccgacacccaccaccaccttcctcctccgcaaaactctccattaatctcccacgacgacgccaatctcttcttcaatttcccttccgttccgaccgacgaagcggcggagctggagtggctctcccagttcgtggacgacgacgcgacgtcgtttcacagcttcccagcaaccgcatcgattggatcccactcgacgtcgtttctctccaacaataacaacagaaacgataataacgaatatcccaaatcttcattatcttcaaacattccatgttcttcagcggtggcgggaaaatcgagagcgaggagggaagggtcggttaccggcgacggcggcgtgcggcggtgcagccactgtgcctcggagaagacgccgcagtggcgcgcgggaccgctgggaccgaagacgctgtgcaacgcgtgcggggttcggttcaagtcgggtcggctcgtacccgaataccgacccgcggcgagccccacgttcgtgctgactcagcattcgaactcgcaccgcaaggtcatggagctccgtcgccagaaggagctgctccgccaccaacaacaacaacaattacaacaagagcaatgccaccgtcacactcacaaccaccacgatttcaaagtttgctgacgtgtcctttgtcggtgcttccttcttttataattaatgatgactaatgtcttcagaatattatcagtaaataaaaaaatgatttttttttccatttttactagtttcataaggagaaatgctggtaatctacatcacaatgtttttgccttaaaaaagaaatatcacgaagttttgtaaatctaatttgttatttaatgaattttactcgtaattttttaaaaaatgagtgccataaacggtgaagcagagatagcgctatttgtttcttggctgtttatttatgctctctctctgatctcaaattgagtgaagggttgatttttttttttttcttttttatgtcgaggagaagagaagtgaccttcgtgggaaagggaaaaaaattgccttactgtacggtttta

SEQ ID NO: 27296 - DNA, 570 bp, Glycine max
  Clone ID: TF_LIB4392-031-R1-N1-G6
aaaacaaaaaaggctaagcaaaaaaacattagactaaaaggaaaacaacaaacaagaagggcccggttaaaaaccaccggtgcttcccaaaattttttttttttaaaaattaccccacaaaattcccagggggagggggggaagccaacaaaaaaccccaaacaggccccgggaagactttgtttctaatccccacaacctttttggggcagttggggggcagggatgctacaaaaggggggctagctgccggccggaattaaaaaaaaagggggccggacctgtatcaaacaccacaagcattgcacagggtttggggacccaaaggcccctctctccatgggggggttttgggcaccccacaaggcaggcattttggggggggacccgacccgggggaagaggaccccgccatcccaacatcggataggggggacaaacccttttcccccgggttttttacttgggggggaagatccccaacaacatttgtcccaaaatctgagtcaaaggcggcggccctttgatcttttcccacggccgggaaattaacgagggggggaattgaaa

SEQ ID NO: 27297 - DNA, 1546 bp, Glycine max
  Clone ID: TF_GmC1783_1
cttcactcccacctgcctcgccttctacgcctcccagacactatacgagcattctcttactcttaattctccccactgcccttctcttcctccttactccctctcactcaaacggtgtttggtttagatgtttattttgagttacgtttcctctatgttcgcgttatcttaccttctttcgatcaatccctgctatacttttcccttctattagcgttttcttaccttccccacgtactgtaatgcgcggctacccccaccatatcccctccttccaacacacccacggttccgcctccggcaccagctcccatcacctgaagaacacgaccgatccgtctcgcgccgcacaccctctacagatcccataccatccacacacccgccgccaactccgatccgcacatcaattccagttcccacaccatcgaagagcacggcgccgtctccaaccaccacatccattacagttcccacaccatcgaagtggacggcggcgccactgtcgaagaggtttccgccgttccgccccttgaaatctctatcaacgattctagccagctcacgctctcgtttcgcggccaagtctatgtcttcgacgctgttacacctgataaggttcaagcagtgttgttgctgttgggaggaaatgaactaacttcgggttcgcaatgtgcggagctatcatctcaaaatcagactggtgaggaggaatatcctgcaaaatgtagtctaccacagcgagcagcgtcattgaataggtttcgtcagatacggtaaagaagggttgctcataagaaagttagatatagtgtacgtcaagaagttgcactcaggatgcatcgtaataagggtcaatttacttcatcaaagaatcaggatggaactaatagttggggttcagatcaagagtcagggcaggatgctgttcaatctgaaaccttgtgcacacattgtggaataagttcaaaatccactccaatgatgcgtagggggccatctggtccaaggtcactttgcaatgcttgtgggcttttttgggcaaataggggcactttgagggatctttctaagagaaaccaggaacactctcttgcaccacctgagcaggttgatgagggcagtaataataatgactttgactgtcggagtggcatccctgcacaacataacaatcttgttaatgataacaaagctttggtatctgatcgttgagttttccactcacaggaaatgcaagtccttgactgtgacattcgcaggtttttagtaattccattcagtttgacctatagaatgtacagtatatagcaaagctctcgtcaatacaagagaggtctatttctatactctctgatcagttgcattaaactgtttatctatgactgtacaaactggaatttggaatgacttgatcgaatacaagagatctattgctttactctcggacagttgcattaactgttttatctatgaatgtataaactggaatttgaaacgaacttgatcctcaaaaagtggtcggtggttttagtttagtctagtg

SEQ ID NO: 27298 - DNA, 1510 bp, Glycine max
  Clone ID: TF_GmC41398_1
tcttcttcttcttcactattttttcagttatcgtgacctcctccctacccttttccgctccctcgctccctcttcatacattttacccgttactctctctctctccatcttcattctcttcttcttcttcactattttctcagttatcgtgaccttatcccaacccttttctgttgcgaaggtgcttctgggctgttgtcagatcaatccacaaccctcaattgttggtgttttggctcttcctgtatcatggatggtattcatgggggtgattctcggatacacataactgatggacagcatcctatacacgtgccatatgtgcaagaacacgagcatcatggactccaccatataagcaatgggaatgggatagatgatgatcataatgatggtggtgatactaactgtggtggaagtgagagtatggaaggtgaagtcccctccaaccatggaaatctccctgacaatcatgctgtaatgatggatcaagggggtgattctggggatcagcttacgttgtcttttcagggccaggtttatgtctttgactccgtgtcaccagaaaaggttcaagctgtactactgttactgggaggccgcgaaatacctccaactatgcctgccatgccagtatctcctaaccataataaccggggatatactggtactccgcaaaaattcagtgtccctcagagattagcttcattgattaggtttcgtgaaaagcggaaggaacgaaattatgacaaaaaaattcgctatactgttcgtaaagaagtagcattaaggatgcaaagaaataaaggtcagtttacatcttccaagtccaataatgatgaatctgcatcaaatgccacaaattgggggatggatgaaaactggacagcagacaatagtggatcccagcagcaagatattgtttgtaggcactgtggcatcagtgagaagagtacaccaatgatgcgacgcgggcctgaagggccaaggaccctctgcaatgcttgtggtcttatgtgggcaaataagggaatcctgagggacctatcaagggcggcacccttatctgggactatcaagaatgagaataaaagtttagaggccaaccagatagtccatagagttgcaggagaagctgatgattcatcatgatgacctttatattttggtgagaatggagagcgattccccgaaataatggtgatgggagagtttgcccctagataagaaattgcagaagggggggctttttctactaagtttttagtgaaaatgtttaaatgagcattctgtattttgttttgaatatatgaagaaagtcattattcccttgtgacagctagttctttttggggaattttatttattttgggtatgctgaacagcttcaagccttcgatgcacttcctgatgttgtattacgttgtatttaaaaaaaatggtctcttttataattttcgtgccctctttcccttcactttcatcctctatacatggatgttttgtgttt

SEQ ID NO: 27299 - DNA, 1480 bp, Glycine max
  unsure (1)..(1480): unsure at all n locations
  Clone ID: TF_GmC1271_1
gccccgccccagaggcacgttgagattcaccacgccttcccttcccgcgcttacgatctgccccttcctgccctctctttcttcttctcttcctcctcccggcccttttgtattatcaactgtagacaaaagggtctcctcttgctgcagctgctctgtttcactcttcgcctgtcttgcgtgtgtctctgtctcctagtctgtgatgcctgtgtatcgttacgtgttgtcgtcgcctatgcctatagatcttaatgaagatcacacccaccacgtcttcagtacaagccatcaagcctcttcttcgtcttcttctctatctttttctattctcttcaacccggatcatcaaggtcaaggaggatcttgttgccactgggaatcaaagcacttacaaagtgatgaagaggcccagaagattgttccttctagtgaatcatgggagcatccagtatctgaaaaggatgaaaacagaagtgatctcaagctgagagtttggaagaaagaagataagtgtgaaaattttcaatttgaagaataattcaactaagtggatgcctttaaagatgagaatgatgcggaggatgatggtgtcagattaaacgggttttgatacagaaggcatgatctctaactctaagcagatcaagaatgaagagaaaaacccaccactgacacctctaggaactgatgatagtaataactacaattcttctgcaaaccacagcaatatcactgttagggtttgttctgattgccacaccactaagacccctctctggagaagtggaccaaaaggtccaaagacactttgcaatgcttgtggaattcgacaaaggaaggcaaggcgtgccattgccgtggctgcaacggcaaacggaatgaatccggtggaggctgagaaatctcaagtaaagaaaggaaacaaattgcatagcaaagggatgaagtccaaaactaagggtgcaccacatatgaaaaagaagcgcaaacttggagcgaagtatagaaagaggtttggtgcttttgaggatttgacagtgagattgagtaagaacttggctctccaaaaagtcttccctccggatgagaaggaggctgcaatcttgctcatggctttatcttatggccttcttcatggctttcccacagatcgttacgtcaattacttagatttatgagatatattggtggtaaaaccataattattgtatgagaccaatgcttaattagtgttgtgctagatttagtgaagttaattagtatgaaaaactgataatagggacaataaagttatgaggagggtggttttatcaattgtatgttgcatctgaacaagaagacaaacacaaaatactagtgtcttattgttcatgatgatgagtatcctataatctcgataaatatttaataaaattccaagagattttatgttaaaaaggggggggggggcgannnnngagaggggganntgggatta

SEQ ID NO: 27300 - DNA, 2568 bp, Glycine max
  Clone ID: TF_GmC356_2
ggtccggaattaccgctcgaccacgcgtccgctctgatgcaacacacactcttctcccactcttctccttcttctcttagggttccgcgactgtgagtgatgcttcttgcgaaatggataacagcctgaacaatccgagcgacaacggggaagacccgccaccgccgccggcttcccatgcaagtcgacggcttccaaccgttccattacgccaattgttccgatgaaggggaagaagctgttccggtcaccaatgcttcttctgctatgcacgccagagccagcgaactcaccatttccttcgaaggcgaagtctatgttttcccagcagttacgccggaaaaggtgcaggccgtattattactcttgggagcacaggagatgacaaatagtgcccccacctctgacattttgttgcagcaaaactatcaggaaaaagcagaagcagcagtacggaaactagagatgaaattggaaaaaaggcgagcatcctctatggataagattatgaacaagcttagattgctaggactcaaccggttcgcgccctcttctcttggacctccgcgcctgttatttatgcttctttcgttatcggtagtagcttcacccgctggtgctccattcagacagtgtttacggcattccttgctgtccccgcgcaatttcgcggaaccttgccctctcatcaagctaattgtgagaattgcacgaaagtaaccgttttggatacaaaagattctgcaaaaaagaaagagatcgcaatcggactcgctatttgcatagtgcgacaagggcgaaggttggtcccaagcaaccatgcgcggacgccggacgcttcagatgagacaaaagctaaagcaaagacgcggagtgaaaaatccaaactcctttgtgggtacaaatccctaagggcaaaggctgaagcagatatacggaatcttgagtttaatttgaaaacgaggacaagcgaaccctgacgataatattataagcaggacaaagagagggcccagaaaaaagctcaggaaatgagaagttcagttccacacaaccaaaccgatcgggttgtaagaacttcacacaaggcttcatcatttcttagaaccagccagatgcgttctttgagtggttgtttcacttgccatgtcttttaagcattctttcatgttcgagttttggggtcttgccgtgggtttcaaatccgccacatgtttgtgattttgaggggcacttcagttgacaaaattggtgttgttgcgttttgctatccatggcaccttctttgaaagtctcagatatcataaaatctaagccccatgttcgggagtttggattcaatgggtagcaatatttgtaagtaggccaaattttagaaataagatcttttgtatatgtttgagtgatggtgggtttccgaaggattcaaatgggccacatgttaatgattgaaaggggcacaacagttgacaaaattggtgttgttgcggtttgctatccatgtcactttccttgaaagtttcagatgccatcaaaattattactcttgggagcacaagaaatgacaaatagtgcccccacctgactgcattccaatgtcctggttttcaaaataagaattggagtttttctttttgacactagtatgttggtgttctgtttgtcctctagagtctagacgtaggttggttttcttgagattgacaatacttggttatctaataggatgcatcgtaagaatggacagtttgcatcattgaaggaagactacaaatctcctgctgaaaattgggattcaagcaatggtactccttgcccagactctactgagcgtagatgccagcattgtggaattagtgagaagtctactccagctatgcgtcgaggaccagcaggtccaagatctctgtgcaatgcctgtgggctcatgtgggcaaataagggaactctgagagatctcagcaaagcagcaaggattgcttttgaacaaaatgaactggatacttcagctgatataaagccttcaacaacagaagccgaacattcttttgctaagcaggacaaggagggaagccctgaagaaactaagcctgtgcaaatggattccagtcggtcacctgagaagacaaatgaccagtttattatcggaactgctgaatcagttactgacaacttgtccatccaagtggagaatcatgctcttagtctacatgagcaggatactcttgaggatcttgctgatgcttccgggaccgaatttgagattcctgcaggttttgatgatcaggttgacattgatgattccaacatgaggacttactggctgtgatctagagatattgctatgcacaatcagcatggtctgttcacaatggaaacaaatgtgcactgctggttcaactaacattagacttctagaaatagtttatgttttatagacaaactatttctggaagcagctgtgaattatatgattgtagacttacaatttcttacattagttcctgtacatccctttggaaccagatttcatttatataatgtgaatagttgagtttttttttaaaa

SEQ ID NO: 27301 - DNA, 429 bp, Glycine max
  Clone ID: TF_GM378C18.C60.o1.fg
atgggtggttatggctcccaggggcacgtgatgggaccctgcacatgtggtatgtttcacagccaaaccaccagctccttcgccacgtttttctccatgcccaaccacaaaccaccaccctacatgattccgacaacatttatgactattcttccttcactccctcttccttttcttccgttgactgcaacctctccctcggtaccccttccacctgcgtctccgaagacgaagaaaaacgaagccgccacgaatgccattccgtctctaacttctgctgggacttactacaatccaaacacaacaaccctcaatcccattccaagtcctccggaaccaccaacaccaccgaccctctcctcgctcgccgctgcgccaattgtgataccacttctactcctctctggagaaatgcccccgtggccctaa

SEQ ID NO: 27302 - DNA, 1397 bp, Glycine max
  Clone ID: TF_GmC4231_1
tctccctttcattttccctcacactcatcattctcaaaaaacacgcccaaattctaatcaaattagggttagggttttcaactcccctcgaattatccctgtaatgcagtgcgattcccgggtcctaccatggagccatcagcaatgtacggaccctcccagcccctgaacatcccctcgcggatcggcgctggcgaaagagacgacggctccggcaacgagcccgccgtcgacggccaccaccaccacattcagtacgaaacgcacgcgctcgatgacggtgccgccggtggcgccgtggttgtcgaggatgttacgtcggacgcggtctatgtctccggcggtggaggccccgaggagtccagccagcttacgctgtcgtttcgtggccaagtttacgtcttcgatgccgttacgcctgataaggttcaagcggtgttgttacttttgggtggatgtgaactatcttcgggtggttcgccatgtgtggatcctggggctcaacagaatcaaaggggttcaatggaatttcctaaatgtagtctaccacaacgagctgcctcattagataggttcaggcagaagaggaaagagcgatgctttgataaaaaagtgagatatagcgtacggcaagaagttgcgctcaggatgcatcgtaacaagggtcagtttacttcatctaagaaacaagatggagctaatagttatggtactgaccaagattcaggacaggatgatagtcaatctgaaacctcatgtaaacattgtggcactagttcaaaatccaccccaatgatgcggcgagggccatctggtccaaggtcactttgcaatgcttgtgggcttttttgggcaaataggggtgctttgagagacctttctaagagaaatcaggaacactctcttccaccagttgaacaggttgatggaggtaatgacccagactgtcggactgccgctgccgaccctgcacaaaacaatcttgctgctttctcagagcctgttaatccagctttggtagctgatcgtaaggttttccaatctcagaaaatgttggagtagttgactctggcataagtaggtctatagttattccattcagattgaccaataggaatgtacagatataacaatactcccatcaatgcaagaactttgtttttatatggtaggatcagtggcattaactattgatctctggatgtatcacctgaaacttaaatgatgacttggtgatggtctcacccaataccttgaatttaattttacatgtatattgttggatctatggcattaaccattgatctctggatgtataacctgaaacttgaatgatgacttggtgatggtctcacccaataccttgaatttaattttacacgtagattttttgttca

SEQ ID NO: 27303 - DNA, 1284 bp, Glycine max
  Clone ID: TF_GmC4231_2
ggtccggattcccgggtcgacccacgcgtccgaaaaaacacgcccaaattctaatcaaattagggttagggttttcaactcccctcgaattatccctgtaatgcagtgcgattcccgggtcctaccatggagccatcagcaatgtacggaccctcccagcccctgaacatcccctcgcggatcggcgctggcgaaagagacgacggctccggcaacgagcccgccgtcgacggccaccaccaccacattcagtacgaaacgcacgcgctcgatgacggtgccgccggtggcgccgtggttgtcgaggatgttacgtcggacgcggtctatgtctccggcggtggaggccccgaggagtccagccagcttacgctgtcgtttcgtggccaagtttacgtcttcgatgccgttacgcctgataaggttcaagcggtgttgttacttttgggtggatgtgaactatcttcgggtggttcgccatgtgtggatcctggggctcaacagaatcaaaggggttcaatggaatttcctaaatgtagtctaccacaacgagctgcctcattacataggttcaggcagaagaggaaagagcgatgctttgacaaaaaagtgagatatagcgtacggcaagaagttgcgctcaggatgcatcgtaacaagggccagtttacttcatctaagaaacaagatggagctaatagttatggtactgaccaagattcaggacaggatgatagtcaatccgaaacctcatgtacacattgtggcattagttcaaaatccaccccaatgatgcggcgagggccatctggtccaaggtcactttgcaacgcttgtgggcttttttgggcaaataggggtgctttgcgagacctttctaagagaaatcaggaacactctcttccaccagttgagcaggttgatgaaggtaatgactcggactgtcggactgccactgccgaccctgcacataacaatcttcctgctttctcagagcatgataatccagctttggtagctgatcataaagttttccagtctcagaaaatgttgaagtagtttactctggcataagtaggtctatagttcttccattcagattgaccaataggaatgtacagacataacaatactcccatcaatgcaagaactttgtttttatatggttggatctatggcattaaccattgatctctggatgtataacctgaaacttgaatgatgacttggtgatggtctcacccaataccttgaatttaattttacacgtagattttttgttca

SEQ ID NO: 27304 - DNA, 1096 bp, Glycine max
  Clone ID: TF_GmC6848_1
gccccagctcccctccctcctccacgcgcccgaccccgccgcgccacccccccaccccgtccatggcgccctctccgggatcaaggctcctaagcaggcctctggggagcacaagaagaaaaagaagatcaaagtgactttcccatcaggtcaagagcggaatgcaccatcacaggcaattaggaaatgcttgcactgtgagataaccaagacaccacagtggagggcagggccaatggggccgaaaacactctgcaatgcttgtggcgtgcgctacaagtcaggccggcttttccccgaatatcgccctgcagcgagtccaacgttttgtgcggccatgcactccaactcccataagaaggtccttgaaatgaggaacaagacaggcaccaaatctggctttgcaactgtttctgctgcctcaccagaactcattccaaacactaacagcagccttacccttgaatatatgtgaaagggggaaaggaaggattctagttggagaattctctaattctctttcaagtcttctcttgagtcatgtcttatacaaggttttgaattgcattctacaaactgcaatgttaaaggttttagaggtgtctgcaactgcgttgtggttgcggttgtgactgcatcagccatatttgtccacaattttgatggcaaccgcaagttaaaaccttagtctttgtgttatttcttgtctgtcatttatttttctcattggatttttgtacagggctggaatggggggataggagcaaaatagaacatgatcatattgtagctatatttagaactgaagaacaagggatagagatatgcaagtcaaagagggtagagtcaccagagtgttagccattttaggtctagtaattgtagcagtactcaggaggagtctttgttacttttcttattctcatcatttttcatttttttttctttaatttctgtttctaaaaatccctccctgtagcaaattttttttgctgttcatttgtagcaaaacttatgagttgatcaggaaaggaacttttggaatttgccttcttcctttaaaaaaaaaaaattgtgccacacccaagaacgcccc

SEQ ID NO: 27305 - DNA, 1415 bp, Glycine max
  Clone ID: TF_GmC1294_1
gtatagagagataaaagataacaccaatacctcaactcaaacgcttgtttcgcctaaccaaaggaaactccactgcggtttccctttcttctctgtcttcactactctcttttctcaataggaacaagaaaaatggaagttgcggcggcgaaagcgctgaaaccaagcttgcggacagagtttattttccctcaagcaatttacgacgagattttatgttttaacgcgaacaacgttgttgccgatgaagatttctccatggacgacttacttgacttttccaacggggaattccaagttggaaaagacttcgatgattacgaggaagaggaagacgaggaaaaaaacagcacctccggttccttgcagtcgcaggacagagccgaagacgacaacaattctaattccaccgctggaggcggcggccacgactatgttttcgccggcgagttatttttgccggcagatgatgtggcagacttggaatgggtttctcactttgtggatgattctctcccggagttatctatattgtaccccattcattgttccaagaaaacaagagtatgggccgaaccggaatccagattgagcccggcccaaaccgtttcaaaagtcccgagaaagtcgagaactgaaaagcctagaaagcccaacactcgtgtctggtcctcttttacggtgtttgctggctccgttgggttcggcgagttggtgactaagaagcagaagaaaaaggttgaggcccaaagcggtggggcccagtctctgcgacgttgtagccactgccaggtgcagaaaacaccgcaatggaggatcggtccactagggcccaaaacactttgcaacgcttgcggggttcgattcaagtctggtcggctttttccagagtatagaccggcctgtagcccgaccttttgtggccacattcactctaacaaccatcgtagagtgttggagatgagatggaaaaaacagatagcagaatccgttactggttcagaccggaaacaattgatcccaaattattaaattttgttagacaaaatttacaatggagtagagtgctagtattattttttcgttagaattaaagttttacctcttatatgcatataaaagtttgcattattgagataaaattttaattctaactaggctatccaaggaaactatgtttaagtagtttttttagagtccaataggctatagattaggaataggtcaacgaaccggtctgagccggtttgatatttgtaccacggttagtgagtagtgatttaaattagtgctagtgagctagggaggaactaagtggtagtaatggacattaggaaggcattgattgcatgtatcccattttcctagatcaattgagtataataaaatcgagaaagagaaaatttaattaaaaa

SEQ ID NO: 27306 - DNA, 1844 bp, Glycine max
  Clone ID: TF_GmC28720_1
cccacgcgtccgctctcaactcaaacctccacacccttggtgtggtgcggtgcttttctacctcatcgttgaccttacccttcggttcctttctcagctaacatgcttcatctctccccaattgtaattttaacttcacccccatccaaacgctgcggggctacttttgctttttcgatcgactcaactcaaacctccatctccatttggtgtgtgtagtggagcttttctaccttcaaagattgcacctttacccttcaggatattttcaattgtcaagaaaatggttggacctaacttcatggatgagatagactgcggcagcttctttgaccacatcgacgaccttctcgattttcccgtcgaggacgtcgacggcggcgctgccaccttgccttccgtctccgccggaaacagcaactcgctggcgagcatctggccctccgagtccgactcgtttcccacctccgactcggtgttttccggcaacagtgcttcggacctctcggcggagctatccgttccgtatgaagacattgtccaattggaatggttgtccaattttgtggaggattccttttgtggggggagcctaacaatgaacaaagtggaagagccatcatgtaccaccaaggaggactcagtcaacacccaatttcacacatcaagcccagtttctgtccttgaaagtagcagttcttgctctggtggcaagacttttccactaagcagtccagagatttacatcctgtggacgtacagcagcgcgcaaccttcaatcctactatgtcattccctgtatatcatccaagtcatcttcagattctgagaattttgctgagtctcaacttgttcccaagatgccaaaacaagcttctgaggagcctaagaagaaaaagaaagtgaagctgccacttccattagttccagctgataacaatcaaaatgcctcacaacctgttaggaaatgcatgcattgtgagataaccaagacaccacagtggagggcagggccaatgggaccaaaaacactatgcaatgcttgtggtgttcgttacaagtccggccggctcttccccgagtaccggcctgctgcaagtccaactttttgcccatctgtgcactccaattctcataagaaggtcctggacactatgcaatgcatgtggggttcgttacaagtccggccggctcttccccgaataccggcctgctgcaagtccaactttttgcccatccgtgcactccaattctcataagaaggtcctggaaatgagatgcaggggatttgacaaatctggttttgcaatcaattcagctgcctcacctgaactcattccaaacactaacagcagccttaccctggagtacatgtgatgtgaaggaggattgatcctttgttggaaatttctctttcattgctgccctctagagtcatgtcttatgttatttcttttgatatttcatttctttggttcattggtttttgtacagggttggactgggggaataggagcaatagatgatgatgatcttattttagcagttaggggaagattgtaatgagaagtgaggaaaaaaagggtagacatatgcaggtcaaaaagggtagggtcttaggtctagtaattgtaggtcccttaaggtcattaggagttggtgtctcggttgttttttttttatttttcttggaattcttttcatttttttccctttttatatatatccctatttgtgggaattctttttgcagttcattttgtagcaaaaatttcgagttgagtaagagagtttttaatttgtaaaaaaaaaaaaaaaaaaaaaaaaaaaaaaaaaatgatttg

SEQ ID NO: 27307 - DNA, 738 bp, Glycine max
  Clone ID: TF_GmC154925_1
ccacgcgcctgctccacctggtcgcgccggagaaggagaagccgccgcaggcgaagaagagagagggaacgaatgtggagtgttccggacgcaaatgccttcactgcggcgcggagaagacgccgcagtggcgaacgggaccgatgggaccgaaaactctatgcaacgcgtgcggcgtgaggttcaagtccgggaggctggtgccggaataccggccggcggcgagtccaacgttcatgtcaacgaagcattcgaattcgcatcggaaggttttggagctcaggcggcagaaggagatgcaacgacagcagcatcatcagcagttgatgagtcaaagttcaattttcggcgtatccaacggtggagatgaattctcgatccatcatcatcatcataatcatcacctccattgtgggccagactttagacacgttatttagactacctagtttttaaattttaattttaattttaatttagggtgcaggtctaagtttaaactatcgtcagcttcagcacttcttttttcttatctgaaaaattttgtcttatgaatttgaattcttagctttttttttcttctaattttctcttttttcctttatggcagaaagtcagaaaagaaaaaaaaaagggcaatagaatcatggggaagggttaaaaatagggagggagagcttcattcggctgtagaatctactcttgattgttttctctttttttatatatatatatatt

SEQ ID NO: 27308 - DNA, 375 bp, Glycine max
  unsure (1)..(375): unsure at all n locations
  Clone ID: TF_LIB3242-152-Q1-J1-A8
agctaatctcccctgcatcctccactggcgagaacgtgcagcacaacgccaccaccacttccaaggcggcctcatcagattccgagaattttgccgagtcagtgatcaaggggccaaagcaggcctctggggagcacaagaacaaaaggaagatcaaggtgactttctcatcaggtcaagagcagcagaatgcaccatcacaggcagttaggaaatgcttgcactgtgagataaccaagacaccacagtggagggcagggccaatggggccgaaaacactctgcaatgcttgtggcgtgcgctacaagtcaggccggcttttccccgaatcccgccctgcagcaagcccaacattntgcgcggccgtgcactcca

SEQ ID NO: 27309 - DNA, 1942 bp, Glycine max
  unsure (1)..(1942): unsure at all n locations
  Clone ID: TF_GmC7389_1
acgaccacacgccctctcacaaacgaaaagcacaaaaacaaaacctcttttaaaactcgaccaacacaaagttgtggttcagatccaatctcccttccttctgcacaacacggcaaacaagggcgattcaaataataaaccattccattgcactcacccaccatcaatcaccttcttctttcatatatatcatttcctcgacttttgcaagttatagtgcaatttcgctcacatgagattatactacatagcaagcactgtcataaaatatacagggttactttatataagtggactatttataaatccaatacaaggttgaaattctaggattaatattcatgttggcggtgtcacctttgaggagcacaagagatgaagggcaaggagagatgatggagagtttctcgattggaaccgatgattttgctgacctttcagaagggaacttgcttgaaagcatcaacttcgatgatctcttcatgggaatcaatgacgatgaagatgtcttgccggatctggagatggaccctgagatgcttgctgagttctccctcagtactgaggaatcagatatggcctcatcatcagtttcagtggaaaataacaacaaatctgcagataacaacaacaacaatgatgggaataatatagttactactgagacacaagatgaggttattgatatagaattcaaatattcttctgatttgccttctagtcgaggggaggagaccataaaaacgtaagtcgaagccttctcaacgctcttcccttgcatgttagattattatgcgcatgcttgcttcctatttcacatctagcaaaaattaaacggggagagaagactatatatataatttttggaactttatttgttcatgtgctatgtcgagccaagaagggtagcccttttgtgtggaatatgtgagtgcattcagggtttgatggaggtaatagtaattgaagtttatcacccgccataacattgggagccacctccaaaaatatcgatagcacaggaagcttttcctagcgcgtgaagctgaaaccgcaaggtggactctaaaggaaacaattgttggcagcagcaggtgtaggaagaggcaccactctcatgggcgccgccggctgcaccgcctcaagagccttcattttggcaccaactggttcataacgcactaatcccaggaacagcttgttttccacaacttctgacaccaacgagatttggaagtccccctgtgcccggcatcccaccccatgccatgtacaaagcagatcacgacattggcctccctggtccccttttcgacttttatccgtcaaaggagtgcatagatgcagctattggagatgttttatcaaagccttggctgcctctacctattggacttaaggctccagcgcttgatagtgtgatgagtgaattacaaagacaaggaattccaaacattccaccctctagtgcttgaaaccaacccttcatggaagaggttcttccctttcatatggtgtccattaaaggccacttaaccctaattcgacgacttctcatccattagatgttgcatgcattgcgtatatgttacatctaagctactatgtcagtgattcatatctttcttcttttgctttgccagtaaaaggaaaagaagaaaaaacttttaagccttttttctaattttcatgtgctataatgtattagttaatggtttcaagtcgtggtcattgtagccattttgtatatgtacggttgtaaaggcagttatttttaatagctgtatgagctgaggaaatcctaataaaggactttgataaaataaaaaattaacctatatacttctatttattacgttcgcacccttaaaaggaccgaaacttacccaaaaannnnnnnnnnnnnnnnnnnnnnnnnnnnnnnnnnnnnnnnnnnnnnnnn

SEQ ID NO: 27310 - DNA, 396 bp, Glycine max
  unsure (1)..(396): unsure at all n locations
  Clone ID: TF_GmC46996_2
tacggctgcgagaagacgacagaagggggtgtgtggctgtaaaacttctctagttggccctgacactgaaactctctctgtcacttcccattcccaaacgatgccgtacccgtggttaagcttaacccctaactcctccacacgcgtgaggatcgccgctagaggcagaggatccgacggcaatccgcacctttgtgggtgtatgcggtttcagtttcagtttcagtgagagtgaaagagttaaaagctgctgggaaagcttcttgaaaagatgaatgttcctggtttgacaagagaaaatgttgctagttatttgcaggttcaattttatgtgtatttaatcttgaatacttgcaatatttggtaacaaagatcgttgaatttgagccnnnnnna

SEQ ID NO: 27311 - DNA, 441 bp, Glycine max
  Clone ID: TF_9902941
gcttttcaatttttcatattaatttgtcattaattcctgcaaggttggtccagaaaaatttcatgttttagtgcttcttttttttgttggtaatattgtttttttttgggtgtaggagcaacaccaaaattggttcttcaattgatgaacatcaaaagtttaagtattgcccatgtcaagagtcatttacagatgtttaggagcaaaaaggtggatgaccgaaatcaagtatttgcggatcataacagtcttgttgaaaccggagacaaaaatatttataatcttagccaactttcaatgctccaagggtataatccgagtcaaagttcatccttcagctacacaaacaattatccaagttatggattcggggatgcttcttttggtgtctacgagaaactgctacaaagacctttcgattggtctaatgcaatttcttct

SEQ ID NO: 27312 - DNA, 732 bp, Glycine max
  Clone ID: TF_GmC12582_2
cccacgcgtccgcccacgcgtccggaaagaatgtgcattagactgttgggagctacaccaaagtcagttcttgagctcatggatgtgaaggatctcacattagctcatgtgaaaagccatttgcagatgtatcgaactgttaagaccactgacaagcctgctgcttcttcaggcctttcagatggatcaggagaagatgacatgtctccaatgggaagcagtggtggaatgcgtcaattttcagaccaaagaagcctttcggatcgaccagtgcaacaagatatggactactcttcaggcaacaacactctatggagtaactcttcaagcagtagagaaacatggcaacaaaataactctaatgacgtagatggtttcagacccccaatcttccagtcacaacaaatatcaggagggcatcaaattcaggagtgtgattcaacccaactcaagaacagtttgtcaggatcaaatttagagtgcaagaacccaagtttggagttcacattagggagaccagattggaatggcaaaggacaagcctaattttcattggttcccttattgtctctagctagtttgcttaattagtttaattacaacccccggtaacatgtgacaaacttcgtaatctttcctgaaatagagaggtgttgtactatatatatatatatatatatatatatatatatatatatatatatatgtattcaatcagaaaaattatatttt

SEQ ID NO: 27313 - DNA, 426 bp, Glycine max
  Clone ID: TF_uC-gmroLIB3259P231e09b1
gagagcttatgcagggtgatggcctaactaacgatcaagggaagagccatacacaaaaataccgtgttcatacacggacagatgctgctgcatgttctaatcacacagttgtgagttcttggaggttagtggatgtcatcaggagcatgacacagactactatctaagttagcatgtcaaggccatggtctcctcaaagacctcttcatctgactgcagggtccccgggagggacatttgctactgaaggtgacagactacaagatgatcaaaatgcaatatccgagagttatagttggtaaagccatatgaacaaaccaggaacatgtgatgtataggatactactcttcaccatgaattttgaaaataaaagattacatgggaggagttttaccactacgtaagaatactactacatgatgcat

SEQ ID NO: 27314 - DNA, 758 bp, Glycine max
  unsure (1)..(758): unsure at all n locations
  Clone ID: TF_GmC391586_1
ggaactagtctcgagttttttttttttttttttacatgattaactacgangtttacttcgtctcacacaggcattgactggagagagagaaagagacgggaggagagagaaagctagttagctaaacatggagctctaaattacatttgaagatcgctgtagggtttttagccttatcgcatcacatatctagaggtgtacgacttgtcatcgattgtgcaacgttcgtgtttctaggatcaatatttaacttatttttattttcttgtccaattatggaagaggatgagcaatagggctcgaggcatatgaaaagatttctcaaaatcctcactccccaattattcctttcttcaattagtgaattttatttcactaattgacctttaatttatccacacaacactgtttatattttcttttgtcttgctccaaaatttcaagaaaacagtagcataaagttgaaaaattaaggtacacaagaagatgggagaaagcagtggctcacaatgttccaagacaagtccttctaacattgatgaagatgacgagggtgaaagtgaggccaatgaagatcaaagtaagcaaaacaacaacggaggaagctcaagtaacagcacagtggaagagaatgagaagaagataaggccttatgttagatccaagatgccaaggcttcggtggacacctgatcttcatcttcgctttattcatgcggttcaacgacttggaggacaagagagagcaacaccaaaatt

SEQ ID NO: 27315 - DNA, 188 bp, Glycine max
  Clone ID: TF_LIB3139-043-P1-N1-G4
cccaaaaaaaaaccttacaaccaacttttgtttagttaaaaaactactccaaatgtcgtgcttaagctcatcaaagtttaaagattaactatatatcatgttaaaagccatttgcagaaatacatgacagctagatatatactctaatcatcttaactagttattgaaaaaaaaacaatttcctttta

SEQ ID NO: 27316 - DNA, 781 bp, Glycine max
  unsure (1)..(781): unsure at all n locations
  Clone ID: TF_LIB4164-049-R1-K1-H3
acccggggatcctctagagtcgacctgcagcagtgatgcctttgtcagtgctcttcactgttctatacatctgcatgaacaccccgcataaaataaaatgagaagaaaagtccacaaaggctaagattatcacattatatttctagataccccttttgtccctagcctttggttctaccttccccactactagaggcaacctagctataacgactaacaacaatactcctctctctctctctctctctctctctctctcttgttctgtctagtcagaaattaattgaaagaggaataaacaactgaacttcactcattaagctcaaagactatggagaaagagagagatatgggaatgaatagtgagtaccccacctgcaagtgactcttgacatgtgctagggttagatccttaacattcattaactctaaaacagacttcggagttgctcctgcaagtgtgagaagacaaactcaagattagacgtaatctaaatgttatatatgctttatctcaaaagaatctagcttttgcatacaataataaagaaaccatcaaactattcattacatagcgtaataattaattagaccatgttcaaccatcacaaagtttttcaaaataattacaganaagaagaaggaaaanacgatttttcttttaacaccactaagatcaataatggatggattagtaaccaaatttagtgactaatttcatcaagttttagcgacggatttaactgaatcaaacatgaactatattaaatggaattacttt

SEQ ID NO: 27317 - DNA, 862 bp, Glycine max
  unsure (1)..(862): unsure at all n locations
  Clone ID: TF_GmC38886_2
cggtccgaattccctttcgcttcacaccagaacggatctctctctctttcaaatccaatcatttcctgagagacaaaaacaaaataaaaatcgcgttcagatacactcacacacaaacacaaccaccaatccccaatctctaacttttcccgagaaaattttagtttccattttcatttctccctcagattcccggaaaatatattcacaacattaatttcgcacttcgccctctgccaactaccaagctccggcttcctctgccaattcaatccgtcgtcgttttcgccaattccgaatgcgtcgatttcgggttggagaatgagttctccgacctcttcttggatctctgttcaaaccgtcacacagtctctgcgttcggattctcttgtccaattttaactctctctccctctctctctctctctctctctcagttagtataactacgtatcaggcaaagaagttttcgccggctagcatggtgccgcataaatctcaaggtggtgtggagcagcttgcaaatgctggggttttgggaggatctgctgtaaaaattgccgctgcacctgctgggggaagtgggaagcagcgtttgaggtggacatctgatcttcatgaccgttttgtcgatgccattacacaacttggtggaccagatagntggggtatttcttttcaatattgagaattntgagtttaaagaacttcttcctctagggaattttcttttcttggaaatttattattgtcttgcanaagcatgttggaaagagaaagtaatagggggaattgtttatctcattttcaagtatatgcaatgttgtatgtaagctttacttagtttagcacatgaacgctg

SEQ ID NO: 27318 - DNA, 377 bp, Glycine max
  unsure (1)..(377): unsure at all n locations
  Clone ID: TF_LIB3092-044-Q1-K1-A2
ctgaggcattcactcatctacacctaagcattttagagagctcatgcatgtcggtggcctaggtaacgatgaattgaagagccatgtacaaaaatacctactgtatacgcagagagttcctgttgcatgaactaatcaaccatacgtgggtctcggaggtttgtagatgtatcaagatcattacaatgactcttcaaaagttagcaactaagngcacattctgctcatagatctcttaattactctgcacgatatctacaaggtacattatctactgaaagttgcagtttagaacatgatgaatatgcaattaactgtaagtatatttgggaaaatgatatgaacaaaccaagaaaagttgatgtataggatactac

SEQ ID NO: 27319 - DNA, 732 bp, Glycine max
  unsure (1)..(732): unsure at all n locations
  Clone ID: TF_LIB4391-037-R1-K1-G3
cagcggagaaacaaggcaaagcaccacaagttgacagagagagcttatatattattaccgtcaattcttataataacacttgcaaatagagcattatcaactttcacctttcataggtatagtaaagtgatcattcagggaatagaagcctgatcaggtaaaggcacaatcaatcatcaggttgattatgctgtttgattgattttaaaatgttatggactcatatatatatatatggtgcttataaagagtacttaattataagtggcttttgcaggttgaatgtacagtactcatcagcaacatcaaggaaagaacattcactcttcttcttcttcttccagaatgccaatcccttctgagaggcatatgttccttcaaacaggaaatggctctggtgattctggacttgttctctcaactgatgctaagcctagattgaaatggacacctgatcttcatgcaaggtttatagaagctgtgcaacaattaggaggagctgacagtgagtatatactatatactatatactatatactatataataaaatacacatccatttgttgatcatcaaatcttgaactgaagagcatagaactttagatctaattgactaattcanagtgcaaaatttatactgcagaggcaactccaaaaacggtaatgaaactcatggggattccagggcttaccttgtatcatcttgaagagccatctccaggtaaaaatca

SEQ ID NO: 27320 - DNA, 545 bp, Glycine max
  Clone ID: TF_jC-gmro02910037d06a1
ggctcgaggcttgggggagcaagctgagctgcaccaaatgcgatcatgccgaccatgaatgtaatgggcttgactatggttgatttgacgagtcatcttgctaaatacaggcttggtaagcaatcatggaaggatgcagtggaaggatgcaaagatgggatgatggcaaatcctatgtgtggatcaaatatgttctcatccctgacacctgaatacacgctgcgtccgatgcgatctgcggtggctttcactacccccttgaccacagagcgaggggtccacttggaattgtaatatgtatgaaggatgaaccaagtaccatggtcatattataccaactatggtgagtacgttgagacatactgatgaggaactgcctgtgcagaattacaattagatgaatggttaatggacatatgtgcaactagggagcagattgtcctcattgtggaactttggattaccaagtgaattgatgattaacatattaactactctttgaatgtgaacactgataaccgtttcttttttcttggcggaatact

SEQ ID NO: 27321 - DNA, 574 bp, Glycine max
  unsure (1)..(574): unsure at all n locations
  Clone ID: TF_GmC59217_2
ggtataagagaaacaagacaagcacaacaagcattctgaaattctcttatttgttagtatcaggactagtaacaattaaccttgaaaataaagcttcatctagttttatcttccataggtagaaaagtgatcaagagaatacacaagtcaccaggtgggaatgtaccatcatcaccaacaccaaggaaaaaacattcattcttcttccagaatgccaatcccctctgagaggcacatgttccttcaaacaggaaatggatctggtgattctggacttgtgctttcaactgatgctaagcctagattaaaatggacaccagatcttcatgccaggtttatagaagcagtcaaccagttagggggagctgacaaggcaactccaaaaacagtaatgaaactcatgggaattccagggcttaccttatatcatctaaagagccatcttcagaagtatagattgagcaagaatctgcatggacaaaacaacaacgtaacatacaaaaatcantaagnagaccaacccttttttcatttggtcttgaactaactaataaaaccagaaaagcttgtttct

SEQ ID NO: 27322 - DNA, 522 bp, Glycine max
  Clone ID: TF_GmC200_2
aatccgaggaaacaaaggcgatgctggtcaccagatcttcatcggcgatttgttgatgcgcttcaacaattagggggcccacaagtggccactccaaagcagattagagaactgatgcaggtggtaggcctcacaaatgatgaagtgaaaagccatttgcaaaagtacaggcttcattttaaaagacctcaaggttcttcaattggccatgctaacagtggcttatgcaagatggcacaagataaatgtggagacgataaatctggctctccacaaggtccactcttcctaggagggtctggaaaaggtctttcaagctctggacgcaatagcatggacacagaaggagatgaggaatcagattgccgcaattggaaaggtgggattcatcaccaattgcaaccagaaagtgacgttttgtgagcttttacagttttcagatacatgagaattaaacatatataatgaatattcaaaatttggagaaattatttggtaatttaaaattattactttttcatt

SEQ ID NO: 27323 - DNA, 649 bp, Glycine max
  unsure (1)..(649): unsure at all n locations
  Clone ID: TF_LIB4392-010-Q1-K1-A2
cagataatcaaacacgatgacaaagaatgtttggatccatcatccaccaagaaagctagagtagtctggtctgtggatcttcatcagaagtttgttaaagcggtgaatcagattggatttgataaagtggggccgaagaaaatactagatctgatgaatgtcccatggctgactagagagaacgttgctagccacttgcagaaatacaggctttatttgagtaggattcagaaagaaaacgatcagagatcttcctcaagtggattgaagcattcagattttcctttaaaagatatgagaagttttggttttcagaactcagtaaacaaccagcaacaaaacgatgttgccattgacagctacaatcattcggatggatcattactacttcagaatgtggaaactaaaagtcacgaagcggatcccaagggaattgtttcacagtccaccatagcgaaaaaaggaaggattttgactggtaacattgctgacacaaatatgagagagagtttaagggttggccttaatcaaacttttgcccctctggagtcagaagaaaaccatgcagtatttgattgttccatgccaacaccatacacttggacttgagntccacacantgcactcanagaagaacacaagtcaattg

SEQ ID NO: 27324 - DNA, 534 bp, Glycine max
  Clone ID: TF_jC-gmst02400044h05a1
ggctcgagatttttttccttttcttttctttctctctcaaatttctttcccttctgttcactcaaaagagcagaaagagacaagatcccggaaaggcgtgccggcgtcagagactcatcagttctcactcgtacggcgttgtgctttgctttctcaccttcttcttcatttctttcatcatcatcatcatcacaatataaagttcgctcctttctcagttttcacccatacccagatgggtaacagcaccatctcggatctgtgtccctcctttaagtgaaaaaggttcaatctttggtctctgaggctgttgggttttcgtcattgaagaagaagaagggtattattatcatgtactcgaggctcatacacccccacgatgggattgtgacgcaggatgacttgcagggtgctgcttccaatctctctcacgctcacaagggagatccttgtctcgttctgacggctgatcccaagcctcgtcttcgttggactcaggacttgcatgaacggttcgttgatgccgtaacgcag

SEQ ID NO: 27325 - DNA, 810 bp, Glycine max
  Clone ID: TF_GmC13720_2
ggctggtgtggaccccgcagcttcacaagaggttcgtggacgtggtggcgcacctcgggatcaagaacgcggtgccgaagacgattatgcaattgatgaacgtggaagggttgacccgcgagaatgtcgcgagccatctccagaagtatcgtctctacctgaaacggatgcagggcctttcgaacgagggcccttcttcttcggatcagttattcgcttccacagctgtgcctcagagtttgcatgactctgctcctcccagtgcccatagcaatggccatggtcatctccctgttcccatgatgtccatgccatatccccctcccatgatgtccatgccatacccccctcccatgatgtccggcatgccccatgcccatggccacatgggcatccccatgcctaattcctccgccacctcagcttaccatccttataacatgttgcatcaaagggattggcctcaccttgctcctaatgataaatgaacctccaagattcaaaggcttgattattggtggtgtgtaattcacaccctgtaattcacattgatgattaccttgtaattcacacaaatggattattgaggaagtatatgaacaatactatatggagctagattacaatctgaatcagtagtgtgtaaccctgtgggagatttacaaacatattggtacacatctctaattcctgtcacctaattgtatgacgagaattctggcttatttcttctggtctgcctagacagctgattctaaagttaattcttaactagttctctgattcataaaaaaaaaaaaaaagggcggc

SEQ ID NO: 27326 - DNA, 1780 bp, Glycine max
  Clone ID: TF_GmC345_1
gacaatgaggacccatcaactcagaagaagcctcgagttgtttggtctgtggagctgcaccgcaagtttgtttctgctgtcaatctattaggcattgacaaggctgtacctaaaaagattcttgacttgatgaatgatgaaaagcttacaagggagaatgtggccagccacctccagaaatatagactttatctgaaaagaattagctgtggggcaaaccgacaggctaatatggtggcagccttaggtactgcagattcatcttatttgagaatgggttctctgagtggcgttggacatttgcagacattgactggtccacaacagtttcataacaatgctttcagaccctttccacctggtggaatgattggtagattgaacacttctgttggtctgaataatcatgggttgtcttcttcagaagctcttcagttgagtcatgcacaaaatttaaacaactccataaatgatccacttaagttccaatcatccatagcttgtggtaatcaaaatgctatccagggaatgccaatgtctataggccttgatcaattgcaacataataagggtgttagtgttagtgttggtcctattcaaaacatgtcccctcttattgatgccagaccaacttttgctgtgtcaaatagactctcagatcaaataccaaaagtaacaatgggttgctcaccctctccggtcttggacgtctcaaacaatgccttggtattgaaagcagatagtgaaaacacacaagggagaggagtatatgagaatttaacttcagtagcatctcagcattcacaattttcgcttcctttgctgggtcatggtaggtgtagtgatatttggtcaagtcctatgcggtcatctgggacaaattcttaccctccaagtgaaactttgcaaggggggaatctgagtggtgcttcatcaattacttcactgtctaatcaatcccatgattcacagacggatatgcactctcaaggactcatttttacaaataattcaggacaaattagcaataatgtgccatttctcgggtgggatgaccataatcatgatagtagttaccattcaaatgttattggtaactcaatagactctctgattgatccagaaggtcatacttctattaactcaacctacaacagaaacttggacttcaatttctgtgatcccttacaaatgaagcatgatggaattatgggattgagtgacgaaaactcattgaaacaacaacacaggtacatcatgaaccagcagaagtctcaaaacagtcgcgcccctaataatattggttcattggaagactttgtcagttcgatgatgaaacagaaacaagacaaggtgaaattcttggacggatcatatttatgcaacaataattaccctgacggaacatccatgtgatatgaactttggcagtatatttgcgcatcatgtcatgctttgttgatgaattttgtagcgtgacaagtcttggtttaccactcttcccagttttgtcttcttggtggtattttctaggtctagggtattattattactttcagcaagggctttctcaatttgtgaaaatgcgttgttttatggatggggccctctagtgcattatggagttaaccatgtttagttttgtgcagacatgcttttctagcaatttgttagtggtccataagcaagaataaaataattttagtggcaataaactcggggtcttccctttatgaatgcaaataatggccgacgaaatagcattcatgtttttttacac

SEQ ID NO: 27327 - DNA, 340 bp, Glycine max
  Clone ID: TF_LIB3109-005-Q1-K1-H1
gccttccattgtgctttatacctgaggaggtaaccagagccgttcacacccccctctctgttcttcaaaacgcaccttattcttccccctattttgcatcgcatttgttcttgaatctctttggtattcctcctcagagcctctaatcagagagagagagagagagaaagtgagagatggagagaatgttccctcccaagaagccctctactatgaattcccatgacagacccatgtgtgttcaaggagactcgggtcttgtcctcaccactgaccctaaacctcgccttcgttggactgttgagctccatgaacgctttgttgatgcctgtactcagct

SEQ ID NO: 27328 - DNA, 2398 bp, Glycine max
  Clone ID: TF_GmC12007_1
aacttattaccattggggaatgtacatggtacctggtactgcaacaggatcatcaccaatccaatcaccgatagtgagcttcacgcgccaccttggcgcgtagggttgccaagctgctattcctccaaccaaaaggagccaaagccaaagcccattcgttcgtcaccgttctgttcactctcgcgagcacccacccaacattattcgcgtctggccggtgatatggtaccaagcaccgcaacaggactacatccaatcctttcaccgattgtgaacaccttttcgcaccttggcgcctagtgattgcccgctacttctactccatccaaccagagacaggccacgcttccggccttacccattccctgccaggctttctggattgccctgcaggcgcccctagtggtaaaaatctggtaaacattagcgccaggctagtgaagatagttcaaaagcctcctagcgtccatggacagaggagtaagccatatggtctactgaatcagcattgaactgacaagacgatactgatacacattcgagtcatttaacttcaagcggagcagttgggcatatgttttcatcttctcctggatattcaactgatcttcatcactcatccttttcatctcatgaaaaacaacctagaaatactcattttatttcacagtcattaagtaacatggcttcattgccattatcttattcttcaaatagtgaaccgataccttctacaacatcaaccccttattccaatggaaacagtgtttcctggcatacagattccttgcctagctttctcgatttccctgccaatacctccattggtaatagtcaagtagaaagcagtgactgcaatatcatggcaactgaagagtattctaagcgaaatgattggcaggagtgggctgaccaattaatcagtgatgttgatcctttgacttctaattggaatgatcttcttgctgacaacattcaagatcttgaaccaaaggtcgcaaaatcatcttctcaacttccaataggacaccaatctcaaagccatcaacaacttcctgcttcatctggagaaaatcgtgttggtgttgccccaacttcctcaacaaattctgcacctgccaagccacggatgcgctggacacctgagcttcatgaggcatttgtggaggctgtcaaccaacttggtgggagtgaaagagctacccctaaaggtgtgctgaagctcatgaaagttgatggattaactatataccatgttaaaagccacctacagaaatacaggacagctagatatagacctgagtcatctgaaggagctatggagaaaaaaccaagtcccattgaagagatgtcatctctagatttgaaaactaggtattgagatcactgaagctctacgactacaaatggaggttcagaagcggttgcatgaacagcttgagagtcaatctggagtgtcttcgacccacgcgtaagaccacgcgtccgcccacgcgtccgaaaccatcaaggtggaccactgcaagtcaggagctgatctggctaatggcagtaccacagttgaggaaagctcattggaagtgggtgagaagcaggatgctcctgaaattcaagcttccgacaatcctgagcaacatgctagtgaagatagtgctaatgcctcaaagcgtccaaggacagaggagtaagccatatgatctactgaatcagcattgaactgacaagacgataccaattcatttaagatttctatttagtaaggaagacttggtagatccataacttgagtttcccctaacctgttgtgatcaatgaggacttgcatatgtatgtcattgtgttacaaaaatgatgagtcaatttttggaccatgaggttcttcgaacttcttatttagcatccttgttaggatgagattctagtgtacagtacagataatgactacatctcaaatcataagtgaggaatgaattaggacagtatctttccaaatactaccacccaaaattctatgttagtacgtacatctcaatatgaattgtttattttaactgtaccggaataataaaaagaagggcacaattctagttctcaagttcgtttttaacaaaaaaaactatttgcaggtagcctaggaatgtcagcatcgcctcagttattatttggccgtttgttttccttggaagagaattcgttgttaaaaatagtatcactgtaagccattactaaacttgtgcacactatctatccttagaatgcggaacccccttcctgagctctatactttatgccccagaaaaagaaaataaaaaacaatgagtcaagtcaacgagcttgtagctcaacttgatgaaaaaaaaaaaaaaaaaaaaaaaaaaaaaaaaaactcgaggggggg

SEQ ID NO: 27329 - DNA, 898 bp, Glycine max
  Clone ID: TF_GmC60412_1
tacggctgcgagaagacgacagaagggggtacgtcacaattgtgaagcacagaaaaatgaaaaattctgagagaagcagtgtaagaaagtacaacaaatctgaacttccacgcctgcggtggacacctgaacttcatcaacactttgttgaagctattcaaagtctaggtggatcacacaaggcaactccaaagcgaattttgcagcagatgcgtgtgaaaggactgaggatcgctcacatcaaaagccatcttcagatgtacagaaacatgaaaggacatgccattgttgcaccagtggatcagttgctggaaggaaaggcaaaagatttcaaaatatgctccaatatttgtccaaccgaaaggaatctcaagcgggaacttcatttgttagactacaaagatgggctttcacaaaccagtgaggaaactgattatgatctaaaccaggaaccacagtcaagtgcagtactcttgcttagtgatgatgtgtcaaatgaagaagaaaattttgctgatctatcattgatctcctttagcatgcctctaatttccatgatgcaaagtgagaataacaaagagataatgcgttttttgtcatcgactgcagctgcagctgctaatcattccgtcgttgattccagtttttttacgccgtcttttgcaaacaattacataaacttagatctaacaatctgaatatgtttattaattagtaattctttttatttacttacacgtgcgcaacactataattacatgttaactttttaggcaaagacttataattattagttagctaattattgtattctttattacagtgttaggcttgttagcagtaataaatggttctctttcttttttcgaaaaaaaaaaaaaaaaaaaaaaaaaccaaa

SEQ ID NO: 27330 - DNA, 1008 bp, Glycine max
  Clone ID: TF_GmC247294_1
cccacgcgtccgcgaacatctctccaccaccaccaccacctaactacctcctcctccctccaccactctcaatcaaaattccccttccaaaacaaatccaatcaattcaaatcaaatccctgtctcctccttaaaccgttaaataaaacaacaatactaaacaccgtttcaattgaacaaaaaatgagggaagaggattccaattggttttcgcgatgggaagaggagtttccgtctccagaagaactcatgcctctatcgcaaaccctaattactcccgatctagccatggccttcgacatccgaaaccctcacaccaccaacaccgctcagcaacaacaccaccaccaccaacaacaaccacaacaacaacaacaaccttcgaacccttcctcgctccccaacccgctacagcaacaacaacaacaacaacaacctacctccgccgagttcgccgactccggcgaactcggctctggcaccgccggcgaggagccggcgcgtaccctaaaacggccccgcctcgtgtggaccccacagctccacaagcgcttcgttgacgccgtcgcgcacctcggcatcaaaaacgccgttcccaagaccataatgcagctcatgagcgtcgatggtttgacccgcgaaaacgtcgctagtcacttgcagaagtaccgtctctacctgaaacgcatgcaggggatttccgccgccggacccggtggtccaggcggcggcgcctccggcgccgtggccgaccccgccaccgaccacttgttcgccagctccccggttccggcgcatttcttgcacccggccgcgaggccgaattcggatcacttcctgccgttcgtgccggcgctccacccccatcagcagcagcagcagatggcggcggcggcgcagtaccaccggcaggtgaggcatttcgggtccccgccgaacgggcacttcgagaacccgttcatgtctaggccgcatcttcagagactgggaggtggtggtggtggaggt

SEQ ID NO: 27331 - DNA, 1050 bp, Glycine max
  Clone ID: TF_GmC27103_2
gactgggggctgctgcatccaaagaagagaaggaagagagtgttatgaatagactttctcttctgacaccttcttctgtgaaagaggggtgtggttcaaggggatcaaggagcagttccaacagggctgtttcttcttcttctcctcccatggttcagccgagtttgcgtgcgacttcacttcagcagactgctaggaaacagaggagatgctggtcccctgagttgcacagacgatttgttaatgccttgcagaagcttggaggttctcaagtagcaacaccaaagcaaattagagagcttatgcaagttgatggcctgactaacgatgaagtgaagagccatttacaaaaatatcgtcttcatacgcggagagttccagctgcaagttctaaccagccagttgtggttcttggaggtttgtggatgtctcaagatcagtacaatgactcttcaaaagttagcagttcagggtcaggttctcctcagagtcctcttcatttggctgcagggtcccggggaggaacatccccaactgaaggtgacagcatggaagatgatgaagatgcaagatccgagagttttagttggaaaagtcatatgcacaaagcaggaaaagttgatgtataggatactactctccaccatgaattttgcagataaaagtatacatgggaggagttttaccactacataataatactacatgatgatgatacataaaaaaagagggtcaacgataagaggctgttggagtttttattgaaggtttagctttgccttctatactgcgtgagttttgatatgagactccgaattaaaattatccttttccacatcataaaattctttcatttctttttgtcatgggaactctctgatgccccctgaagaaattaattagtcccatatttagatgggtctcatctctgcatgtttgggtggacattggctgttctaattgctggtggtggatggattatttcttctcatacttttatttacacgaattttagagatatcttttcgtaattattcctcctttcctcgt

SEQ ID NO: 27332 - DNA, 2796 bp, Glycine max
  unsure (1)..(2796): unsure at all n locations
  Clone ID: TF_GmC1389_1
agggagctatagctaaagccttgcacaacctcctctttcctcttcaattaaaacgcatcctattcatccctcatagcatcgaatttgttcttgaagttcttggtattcttcctagcttcttctcatcttgagagagagaaagtgagagatggagagaatgttccctcccaagaagccctctactatgaattcccatgacagacccatgtgtgttcaaggagactcgggtcttgtcctcaccactgaccctaaacctcgcctccgttggactgttgagctccatgaacgctttgttgatgctgttactcagcttggagggcctgataaggccactcctaaaaccatcatgagggttatgggagtgaagggtctcaccctttaccacctcaagagccaccttcagaaattcaggcttggcaagcagccccacaaggatttcaatgatcactcgattaaggatggcatgagagcttcggctttagaactgcagcgaaacactggctcctcttctgccatgattggccgcaacatgaatgagatgcaaatagaggtgcagagaagattgcatgaacaacttgaggttcaaaaacaccttcagctaaggattgaggctcaaggaaaatacatgcaaagcatattggagaaggcttatcacacacttgctggtgaaaacatggcatctgcagcaactaacttaaagagtgctattgtacctcatcatcaaggaatccctgacatgggagtagtgatgaaggagtttggttcccctcttggtttttcttcattccaagaccttgagaacatttatggaggtaaccaaattgaccttcagcagaacatggagaagccatcccttgatcatggtttcatgccaatcaatgagagcttgtgtttggggaagaagaggtccaataacccttatagtgggagtggtaagaaccctttgatttggagtgatgatctaaggcttcaagatttgggagggccagcatcatcatgccttggccctcaagatgaccctttcaaaggtgaccagattcagattgcaccaccaggatcattggatagaggagctagcactgacattgatcccatgtcagagatctatgactcaaaacctgtgcttcagagtgaagagaaaaagtttgatgcatcatctatgaagcttgaaaggccttcaccaagaagagcacctcttcagcctgaaaggatgagccctatgatcagcactggtaccatggcacaaggtagaggctcaccatttgggtgaatatcatagtttttaattaattagatcatttggctatgttatgtgtaattgatgacttgatcatgtgaaactctcttaatagtagtaccatatctagggtttttgaatttggtcttggaaattagcagttcttacgagggttatttcccccctcgtcaagtactgttatgtggtataatgcctttacatggcaaattaaaccaaagtcttaattctgacaaatataattaaagcgtattattgtgcttgaatgtgagcattctcacttgtagcttttaaacatgagggtataagggctcctctaagtgctcggcaggattttatgaagccattttcttgtaatattcctcccctgcatgcctatccatcatttcctccagaacccaagggattatgatcaccaccaccgccgcctctacaaccacctatgccatcgccacaacactccacaccaagtccctttgcaagatacatttctttaccactaccaacctcttcctggtcaccaaaactcaccctacaaactccattcttcactctcacctcttcactgaatatcacatcctttccaccattcaccacactgaacccatcttcactctcactttccatttcttcatcttcctcttcttcactcaagccattgtgcttagcagtagagtaagaaggaattgtctccagcaccaagctcctgtgtctagctgaaaacctcttggaagggtctaaatactccaacctttcttcattgttgcaagaaaagtaggccaagtcttgcaagttcccatcagattggactcttctaaagcctttgttttgcctttcaagctcaccaattgagggagagattggagaagaaccacatgcaaaggaccgggtttggtggcaagtaagtttgtgataaggttgtgggacactggttggtggaaagtgtttaagtgcatgacaggtttctgagtgaatattgttgttaggactatctgggaaggatgagaggagggatccaagaactggtgttgaagagcttcttagcatcatgttttctgattcaagataacttctgtgtggctgtcccttgttttctgattataaatcaccttttttaatgctgaagagttcttgatgaccctataaatataatcctatgtaatttcagatgatcattggaagggagagaattttctagcagtcggcctgagaaaatagaacaaactgtaaattacttacttcaggaaaataaagctagaaaaagagaaaggcatatttggtttttgaaacagaaaacaaattgatatggctacaaggaaaagtaatgatgctgattgctgattgctgattgctgattgctgattgctgagtagaatcagtaaatttaacacaaaagaaatgtttggggttggtaaaggaagacagagaagaaaagaacaatacccttttgtgatgctgaagagttcttgatgaccntaccaatcctatgtaatttcagatgatcattggaagggagacttttgtagcagcccacgcgtccg

SEQ ID NO: 27333 - DNA, 1157 bp, Glycine max
  Clone ID: TF_GmC6799_2
cggacgcgtgggcttctctctctttctatcattcattccttcaatccttccccactttttttactccaaaatcaaggaatgacataaacagaataattaatctccttaccactgcaactcacaaaacaaaagaataaaaagaagacccttttgtcatcataacaactctttgttacattacactgtaacacacgccaacatgggtttggtggttcctgaagaagaactaagcttagatttgagaccctcttttgttccaaaaaccatcactgattttctctgccacctttccaccaccccaaatgcatcccacaaggtgtccttgctcgatgactttgtccacagattggaactcgaattggccaagatccaagcattcaaacgcgaacttcctctctgcatgttcctcttaaatgatgcaatttcagctttgaaggtggaatcagaaaaatgcagggcttgcaagtctgagccagtgtttgaggagttcattcctctgaagaaagagtgtgatcagaggaaggaaattgagaaggagaaggaatgcagggacaagaagaattggatgagttcttttcagctttggaacaatgatgataaagctgataataataacaatgcatatgaatgtgacaaaaaacacaactatagagttgaaaacaagaataatggagaaaaaagaaaatctgtgctcgagccgttgttccaatatggtagaattagaaatggagagaaggggtttgttattcctttttcctcttaccctgcaacaaaggaagaaaaggaagattgtgttgccaatggactttctcttcagacacctggaactgcagtgaaaagcactagggagggatctggttgtagaaccagctcttgcagggtgggttcctccgctccttcaccgctgcatcagccacaaagcagccggaaacaaaggcggtgctggtcaccggagttgcatagccggtttattaaggctttagaggtgcttggaggttctcaagctactccaaagcaaattagggaactcatgagggtagatggcctgaccaatgatgaaaaataccggcttcatacacagcgagttccagttgctacaagctgcaaatttagtcggtctgctgtagatctggaggcttgtggatgcacaatgaatc

SEQ ID NO: 27334 - DNA, 1812 bp, Glycine max
  Clone ID: TF_GmC38886_1
cggatgtgtgggcggacgcgtgggcggacgcgtgggcggacgcgtgggaacaaaaacaaaaaaaaaacgcgtttcgcgttcagacacactcacaattcacacaccaacaccaccaatccccaatctctaacttttcccgagaaaattataatttccattctcttttctccctcagattcccggaaaatatagtattcacaacgttatattttggcaccgccaagctccaattcaatccgtcgtcgttttcgcgaattccgaatgcgtcgacttcgggttggagaatgagttctccgtgctcttcttgtggctgtttgttggcgttcttggatctctcttcaaaccctccacagtctcctgtccaattttaactctcttagtcagtttaactatgtatcacacaaagaaattttcaccggctagcatggtgccgcataaatctcaaggtggtgctgaacagcttgcaaatgctggggttttgggtggatcggctgtaaaaactgctgcaccttctgggggaagtgggaagcaacgtttaaggtggacatctgatcttcatgaccgttttgtggatgccattacacaacttggtggaccagatagagcaacaccaaaaggtgttcttagagtgatgggtgttcctggactgaccatttatcatgttaaaagtcatttacagaaatatcgccttgcaaaatacttgcctgaatcaccagctgatgaccctaaagatgagaagaggatgtctggggacagcatttctggtgcagattcttcctcgggaatgccaatcaatgatgccctaagaatgcagatggaggttcaaaaacgtctgcatgagcagcttgaggttcaaaagcaattacaaatgagaattgaagcacagggtaaatacttgcaaaagatcatagaggaacagcagaaattaggtagtaccttgacaacctcggaaaccctccctttgtcccatgataagcaaaatcatcctcagtcagaggcttctggatctagtgatgcccttgcaagcactgtgtctccacttaaaaaacagagaatcgatgatggttccaaggaaggcttcactgcttcccaagtaagaaaagaatgactgcaatgttggtcagttggatccaaacttgtatgatgatgctgggtttgaatttgatttggagacaaaaaaggatgaagataatgagagtggacagtaagaactaggttccatttgtaggtcaatgtgtctcattgtaatgtgtagtgtatttttctggaagaaaatacaaatcatgctttgtaaattatatttcacgcaatccatttgtacatattaatgtagatatagatgcattcttctctcccggtttgaaagtcataaacactgcactccacccaacagaaatgctttgacatgcattacacgtgtggtcatggatgaatgttgggtgcaagattcttgtcgatgttcaggttgctatggtcttggccaatatcaaaggtatcaattagctgatgaccacattgtttgatccttgtagccaacctaatcatgggagaatggacttggttctttttgttggagatagtaatgaccagcttcccttgatattaatcatttaatttaattatgtattttcttcgaggttaatgttgtttggcatatttagactcatgaatgtgatgctatctaacctatgagtaaatgagtaatactatatcttctttctccgtaaagtatgaaaatattcaaccaaaaaaaaaaacaaaactgtactactggatgtattgtgatttgtgagtgtaagaattcttatattg

SEQ ID NO: 27335 - DNA, 334 bp, Glycine max
  unsure (1)..(334): unsure at all n locations
  Clone ID: TF_GmC161288_1
caagaacgccgtgcccaagaccataatgcagctcatgagcgtcgacggcttgacccgcgaaaacgtcgcgagtcacctgcagaagtaccgcctctacttgaagcgcatgcagggtttgtcggccggtggcggagttggtagggtcgcctccgccgaactcaccaacgaacggctcttccccagtcggccgtggcgccgccttactgcagcggcgggatctgaccattattgccagtttgtccattccggctcgcacatcaccaaaagaggcaacagcaccacatttggcagggcatgacagtgtaattggcacngccaattggttncgcagang

SEQ ID NO: 27336 - DNA, 2886 bp, Glycine max
  unsure (1)..(2886): unsure at all n locations
  Clone ID: TF_GmC594_1
gaattcgagctctgtacccggggatcctctagagtcgacctgcagttaatcaactgggcctagatagtgagtttctgaaagaaaaaattttacgtttccaagttgtttgacttggtaccgtataatttcatacctcaaaatgagtactataattcctaatgtcaggtttattcaccttttattgcagaggctgttcccaagaaaatacttgacctaatgaatgttgaagggcttacaagggaaaatgtggcaagccatctacaggtataaaatcttggttttgtagttatcataattgttctatgcagtctttgacaaatcaaggaatgaaaatcttttagattggatgattccttaaattttttgtgatggaaatattaggaaaagatagtttgtagcgaaaattaataactctgagaactttatagcacatagtataagtattttagatatttctttttcttgtaataatatgtttcgataaaatatggatagataaaattaaaaaaagggcttgttactaatgggacatttaagacttctaacccaagtgtttgctaggtgatgngttgtgcacctgttcctgttcatttaatgcggcaaagtatatttttcattactggctcgaggttctacatttttttttcttctccctttatctcttgccctttttgttgttggtgaaagagtgccctagagaacaaagttcccgttttcaaaattgaagcttttgggtctctgaggtttgatctctgcacaagaaccttgttttctcatctgggtgtgttgcttttgcctctgctggctcgatatggctgtggaaaaccaaagggaagatgggggttgtgatcgttttcctgtgggtatgcgtgttcttgctgtggatgacgacccaatttgcctcaaggtgttggagaatctccttcgcaaatgccagtatcatgttactacaactaatcaggcagttgaggcactgacaatgttgagggaaaacagaaataagtttgacctcgttatcagcgatgtgaatatgcctgacattgatggatttaagctccttgagttggtgggacttgaaatggacctacctgtcatcatgttgtcagcacacggtgatacaaagctggtgatgaagggtgttacacatggtgcatgtgactatttgctgaaacctgttcgaattgaagagttgaagaacatatggcaacatgtggttcgaagaaagaattttgatagcagggatcagaacaaggcttccaatgaggagaaggctcctaattttgctgggggaggtagtcaaggcctaagatcagaaaacagtgctgaccagaataaaaggcttggtaaaaaaaggaaggaccaaagtgatgaagaagaagaaggtggggaagagaatgaagatgatgaggacccctcagcacagaagaaagctcgtgtggtttggtctgttgagctgcatagaaaatttgttgctgcagttaatcaactgggcctagataaggctgttcctaagaaaatacttgacctgatgaatgttgaagggcttacaagggaaaatgttgcaagccatctacagaaatatagactctatctgaaaaaggcagcccagcaagctaacatggttgctgcattgggtggtagtgattcttacctacgtatgggttcaatagatggatatggagatttttgcacctcgtctgggtctggaaggatcacaaacactactttaccatcatatgcatctacgggaattttcagtaggctgaattctccagctgccttgaacatgagagcaattagttcttctgcgcttatccggcctgttcagtctcaaaacatcaactgctccttaaacacacttggaaacattcagccatctatttttcctgcaaatcatcaagtccccggtattacatggaattccaacatcaatttagcttaaccaataaacgcatggcccaggagcgtttagcaatcagtcttctgtcagagcggcttctttgtgtgctgaatctacgtgggcttatgtggttcttctaatttggatcataatcgatgataactggaatgcgctcaattgtctaaatttcctccaattccttgccactttgtgaggctttcagcaatgaccaactcactagcatcaatgattcgaactcaagtactcatattggcaacaacagtccagttgatttttcttctaagcaaaacatgagctgtccctttaattctgtaaattcacgcttcctcaagatggggcatgttttaattcagcaatagagttgatgcatcatctttggttggccaactaaatggagcatccccatcaatcagccggtgcactgaagttgagaaattctcttcagacattcgactgaagccaaatgaagcctacattttggagcaaatgaagtcccaagatggatttatgcagaatacttttgggaccttggatgacataatgggtgtaatggtcaaaagggagcaaaatgagtcgacattgttggatggagaaatgggatttgatgcctaccctgttggatcatgcaactgatttcttcttaaccagaacgaatccaggagcaataaaatcgtgaaacttgctccagtctctgaaaccgattaatgtacacctatttttatgttctgctactaaatttattttcttggccaacattttgttgtttcacttatggacttttgttagccatctgatctgttccatcttttttttttttcaatctgtagtgtatccccataaaaattgtctttggtttagataaaataattgtaatatgaatgtttcttggtgctcaaaaaaccaatttttaaaaatttaaaaaaaccccccttacccgggaattaaccatgggggggggggttggt

SEQ ID NO: 27337 - DNA, 1658 bp, Glycine max
  Clone ID: TF_GmC381_3
tttctttctctctcaaatttctttcccttctgttcactcaaaagagcagaaagagacaagatcccggaaaggcgtgccggcgtcagagactcatcagttctcactcgtacggcgttgtgctttgctttctcaccttcttcttcatttctttcatcatcatcatcatcacaatataaagttcgctcctttctcagttttcacccatacccagatgggtaacagcaccatctcggatctgtgtccctcctttaagtgaaaaaggttcaatctttggtctctgaggctgttgggttttcgtcattgaagaagaagaagggtattattatcatgtactcgaggctcatacacccccacgatgggattgtgacgcaggatgacttgcagggtgctgcttccaatctctctcacgctcacaagggagatccttgtctcgttctgacggctgatcccaagcctcgtcttcgttggactcaggacttgcatgaacggttcgttgatgcggtaacgcagcttgggggagcaagtaaagctacaccaaaagcaatcatgcggaccatgaatgtcaagggtttgactctgtttcatttgaagagtcatcttcagaaatacaggcttggtaagcaatctgggaaggatgtgggtgaaggatgcaaagatggttcatatcttttagaaagccctggcgctgataactcatctccaaagttgccaacttcagatacaaatgagtaagaatttgcattaattcataaaaaaatatttttttcttctggctgatgtctcaatggatttgaattaccaaattgagtgagtgattaattttatgcctaggggttatgaaatcaaggaggcattgagagcacagatggaagtgcaaagtaaattacatttgcaagtggaggcagagaagcacttgcagattcgccaggatgcagaaaggagatacatggccatgctcgaaagagcttgcaagatgctggctgatcaatttattggtgccacagtcatagacacagacagccaaaagtttcaaggaattggaagcaaagcacctagaggtaccttggttgatcctcttggtttttactccatgccatccactgaggtggctggagtgaatgtcccagaagaagaaataccgctgagtctcccaccccaaagggctgattgttcaaccgaaagttgtttaacctcacatgagagttctggaggattggctttagaaggatctcctggcgagggaaaaaggaggatgcttggcatggactcgatggcagcacctttgatatggagtgaagctaagatgagaactcaagccatcaatgtagcccaaggtaatcttcctcaaggaataactaggtatggcatgtagggatggaaggtctacttgatggtttatcccggcatgatatataaacctttgggctttcattcattccctttttttataggtacttgaactcttcatgtcttgtaagttagtgagacataggtggaatcaattttacccctttgtaaattcaatctactctgtgactttaaaaattgcaaaaaactagctttgactatacaaaaattgtgtgctttggtgacttctatggattccttattgctcattgcatcatgctgaataaagaagatggagagtcattagtaaa

SEQ ID NO: 27338 - DNA, 966 bp, Glycine max
  Clone ID: TF_GmC381_5
cccacgcgttcggttcactcaaaagagcttaaagagacaagatcccggaaaggcgtgccggcgtcagagactcatcagttctcactcgtacggcgttgtgctttgctttctcaccttcttcttcatttctttcatcatcatcatcatcacaatataaaggtcgctcctttctcagttttcacccatacccagatgggtaacagcaccatctcggatctgtgtccctcctctaagtgaaaagaaaggagcgaactttatattgtgatgatgatgatgatgaaagaagggtattattatcatgtactcgaggctcatacacccccacgatgggattgtgacgcaggatgacttgcagggtgctgcttccaatctctctcacgctcacaagggagatccttgtctcgttctgacggctgatcccaagcctcgtcttcgttggactcaggacttgcatgaacggttcgttgatgcggtaacgcagcttgggggagcaagtaaagctacaccaaaagcaatcatgcggaccatgaatgtcaagggtttgactctgtttcatttgaagagtcatcttcagaaatacaggcttggtaagcaatctgggaaggatgtgggtgaaggatgcaaagatggttcatatcttttagaaagccctggcgctgataactcatctccaaagttgccaacttcagatacaaatgagggttatgaaatcaaggaggcattgagagcacagatggaagtgcaaagtaaattacatttgcaagtggaggcagagaagcacttgcagattcgccaggatgcagaaaggagatacatggccatgctcgaaagagcttgcaagatgctggctgatcaatttattggtgccacagtcatagacacagacagccaaaagtttcaaggaattggaagcaaagcacctagaggtaccttggttgatccctcttgggttttactccatgccat

SEQ ID NO: 27339 - DNA, 794 bp, Glycine max
  Clone ID: TF_LIB4164-003-Q1-K1-D8
cggtccggattcccgggtcgacccacgcgtccgacagatcccggaaaggcgtgccagcgtcagagagactcatcagttctcactcatgagtaacagcaccatctcggatctgtgtccctcctttgagtgaaaaaggttcaatctttggtctctggggctgttggggttccgtcattgaagaagaagaagaagaagggtattattgttattataatcatggacccgaggctcatacacccccacgatgggattgtgacgcaggatgagttgcagggtggtgctgcttccaacctctctcacgctcacaagggtgacccttgtctcgttttaacggctgatcccaagcctcgtcttcgttggactcaggacttgcatgaacgcttcgttgatgcggtcacgcagcttggtggagctagtaaagctacaccaaaagcaatcatgcggactatgaatgtcaagggtttgactctgtttcatttgaagagtcatcttcagaaatacaggcttggtaagcaatctgggaaagatgtgggcgaaggatgcaaagatggttcatatcttttagaaagccctggtgctgataacacttctccaaagttgccaactcctgatacaaatgagggttatgaaatcaaggaggcattgagagcacagatggaagtgcaaagtaaattacatttgcaagtggaggcggaaaagcacttgcagattcgccaggatgcagagaggagatacatggcgatgctcgaaagagcttggcagatgctggctgatcaatttatcagtgctacagt

SEQ ID NO: 27340 - DNA, 512 bp, Glycine max
  Clone ID: TF_GmC804873_1
cctcgtgccgaattcggcacgaggataacttgtgtccacaaggaccacgtcaccgtcaaccagtcggagcttgcagcggccttcagtatgtcactagagccccaccgaattgtcctcaacgtcaaacgcggctcgtgcaacacgctctccacaatccgcagtgacaggaccatgcagcatgccttcttctccaacaacaacttcttccttgcactacaatggcgatggagacgtcaacgacaaggaagacaacgatgacaccgattgcaaagactcgaggtcggattctcgaacggagacctcagcgaagcgaacgacagtgaagcgactgcaactagtgtggaccctgcagcttcacaagacgttcgtggacctggtggcccacctccccatcaaaggcgctgtgccgaagacgattatgcaattgatgaacgtggaagggttgtccctataattgttaacttgtttgttcttattgcaatttatttgaacaaaatgctatttatgaatgt

SEQ ID NO: 27341 - DNA, 1886 bp, Glycine max
  unsure (1)..(1886): unsure at all n locations
  Clone ID: TF_GmC942_2
ccacgcgtccgaccgtagttaaacctcctaactcactctagttgctttgtttgtcttcaatggaataagaacagcagaaagaaagaacacaactttggccagaagacttggtgggggcattttcttttcagccaagaagggattcggtgttgatgagcaatattgatctgttgctgcagtaggggaccgagtaagaatgccaaaccagctatggtttgcactgccaatgatttacaaggatggaaagatttcccaaagggacttagagttcttctgcttgaaggagatagtagttctgctgctgagataagagaacaacttgaggccatggactataaggtttccactttctacgacgagaatgaagccttgtcagcactctcaagtagtcctaaaggcttccatgttgccatagtggaggtgagtacaagctgtagccttggaggtttcaaatttcttgagaatgcaaaggacttgcctaccattatgacttcaaaggaccagtgtctgaacaccatgatgaagtgcattgcgcttggtgcagttgagtttctcagtaaaccactctctgaggacaagctcaagaatatttggcagcatgttgttcacaaggcatttaattctggggaaaatgtcctttctgaatcactaaaacctgtcaaagaatctgtagaatccatgctgcagctccaaacagacattggacaagataaaagtaggatttcaattgatttagagaatgtgtcgaggtttagtgataatgaccatgagcagtctgctgtatgtgataaatatccggctccgtcaacccctcaattaaagcaggggacaaggttactggatgatggagattgccatgagcagactaattgctcaacagaaaaagaaagtggggaacatgatagggaatgtaaatctgtcgaaacttcatgtgggaatttgaatgccgaaagttctcctcagccaagggaacctgataagactctgattagggaggaagatgattttgccaatgtttccaagggtgagagcgctgtttcactgaatccacataataaaaagtttctcagcaatgccgatggtaatacatctccaaataaaacgggtgtacttaatgattcatgtgagattaaagctaatcggaagaaggtgaaagtagactggacacctgagctgcataaaaaatttgtaaaggctgtcgaacaactaggtattgatcaagccattccttctagaatattggagataatgaaagtggaaggtttgacaaggcacaatgtggcaagccatcttcagaaatatagaatacacaagagncaaagaattcggctcgaggaagatcggaaatggcataatcaaggggatgcaatgcaaaggaactattatatgcaaagaccaatcatggcataccctccatatcattcacatcacaccctttctccagctcctatatatcctatgtggggacaacctggcagtcaaacagccggtgtacagatttggggccatcctggttatcccatgtggcatcctacagaaagttggcactggaagccttatccgggggtgcatgtggatgcttggggatgcccgttggtgccacctcctcaagctccttgttttccctacaatcaaaatacacctggattgcacaatcctaaagcagttgactatagattcagcatgccacgaagttcctttgagcatcatccggtaaggcagtactttcctttcagttccttctaccatgtcatgaatttttttctctagttgaaaaataataagaattgtatatcgagcaaggtatgtagatgggaaaatatctcaaatattttgtatcaagcatgtatcttaaaatgacagcagtcgtataaagccatttatct

SEQ ID NO: 27342 - DNA, 806 bp, Glycine max
  Clone ID: TF_GmC1335_2
attatttccacgcagggtatcactgtgtatgaagagagagaaaggaagagagaggaaggaagagcacagcactacacagctccgaaataggagggggagaaattttgtatgcgttggatttcgtagatctgaataaatgacaaatgtatcattcaaagaatgttcctagtgcaagtttaattggtggtaattcattaagtcatggtcagcacatagattgtggtggcagcacaatggatcctggcagtggaggaaatggtcttagcaacaactctaatctcacctcaaaacaacgtttacggtggacacatgaattgcatgagcgctttgttgatgctgtggctcaacttggtgggccagatcgtgccacacccaaaggcgtgctcagagttatgggtgtacaaggcttgaccatttaccatgtcaaaagtcatttacagaaataccgacttgcaaaatatttacctgactcctcatctgatgaagggaaaaaggccgacaagaaagaaacaggggatatgctttccaatcttgatggttcatctgggatgcagattactgaagcactaaagcttcaaatggaggttcagaagcgactacatgaacaattggaggtgcaaagacagctacaattacggatagaagcccagggtaaatacctgaaaaagataattgaagacaacagcggactcagtggtgttctttcggaggcacctggctttggggtttgcagcggttgttcccaggggatgcatgccaagaacctgatataagactgacccgtcaacccctgaccctgaaagctg

SEQ ID NO: 27343 - DNA, 976 bp, Glycine max
  unsure (1)..(976): unsure at all n locations
  Clone ID: TF_GmC242282_1
gaattcccgggtgcgacccacgcgtccgcacactctccacattgtgttgcgcttctccgactctgaattttcgccaaaacgacgtcgtttcatggctccctgtgcggctgcggcggagtttccggtgggtctccgggttcttgtggtcgacgacgacgccaccacgttgaagattatcgagcaaatgtccattcgctgccgttaccgcgttaccacatgcactgaggctactgtggctttgaatcttctgcgggaaaggaaaggttgttttgatgtggtgctgagtgatgttcatatgccagacatggatggctataaactccttgaacatgttgggctggaaatggaccttcctgtaattatgatgtctggtgatagtactacaagtgctgtcatgaagggaatcaggcatggggcttgtgattatttgattaagcctgtacgtgaggaagaactaaggaatatatggcagcatgttgttaggaaattctggaatgacagcaaagaacaggataattctggcagcatggaagatagtgatcaaaataaacgggggaatgatgatgctgaatatacttctgttgctgacgcagcagtagttaaagcaccaaaaaagaggagcagtttaaaagaagaagatattgaattagagagtgatgatccagctgcatctaagaagccccgtgtagtgtggtctgtggaactgcatcaacaatttgtcagtgcagtgaatcaacttgggcttgacaaggctgtgccaaagagaatacttgaattgatgaatgtccctggtttgacaagagaaaatgttgcaagtcatttgcagaaatttagactttatttgaagcgattaactggagtggcacagcaccagaatgggatgctatacacagttcctgggcctattagaatccaatctgggaactaatggaagatttgacgnacatgctttggctgctgctgcccatgttccccc

SEQ ID NO: 27344 - DNA, 1395 bp, Glycine max
  Clone ID: TF_GmC16929_1
caatttataaagagaaactatagtctatagctgccacacattcaaacagtagctaaaagcatcaaaagtagtatatatttttatgtttcagtaacaacactaccaaaaaaaaggcaaaatggatctgcaaaatgtgcaaaaccaaagcatgatgcgtttggttctgtccactgatgccaagcctaggctgaaatggactcctgagcttcaccaacggttcactgaggctattaatcagcttggaggtgcagaaaaggcaactcctaagagtctgatgagagtgatggggattccaggactcactttgtaccacctcaagagccatttacagaaatataggcttgggaaaagccaaccactagaaacctgttctgacaacaagcaacaaggttacagtgaaatccagaacagtgatggtcattgcagcaaggaaatcagcattgggacccagaatcagatgactgaaagcttgaagattgctgaggctctccaaatgcaaatggaagtacaaagaaaactctatgaacaaattgaggtacaaaaacatttgcagcttaggattgaagctcaagggaagtacttacaatcagtgctaacaaaggcacatgaagcacttgcaagacacagttcttccacaactggtgtagaacttgcaaaatttgaactttctctgttagtgtcaataatcaataatgcatgtccaagctctccaatttcagaactcacagaaacacgagggttaagtttgaactgtggagagaggaaacaagacagaggaaccatgtgttcacttgaaagctctttgacatcatctgaaagctctgaacaacaacacatcatggatgaggcagaaaaccctcaaaagtttgatggtgtttcagttgaattgccgttgatttccattcatccagcagaagttaaagcattcaagggagatacaagtgttgatgggagaaagagaagtgcagaaactgattctgatcattgtgttgatcaagcttgtggcaaaaagaagttgaggaaatctgaagtgtcacaaatgcttgacttgaacagccaataccagagagacattgactcaagtgtgaaagaaatagatttaaatttcagttcaagcttttagggacaataaagatgtgtctggttatgttaaaaacatatgcaacaaaaatcattctcaaaagaaaatatgtttataaactatgtatatttttataatcagaaagaaaaaaaaagtcaagaatagtttcaagcttttagggacaataaagatgtgtctggttatatcaaaagcatataaacaaaagttcgcagaagaaaataaaattatagcaagtgcctattttgaaaacgattaccccccttcttgggtggtgttatacaaaaaaagggggg

SEQ ID NO: 27345 - DNA, 991 bp, Glycine max
  Clone ID: TF_GmC795_2
acgaaacacgattcgctcgaggagggctccgaggatgcgttggacttctaccctccatgctcgctttgttcatgctgttgaactcttgggtggccacgaaagggctacacccaaatccgttcttgaactaatggatgtcaaggatctcactttaacttatgttaagtcttatttacagatgtaccggacggtgaaaactacatatagggcggcggcttcatcagggcaatcagatgtgtatgataatggatcgtctggagatacttctgatgacttaatgtttgacataaaatcctcaagaaggtctgatctatccgttaagcagggaagatcaagtgttaatcaagataaggagtatcatggtctttggggcaattcttccagggaagcttggttgcatgggaagacaaagactgattctgttggaaacgtgcctttttctcttgagaaggaaatggatccaaagtgcctaagctatgagagaatatcagatggaagttcatcctcaaatctttcaggatcaagcccgaagaagcctaatttggatttggaattcagcttgggccagccactttaatttgagatctgaatatatatattattcattaactactatgaaactgaaagagggtagagctctggaatgagaatcaggaacccgctgagaaaatcagagaaagagaaagctaaaaagaaaacaaaagagaaaaaagaaaagtaaaaggagctaaagaacacaaggagacaagaaagacagaatgcaacaaaaaggaaggggcgagggaaaaaagcatggccttcctatcagagctcttgtgatgagatccaaatcaacatattatattttcttggtaaatatatgaaatctaattgatttgtatgtttttgcaatctgagagaaagagagagttatgttaaaagtatgaagtgatccttggtaattgtaatggagcactttacacttatgaaatatttagatatttccaccaaa

SEQ ID NO: 27346 - DNA, 2700 bp, Glycine max
  Clone ID: TF_GmC683_1
cgaagctcttattcggctggacctgacccaaaatccgtcttctctttctttctactccgattcctgcgttgcttttggtcttggtcgaattgcgaactcagcagcagaagaagttcctcaattgtttcacctcaaattcgattcgaactatgtaaacgccactgtcgcgtcgggtttgttgtctctgtttttgttgcggtgttactgttcctcggttcggatctccgaagcatgaatctcagcaacggaaagggatccatgtcaacccttactgcaagcgtggttatgaaatccggcgacgccgtctccgaccagtttccggcgggtctccgggttctcgtggtggacgatgatcccacgtgtctcatgattcttgagaagatgctccgcacgtgcctctacgaagttaccaaatgtaatcgagcagaaactgctctctcactgcttagagagaacaaaaatgggtttgacattgttataagcgatgtgcatatgccggacatggatggatttaaacttttggagcacattgggttagagatggaccttcctgttataatgatgtctgcggatgatggtaaaagtgttgttatgaagggtgtgactcatggtgcttgtgattacttaattaagcctgttcgcattgaggctttgaagaacatatggcagcacgtggttcggaagaggaagaatgagtggaaagacgcggagcaatcagggagtgctgaggaaggagatcggcaaccaaaggcttctgacgaagcagattactcttcctcagcgaatgaaggcagttggagaaactcaaagaagagaagggatgaggaagaggagggcagaggatgactcatccacgttaaagaagccgcgagttgtttggtctgttgagcttcatcaacagtttgtggctgttgtggatcaacttggaattgataaggctgttcctaaaaaaattttggaattgatgaatgttcctgggcttactagagaaaatgttgctagccatcttcagaaataccgtttgtatcttagaaggctgagtggagtttcacagcagcagggtaacttgagcaactccttcatgagctcacaagaagcaacatttgggggaacctcaatcaatggaattgatcttcaaaccctttcagctgctggccagttcccatcacaaagtctagccaagtttcaagctgctggacttggcaggacaactgccaaagcaggtatacctatgtctctatccgatcaaaagaaccttttcagttttgagaacccaagattaagatttggagaagggtcactaactcatatggatatccgtaagccaaaaaacttgcttcatggaattcttaccaacatggagccaaagcagcttgccaatttgcaccaatctacccaaccccttggtagcttgaatatgcgagtcaattctcctgccacgcagaacaaacccttgctgatgcagatgactcaggctcaaccaaaaggtcagttgctgagtgagaatgtcaatacgaattaaaccaggtatccgtcatctttgttgcagactacagaagaagaagatctttcaactggtgtttcgggaaatgcaattgcttgttccagaaacattactaccacttataaccctgttcaacagaaatcttctttggtgaaggtggccatgaatagagatgataaatccacagcaaagaagccccaggttgttaggtccctggagatccatcgtaagtttgttgcagctttgtttcaacaagaaggtacctctggtgttaaagaatctgttgtattatttaaaagttatgacatgtttaatgaccttcaccatcagaagtcccatgattgggacttaacaaacacaggcatgacatatgatgcttctcagcatgcaaaaccatctcaaacaacccttttttcggccccacaagacgcgattcatgagagtttttcctctatgcaagagactgatcttcatacagatactacttcaattggaaaagctatgttctccacaggtgaaggcatgcatcagagtagtctccaaaatattggtcaacaccgagcaataaccttcttcttgacaattcagtaagggttaaggctgaaagaattcctgatcctagctgtcagattaataacctcttctctgaccaatatggtcaggaggatcttgtcagtgcatttctgaaacagcaagaaggcgttggaacagctgaaaatgagtttgactttgatggatattccttagacaacattccagtttagaacagattctgcccgttctcttcctaattgcagtcgccaatgcaaatagttggcgttccatttgaaccaaatcgcactgcaattagtttgtttggatcttagtttaaatttttcaacaaatagaatttaattgatgtaaaaaattcaggcttcagggagtagtatgttattatgatttagtctggatgcttaaaagatgaataacaacaaactttaaatgcatgtgtgcaaaaggcatatttgcaattttttggctgctttcgtttgccaaggttctagcaagcttatgttgttaaggtgtacatgaagacactggtttagggaaaaactgtagagggcaaggctttgatacacctgcagacttgtaggagcattttaacttaataacacattatgaaatattttttcccttactccttggagataacaaac

SEQ ID NO: 27347 - DNA, 303 bp, Glycine max
  unsure (1)..(303): unsure at all n locations
  Clone ID: TF_LIB3109-028-Q1-K1-G3
gaaatggctctggtgattctggacttgttctctcaactgatgctaagcctagattgaaatggacacctgatcttcatgcaaggtttatagaagctgtgcagcaattangaggagctgacaaggcaactccaaaaacggtaatgaaactcatagggattccgggtcttaccttatatcatctgaagagccatctncagaaatacagattgagcaagagtctgcatggacaaagtaacaatatgacacacaaaataaccataaattcaggtgcagcaacagacgaaagactcagagaaaataacg

SEQ ID NO: 27348 - DNA, 1812 bp, Glycine max
  Clone ID: TF_GmC27103_1
cccacgcggagggaagaaaaaagtgacctttaaaacctccgtcgtcgttgctttcttctctctcttcctgtccgtggccgcatgagcttttcgttctgaaatttccttcacatccaacccactttccttttctctctccctctctttttatttatttattcattcattcatttcgctctctctctcccccttctcctttcttcctctgcaaccaaaatctgaatcttagggcaccaacacctttgatccaatgggttcggttgccgcagaagaactgaacttagatttaagatcctccttcgtccccaaaaccatcaccgatttcctccgccacctctccgccaacaacaaccaccctgccaccctccgcgatttcctctcccgcctcgaagacgagctccgcaagatccacgccttcaaacgcgaactccccctctccatgctcctcttaaacgacgcaatttccgttctgaaggttgaatcgcagaaatgctgcagggtggcgcgcgattcgccgccggtgctggaggagttcattccgttgaagaaggagcttggtgatcagagcgaggaggaggaggagaatgatgatgacaaggacgataacgaatgcagggataagaggaattggatgagttccgttcagctctggaataacaacactaccaccactactactaataacaacaacaatgcctctgatcgcaaacaactacttcataaattacaaaccaagaaaagtgaagaagggcagtctgtggctgaggatccttttcagacttgtagtaatagaaatgggggaagaagggcatttatgcctttctctaggtactcttcttcatcatcatctgtgccggtgacaacagtggggctgggggctgcatccaaagaagagaaggaagagagtgttaggaataggctttctcttctgacgccttctgtgaaagcttggtgtggttcaaggggatcaaggagcagttctatcagggctgtttcttcttctcctcccacggcccaggcgggttttgcgtgcgacttcagtaccaaaaccaaagcaaattagagagcgttgctggtcccatgagttgcacagacgattcgttaatgccttgcagaagcttggaggttctcaagcagctacaccaaagcaaattagagagcttatgcaggttgatggcctaactaacgatgaagtgaagagccatttacaaaaataccgacttcatacgcggagagttcctgctgcaagttctaatcagccagttgtggttcttggaggtttgtggatgtctcaagatcagtacaatgactcttcaaaagttagcagttcagggtcaggttctcctcaaagtcctcttcatttggctgcagggtcccggggagggacatctcctactgaaggtgacagcatagaagatgatgaagatgcaagatccgagagttatagttggaaaagtcatatgaacaaaccaggaaaagttgatgtataggatactactctccaccatgaattttgcagataaaagtatacatgggaggagttttaccactacataagaataatactacatgatacataaaaaagagggtcaacgataagaggcagttgtagtttttttttaaggtttagctttgccttatatactgcgtgagttttgatatgagactccgaattaaaatatcattttccttcgctttaagaagctggatatttttttttctctatcataaaattcttttatttcgttttgtcatgggaactctctgatccccccagaagaaattaattactagtccaatatttagatggtc

SEQ ID NO: 27349 - DNA, 257 bp, Glycine max
  Clone ID: TF_701008362H1
cgcatctcaggttcctccgtagcagcatataccatctggcgaagttgttggtaagtcatcatcaactgcatcgcagagtaaggctagaactacgcggactccagaacttcacgaggcctttgcggcagcagttaatcaccttggtggtcgtgtgacggctactccacatggtgtgttgaatcaaatgacagttgaaggtctcgatatcgatcatgtacaaaggcacttgcagaactatagaactgccagttacaaac

SEQ ID NO: 27350 - DNA, 1716 bp, Glycine max
  Clone ID: TF_GmC575_1
aaaaggttcaaaccacgcgtccgctctttctctctgcttctacaaaacgccatttccttatatatcccttctccctcccactcttcttctcgttcttcttcttaacgccatcaccacctttggcttcctttaaaaatgtattttttcactgagaaaatgcacagtttgaagatgggcttccctgactacatccaaacattggaagaagaacgccgtaagattcaggtgttctccaaagagctacctctttccttggaactggtcactcaagccattgaagcttgcaagcagcaattgtctggaactgcgagtgagtataatttgaatggccactcggagtgttcggagcagacaacatcaacggaagggcctgttttggaggagtttattccaatcaagaaaatggcatcatcatcccctttttgtgatgaagaggatgaggatgatgagcaacattctcacaagcaaagggtttcaaaggaaaataataacagtgataagaggaaatccgactggcttagatctgttcagttgtggaatccagatcccccagctgaggaggatgtgaataagaaagtgcctggattggaattgaagagaagtggaaatggtggcgctgccctccaccccccccgcctgctgggttgtggggcgttgcccagggtttctgtgagtaaagcaccctcttcaacctcggtagccgccgcgagttctagcgccgcagaacccgcagcagaaaaatctctgaatgagggacagagaaagcttcgcaggtgctggtcacaggacttgcataagcgcttcttgcatgcccttcagcagcttgggggtgcagattgtgagtatctcaatatatactgccacaccaaagcaaatcagagagctgatgaatgttgatggcctcacaaatgatgaagtcaaaagccatttgcagaaataccgtttgcacactagaaggccaattcccatggttcacaacagttccgatccacaagcagcaccttttgtccttgtagggaacatttttgtccaatcaccagaatatgcagctgtagctacctcaacagcatcaagagaagtggccacagttgcagcacctgctagaatttatgcaccagtggccacacatcctacacctgtttcacacccaccagatgattcaattaagaatccacagtttaagaaagtaaagctgtttgagcattcaaattcagatgatagggctaatcacagtgaaggagctgttcattcaaattcccctacctcatcctcctccacacatacctctacttcccttggctattgagttttaagatattgcacaagttttgtaaccaagttgttgtagaaagtccttagatattttcttatgactttttttttttactaaaaatgttctttactcctgttatctgggatttaaatcatagaggtaaaatacacagaaggtgacagttttgatgtcaaataaagtcccaccctcttggctggttactatgttatctccttggtacagaaggtgaactgaaatttcaaaatttaaaatttggaagcatgctcaatgtttcaattggtccagcttctcaagattgtgacaaattaaagctactgttctgacttagtcatattccttacaccttgggtaaactattaatcacaccactgtgttagttgggaattaaaagtggtccacctaagcacctacactgtcttggt

SEQ ID NO: 27351 - DNA, 1066 bp, Glycine max
  Clone ID: TF_GmC62574_1
gaattctgcattagggaacaacggctccaccatggcggcgtgtagggctgccacggccacaaggtttaatgggttctccggcgatgctttcaaatcttattttccattgcaccaatatggggtgggcccttcagaagcctcttctgggttcatgagatcaaggtttctgcagaagcttcccaacaagaggagcatgagagccccccacgcgtccgggacaagcaccctccatgcgagatttgttcatgcggttgaacttcttggtggccatgaaagagctactccaaaatcagttcttgagctcatggatgtgaaggatctaacactagctcatgtgaagagccatttgcagatgtatcgaactgttaagaccactgacaagcctgcggcatcttcaggccattcagatgggtctggagaggatgatttatctccgatggttagcaccgccgatcgtggtggtctccgacaatttcccaaccacagagggcggccggagtgggcggcacaacaagacatggactactcttccaccaccactactctatggagtaattcttcaagttgtggggagtcacggctaagacctagttctaacgacatagatggtctcagatcacctatcctccattcacaaacaatatcaggagggcatcaaattcaggagtgtgattcaatccaactcaagagcaacatgccaggttctaatttggagtgcaagatcccaagcttggaattcacattaggaagaccagattgggatggcaaagaacaagcctagctaataattttgataattggttcccttgcttaatttcttttaattttgcaatttatttataaaccatggtgacaacttcgtcatcttatgaaatgtagagctaattatttagataaatataaattggtgtctaggagaggaagaaaagaccctccgtgcgtagttctacttagctagctttcgaaaagtgtttttgagtttatgaacagttttgtttatattttattttgtttttatttatttgtgaggatgagaaggagggaaattaagatgtggcaattaaca

SEQ ID NO: 27352 - DNA, 1076 bp, Glycine max
  Clone ID: TF_GmC12582_1
cgctgctgccggggcgtatagggctgccacggccacaaggtttaatggaatttccggggaggctttcaaatctcatcatccattgcaccaccatcactcatcatcaccacactatggggttggacttggaccctctcatgagacctctgcagggttgatgagatcaaggtttttgccaaagttgccagcaaagaggagcatgagagcaccgagaatgcggtggacaagcacactccacgctcgatttgtccatgctgtggagcttcttggtggccagctcgaggctacaccaaagtcagttcttgagctcatggatgtgaaggatctcacattagctcatgtcaaaagccatttgcagatgtatcgaactgttaagaccactgacaagcctgctgcttcttcaggcctttcagatggatcaggagaagatgacatgtctccaatgggaagcagtggtggaatgcgtcaattttcagaccaaagaagcctttctgatcgaccactgcaacaagatatggactactcttcaggcaacaacactctatggagtaactcttcaagcagtagagaaacatggcaacaaaataactctaatgacgtagatggtttcagacccccaatcttccagtcacaacaaatatcaggagggcatcaaattcaggagtgtgattcaacccaactcaagaacagtttgtcaggatcgaatttagagtgcaagaacccaagcttggagttcacattaggaagaccggactggaatggcaaagggcaagcctaattttcattggttccctttattgtctctagctagtttgcttaattagtttaattacaacccggtaacatgtgacaaacttcataatctttcctgaaatagaaaggtggtactatatataaaaatatatattcaggcagaaaaagtaaaagccctatatagttccgctaagtttatccttttttggaagttttatgacttcatgaacaattttgtttagcctttttcttgaatttaacattttaatcattggagacaggatgcacaatgaaaacaatgtggttgagaataagggttaccc

SEQ ID NO: 27353 - DNA, 1503 bp, Glycine max
  Clone ID: TF_GmC51280_1
cagagattctctccaccccattcaagtcaaagaagaaagaatagagggaatttttcttctttttttaaaaaagaaaagaaggaaaagttggtatggaatgggatgagagagaggaagaaccacagctcatggcatatattcccccaacataaccccacttatgtttcctgatatggagtgagatcatagaacaacacaaccaactccaagttataaagagaactatagctggcacatattgatgcatacatagctaaaaggatcaaaaggcacatctatgtttcagtcctttgccagcaagtaagtagtaactcatccaaatatagcaaatggatccacaaagcatgcattttgtgctgtccactgattccaaaccaaggctgaaatggactcctgagcttcaccgacggttcattgaggctaccaatcagcttggaggtgcagataaagcaactccaaagagtcttatgagggtgatgggaattccgggacttactttgtaccacctgaagagccatttacagaaatatagacttgggaaaagccaagaactagaaacctgctctgacaacaaacaagaagattacatagaaaccaagagcagcagtgatggccattgcagcagggaaatcagtattggggcccagaatcaacttacggaaaacatgcagatagctcaggcactccaaatgcaaatggaagtgcaaaggaaacttcatgaacaaattgaggtgcaaaaacatttgcagctcagaattgaagctcaagggaagtatttacaatcagtgctaaagaaggcacaagaagcacttgctggatacaattcttccccagtggggatagaacttacaaaagctgaactttctcagctagttaccatcatcaacaatgcttgtccaagttctcccatctcagaactgacagaaacaagagggttgagtttaagctgtggggagaggaaaagagacagaggcactatgtgttcactggaaagttccttgacatcttctgaaagctcggggagaaaggaagagaaacagccaatggaagagattgtggagttcaaaagttccattaatgtttcacttcaattgccattgatggaaattctcactgaggataaagcatccaatggaggctcaagcaatgaggctagtgggagaaagagaagtgcaacagcagcagaatctgatgatggtagctgtgttgttgagcaaccatgtgggaaaagatgtggcaacaagttgaggaaagccaagttgtcagaaatgcttgacttgaacagccagtgtcagagtgacatggactcaacaagctcaaaaacattagacctaaattgcagtttaaacttttgggaaccatgaagatggtttttatatacttcacttcctaattaattatatgaacgtatgaagcaaaatcattgtcataaaagaaatctgtttatatagtatgtatatttttattattataatggaaaaaagaaagaacaattgactgtaa

SEQ ID NO: 27354 - DNA, 558 bp, Glycine max
  Clone ID: TF_18691984
actcgttgatgttcacttgccaaatatggatggctatgaattccttaagcatatcaataaggaaattgatatccctgtcatcatcatgtctgttgatggttctacgagtgctgtgaggaaggctattacacatggggcatgtgattattggaccaagcctttcagtgagaaccaattcaagattatgtggaagcatgttgctatgaaagcctggaatgaaaagaagctacaaaaaaaagatttttctgaatttgcttcttctgttcttgatgcaaacttgaaggaccaaaaagagatcagttccaattccaaagaatctgatgttgatgattgtgatgcacaaccaaagaagccccgtatagcatggaaaggagaactgcattgccaatttgtcaaggcagtgatgcatattgggcttgacaaggcacagccaaagaagattcttgaagtgatgaacattcctggtttgacaaaagaccatgttgccagtcatttgcagaaatatagatttgatttgaagaaatctaatgaagtggctgtgcaacagaatgagatgca

SEQ ID NO: 27355 - DNA, 571 bp, Glycine max
  unsure (1)..(571): unsure at all n locations
  Clone ID: TF_LIB4392-050-R1-K1-E7
tcgccctctgccaactaccaagctccggcttcctctgccaattcaatccgtcgtcgttttcgccaattccgaatgcgtcgatttcgggttggagaatgagttctccgacctcttcttggatctctgttcaaaccgtcacacagtctctgcgttcggattctcttgtccaattttaactctctctccctctttttttttctctctctctcagttagtataactacgtatcaggcaaagaagttttcgccggctagcatggtgccgcataaatctcaaggtggtgtggagcagcttgcaaatgctggggttttgggaggatctgctgtaaaaattgccgctgcacctgctgggggaagtgggaagcagcgtttgaggtggacatctgatcttcatgaccgttttgtcgatgccattacacaacttggtggaccagatagagcaacaccaaaaggtgttcttagagtgatgggtgttcctggactgaccatttatcatgttaaaagccctttacagaaatatcgccttgcanaatacttgcctgaatcaccagctgatggttaagactctaaag

SEQ ID NO: 27356 - DNA, 712 bp, Glycine max
  unsure (1)..(712): unsure at all n locations
  Clone ID: TF_GmC594_2
ttgagctgcatagaaaatttgttgctgcagttaatcaactgggcctagataaggctgttcctaagaaaatacttgacctgatgaatgttgaagggcttacaagggaaaatgttgcaagccatctacagaaatatagactctatctgaaaaaggcagcccagcaagctaacatggttgctgcattgggtggtagtgattcttacctacgtatgggttcaatagatggatatggagatttttgcacctcgtctgggtctggaaggatcacaaacactactttaccatcatatgcatctacgggaattttcagtaggctgaattctccagctgccttgaacatgagagcaattagttcttctgcgcttatccggcctgttcagtctcaaaacatcaactgctccttaaacacacttggaaacattcagccatctgtttttcctgcaaatcatagctcaagtttattacagggaattccgacatcaattgagcttaaccaatctaagcaaagcaactgtacaactggaatatcacagttaagtcaagttgagttatacttatggacttttgttagccatctgatccgttccatctcttttttttttcaatcttgtagtgtatccccataaaaaaatttctgtctatggtttagataaaataattgtaatatgaatgcttcttggtgctgngcnnnnnnnnnagattttacaaaccc

SEQ ID NO: 27357 - DNA, 2038 bp, Glycine max
  Clone ID: TF_GmC942_1
ccacgcgtccgtagaaaatgtgtcgaggtttcgtgctatagatgcttagcagtctgctgtatgtgatagatatccggctcggtcgaacacaactttggccagaagacttggtgggggcattttcttttcagccaagaagggattcggtgttgatgagcaatattgatctgttgctgcagtaggggaccgagtaagtatgccaaaccagctatggttttttctgccaatgaagttcaaatatagaaagagtacccaaaaagactcagaattcttatgagtgaaggaggtggggcattttcttttgagataagataacagcttggaaacaagaaaaaaaagtgaattagtgaaaagaaccgcctttcctactacatccctgattctaccttgattcatgtatgcatgttttggagacaaagctatccggtttaggtttaaagtagactggactcctgagctacataaaaaatttgtgaaggctgtcgaacaactagggatcgatcaagccattccttctagaatattggagataatgaaagtggaaggcttgacaaggcacaatgtggcaagccatcttcagaaatatagaatacacaagagacaaagtgcacccagggaagaagatcggaaatggcataatcaaagggatgcaatgcaaaggaactattatatgcaaagaccaatcatggcataccctccatatcattcaaatcacaccctttctccagctcctatatatcctatgtggggacaacctggtagtcaaacagctggtgtacagatttggggccatcctggttataacatatggcatcctacagaaagttgtcactggaagccttatcagggggtgcatgtggatgcttggggatgcccattgttgccagcccctcaagctccttgttttccttacaatcaaaatatacctggattgcacaatcctaaagcagtggactatagattcggcatgccacaaagttcctttgagcatcatccggcagaggaggtggtagacaaggttgtgaaggaagcaataagcaagccatggctaccattgcccttaggactcaaacctccttccatggatagtgtgttggctgagctctccaaacaaggcatttccggcatccctcttggcaacaagcgttcttctactcctaaactccgctgacatgtatgaccgaccccaccactgggtcccacagagtagtggttttgatgatggggccagccagttacatatcaacgccctgttgactcttgtaattattttgtttctcaaatttccctcccaggttgcaactagtggtagatttggctggaagttgggaccatttactttgccttgccatccccgcctccacaccaaccactcaagatgtctctccttaagctgctgagcaatgatggttgatatgatatgatatgatatcaggtcaggtcatacaccaccatgatgcatcacaaatgggcaatacattgatcctattccatggccacttgccaaaacaaaacgctaaaaataacattaaaaaaaaaggttaagctatgcagcagcattcagcagtttcaatgcagtgcatggcatcatttgttgaaactaaggactggccacgcatttgttgaagctttatacaaaatattgtggctgaaagaaagataacaatgtggactttttgatggttgtggtggtgaggggtttttggttgtaagtgaccagcttcggggtccatgtaaaaatagcatgacagggactggaggtgtcttggttctgttggtgttgttggggagggggtctagttgaggtctaataatggaaaaaaaggatagttaggatagtgttgtgaataaaaaatgagtccaggctttggtttatgctaacttgttcttttcccaattcaatttgttcactcagctattttagcttaagttcagcattgagaacaacactttgtgcatgttcagttgtttttgctcactttatctttttaacgttttgaaaataattctaagctatgatcattactttcttttaaaa

SEQ ID NO: 27358 - DNA, 2818 bp, Glycine max
  Clone ID: TF_GmC577_1
aaaaagacaccaactttttcgctccttccttgcatttattcattcacattctcctcaaaacttactattccttcctcacaaaataaacaaaaaaaaatctttccttattgttttccgtgtttcctttgtttcatagcttctgggttttggttttcagacccacaatacaaagttcacaagtgtgtgtaaagattgaagaagaaaatgaccgtagagaagaaaatgaatgattccggcgacgagtttcccgtcggaatgcgtgttctcgccgtcgacgatgatcccacttgcttattggttctggaaactctcctccgaagatgtcaatatcatgcaaccacgactaatcaagcaataaaggcgttggcgctgttgagagaacacaaagacaagtttgacctggtaattagtgatgtgcacatgccagacatggatggatttaagctgcttgagctagtgggacttgagatggatcttcctgtcataatgttatctgcaaatggtgatacgaagctggtgatgaaggggatttctcatggggcctgtgattatctgctgaaacctgtaagaatggaggagctcaagaacatttggcagcatgtaatcaggaggaagaagtttgactcaaaggagaagaacaaaacccgcaacatagacaaacctacttcaaacagtagcaatggactagggtcatcaggaacaggaaattctgatcacaatgagaagctgactaagaaaaggaaggatcaagatcgaacagcttatgaacagcagtagaatgatcatgacaatgacgacccatcagcccagaagaagcctcgggttgtttggtctgtggagctgcaccgcaaatttgttgctgccgttaatcagctaggcattgacaaggctgtacctaaaaaaattctcgatttgatgaatgttgaaaagcttacaagggagaatgtggcaagccatcttcagaagtataggctttatctgaaaagaattagctgtgtggctaaccaacaaaccaatatggtggtggccttagggggtgccgatccatcctatttgagaatgaattctgtgagcggggttggacatatacaatcaataagtggttctggacagcttcataacaatgctttcagatcctttccacctagtgggataattaatagattgaatactcctgctggtttaaatgtgcatggatttccttctggagtacttcaattgagtcaatcacaaaatttaaaaaacaccaatgataatcttaagttccagtcagccattgttcctgctaatcagaatggtgttcatggaatgacagtatctgtagggcttgatcaactgcaaaacaataagggtgttatgtctgttcaaaacctgactactgtttttgatgccaaaacaacttttcccatctcgaataaactcccagatccaagaccaaaaataaccaactctggctctcacactccagatgtgagtttctcaaacaatgccttgatgttggaaccacgccctcaaggcacacaagggagtgtaagaattgaaactttatcttcttcagtagcctctcaacattcagaattttctttgtctttgctggatcaaggtagatatagtgataattgggcaagtactgtgcagccatctgtgatccagacaaactcttaccctccaagtgaatgttttggacagactaatatacctcctacagataacatggcttctgtacccttgcaaggtgggaatctaagtggtgcgtccatcacttcactgtccaggcaatcctatgattcaatgacagatatgcactctgaaggagtgacttttaccaacagacctgggcatataagcagtaatgtgccatatcaagggtggcatgacaataatcaggatgctactcaccattcaaatattttgtcaataaactcactgactccagtcaatggtgctgctgttccagctggccatgcagcaatgaactcagccttacacagaaacttggactttaattattgtgatcccttacaaatgaagcatgagggatttgtggagttaactgacgaggccttatcgaaacaacatcaggggaatatcatgaacctaccgaaatctcaacaaagtcatttctctaataatcttggttcactggaagacttggtcagttcaatgatgaaacaggaaaatgataagatgaaattattggatggaaacctcatttgcaataattactctggtgggttatctcgatgtgatagcaggtttagcagcacattccagaatatcatgcatcctcgctgatgaatttttttgtagttttcatcgtgttttaagggctttagcttttgtcttctcgtagttactataggatttagcttctccagattactttgttctctaggtttgttccactaagggctttctattttttaaacaaatgcattgttgtccttgccttgagtccagcaatgcaatatggagtgttattgatcactttgtttaatctccttagatatgttggccttcaaattggacctagatcttctgtcacagccacacttgcagcgaggagagagacacaaggtcctggtggagcccatcacacaaatgggatccacttgaaccctgtgtctttttcatgccttgatgcttggtgtaggtgtggcagcttgagagagatcagggattgcaaatttaaatgttagggatccataaacaagattatagtgattaagttgaatgacaataaacacgaattcccccttttatgcttggaaatgttgtctattaaaattacacattcaatattatttattgacgtagc

SEQ ID NO: 27359 - DNA, 2343 bp, Glycine max
  Clone ID: TF_GmC606_2
tgacatggatggttttaaacttcttgagcatgttgggcttgagatggatcttcctgtcattatgatgtctgtggatggggaaacaagcaaggtgatgaaaggtgttcaacatggagcctgtgattatctccttaagcctataaggatgaaagaactgagaaacatatggcagcatgtctttagaaaaaagatacatgaggcaaaagaatttgaaagttttgagagcattcacttgatgagaaatggatcagagctatcagatgatgggaacctgtttgctgtagaagatgttacctcatcaaagaaaagaaaagatgcagatagcaaacacgatgacaaagaatgtttggatccatcatccaccaagaaagctagagtagtctggtctgtagatcttcatcagaagtttgttaaagcagtgaatcagattggatttgataaagtggggcccaagaaaatactagatctgatgaatgtcccatggctgactagagagaatgttgctagccacttgcaggtgatgctatattttcacaccagtatgttatacttagactatagagaaagaaacatgtatactttctttcattcagatgagcatctagattcttaatattttttattgtatgcatgattacatctcatttatatcaccgtttggtagacttagaatcacaacaaagcttcactttaatacaatagggtgtaagtgtaacctccaaaccataggtcctgtacaaatgtttcgtagaaatattacaacttaacacgttactcagcatgtccatctccatctaatgtaggttttgttactcaaacttgcacaccaagaagatacagatcctctcataaattcaataaagcaaaataataggatagaaaaatggcaaaacttatatacagttccttatgttctgtttgtactatttactaatcaaaattgaagtttcatctcgataatctgcacaattctttaatgcaaacctttatatgatgaaactgcaattctaattagataacaacacaaacatctatagaactgtatctaagttttgtccatagaagaaatgtatgtttctataatgtttcataagtttgaaaccaaggttcttactaagaaatctttaattatgcagaaatacaggctttatttgagtaggattcagaaagaaaacgatcagagatcttcctcaagtggaatgaagcattcagattttccttcaaaagatatgggaagttttggttttcagaactcagtaatcaagcaacaaaatgatgttgcaattgacaactacaatcattcagatggatcattacaacttcagaatgtggaaactaaaagtcatgaagctgatcccaagggaattgtttcacagtccaccatagcaaaaaaaggaaggattttgactggtaacattgctgacacgaacatgagagagagtttaagggttggccttaatcaaacttttccccctctagagtcagaaggaaaccatgcagtgtttgattgttccatgccaacaccatactcttggactgaagttccacacatgcaactcaaagaagaacacaagtcacttgtttatttagaagatagcttcaatcagttgccattacatggtaagcagcagcaacacatccatgtggatcaatcacaatcagttgcttcaattagttccgctccctcaataaccgaggaagaggctgctgcttgtatagaaccaaaacctttgtttgcagattacaacaatgattatgccagttctgtgagttcaacagggaatgcagttgccacctttcctattcaaccaggaagtcttattatgaatggtcaatcttcagaacgcatttccactacaacttctggattgaaaacacaggaatataataatctcagtagcatttctgatcaggaaatttaccaaagaaaccttttgggatgtgaggcagcttctgcatcattggacgaggacttgcatttctattggctagaaggcgaatgctataataatatgaacttcggtctgcagaatataggaatgtctgaatattatgatccaggacttatttcagaagctccaatccacttatatgattcagctgattactcagttatggatcaaggtctattcatagcatgatttgctttgcctttcctgcatcttcaacaaaaatcaaaatttactcatgaaaggacaatttagtgtttcttgtagctaactacagctttattggagaatttcaacctcaagggttggggtattcttttttccaatcatcgaggatttggatatatattgcagtatgtataaaaatgggtgctgacaagtattgagcttactt

SEQ ID NO: 27360 - DNA, 2084 bp, Glycine max
  Clone ID: TF_GmC29852_1
ccatacggctgcgagaagacgacagaaggggaactcaagtcattagcattcttctttgactttttggtctaaaaccggtttctcttgtcacaccaaatggaccgacccgccgccatattttccgacaccgtcaacctcaacggcacggtgacgcagctgtctctgctcgccgacgggaggctgtggtggccggagggcggtcaacgcaatttgagcatcgagaaagaggttctcgggttcaccggcgacggtcccgatataaggctcaaaacaatcgtggaaaccgaagatggatgctgtggcggtgcaagcagagcaaaactagtccgaaacgacgtcgtttttcggccatcgtccgaggaaacgcataggctctggtgccagaagcttggcgaattcatcgattctctcggacgacccaagaggctttttgtttttgttaatccattcggggggacgaaatctgctgtcattgtttttcgtgatcaagtcaagcctctgcttgaagacgcacaagtgcagcttacagtccaagaaactaagcatcagctccacgcaaagcaagttgttcagtcattagatttttcaaagtacgatgggattgtttgtgttagtggagatgggatcttggtcgagtaggttgtaaatggactgcttcagaggcaggactgggacactgcaattaagatgccccttggagtagttcctgcaggtacgggaaatggcatggcaaagtctcttcttgattcagttggtgatccttgtacagtacccaatgctgttcttgccatcatacgaggccgtaagcgaaaacttgatgtggccaccatcacacaaggggagaccagatttttcagtgtgttgatgcttgcatggggtctggttgctgatattgatatcgagtctgaaaagtataggtggatgggaagtgctcgtattgatttttatgctctcactcgaatcttgcatttgaggcattacattggatgtctttattttgtgcctgcacctggatttgaagcttacggggaccccactagttaccctggaagttctaataacaaaggcagcaatagtgaactaattgatgaggaacctttgaagttacaaaggctaggctatcaaggacctgaaattgacctggagaatcagagttggagagttttaaatggaccatttatttctgtctggcttcacaatgtggcttggggtgctgaaaacaccaaggcagcaccagatgcaaagttctcagatggttatctggacttgatcattacgaagaattgcccaaagttaccattgctgtcgttgatgtcagatttgaataatggaggtcatgtaaaatcaccatatgtcatgtatttaaaggtgaaagttttggtcttggaacctggtccacgcttgggggaccaagagaaggaagggatcatagatgcagatggtgaggttctggcaagggggaaagggtcgtaccaatgtgagcagaaggctttgatggcctatgataaacttcaaataacagtagatcaaggtttagctactattttttctccaatataaaaaccttgatttttataacaaaaaagaaaaaaaaaacaaaagaaagaataatcttggtttaataattttggaaaaaagcaactatcagtgcaaccttatttcagcctggagagaaagagatgttagagaggagaaatgtaaatataataaattgtaaatgatataagagatgttcatataacattgtttgataataaacaaaaaaaaaaatccgtggtcgctcactttgacatcttatcctccgttcactagacgcacatgcagctcatgagcgtgactggtttgacccgctaaagcgtcgctagtcgcttgcagaagtccggtcttcacctcaagcgcatgcaggggatatccgccaccggtcctgacggcgcctccggtgcagtcgccgaccccgccaccgaccacttgttcgccagctcgccggtgccggcgcatttcttgcacccggccgcgaggcggaattcggatcatttcctgccgttcgtgccggcgctcctccaccaccaacagcagcagcagat

SEQ ID NO: 27361 - DNA, 267 bp, Glycine max
  Clone ID: TF_LIB3242-572-P1-J1-E2
tgaattcggctcgagatcaaacacatggtcattaacatcatgttttttaatttggacagaaaggcacagatgcatcccggcccttactcaggaaatgggctcctgcttagccacttatgcgtaggacaccataacttcatgaggcgtttgtggaggctgtcaaccaccttggagggagtgaaaaagctacttcaaacggcgtgctgaatctcatgaaagtagcaggattaactctatttaatgtcagaagccttctgcagctcattc

SEQ ID NO: 27362 - DNA, 684 bp, Glycine max
  unsure (1)..(684): unsure at all n locations
  Clone ID: TF_LIB4392-004-Q1-K1-A1
aagaacagcagaaagaaagaacacaactttggccagaagacttggtgggggcacttttcttttcagccaagtaggggaccgagtaagaatgccaaaccagctatggtttgcactgccaatgactttacaaggatggaaagatttcccaaagggacttagagttcttctgcttgaaggagatagtagttctgctgctgagataagagaaacaacttgaggccatggactataaggtttccactttctacgacgagaatgaagccttgtcagcactctcaagtagtcctaaaggcttccatgttgccatagtggaggtgagtacaagctgtagccttggaggtttcaaatttcttgagaatgcaaaggacttgcctaccattatgacttcaaaggaccagtgtctgaacaccatgatgaagtgcattgcgcttggtgcagttgagtttctcagtaaaccactctctgaggacaagctcaagaatatttggcagcatgttgttcacaaggtagactggacacctgagctgcataaaaaatttgtaaaggctgtcgaacaactaggntattgatcaagccattccttctagaatattggagataatgaaagtggnaaaggtttgacaaggcacaatgtggcaagccatcttcagaaatattagatacacaagagacaaagtgcaccca

SEQ ID NO: 27363 - DNA, 1469 bp, Glycine max
  Clone ID: TF_GmC200_1
gatccacgcgttcgcatggttgtttgcgacttctgggagctcagtctcgctcagagtcagagaaaaacacccaaatcaaatattatcatggagcccagcttggatttgagactgggctttgtccccaaacccctttccctgtttttcggcgacgtttctgggaacagagacaagtgcgacaaagtggtcacactcgatggcttcgtgcagagattggaggaagagttgacaaaggtcgaggctttcaaacgcgagcttcctctctgcattctcctcctaaacgatgctatagcgagattgaaggaggaaaaagtgaagtgttcgggaatgcaagatccgcctcttaaaaccagttcaggaggaaatgaaaatgaaaactctgctcgacagaaggggaattggatgagttcagcgcagctttggagcactcagaaaaccaaatcgagaaatgaggaagatgataggtctgtgccagcgaacccaattaatgggaattcgtgtgtcctcgagaaggagggttcccaagttccgaggtttggtttgatggctcgtgcttctgaactgagtcatagcaattccaagagtgttggtggagatattagttctggctcctctttgctccgtgttgaggtacagagtcagccacaaccgccgcaacatatgcaacagaatccgaggaaacaacgccgctgctggtcgccggagcttcaccgccgctttgtggacgctcttcaacaacttggtggagcacaagtggccactcctaaacagattagagaaccgatgcaggtggaaggccttacaaatgatgaagtgaaaagccatttgcaaaagtacaggcttcacgttaggagatttccagtttcttcaactggccaggctgataatgggtcatggatgtcacaagatgaatctggggataaatcaaagggaaacaacatgtcacagtctggttctccacaaggtcctctcacacctctgatcctaggaggagcaggaggaggatctgctaagggtctctcaagccctggacagaacagtgtggatggagaagatgagcaatctgattgccggaattggaaaggagggcttcaccaccaccagcttgaagctgataatcaatgcctctaatattttgcagataaattataatacaatacataaatgatgaagagttgaagacccagaatttgacaacataagaataatagatctaacacatagaagaactatagggatcaagttttatgctaccattattttaaactgtttggtagagagcaactgaggttttacaaatttttcgggtttcttcttttttaaactcggtatagttgtatggagcttaacttttactgggcaattttcatagattaatcctcaattatgccatgtgctttaatttgtggttgggtttggcttttggatgttgaattttatgcaaaatgccacaaaggtttatttcaggt

SEQ ID NO: 27364 - DNA, 352 bp, Glycine max
  Clone ID: TF_LIB3028-002-Q1-B1-G9
ggcagtgctggtcaccggagttccatagccggttcattaaagctttagatgtccctcgatgttctcaaacatctactcagaacgaaattaaggaactcatgacggtggattagctgacaacttcagaagtccagactcatttacaaaacaagcgacttcatacatagcgagttccagttgctacaactccaagttttagtcagtcagctgtatatctagcatgcttgtgcacgcacactgaatccattaagggtggcagttctgatactcctcacagtccactccatcaatccacacactcgggggaatcaccatcgaccacataaggtgaccacatgatggatcatgatga

SEQ ID NO: 27365 - DNA, 2396 bp, Glycine max
  Clone ID: TF_GmC577_2
gcgagaagacgacagaaggggagagaacacaaagacaagtttgacctggtaatcagtgatgtacacatgccagacatggatggatttaagctgcttgagctagtgggacttgagatggatcttcctgtcataatgttatctgcaaatggtgatacgaagatggtgatgaaggggatttctcatggggcctgtgattatctgctgaaacctgtgagaatggaggagctcaagaacatttggcagcatgtaatcaggaggaagaagtttgactcaaaggagaagaacaaaaccagcaacctagacaaacctacttctaatagtggaaatggactagggtcatcaggaacaggaaattctgatcaaaatgagaagctgactaagaaaaggaaggatcaagatgaagatgaagatgaggatcaggagaatgatcttgacaatgaggacccatcagcccagaagaagcctcgggttgtttggtctgtggacctgcaccgcaagtttgttgctgctgttaatcagctaggcattgacaaggctgtacctaaaaaaattcttgatttgatgaatgttgaaaagcttacaagggagaatgtggcaagccatcttcagaagtataggctttatctgaaaagaattagctgtgtggctaaccaacaagccaatatggtggcggccttaggggttgcagatccatcctatttgagaatgagttcggtgagcggggttggacatgtacaaacattaagtggttccggacagcttcataacaataatttcagatcctttccacctagtgggataattaatagattgaacactcctgctggtttgaatgtgcatggatttccttctggagtacttcaattgagtcaatcacaaaatttaaacaatgccaatgatcatcataaattccagtcagtcattgttcctgttaatcagaatggtgttcagggaatgacagtgtctgtagggcttgatcaactgcaaaacaataaggttgttatgtctgttcagaacctgaccactgtttttgatgccaaaacaacttttcctatcccaaataaactcccagatccaagaccaaaaataaccaactctgtctctcatacttcagatgtgcatttctcaaacaatgccttgatgttggaaccacgccctcaaggctcacaagggagtgtaagaattggaacattatcttcttcagtagcctctcaacattcggaattttctttgtctttgctggatcaaggtagatatagtgataattggacaagtgctgtgcagccatctgtgatccagacaaactttttccctccaagtgaatgttttaggcagactaatatacctcctgcagataacatggcttctgtacccttgcaaggtgggaatctaagtggtccatccatcacttcattgtccaggcaatcccatgattcaatgacagaaatgcactctgaaggaatgacttttactaacagacctgggcatacaagcagtaatgtgccatttcaagggtgggatgaccataatcaggatgctactcaccattcaaatattatgtcaataaactcactgactccagtcaatggggctgctgttcaagctggccatgcagcaacgaactcggtcttacacagaaacttggattttaattattgtgatcccttacaaatgaagcatgaagggtttgtggagttaactgatgagaccttattgaaacaacatcaggggaataccatggaccagcaaaaatctcaagaaaatcatttctctaataatcttggttcactggaagacttggtcagttcaatgatgaaataggagaaagataagatgaaacacttgatggaaacctcatttgcaataattactctggtgggttatctatgtggtagcaggtttggcagcacataccagcatatcatgcacatcctcgttgatgaattttgtagctttcattgtgtttaaccacttttttcttctcatagttactataggctttagcttctccagattactttttcctgggtaaagttttctaggtttgttccattaagggctttctaattttatacaaatgctttgttgtccttgccttcaggtccagcaatgcattatgaagtatcaatcactttgtttaatctacatagatatgctggcctgcaaattggacctagatcttctctcacagcctcacttgtagtgaggagagagagacaaaaggtccaggtggaacccacttgaacctgtgtctttctcactcctcgctgcactctgtgtagcagatggggagagatctggggttgcaaatttgtaaaatgttagggatccataaacaaagattgtagtgattatgatgaatgacaataaacatggatgcccccttttatgcttgg

SEQ ID NO: 27366 - DNA, 1833 bp, Glycine max
  unsure (1)..(1833): unsure at all n locations
  Clone ID: TF_GmC89825_1
gttttccgtccacgctttgacaaatcgccattccctatatattccttctcatccctccttctcaaacngtttttcctttccttctcacacccacaaaactcataactcaccaacacacaatcaaagaggaaaaaaaaagaagcttcaaaatttcaatgcaatttgctgagaaaatgcaacccttgaaaatggggttccgtgagtacatcgaagctttggaggaagaaaggaaaaaaatccaagttttccctaaagagcttcctttgtcattagagcttgtcacacaagcaattgaggcgtgtaggcagcaattgtctggaacggttgcggagtacaatttgaatgcccaatcggagtgttcggagcagacatcaacggatggacctgtttttgaggagttcattcctataaagaaaagggcatctcaagaatctgttgaagaagaagatgaagatgaagaacattttcataaacacaaaaaaaccgccactgataaaaaaaaatcagattggctcagatccgttcagttgtggaatcccaatccccctcctaccaaagaggacgttgttgtgcctaggaaaactgatgttgtggaagtgaagagaaacggtggagcttttcaaccgttccaaagagaggaaaaaagtggtgatgcaaaggctagtattaataatgatgcatcagcaattggtaaagcaccctcttcaccaccagtgcctgctacaagttctacaggaccagtgagagtagaaaacaaaaaagaagagaaaggacaagctcagagaaagcaacgcaggtgttggtcacaggaattgcacaagagattcttgcatgcacttcaacaacttgggggtgcagactctgccacgcctaaacagatcagggagctgatgaaggttgatggcctaaccaatgatgaagtcaaaagtcatttacagaaatttcgtcttcacactagaagaagccccataatccacaacaatgcaagttcacaagcaggccctttatttcttgtggggaacatttttgttcagccctcagaatatgctgcagtagcaaccacctcaacagcatctggagaggaattgaccacagttactactactactgctccaactggaatatatgcacctgtggctgcacaccctccagctgtcacccacacattaccaattatgaagcagaaggagcattcacactctgaggaaagacctaatcatagtgttctttcaaactcacctgcctcatcatcctccacacacaccatcacaacttcaccacctgtccccaattgattttgatcaacttgttgtaaaaaattttgtaaacatattctagtacaaaagaaagtctctattgttattctcttagtgtatgtttagattaatttattttaagaaaatagttttattttctgtattttaactagatgatgttttcagttttcacaaataattaatattcgaaaaaacaaacatgttaaactacaaatcacccttttagctggctacactaatatttcctcagcagtaaaatatgtaactgactntttaaagcatcttggatttggaagcacgttcaacatccattaattttaaagtaaagtgttttatctttagatgttttaatttaaaaaatgagttattaattaaatggagtatagaatttttattcaataccaatggtttcattcaatgcctctagtatttctcaactcaattaattttataccgaaaataatttccttgatataaattaaatgtgggactatttaatttaaaatacaataaatggaaattttaatggaattttaaatgatctaatctgaattta

SEQ ID NO: 27367 - DNA, 2060 bp, Glycine max
  Clone ID: TF_GmC606_1
ggactctcctctcaaacaacatggtcaatggttgcttctctagttctccacgccacgatgcttttccagctggtttgcgagttcttgttgttgatgatgatctaacatggttgagaatccttgaaaagatgctcaagaagtgcttatatgaagtgactacatgttgtttagcaacagaggccctgaaaaaacttcgtgaaaggaaagaagcatatgacatagtgatcagcgatgtgaacatgcctgacatggatggtttcaaacttctggagcaagtaggacttgagatggatcttcctgttatcatgatgtctgttgatggagaaacaagcagggtgatgaaaggtgttcaacatggagcatgtgattatctccttaagcctataaggatgaaagaactgcgaaacatatggcaacatgtctttagaaaaaggatgcatgaggcaagagattttgaaagccatgagggttttgactttgagggcattcacttaatgagaaatggatcagatcactctgatgatggtaacctgtttgctgtagaagaaactacgtcaattaagaaaagaaaagatgcagataacaaacatgatgacaaagaatttggagatcattttcccacaaagaaagctagagtagtttggtctgtggatcttcatcagaagtttgtcaaagcagtgaatcaaatcggatttgatattggtcccaagaaaattctagatctgatgaatgttccatggttgactagagaaaatgttgctagtcacttgcagaaatacaggctctacttgagtaggttgcaaaaggaaaatgatcagaaatcttcatcaagtggaataaagcactcggattcaccttcgaaagatctaggaagttttagttttctgaacactgcaaacaagcaacaaaatgatattgccactgacagcttcagttattcagatggaactttactaattcagatggatgctacaagttatgaaggtgatctcaagggaattgtgtcagagcctacaacagaaaaaagaagagcttccactagtgaaattccggatccaaaggtacaaaaaagttcgcagaagagcctcaacaaaccttttacatctgtagagtcatcagaagcaaaccatgcagtctttgattgcaccataccaacagaatactcttggagtgagtttccaaaaggtccactcaaagaagaacagaagacacctgttcaattagaggatagcctctgccagttgccattgcatggtacacagcatcacattcagattgatcaatcacaatcaattgcctcaattaattccaatccctctataacagaagaagaggttgctgccaaattagagaccaaacctttgtatgctggttacgagagtgattatgtgaatcctgtgagttcaataggatctgcagttgaagcctttcgtagtcagtccaaaagccttatggtgagtgatcaatcttcagagcccactttcacctcgaatttgagcttgaagactcagggattcaatctagattgcatttctgatctggatttttaccaaaggaacctattattgggtggtgaggtagcttctgcacctttggatgaggacctgaatttctttttgctacaaagtgaatgctacaacatgaattttggactgcagaatatagatatgtcagagtattatgatccaaggcttactgctgaagtccctagccacttttatgattcagcagattattcatcggtagatcaaagtctattcattgcatgatcggtcctgctcttcccttttctgcatcttcaacaaaaatccaactaaatgcacgaaaggacgatttactgtcacaacttgaactttctttttcctttccaagaatatcaactttagggggctggggtattcttttttccaattagaaaggattttgatattgaagcacagataaaagtggatgatgtgtgatgacaaacgttaagcttatcaataagcttgcttcctttaatactaataactgaatatttggagaagcataatcttgtgtttgtaagttcagagtgattc

SEQ ID NO: 27368 - DNA, 2206 bp, Glycine max
  unsure (1)..(2206): unsure at all n locations
  Clone ID: TF_GmC13720_1
acaatttcacaaatttagaaagaaaaaagaattattcaccattatttcattcatctttctttactcactttccttgtcgcaaccacacacccaccgctgaatctcccgaaatatcttcaaaacacaagaaattcaatttgtgctttcttttccttctcttctttctatctatccaaatccaattccacgctccttaatttatttattttttttctcttcggatccaaattcaataccataaccgtttcagtttcagtttcagtttcacatatatatccctgtctctgtttgggttagggacatagaagagtgtgtgagagacggttatatatatatatatatatatatattttttttttttacggttacaactaacccgcgcgaatgcggcacgagagacgagcgagtacgacgaagagcgcgtgatggagtgggaggcgggtctcccaactgccaacgatctcacgcctctctctcagccgctgatcccgccggaactcgcgtcggccttcagcatcttgccggagccccaccgcaccctcctcgacgtcaaccgcgcctctcgcaacacgctctccacgctccgcggcggcggagggagcgtgcaccaggccttctcctcctccaacaacaaccacaactacgacggcgacggcgacggaggcgtcgaggaggaggaggaggaggacgacgatcgcgacggctcggggccggattcacggaagcagcggaagatcgactgcggcgcggccgaggaggcggactcggcggttcagacggagacctcggcggagcggacggcggtgaagcggccgcggctggtgtggaccccacagcttcacaagaggttcgttgacgtggtggcgcacctcgggatcaagaacgcggtgccgaagacgattatgcaattgatgaacgtggaagggttgacccgcgagaatgtcgcaagccatctccagaagtatcgtctctacctgaaacggatgcagggtctctccaacgagggtccttctgcttcggatcagttatttgcgtcgacacctgtgcctcagagcttgcatgactctgctcctcccagtaaccatagcaatggtcatgggcatgggcatggccatagcaatggccgtggtcatggtcatggtcatggtcatggtcatctctctgttccgatgatgtccatgccatatccacctcccctgatgtccatgccatatccacctcccatgatgtcgggcatgccccatggccacatgggcatccccatgcctaattcctccgccacctcagcttaccatccttataatatgttgcatcaaagggattggcctcaccttgctcctaatgataaatgaacctataaggtcagccatcaccatcatatgcaaaagattcaaaggcttgattattggtagtatagctttctgagaagggaggagctgcattgatgattaccctgtaattcactcaaaaggattattgaggaagtatatgaagaagagtatatggagctagattacaatcttagtcagtagtgtgtatcctgtgggagatttacaaacttattggtacacatctctaattcctgtcacctaattgtatgacgagaattctggcttatttcttctggtctgcctagacagctgattctaaagtaaattcttaactggttctctgattcataaattatagattcctattatattgtgtaatcctgaatgtgttaactctctttttcagaaccattgaataaaagaaagactgaacaacagacagcaaacatttataccaatgctctggcattaaatgtttttctttatcttatagccttgatcattatttatttcctttgaaagagatgttccatttttttgaattgggtgctgtaggctctcatgttaaagaaatggtacactgggagtggaacgggagaatttttaccttgtgtaacacacgcatacacacattccgacctggggaattcttgtttaacccataacgcaattcacttgtctcctttttcctgtgagaatttcaactggacttgctgtctttttggtggtaatgaacaaaacctccaccattctatggtttaatcgattaaaagagtatgcactcttacgagaaaggcaaaaatctattttgagcaaaataaataggagtttggggaagatcgatattctgagtttttnnncttcnnnnnccatta

SEQ ID NO: 27369 - DNA, 2110 bp, Glycine max
  Clone ID: TF_GmC381_1
tgggtctcccataacacaatcttgaccttttttttttttcctgtttctttcttcttcgcttatcggaggggcttcaagtttcaccataggatggtgtataggttgatacatactcatgaagggcaagaagacatgcagggtggctccaatcacgctgtgcccacagacaataaccctttataaaaaaaaaaaaaatctcggtctgttttttttctcttctttttctctctctctctcgccaatatcctttccagtcgtgccggcttaaaagagcagaaagggacaagatcccggaaaggcgtgccagcgtcagagagactcatcagttctcactcgtacggcgcttttgctttgctttgcttcatttctttcatcgtcatcataaagttcgttcctttctcagttttcacccatacccagatgagtaacagcaccatctcggatctgtgtccctcctttgagtgaaaaaggttcaatctttggtctctggggctgttggggttccgtcattgaagaagaagaagaagaagggtattattgttattataatcatgtacccgaggctcatacacccccacgatgggattgtgacgcaggatgagttgcagggtggtgctgcttccaacctctctcacgctcacaagggtgacccttgtctcgttttaacggctgatcccaagcctcgtcttcgttggactcaggacttgcatgaacgcttcgttgatgcggtcacgcagcttggtggagctagtaaagctacaccaaaagcaatcatgcggactatgaatgtcaagggtttgactctgtttcatttgaagaggcatcttcagaaatacaggcttggtaagcaatctgggaaagatgtgggcgaaggatgcaaagatggttcatatcttttagaaagccctggtgctgataacacttctccaaagttgccaactcctgatacaaatgagggttatgaaatcaaggaggcattgagagcacagatggaagtgcaaagtaaattacatttgcaagtggaggcggaaaagcacttgcagattcgccaggatgcagagaggagatacatggcgatgctcgaaagagcttgcaagatgctggctgatcaatttatcagtgctacagttatagacacagacagccaaaagttccaaggaattggaagcaaagcacctagaggtaccttggttgatcctcttggtttttactccttgccatccactgaggtatccggagtgaattgtcccggaagaagaaatactgccaagtctcccaccccaaagggccgattgttcaaccgaaagttgtttaacctcacatgagagctctggaggattggctttagaaggatctccaggcgagggaaaaaggaggatgctaggcatggactctatggcagcacctttgatctggagtgaagctaagatgagaactcaagccatcaatgtagctcaaggtaatcatcctcaaggaataactaggtatggcatgtagggatggaaggtcttcttgatggttcatcccctcataatatataaacctttgggcttcatgcattccctttttttatgggtacttgaactcttcatgtcttgtaagttagtgagacataggtggaatcaattttacccctttgtaaattcaatctactctgtggctttaaaaattgcaaaaaactagctttgactatacaaaatttgtgtgttttggtgacttctatggattccttattgttcattgattcatgctgaataaagggtgtgacgtcctttccttcaagatatagagtcattattaaactcttgaactctaaaaaaaaaaaaaaaaaaaaaaggttagttcctcatgaagagagttcatgacattgtgctttgtcccaagcttttaggattaagtactgagtagggaaggttagctcctcatgaagagagttcatgacattgtgctttgccccaagcttttaggattaagtactgagttagattattatcggttgttgtccattaagttggtgagaatcaacttatctcacatcattgtgtaaattgaaatactatatggcttaacttggcccgtcactaaatgttggcgctgaccatttatgatc

SEQ ID NO: 27370 - DNA, 1744 bp, Glycine max
  Clone ID: TF_GmC59217_1
cgagaagacgaaacaaggcaggcacaaacaaggcaaagcaccacaagttgacagtgagagcttatatattattaccgtcaattcttataataacacttgcaaatagagcattatcaactttcgacctttcataggtatagtaaagtgatcattcagggaaaatgtaccttcatcagcaacatcaaggaaaaaacattccttcttcttccagaatgccaatcccctctgagaggcacatgttccatcacacaggctcggagaggcatatgttccttcaaacaggaaatggctctggtgattctggacttgttctctcaactgatgctaagcctagattgaaatggacacctgatcttcatgcaaggtttatagaagctgtgcaacaattaggaggagctgacaaggcaactccaaaaacggtaatgaaactcatggggattccagggcttaccttgtatcatctgaagagccatctccagaaatacagattgagcaagagtctgcatggacaaagtaacaatgtgacacacaaaataaccataaattcaggtgcagcaacagatgaaagactcagagaaaacaacgaaactcatatgaatagtttaaaccttgcccctcagtctaacaacaagtaaaaaaatttcagttttcacacatgctttcttaagaactttctaatttctatcactaaaggttttatactgacattcattaacttcccttgtacctggcagagatttatacataagtgaggcactgcatatgcaaatagaggagcggagaagactaaatgagcaacttgaggtgcaaagacttctgcagctacgtatagaggctcaaggaaaataccttcaggctgtgttggagaaagctcaagaaacacttggaagacagaatttgggagcagtaggacttgaagctaccaaacttcaactctcagagctagtgtcaaaagtgtcctctcagtgtctgaattcagcattttcagatcggctgaaggagatacaaggatttagcccccaccaacaaacacaaaaccaaccagccaaatacaaatgactgttccatggacagttgcctcacatcttgtgagggatcacaaaaggagcaagagatacaaaatggagggatgagcttaagacccttcaatgttcacacattcatggaaagaaaggaagtcatagagggtccaaatcttaataatctaccaaacactgacctcaattggtgtgatccagtgaagaagaataccttccttaccccattgagcatgcatgcagataaaagaagtccaagcaacttgtctagcattggattacttgaaggagaaacaactgagaatagaagcaccattgttaggacagaatcaattaaaccagctgtggctgagaaagtttctcaagattatggattgccatctaactactttgctgcttcaaaactggaccaaaccactgaagataataaagacactaaaactagttgcaaacaactggacttgaatggattcagttggaactgatgagaagagaaagcacaatggaagcacacagaaagcaaagttactccaatttctggcaggaaacaatgtatttactgtaaacaatgtatcagcttctgtttctttcagctcatggtggtcatgactagccaaatatgagttacttttagtagaatgcaaagttgcaactaacaaatttgtaagcagtaattataatggatatagagtatctcgttttattcc

SEQ ID NO: 27371 - DNA, 1383 bp, Glycine max
  Clone ID: TF_GmC381_2
gagaagctgagcgtgaaatgcaaaaaagaagagaagaaagtgacaaaatcccagtaaagcgtgacagtgccagctccctacctcaaccccaaagtcttgtgcttttcacatccccattttccccattcccctttctgcttcctctttctttcgccaaatgggtcatcatctccttctcccataacacaatcttcttcaccttttctttcttcttcgcttcccttcggtggggtttcaagtttcaccataggaataggatgttttctaggttgattcatccccatgaaggccaggaagacatgcagggtggttccaaccacgctcacctcggagacccttgtcttgttctcacctctgatcccaaacctcgtcttcgttggaccgctgaccttcacgaacgctttgttgatgctgtcactcaacttgggggtgccagtaaagccactccaaaagcgataatgaggaccatgaatgtcaagggtttgacgctctatcatttgaagagtcatcttcagaagtacaggcttggtaagcaatcaggaaaagattctgatgagggactcaaagatgcttcatatcttcaagaaagccctggtactgataactcttctccaaagttaccagcttctgatgctaacgagggtcatgaagtcaaggaggcattaagagctcagatggaagtgcaaagtaaactacacttactagtggaggcagagaagcacttgcaaattcgccaggatgcagagcggagatacatgggcatgcttgagcgagcgtgtaagatgttggcagatcaatttattggggatgtaattatcgacagggatggccaaaaatttcaaggactggaaaacaaaacatcaagaagtcccctagttgatcatggaggcttttttcccgcagcgtgtactgaggtgggtggaatgcatgtttcagaagtaccacccattctccagcctcaaggggctgagtgctccagtgaaagttgcctaaaatcacttgagagtctgggagggttgacactagaaggatctcccggcggatcaaagaagaggatgctgaacttggactcaatggtagcacctttgatctggagcgaagccaacaccagaactcaaggaatccatttagcccaagttaatcctccaggaatgactaggtatggcatgtaggtaggatagggaaggctagttcctcatgaagagagttgaggacattgtgctttgttccaagcttttaggatgaagtaccgagttagattcttatctgttcttgcccatcaagttggtgggaatcaacttgtctcacatctttgtgtaaattgaaaatactatgtggcttaacttggactatcactactaaaggttggcgctgaccattgac

SEQ ID NO: 27372 - DNA, 1327 bp, Glycine max
  Clone ID: TF_GmC381_4
ccacgcgtccgatctccttctcccataacacaatcttcttcaccttttctttcttcttcgcttcccttcggtggggtttcaagtttcaccataggaataggatgttttctaggttgattcatccccatgaaggccaggaagacatgcagggtggttccaaccacgctcacctcggagacccttgtcttgttctcacctctgatcccaaacctcgtcttcgttggaccgctgaccttcacgaacgctttgttgatgctgtcactcaacttgggggtgccagtaaagccactccaaaagcgataatgaggaccatgaatgtcaagggtttgacgctctatcatttgaagagtcatcttcagaagtacaggcttggtaagcaatcaggaaaagattctgatgagggactcaaagatggaatgtcagcttcatatcttcaagaaagccctggtactgataactcttctccaaagttaccagcttctgatgctaacgagggtcatgaagtcaaggaggcattaagagctcagatggaagtgcaaagtaaactacacttactagtggaggcagagaaacacttgcagattcgccaggatgcagagcggagatacatgggcatgcttgagcgagcgtgtaagatgttggcagatcaatttattggggatgtaactatcgacagggatggccaaaaatttcaagggctggaaagcaaaacatccagaagttccctagttgatcacgttggcttttatccccaagcgtgtactgaggtcggcggaatgcatgcttcagtagtatcacctattcttcaacctcaaggggctgactgtttcactgaaagttgcctaacatcacttgagagtctgggagggttgacactagaaggatctcctggcggatcgaagaagaggatgctgaacttggactcgatggtagcacctttgatctggagtgaagccaacaccagaactcaaggaattcatttagccaaagttaatccttcaggaatgactaggtacggcatgtaggtagggtagggaaggttagttcctcatgaagagagttcatgacattgtgctttgtcccaagcttttaggattaagtactgagtagggaaggttagctcctcatgaagagagttcatgacattgtgctttgccccaagcttttaggattaagtactgagttagattattatcggttgttgtccattaagttggtgagaatcaacttatctcacatcattgtgtaaattgaaatactatatggcttaacttggcccgtcactaaatgttggcgctgaccatttatgatcattgccttgattttc

SEQ ID NO: 27373 - DNA, 635 bp, Glycine max
  Clone ID: TF_GmC381_6
cacgcgtccggcagagagcggcaaatgcaaaaaaggaagagaagaaaggaaaagcagcagaaagtgacaaaatcccagtaaagagtgacagtgccagctccctcaagccaaagtcttgtgcttttcacatccccattttcccatttccctttctgcttcctctttcgccaaatgggtctcccataacacaatcttcaccttttttttttcctctttctttcttcttcgcttctcggtggggcttcaagtttcaccataggatgttttctaggttgatacatcctcatgaagggcaggaagacatgcagggtggctccaatcacgctcacctcggagacccttgtcttgttttaacctccgatcccaaacctcgtcttcgttggaccgctgaccttcatgaacgctttgttgatgctgtcactcaacttgggggtgccagtaaagccactccaaaagcaatcatgaggaccatgaatgtcaagggtttgacgctctatcatttgaagagtcatcttcagaagtacaggctaggtaagcaatcaggaaaagattctgatgagggatgcaaagatgcttcatatcttgaagaaagccctgagactgataactcttctgcgaaggtaccagatgctggc

SEQ ID NO: 27374 - DNA, 716 bp, Glycine max
  unsure (1)..(716): unsure at all n locations
  Clone ID: TF_LIB4390-015-R1-K1-H4
tgcaaatgaggagaaagcctgctatatggctggggaatgtagtcaagccatggcatcaaaaagtaatgccgaccagaatataaaactgggtcaaaaaaggaaggaacaaagcgaggatgaggaagaggaagaatatgatcaagaaaatgaagaaccctcaaatcagaagaagcctcgtttagtttgggatgccgagttgatatgatantcttgctgcgattaatcatctgggaattgacactcctaacgtgaggtttcaacttttattgcagaggctttccccaagagaatactggacctgatgaatgttgaaggacttacacgagaaaacatagcaagccatctgcagaaatacagactcggtctcaaaaaatccactcaacagcctagcatggttgctacgttgggtaatagtgatccttaccagcagatggattcaatagaaggctttcgcactttgtcgggatcaggaggaatgataagcaccacactaccatcatatgcatctggtggactgttttgtaggctgaactccccatctggcttgagaggaattaactcttctcttcttgttcagcctgttcattctcaaaacattgatagcaagtccataaaaacacttgggaacatgcagctatccatgttttctgcanatcaaacctcaagtttattacaggggcattccaacatcaatcgatgggtaaccattttcagca

SEQ ID NO: 27375 - DNA, 504 bp, Glycine max
  Clone ID: TF_jC-gmro02800038h07a1
ggctcgaggcttcttgcatgcccttcagcagcttgggggtgcagatactgccacaccaaagcaaattagagagataatgaatgttgatggcctcacaaatgatgaagtcaaaagccatttgcagaaataccgtttgcacactagaaggccaagtcccatggttcacaacagttccaatccacaagcagcaccttttgtccttgtaggaaacatttttgtccaatcaccagaatatgcagctgtagctacctcaacagcatcaagagaagtggccacagttgcagcacctgctggaatttatgcaccagtggccacacaccctatacctgtttcacacccaccagctgattcaattaagaatccacagtttaagaaggtacagctgtttgagcattcaatttcagatgaaagggctaatcacagtgaaggagctgttcattcaaattcccctacctcatgctcctccacacatacctctacttccctggctattgagtttaagat

SEQ ID NO: 27376 - DNA, 949 bp, Glycine max
  Clone ID: TF_GmC436_1
aaacggctgcgaaagaacgacagaaggggacaaagaaaacattctatggtcgatgctgctgctttcatattagatgtaaaacataacaagtcttatttatacacatattctttcattgagccttctcttgctgttaatttctgcacgacgtgaaagcgaagaaaaatgaagaattctaagaaaacttgcgcgcggaagtaccacaaatcggaaaatccacgcttgcggtggacacctgaactccatgaatactttgttgaagttgtggaaggtcttggcggaaaaaacaaggcaaccccaaagagcattctgcatatgatgcatgtgaaaggactgaggatctctcacattaaaagccatcttcagatgtacaggaacatgaagggaggtacgattctcacatcaatgcaacaggaaatggaagaaaatgtgcatgttaaggatcatcacccaatctgctccaactgttcatcccaaagcataatcttcagatcacaaggaactaaatttaaattaaaggcatcaaaatatgatacggggattgtcaatcaagaaattcacccgctagaaaataaaggactttcgcagaccagtgaaactgattatgatctaaatcaggaacccgagtcaagtgcatgcttatttagtgaatcgtcaaatgaagaaaagagtaggacaatgaaatttcttgatctctcactctctttcggctcttcaccaattccaacaatggacggtgatcaagagagaatgcgtttttcttcaccaaatacagcagataatcatgttatcgattctaattctgtacaatctcatgggagcaattatataaatttagacctaacaatatgaatatgtatcatttctgtaaccacgtacgcaatatttatcatagatttagggttttggcaaagatttataaaattaaagctttaatgaattattctat

SEQ ID NO: 27377 - DNA, 647 bp, Glycine max
  unsure (1)..(647): unsure at all n locations
  Clone ID: TF_GmC381_8
ggcgccacgcgtccgagatgagtaacatcaccatctcggatctgtgtccctcctttgaggcaaaagtgatgagttgcatggtgcggctgcttccaacctctctcacgcgtccgctttttttttttttttcctcttaacggctgctccccttcccggtggggcttcaagtctcaccataggatgttttctaggttgatacatcctcatgaagggcaggaagacatgcagggtggctccaatcacgctcacctcggagacccttgtcttgttttaacctccgatcccaaacctcctctgtttcagtccgctgaccttcatgaacgctttgttgatgctgtcactcaacttgggggtgccagtaaagccactccaaaagcaatcatgaggaccatgaatgtcaagggtttgacgctctatcatttgaagagtcatcttcagaagtacaggctaggtgagcaattcggaaaagattctgatgagggatgccaagatggaatgtcagcttcatttcttcaagaaagccctggtgctgataactcttctccaaagttccccggtgctcacgaggggtctgaagtcaagggggcctttttgagccccgttgggagggcaaagtnaacttcccttactagggggggcggggaagc

SEQ ID NO: 27378 - DNA, 1848 bp, Glycine max
  Clone ID: TF_GmC498_1
caaaagcaagagcctatagttgacggcgttggttggggttctaagattgttttgtttgagttaaacgcgacaaactcaaatacgtgtgcattacaactcctaacccctcaccatcctcttcttctctctcattcatacccctccttttttatttgtattctcagctttttagattccgtttctggtttttcccaattccatagtactctgttatcatcgtcatccctttataggacagacaaagctgattcacttaggagcctcgagagctatgtctacatcttctcgtgctcttcccactccattggaaaacaagtatatgaaacccccagattcttttcagctttcgccagtcagagatctgactgcaaattctgcctcatcaaattcaatcagaagtgctgggaagatgttttcttcaccttctaaatgtcccgatgacttccctttttcctctgtttcacagcatgataggcaatatcaagatcccccctttgtttctcagacaattggtgatagcgtgtcttccgaaatacattcaatgacattcatttctcaccctcaagaaaatgaagatctttcctggggaccagatccatgtcaggatattcttggctttcctgaaaatgtttctgtccagcatgatcaggtggaaaacaatggttgttacataaatgatgataatgtcaaaagatctgattttggggagtgggttgatcagttaatgtcaattgatgattctcttcacccgagctggagtcagcttcttgctgatgacaatgtagcagaaccaaaaccaaaggcatctcaggttcctccgcagcagcatataccatctggagaagttgttggtaattcagcatcaactgcatcgcagactaaggctagaatgcgttggactccagaacttcacgaggcctttgtggaagcagttaatcaccttggtggtagtgagaaggctactccaaagggtgtgttgaatcaaatgaaagttgaagggcttactatctatcatgtaaaaagccacttgcagaagtatagaactgccagatacaaaccagagccatcagaaggaacgtctgagaaaaaggtgactccaatggaagaaatgaaatctctagacttgaaaacgagtaaggggatcactgaagcattacgtttacagatggaactccagaagcgacttcacgaacaacttgagatccaaagaaagttgcagattcaaattgaagaccaagggaaacgtcttcagatgatgtttgagaaacagagagagatgggtgacagcaaggttaacgtctccttggacgagccttctgctgctgcaccatcagacacagtagaaaccacaaatgaggaacgccacaaatttgaaagcattccaaaagccatacccgaagagaaggagtcaagcacaacaaaacaaattgcaggtgaagctgaagaaatgatcaaggaagatgaagttgcaccacccacaaaacgggtgaaaagttcgtaacagcaggatcgttgttttatgccttctagatttgtttaatattcttagactggtttggactccatggaacttgtagaaatattattggatccaaggatgtttcaacttgctcatttatcacagccatttcctatgaaaatatggcatgagtgccacaagtaatggtggctcattgtgatggaaattttgttaccatcctcttagtggtccttgaggtttttttttttttcttttctttttcacatgtaaactagcatttatttatacctgtgtttaatgtattatatagaaaatcagaattgaaaaataaaagtaatattaagactccaaagaaataatacattttc

SEQ ID NO: 27379 - DNA, 1734 bp, Glycine max
  Clone ID: TF_GmC1091_1
cattaccaccctttctctgtctctctctctctctcgcccccaccaaaatctcaaaggaagaagccaaagaccctcttttgctcttgtttgttcccacataccaacctgttcctattttggcatgaacatatcttacacagtgtgaacttgttaattagttggttatctatacacgtgaatttaaagaatggcatcaccctcagaactaagtctggattgcaagcctcaaagctattccttgctactcaaatcatttggagatcaaactgatcattcctacaagcttgaagaattcctcaatcgcttggaggaagaacgcctcaagattgatgctttcaagcgcgagcttcctctctgcatgcaacttctcaccaatgccatggaagcttcaaggcagcaacttcaggcctttaaagtaaaccatggagcaaagccagttctggaagaattcatacccatgaagcacttagcctcagagagctcagagaaggcaacaaacatgtctgacaaggcaaattggatgacatcagcacaactatggagccaagcatcaagcgaaggaaccaaacaacaaccaccaatcacaacccttaaagaatctgatataggcttcagcataagcccaaagttggctcttgacaacaaacaaaggaacggtggaggagccttccttccattctccaaagagagaaactcttgccagggctctacattgcggcctctccctgaacttgttcttgcctctgcggagaaagaaatggaggataagaaacgtgcagaggtagaaattaagggagtttcgtgtcagagtaggaaggagaattcaggaagtgatggagctgtggttgatcaaggaaaaggtggtagcccagttgcatcgtctcatgcacaaacaaccacaaccactactagtgcacaaactcataggaaagctagaaggtgttggtcaccagacctgcaccgaagatttgttaatgctcttcaaatgcttggtggatcacaagtggcgaccccaaaacagataagggagttgatgaaggttgacggtttgaccaatgatgaagtaaaaagccatttgcagaaatataggcttcacacaagaagacccagtccaagtcctcaagcgggtgcagcagcaccacagcttgtggtcctcggcggaatctgggtcccaccggaatatgccacggcagcacacacagccacccctactctctacggcgcccaccctacctcccacgcgccgccgccacattactgcgctgccactcccatgccacaagacttctacaccacggcgccgccacagccgctgcttccgccgcctccgccgcaccacaacgctctgcaccacctgcacatgtacaaggcggcaccgcacggccaaggctcgccggaatccgacgttcccagcaacggagagcgatcggagagtattgaggatgggaagtcggagagtagcagctggaagggggagaatgaaggggagaggaaagggattagtaaagggagcaatgggagtgagatcactctcaagttctagggttttagaattagggttttgcttgcatcccataaccgatgcatgttcaactactattcattattgttcaacaaaaatggggaaaaaaaacaaactaagtagaacaaaatatccttggtggtactttttgcctatatttctgtggtaaaaaggcataaaactggacatttgttttgtattttttgctttac

SEQ ID NO: 27380 - DNA, 1572 bp, Glycine max
  Clone ID: TF_GmC496_1
acgacgtgaagagcggctgcgagaagacgacagaagggggactacatgcttggccaaagctcctgtgctctgtatctcagtcttcggtatcatcttctgcatccagactacttgttttatagaataaggaagttgcagaagaatttcaagcttcgtgtggttttatgccatgttggaagatgtaataaagcctcttcttgaagttacaaaaacagctttgcttcatgactgtacactcctatatggatggagcctggaggaatgtggccgttacttggaaaccataaaagtctaagaaaacaagcctgcagacattattcaaggccaaatggatacagattatctatcaaggctaacacatgcccttacaacagtccggcatgttaacaagactgatgtagtcaccctcggtaccacatttgggtctctttgtaacattatgggtgcatctatggaagatctagctcgttgccctggcataggagagcgcaaggtcaagcgcttgtttgacacttttcatgaacccttcaagcatgtggaatccagccggcaagccattccagagacttctgtccagaacaagccagctagtccgtccagtctcatcgatcaggaacaatgctgaatcttcctccttgattgaagacaagcatgaggatgcagaagatgtgagctaacgtaggaagaaagaacttgaagttactgtcaaatctgccctttctgcagcttttgccaaatattctggtagagttggaaagaggaaaagcacttcacaggtggaggaaaaaggagaatcaattatttccaaagaatcagaagctgaaacataaaattaccatgaagtttttcactggttcaataatttacccataaacaagataatctcatgagattaagaggcttcatttttaatctctatgcatgtaaagccatggaactctattgggagtgtaaaggggaacatctctaacaaatgaagaggtagttagttgtaatatgatagctgaactgttaggtagttatgaggctttaatcaaatgggaaggaagagaaaggagagaggtggggtcatatggttataacaacaaatcgagggaagaatggattttcggttgttgagaattgagataagttgggagggagagttagtacctttgaaattcttgatttgagtgatattcttatctttgtaagggaatcaattatttccaaagaatcagaagctgaaacataaagttaccatgaagtttttcactggttcaataatttacccttaaacaatataacctcatgagattatttaatctctatgcttgtaaagccatggaactctattgggagtgtaaacgggaaacatctgtaacaaatgaagaggtagttaggaggctttaatcaaatgggaaaggaagagaaaggagaggggtggggtcatctgggtaattgggtataacaacaaattgatggaagattagattttcggttgttgagaattgagataagttgggagggagagttaggacctttgcaattcttgatttgagtgatattctcatctttgtacattctgtcaaa

SEQ ID NO: 27381 - DNA, 827 bp, Glycine max
  Clone ID: TF_GmC184192_1
aaaaataattgacagggatcacactttttcaatgatgagtaaaatattgggattaattacaacatacaagaacacaaagcaaactgaatagattgctagctctagctgcggcaatggtacaatgataataaattgaaaagaataaaaatcacactttatagactaaatttaaaagagctgagaatggacttcaaccgagtattgaatcttcagctttatcttcaaatagcgtttttgcagcttttgtgaacaagttatgggcctgcttggaagagaggcctatcttctccaaatcatttaacgattttaggggactttcttctctaaggtctattatgtattctgccattttctctcctataccctttaactctagtagctcctctctgcttgcattattcaagaaatcaatgtattcttgaactaaacagttcttcagtgtaaaacttcgtgtgctgaatttgccaactcgagcatgatccttttactcccctttattctctgagcaggtttgaattgaaatcaattttaattcaaggggttactcattaccaaggatggagataccaaggagagcgtttgctctacctccttgcattatacaagaaataacagtattcttgaactagactgcccttcagtgtagaacttcgtgtgctgaatttgccaagtggagtgtcattcttttgtggccctttattagtggagcaggttgccagaaaaggtgtttgtgattcaaggggtttctgattaccattgatgttgatgggggagagggcttttcttaaaggactttgtgctgcatctttactcttaatagtaattga

SEQ ID NO: 27382 - DNA, 1003 bp, Glycine max
  Clone ID: TF_GmC708193_1
ccttctcaatacaatttccaacacatctaataatattacactagtcaaggaacatctcataatattacacaagtcaagggcaactttgggttgccaatagatatattctccatggatatacattaatacataaaaaatattccagaaacttgtataaatcccgcaatgcatttataactaactgaaaagctctccgacttccttcttcattattcctttaacctgctttgctgaaagcccaatatccttcaaatcatccagactcttgaaaggttctggagattcttctcggagttcaagtatgaaggtagctctcttctccccgattcccttcaatttttttaattcctccttgttagctgtatttaaaaacctgaggtattcttgaacaagagaactcttcattccagaacctcgcatgctgaatgtctcccagggacttttggcattcattgcatccaatctgttaatgctcatgttttgttcaattgtaggagtttttggttcaacaatatcaagtggaatgggctccttttctggtatctgcatgcatgatggggttgaagaatatagcattttaagactattagaaagatcccgcaactgagaactgataggtggtgaactaatagtagccgatgaatcatctccgattgcccttgaattgttgttctccttgttcatgctatggtcttcctgaactatttttgccaatgcttcagagtaattccgggcataaggagtatgctccttttgatgatcctcctcatccaccgaaataccctgatctgctaggggattaagttccacttcaatgttagcattaaaagatgaatcatcattttgcaccatcagatcaagtttcacgttctctctagcttttgaaaatgagtcatccttttccactccagagttgagtacaacatgatttctggtcttcttttccattccagagttgagtacaacatgatttctggtcttcttttccattccagagttgagc

SEQ ID NO: 27383 - DNA, 1340 bp, Glycine max
  unsure (1)..(1340): unsure at all n locations
  Clone ID: TF_GmC202_1
ggcaatatattattttggcgcccctccaattcttttgaatcctcacccccacacaacaccactccacacattttcgttcttccctttcacccatctcatctcaacaattgaatctttgaggggtctttcagaatcagaatgatggcagcaactatggagcagcagcagcaacgcccccaacaacaagacgaagctgaagaaatacaacatggccctttacccgtcgagcaacttcaggcatcgggcatagccgccacggacgttaagaagcttaaagacgcgggaatttgcaccgttgaatccgttgcttacactcccaggaaagatcttttgcaaatcaaaggtatcagtgaagctaaagttgacaagataattgaagcagcttctaagctggtgcctatgggtttcaccagtgctagtgaactccatgcccagcgcgatgcaatcattcagataaccacgggatcgacagagcttgacaagatattggagggtggagttgagactggttctatcaccgagttatatggtgaatttcggtctgggaagactcagttgtgtcacactctctgtgtcacttgccaattgccactagaccaaggaggcggggagggtaaagctatgtacatagatgctgagggcacatttaggcctcagcgactcttacagatagcagataggtttggattgaatggtgctgatgtattggaaaatgttgcttatgctagagcatacaataccgatcatcaatcacggcttctgcttgaagcagcttcaatgatggtggaaactagatttgctgtaatgatagtagacagtgctactgccctctataggacagatttctctggaaggggggagctttcagctcggcaaatgcatctagcaaagttcctgaggagccttcagaaattagcagatgagtttggtgtggctattgtcataacaaaccaagtagtttcacaagtagatggttctgcagtctttgcgggacctcaaatcaagcctattggaggcaacattatggctcatgccacaactacgaggctagctctcaggaaagggagaggggaagagcggatctgtaaagtgataagttctccttgcttagcggaagccgaagcaaggtttcagatttgtgcagaaggagtttcagatgttaaagactaactgatttcagaatgtttgaattttttgttttcctatttgcatatcattttgtaaggtgtaccagttgactttcaacttgcaacttgcaagtatccagtatcaaaattttcaatatatgtcagtttggtgccccctattttttaaaaaaaaaaaaaatannnaagggcggc

SEQ ID NO: 27384 - DNA, 311 bp, Glycine max
  Clone ID: TF_LIB3242-368-Q1-J1-E12
ccggaggttgggaatcactattatggtctatgacacccttttattccacatcaaatacggatgacacgggctcttctaacacaggatggaggggtacagcacattcaattccacaagccatctcctacttaatactaccacctttgtcacttacatgctgatgactatgtatatattacttcaaaacataactcctgaaacacaaaatgatcatctaaagcaactaatacgctataatgttaaacaagaccggcccataaaaaacaaccaaaaaaatccctccctttcttttacaaaaggtgcagaccccc

SEQ ID NO: 27385 - DNA, 708 bp, Glycine max
  Clone ID: TF_GmC129_2
agaatacataaatgaactggtagaagttgataaagaaggggggaagcagctttgtggtgggacatttttgaaccctggatcatgggatgctgcacttcttgctgctgggactacactatctgcgatgaagcatttactgaatggggatggaaaagtttcctatgcattggttaggccccctggtcaccatgctcagccttctcaggccgatggctactgtttccttaacaatgcaggtctagctgtgcaattggctttagattccggctgcaagaaggttgcggtcatagatattgatgtgcattatggaaatggaacggcagaggggttttatcgatctaataaggttcttaccatctctcttcatatgaaccatggatcatggggtccatctcatccgcaaagtggctctgttgatgagctaggtgaaggagaaggttatggctttaacttgaacatacctctaccaaatggaactggggacaagggatatgtacatgccttcaatgagttggttgttccatccatccaaaagtttgggcctgatatgatagttttggttcttggacaagactctaatgcagtaagttattctatttttgctgttggcaatttatattttgatcattttagcattttattgcctagtttatgtagacttgaattcatgctctgagataaattaaaacctgataagatattagcaca

SEQ ID NO: 27386 - DNA, 2309 bp, Glycine max
  Clone ID: TF_GmC1634_2
ccacgcgtccgatcaatttcagaggcggagcctggaggctggagctgcttcaagtcttcaactatctgaatttctgaactcatccattcgttagcgcagctagaacgaaaactgagtaatggaaagtggagggaactcccttccatcagggtcagatggtgtgaagagaaaggtttcatatttctatgatccagaggttggaaactattattatgggcagggacacccaatgaaaccacacaggattcgaatgacacatgctcttttagcccactatggattgcttcaacacatgcaggttctgaagcctatggctgctaaagatagggacctttgcaagttccatgctgatgattatgtggcctttctgagaggcatcacccctgaaacgcagcaagatcaattgagacagctgaagaggtttaatgttggcgaagactgccctgtatttgatggtctttactctttctgccagacatatgcaggaggttctgttggtggtgctctaaagttgaaccatggagtatctcacgcgtccgtaaattgggctggtggtctacatcatgcaaagaagtgtgaggcttctgggttttgctatgttaatgacattgtgctggctattttggaacttctcaaaatacatgagcgtgttctgtatgtggacattgatatccaccatggtgatggtgtagaggaggccttttacaccactgacagggtcatgactgtttcgtttcataagtttggggattactttcctggaacaggtgatattcgcgatattggatatggtaaagggaaatattattcactaaatgttcccttggatgatggaattgatgatgagagctatcagtccttgtttaagccaataatgggaaaggttatggagatttttaggcctggtgctgttgtattacaatgtggtgccgactctttatctggggacagattaggttgtttcaatctttccataaaaggtcatgcagagtgtgtcagacatatgagatcttttaatgttccccttctattgctcgggggaggtggctatacaataagaaatgtggcacgttgttggtgttacgagactagcgttgctcttgggattgaactagatgataagatgcctcaacatgagtattacgaatattttggtcctgactatactcttcatgttgctccaagtaacatggaaaacaagaactcccgacatttattggatgaaataagagcaaaacttcttgataatttatctaggcttcaacatgcaccaagtgtcccattccaggaacggccacctgatgcagagcttctagagagagatgaagatcaagatgatagagatgaaagatgggatcctgattctgacagggaggctgacaatgacagcaatcctgttcgcagaagggtgaaaagtgaatgtgttgaagctgaggataaagatgcagtgttgggggtggactcaatggcagtggatgaaccatgcatcaaagaggagcaggataatttaaaagagctttctgatcacaggtcacgatgaagcaataataagcattattgatcaaccttctccttgactagtaaactgaagacatatatggtgcaagcttgccttggcttttgatgtttaatattactgcaagatgaatgtagtagttattttttctgtatgttacactatggtaggagcctttgtcaagggagcagctcattgttggatccgttgagatgaagtaataacattcatcttgtgtttcttggaaaaatgattaaacaaacacatgctttcaccataaatctagtttgtcatttatcgatagcggtgcttagtggcattgggccactacaaggagaccgttgcatctcagttcagtggtgcgtgcggccattgcggctgtatcccagagtggtggaacgtcagattgtttcaaatcttctagaagatctgtctgaagttgtttcaaaatcagtgtctgtcgccctgtaaattatagtttcctcctaaagcagtttggcatgcattcatctgacgtctgtagtgtttcaaatttttgctttatctggaaactgaaaagatatggtgcaagcttgccttggcttttgatgtttcatattactgcaagatgaatgtagtagttattttttctgtatgtttcgcaatggtagcagactttgtcaagggagcagcttattgttggatccgttgagatgaagtataacattcatcttgtgtttcttgcaaaaatgattaaacaagctcattctttccccataaggggggggggggggggggccccggggggcccagg

SEQ ID NO: 27387 - DNA, 1089 bp, Glycine max
  unsure (1)..(1089): unsure at all n locations
  Clone ID: TF_GmC974_3
ccagtgtgagcaagactcacttgctggcgatcgcttggggtgcttcaatctctctattgatggtcacgctgaatgtgttagcttcgtaaagagattcaatttgccattgctggtcactggaggtggggggtacacaaaagaaaatgttgctcgatgttggactgttgaaacaggagttcttctagatacagagcttccaaatgagattccggaaaatgattatattaaatattttgcaccagaattttctttgaagattccaaatgggcagatagaaaatttgaatagtaaatcatatcttagcaccattaaaatgcaagtcttggaaaatcttcgttgcatccaacatgctccaagcgtacagatgcaggaggtgagttcatacttgaaatagaatcaccccatctagtaggcaggctcaattattttatcataaaattgtttcttgtaaaaactgttttgactttagaggcactatgttactagctcttcaactttcttgtattcatgaactcttacaaatgtggttaatcatcaattatttgcattggaggtaaatctttaaacaattgaagtggaaaatgttccttcttatagaacttctaaattaaggtgagagtcgctagttagattggggagagaaaagggttcaaaacttgggtggtatttcaggaactaaatatcaacttgtgaatggctttgaatgggttctgcggatgtatgcatatcaggtggaggacattttgatatatggttgtatttctggctttatagtctagagctgtagttgtagttctgcattgtagatttttctgttttgacacctgatatctttttgtactgatacagctttgtttggatcacaccttgtggttcaaccatgctctttctttaatataatattcatttggcctcttaaaaaaagactgattcattaaaactgcttaagctgaaggaccacggccatggaaattgggcatttgggctctctttctcacatgagactganatctattatttagggtatgtatgttagtaaacttggaatgtcacaacttggcattaatactttcatgtctggagttgctc

SEQ ID NO: 27388 - DNA, 623 bp, Glycine max
  Clone ID: TF_GmC1790_2
ccacgcgtccgagacttgtgtgaatccaacggttcaaaaagttgctggagggagccggagaagatttcccgctgtcggctcgctgcttccaaaaagcagtgagggctgtgaggcgcttttggccggagttgcttctctcatcgtcagttgtcgttacgttggtcgaccgagtgtctgtgcagctaattctgcaaagcgaagagggaattttgttaggatggttgaatattgacaagagaaataacgggaaacaatagacatggataccggtggcaattctttaccatctgcacctgatggggtgaagagaaaggtgtgctatttttatgatccggaggttgggaattactattatggtcaaggtcacccaatgaagccacatcgtatacggatgacacatgctcttctagcccattatggattgctacagcacatgcaggtccacaagccatttcctgctagagacagggacctttgtcgttttcatgctgatgattatgttgcattccttcgaagcataactcctgaaacacagcaggatcatctaaggcaactgaaacgctttaatgttggtgaagattgtcctgtttttgatggcctctactctttctgtcaaacttatg

SEQ ID NO: 27389 - DNA, 1798 bp, Glycine max
  Clone ID: TF_GmC974_1
gcaaaagggaatggattttattgcacaggaataatcattcttgcaccattttgaggaattttttcagataagaccagtacaatagtttctttaagcacatagagtgattaggctggtagcaagcgcgacatggcactgcagtgcaggttaagctcacaccattgatatcactagccatattctcctttcgctaattcccgcaagctactactcttcttcaacgctctctctgcaaaagatgcgctccaaggacagaatcgcttacttctacgacggtgatgtcggtagtgtttactttggggcgaagcatccgatgaagccccaccggctttgcatgactcatcatcttgttctctcatacgatcttcataagaagatggagatttatcgtccacacaaggcttatcctgttgagcttgcccagtttcattcagctgattatgttgagtttttgaacaggattacacctgacactcagcacttgttcttgaatgaactgacaaaatataatcttggagaagactgccctgtatttgacaacttatttgaattttgtcagatttatgctggtggaactatagatgctgcacgtcgattaaacaatcaactgtgtgatattgctatcaactgggccggtggactacatcatgccaagaaatgcgaggcatctggattttgttacatcaatgacttggttttaggaatcttggagcttcttaaatatcatgctcgtgttttgtatattgatatagatgtgcaccatggtgatggtgtagaagaagccttctacttcactgacagggtgatgactgtcagttttcacaagtatggagattcgttcttcccgggtactggcgatgctaaggaaataggagaaagagaaggaaagttttatgccataaatgtcccattgaaggatggaatagatgacagtagcttcactcgacttttcaagactattatttccaaagtagttgaaacatatcaacctggtgcaatagttctgcagtgtggagcagattcgcttgctggagatcgcttgggttgcttcaatctctctattgatggtcatgctgaatgtgttagcttcgtaaagagattcaatttgccattgctggtcactggaggtgggggatacacaaaagaaaatgttgctcgatgttggactgttgaaacaggagttcttctagatacagagcttccaaatgagattcccgcaaaatgattatattaaatactttgcaccagaattttctttgaaggttccaaatgggccgatagaaaatttgaatagtaaatcatatcttagcaccattaaaatgcaagtcttggaaaatcttcgttgcatccagcatgctccaagcgtacagatgcaggaggtccctcctgacttctacattccagaattcgatgaagatgagcagaaccctgatgaacgcattgatcagcacactcaagacaagcacatccagcgcgatgatgaatattatgacggtgacaatgacaatgatcaaatgaatatttcatgaagtgcagttgccgtttgccttttggcgggggattgaccgttttaagagagaaggaaaatgttaattagacaaacacctagatgtatcaacaaagcggtagtactagcccaagaaacttgtatatttataagatttttattgttttcagttgctaatatatttgctcaaagttacattattaatgatgtttcttccctgtcatttttttgaatgaaaatggacggtgttagagcaactctgacaacaagagcttgcataacattcttttt

SEQ ID NO: 27390 - DNA, 1719 bp, Glycine max
  Clone ID: TF_700841470_FLI
taacattttaaagtagataagccttccccgcccactagaaatagagagaaggtaaggagggtttggttttgggtactttacaaattacaataattagcgaaagagagaagacatagcacatagagtcatagagacatcatcatcgtatgggaatggaagaggagagtagcaacaacagcagcatcatagaaggtggtgcttcgctgccatcaacgggttcagacgccaagaagcgaagagtgacgtacttctacgagcccacgatcggcgattactactacggtcaggggcacccaatgaagccgcaccgaatccgcatggcgcacaacctcatcgtccactactccctccaccgccgcatggagatcaaccgtcccttcccggcctcccccgccgacatccgccgcttccactccgacgactacgtcgactttctctcctccgtctcccccgagaacctcgccgattccgccttctcccgccacctcaagcgcttcaacgtcggcgaggactgccccgtcttcgacggcctcttccccttctgccaggcctccgccggcggctccctcggcgccgccgtcaaactcaaccgcgccgacgccgacatcgccatcaattgggccggcggcctccaccacgccaagaagtccgaggcctctggattctgctacgtcaacgacattgtcctcggtatcctcgaactcctcaaagttcacaggcgcgtgctgtatgttgacattgatgttcaccatggtgatggtgttgaggaggccttttacaccactgatagagtgatgacagtgtctttccataagtttggggactttttccctggcacaggacacgtcaaggacattggggtgggatcaggaaagaattatgcagtcaatgtcccattaaatgacggaatggatgatgagagtttccgtagtctgtttcgaaccatcattcaaaaagtattggaggtctatcaaccagaggcagttgttctacaatgtggagctgattcattgtctggggacaggttgggttgcttcaacttgtctgtgagaggtcatgcagattgccttcgttttcttagatcgttcaatgttcctttaatggtcttgggtgggggtggatatacaattcggaatgttgcccgttgttggtgttatgagacagcagtggcagtaggagtggagcctgataataagttgccttataatgaatattatgaatattttggcccagattatactctctatgtcgatccaagcaacatggagaacctaaacacacccaaggatatggaaaaaataaggaacacactactagaacagatttctcaacttccccatgctcccggtgtaccttttcagacaacaccacctaccttacaacttccggaagaggcagaagaggacatggatagaagacctaaacttcgcaaatgggatggtgaagattatgattctgatcctgatgaaggtggaaaggctaattccaagtttccaaacgtcactgcccatatgagggacattacagatgaaatggaagaagagaaaccagaagtgcatccatcatcttgttgttgatagaacagagcaagttcttgcacagcatgtttgtattgttatctttattccgtttatgggggagatcattactaaacagtaccacatgcagctgttgagaatgcaaatataatcaatacattgtgcaaatgtaatatagtgt

SEQ ID NO: 27391 - DNA, 736 bp, Glycine max
  unsure (1)..(736): unsure at all n locations
  Clone ID: TF_GmC141697_3
attagcatgggaattccgaaaggacagatagttgtgtaagaaagagctcctgagccaatcaaacaatctctctgtcttcccttgaagaaggagaaatggggggaaattaaaagggaaaaaggcatataaccggaaacaatcgcgtttcgaattcaaaatcactcgtttctcgcttctcctttcgttcgacgcatgaatgcaggggcttcaccgcttcagacttcagtagcagagtgacagaaattagaaactcaaaaaagtaggcgcagccgagtgagaaaccatggaacgtgaaaacgacaacagcgccaaaagcagtgtcaacggtcagcgccgcgtgggtttactctacgacgagaggatgtgcaagcaccacacaccagacgacgaggaccatcccgagacccccaatcgcatcagagctatttggaacaaactccaaagcaccggcgttccccaacgatgcgtgattttggaggccaaagaagctgaggacaaacatctactgttagtgcattctgaaaatcatgttaatctgattaagaacatcagctcaaagcagttcaattcgcggaggcataagattgcctcaaaattggattccatatattttaatgaaaggttcatcggaagctgcgtaccttgctgctggctctgcagtaaaggttgntgaaagagtggcaagcagggaattggattctgctgttgccattgntaggcctncaggtcatcatgc

SEQ ID NO: 27392 - DNA, 1480 bp, Glycine max
  Clone ID: TF_uC-gmflminsoy057h02_FLI
cgcatggagatcaaccgccccttcccggcctcccccgccgacatccgccgcttccactccgacgactacgtcgacttcctctcctccgtctcccccgagaccctcgccgattccgccttctctcgtcacctcaagcgcttcaacgtcggcgaggactgccccgtcttcgacggcctcttccccttctgccaggcctccgccggtggctcccttggcgccgccgtcaaactcaaccgcgctgacgccgacatcgccatcaattgggccggcggcctccatcatgccaagaagtctgaggcctctggattctgctacgtcaacgacattgtcctcggcatcctcgaacttctcaaggctcacaggcgtgtgctgtatgttgacattgatgttcaccatggtgatggtgttgaggaggccttttacaccactgatagagtgatgacagtgtctttccacaagtttggggactttttccctggcacagggcacgtcaaagacattggggtgggctcaggaaagaattatgcagtaaatgtcccattaaatgatggaatggatgatgagagtttccgtagtctgtttcgatccatcattcaaaaagtcatggaggtttatcaacctgaggcagttgttctacaatgtggagctgattcattgtctggtgacagattgggttgcttcaacttgtctgtgagaggtcatgcagattgccttcgttttcttagatcgttcaatgttcctttaatggtcttgggtgggggtggatatacaattcggaatgttgcccgttgttggtgttatgagcagtggcagtaggagtggagcctgataataagttgccttataatgaatattatgaatattttggcccagattatactctctatgtcgatccaagcaacatggagaacctaaacacatccaaggatttggaaaaattaaggaacacactactagaacagatttcccgacttccacatgctcccagtgtaccttttcagacaacaccacctaccttgcaacttccggaagaggcggaagagaacatggatagaagaccaaaacttcgcaaatgggatggtgaagattatgattctgatcccgaagaaggtggaaaggataattccaagttctcaaacatcactgcccatatgagggacattgcagatgaaatggaagaagagaagccagaagagcatccatcatcttgtagttgatagaacagagcaagttcttgcacagcatgtttgtattgtaatctttatcgtaaactatttttgtttatttaagtcattttcttttatttggtccctgacttacacttagtttcgttttagtctcatagtgaatttagtttattttgaatattttcatttgtgcatattttcatttggtcaaatggagacgtcactttaattttggttcatgtatatttcttttacatgtatgatgaggatattaaagaaagtgatgaaggggc

SEQ ID NO: 27393 - DNA, 545 bp, Glycine max
  Clone ID: TF_GmC382331_1
ggcacgatatttcctggaaaatgctattcaattcctgctagagggctcgagccagaagaacttattacggttcattcgttggagcatattgaatctgtggaagttacaagtgaatcactttctagttatttcacgtctgatacatatgccaatgagcattcagcacttgctgctaggttggcagctgggttatgtgctgatctagcatcagcaattgtttctgggcgagccaaaaatggatttgctttggttaggcctcctggtcatcatgctggtgtaagacaggcaatggggttctgccttcacaataatgctgccgtggctgcattggcagctcaagctgcaggggctaggaaggtgctaattttggattgggatgttcatcatggaaatgggacacaagaaatatttgaacaaaacaaatctgtcttgtatatatcattgcatagacatgagggaggaaagttttatcctggtactggagctgccgaagaggtacatgactgcagacaaattttcaaattaaactgctgctgctggcaaac

SEQ ID NO: 27394 - DNA, 1356 bp, Glycine max
  Clone ID: TF_GmC1063_1
ggctcgaggcatttttggaaatgtggccattgcagcccgttattctcagcgtgttcatggattgaagcgtgtgtttataattgactttgatgttcatcatgggaatggaacaaatgatgctttctatgatgatccagatgtatttttcctttcatttcaccaagatggaagctatcccggtactggtaaatttgatgaagttggaagtggagatggtgaaggaaccacattaaatctgcctcttcctggaggttcaggtgatactgctattagaactgtgttcgatgaagtcattgtaccatgtgctcaaagatttaaaccagacatcattcttgtttctgctgggtatgacggccacgtgttggatccactagctaatcttcaatatacaactggaacatattacatgctagcgtccagtatcaaacaactagcgaaagatttatgtgggggccgatgtgtgtttttcttggagggaggatataatctgaagtctctttcatattccgtggcagacacattccgtgctcttcttggggaccgaagcttggcatctgagtttgataaccctaacattttgtacgaagagccatctacaaaagttaagcaagctattcagaagataaaacacattcattccctgtgaggtcaaaatagaaactgacatgacaagcatctaaatgtctagcattaataatttccttttctgtgggttcaatctataagtacatgtctttacactcttgggtgggcattctcccacttatcacatagaagcaaaaccattgtacaggattgcttgtggtctttgaacgagtctccagttacagtttctatatgccatgcagccatattgatcatgtggtcatagccatatacataaaggagtaaaccctaattttatatatttacttcattgaggaacactagcaacacaatttttaacacactcttattagcacattctctctatcaaatgaaacccatgtaagtctcaccaaatgatgcatgcctcgtaattttttttaatgggtttcactttccatttcgtgagtcatatgtagcttttacccaataataaagagttgaatgcattaataggatctctaagaactaccgaacatgttacttgtgggagaatttttataatgccattctttgtagattcaatagtggcatttactgtgtctgtgttgtaggaatctgctacttgagccttgttagatagatcaaaagcctcctcctattgggctaggtgggtgtatcaattatcatgtatgttagcttctttgatttttttttttattatcagcaaatcaaaatatattaaatagatgaccacctggctaatctcaa

SEQ ID NO: 27395 - DNA, 1980 bp, Glycine max
  Clone ID: TF_GmC305_1
ttctttcgtccgggtatattggatctcgcactttagaaattagcgaaagagagacgtatgggaatggaagaggagagtagcatcatagaaggtggtgcttcgcttccatcgtcgggttcagacgccaagaagcgaagagtgacctacttctacgagcccaccatcggcgattactactacggtcaggggcacccaatgaagccgcaccgaatccgcatggcgcacaacctcatcgtccactactccctccaccgccgcatggagatcaaccgccccttcccggcctcccccgccgacatccgccgcttccactccgacgactacgtcgacttcctctcctccgtctcccccgagaccctcgccgattccgccttctctcgtcacctcaagcgcttcaacgtcggcgaggactgccccgtcttcgacggcctcttccccttctgccaggcctccgccggtggctcccttggcgccgccgtcaaactcaaccgcgctgacgccgacatcgccatcaattgggccggcggcctccatcatgccaagaagtctgaggcctctggattctgctacgtcaacgacattgtcctcggcatcctcgaacttctcaaggctcacaggcgtgtgctgtatgttgacattgatgttcaccatggtgatggtgttgaggaggccttttacaccactgatagagtgatgacagtgtctttccacaagtttggggactttttccctggcacagggcacgtcaaagacattggggtgggctcaggaaagaattatgcagtaaatgtcccattaaatgatggaatggatgatgagagtttccgtagtctgtttcgatccatcattcaaaaagtcatggaggtttatcaacctgaggcagttgttctacaatgtggagctgattcattgtctggtgacagattgggttgcttcaacttgtctgtgagaggtcatgcagattgccttcgttttcttagatcgttcaatgttcctttaatggtcttgggtgggggtggatatacaattcggaatgttgcccgttgttggtgttatgagacagcagtggcagtaggagtggagcctgataataagttgccttataatgaatattatgaatattttggcccagattatactctctatgtcgatccaagcaacatggagaacctaaacacatccaaggatttggaaaaattaaggaacacactactagaacagatttcccgacttccacatgctcccagtgtaccttttcagacaacaccacctaccttgcaacttccggaagaggcggaagagaacatggatagaagaccaaaacttcgcaaatgggatggtgaagattatgattctgatcccgaagaaggtggaaaggataattccaagttctcaaacatcactgcccatatgagggacattgcagatgaaatggaagaagagaagccagaagagcatccatcatcttgtagttgatagaacagagcaagttcttgcacagcatgtttgtattgtaatctttattccgtttatgggggagatcattgctaaacagtaccacatgcagcagttgagaatgcaaatataatcaatacattgtgcaaatgtaatatagtgtaaaacattgttttggtctccctcgtaaactatttttgtttaagtcattttcttttatttggtccctggcttacacttagtttcgttttagtctgtcatggtcaatttagttgattttgaatattttcatttgtgcatactttcatttggtcaaatggatacatcactttaatttggttcttgtatcttttacatgtatgatgaggatattaaagaaagtgatgaaggggcaaaatgttgttttcttgttactatttcatttttgaaagattcttatgtataatccaaatattttaattaaattgttagttaattaaaaaaaaaaaaaaaaatatagggcgcccgccgactagtgagcgcgtc

SEQ ID NO: 27396 - DNA, 1419 bp, Glycine max
  Clone ID: TF_GmC1092_1
gcctcaacgaagtgtgaggcttctggattttgctatgttaatgatatagtccttgcaatcttagaacttctcaaacaacatgagcgtgttctatatgtggacattgacatccaccatggagacggtgtggaggaagctttctacactactgacagagtcatgactgtttctttccataaatttggtgactattttcctggtactggggatgtacgtgatattggatatggaaaaggaaaatattactctcttaatgttccacttgatgatggcattgatgatgagagttatcattttttgttcaaaccaataattggcaaagtaatggaagtgttcaggcctggtgcagtagttctccagtgcggtgctgattctttatctggagaccgattgggatgtttcaatctttcaattaggggtcatgctgagtgtgtcaaatacatgagatcattcaatgtgcccctcttgctactaggtggtggtggctacaccattcggaatgttgctcgttgttggtgctatgagacaggagttgctcttggaatagaagttgatgacaaaatgccacaacacgagtattatgaatattttggtccagattatacccttcatgttgccccaagtaacatggaaaacaagaattcccgtcatttacttgaagaaattcgatctaaactacttgagaatctttccaagctgcagcatgctcctagtgtccaatttcaggaaagacctcctgattctgatcttggagaggccgatgaagatcatgatgatggagatgagccttgggatccagattctgacatggacgttgacgttgaacgtgagcttgtctcgagcaaagtaaagaaagaaattgctgaacctcagcccaatgatctggaggaccagagaagtggagagcatttgagagactctgatactgcagttgcggaaacctgcatgaaggctctagatatttcttctcagaaagctgatgaagataatgtgaaagtagaacagaatactgtgaatgatttggccaaagagacggacctgaagggttaagcaacataggctttaactgattggtgaacagttaaattgattttccatttatgctgtcgcatttccaaattaattgagatgtggctgctgcttggttccatcatagtccattgtatacaccagtcgcattttcctaatgttaggggcaagtttgcaaatttaaattggttttttttttatctcatccagatggttttttgtactgttacattacatcttgttacagaatagtattacgtgctattattgagccgggtttatttttcttatactgatctttgtttaaaactttatgtgtgtaatgtctaattggtaatgtgaaacatattatcttgttaaataatctagttataagttttagcggtttac

SEQ ID NO: 27397 - DNA, 728 bp, Glycine max
  unsure (1)..(728): unsure at all n locations
  Clone ID: TF_LIB4201-008-Q1-K1-G3
ccggaattcccggctcgacccacgcgtccgctctgacagacactatcagatttcagaggcggaggcggaggctggagctgcctcaactcaagtcttcaactatctgaatctgaactcatccactcactcgttagcgctgctagaacgaaaactgagtaatggaaagtggagggaactcccttccatcagggtcagatggtgtgaagagaaaggtttcatatttctatgatccagaggttggaaactattattatgggcagggacacccaatgaaacctcataggattcgaatgacacatgctcttttagcccactatggattgcttcaacacatgcaggtcctgaagcctacggctgctaaagatagggacctttgcaagttccatgctgatgattatgtggcctttttgagaggcatcacccctgaaacgcagcaagatcaattgagacagctgaagaggtttaatgttggcgaagactgccctgtatttgatggtctttactccttctgccagacatatgcaggaggttctgttggtggtgctctaaaattgaaccacggagcatgcgatgtcgcaataaattgggctgggtggtctacatcatgcanaggaagtgtgagggcttctgggttttgctatgttaatgacattgtgctggctattttggaacttctcanaatacatgagcgtgttctgtatgtggacattgatatccaccatggtgat

SEQ ID NO: 27398 - DNA, 1917 bp, Glycine max
  Clone ID: TF_GmC305_2
cggctcgagcggctcgagtaacattttaaagtagataagccttccccgcccactagaaatagagagaaggtaaggagggtttggttttgggtactttacaaattacaataattagcgaaagagagaagacatagcacatagagtcatagagacatcatcatcgtatgggaatggaagaggagagtagcaacaacagcagcatcatagaaggtggtgcttcgctgccatcaacgggttcagacgccaagaagcgaagagtgacgtacttctacgagcccacgatcggcgattactactacggtcaggggcacccaatgaagccgcaccgaatccgcatggcccacaacctcatcgttcactacgccctccaccgccgcatgcaggtcaaccgccccttccccgcggcggaggccgacatcggccgcttccacgccgacgactacgtcgacttcctctccaccgtctcgccgcaaatcctctccgagaattcccactcccactaccgtcagctcaagcgcttcaacgtcggcgaggactgccccgtcttcgacggcctcttcgacttctgccgcgcctccgccggcggctccatcggcgccgccgtccgcctcaaccgcgaagacgccgacgtcgccatcaattgggccggcggcctgcaccacgccaagaaggccgaggcctccgggttttgctatgttaacgacattgttctcggcattctagaacttctcaaagttcataggcgtgtgctgtatattgatattgatgttcaccatggagatggcgttgaggaggcattttacactactgatagggtgatgacagtgtcatttcataagtttggggattttttcccaggaactgggcacattaaagacattggggtgggtgctggaaagaattattctctaaacgtcccactcaatgatggattggatgatgagacttttccgtggtctgtttcgccccatcattcaaaaagtcatggatgtttatcaaccggatgcagttgttcttcaatgtggagctgactcgttgtctggtgatcggttgggttgcttcaacttgactgtgaagggccatgcagattgccttcgtttccttagatcattcaatgtccctctaatggtcttgggtgggggaggatatacggttcgcaatgttgctcgttgttggtgttatgagactgcagtggcagtaggagtggagcctagtcctaagttgccttacaatgaatattatgaatattttggcccggactataatcttcatgttgagccatccacaatggaaaacctaaacacacccagggatctggaaaaaattcggaatacattactggaacaactttccaggcttccccatgcacccagtgcaccttttcaaacaacaccatcggtcatcgaagttccagaagaggaagaggaggacatggatgtaaggccaaaacgtcgtatatggagtggtgaagattttgattcggatcatgatgatgacatggctagttcaaagaactctgatttaactgcacaaacgagcaggtctgttgcagatgacatggacgaagataaagattaaagcaggagtgcatccctcatcttaataatgatagaacagagcaagtaccagatttagcattttacaaattagtgggaagcttattgctgtttgatctattgcatattttctctagactttttatggataaagtagggagcagtgttgcctttggcttgttgggggatggtgccctagtaatggcgggtttctactttttagaacacaccaccccccgaaaataacattgccttgcatgtttgctttggcggaccggattttaaatttcaatagaaaaatatacacaattaccattttacccttttggttattttaaaaaataaattaatttctattctt

SEQ ID NO: 27399 - DNA, 796 bp, Glycine max
  unsure (1)..(796): unsure at all n locations
  Clone ID: TF_GmC1790_1
ccacccgtccggtccgctttcctttttatccttagtataagagagactactagtttaggacgaaatttatggtttacttcggagaataattttaaaatatcatcgaacaagcagttagagttgtgaggcgcttttagccggagttgcttctctcatcgtcagttgtcgttacgttggtcgaccgactgtgtgcagctgattttgcaaagagaagagggaattttgttaggatagttgaatactgataagagaaataacgggaaacaacagacatggatactggtggcaattctttaccatctgcacctgatggggtgaagagaaaggtgtgctatttttatgatccggaggttgggaattactattatgggcaaggtcacccaatgaagccacatcgcatacggatgacacatgctcttctagcccattatggattgctacaacacatgcaggtccataagccatttcctgctagagacagggacctttgtcgatttcatgctgatgattatgttgcattccttcgaagcataactcctgaaacacagcaggatcatctgaggcaactcaaacgctttaatgttggtgaagattgtcctgtttttgatggcctctactctttctgtcaaacatatgcagggggttcagttgggggtgctgtcaagttaaatcatgaccaatgtgatattgctgtcaactgggctggtgggttgcatcatgccaagaagtgtgaggcttctggattttgctatgttaatgatatagnccttgcaatcttanaacttctcaaacacat

SEQ ID NO: 27400 - DNA, 1610 bp, Glycine max
  Clone ID: TF_GmC974_2
gcacacaattgatatcatcaatggcattctattgctagccattttctcctttcgctaattcttcttctacgctctctctgcaaaagatgccttccaaggacaaaatcgcttacttctacgacggtgatgtcggtagtgtatactttggggcgaagcatccaatgaagccccaccggctttgcatgactcatcatcttgttctctcatacgatcttcataagaagatggagatttaccgtccacacaaggcttatcctgttgagcttgcccagtttcattcagctgattatgttgagtttttgaacaggattacacctgacactcagcacttgttcttgaaggaactgacaaaatataatcttggagaagactgccctgtatttgacaacttatttgaattttgtcagatttatgctggtggaactatagatgctgcacgtcgattaaacaatcaattgtgtgatattgctataaactgggccggtggactacatcatgctaagaaatgcgaggcatctggattttgttacatcaatgacttggttttaggaatcttggagcttcttaaatatcatgctcgtgttttgtatattgatatagatgtgcaccatggtgatggtgtagaagaagccttctacttcactgacagggtgatgactgtcagttttcacaagtacggagatttgttcttcccaggtactggcgatgctaaggaaataggagaaagagaaggaaagttttatgccataaatgtcccattgaaggatggaatagatgacagtagcttcactcgacttttcaagactattatttccaaagtacttgaaacatatcaacctggtgcaatagttctccagtgtggagcagactcgcttgctggcgatcgcttgggttgcttcaatctctctattgatggtcacgctgaatgtgttagcttcgtaaagagattcaatttgccattgctggtcactggaggtggggggtacacaaaagaaaatgttgctcgatgttggactgttgaaacaggagttcttctagatacagagcttccaaatgagattccggaaaatgattatattaaatattttgcaccagaattttctttgaagattccaaatgggcagatagaaaatttgaatagtaaatcatatcttagcaccattaaaatgcaagtcttggaaaatcttcgttgcatccaacatgctccaagtgtacagatgcaggaggtccctccggacttctacattccagagttcgatgaagatgagcagaaccctgatgaacgccttgatcagcacactcaagacaagcacattcagcgcgatgatgaatactatgacggtgacaatgacaatgatcaaatggatgtttcatgaagttagcacttgcaatgttgccttttggttggggagtgaccatttaagagagaaggaaaatgtaattagacaaacgcctagatgtatcaacaaagcggtagtactagcccaagaaacttgtatattttgtaagatttttattattttatatatatatatatatatatatatatatatatatatatatatatatatatatatttgctcaaaagtacattattccggtcttccctt

SEQ ID NO: 27401 - DNA, 801 bp, Glycine max
  unsure (1)..(801): unsure at all n locations
  Clone ID: TF_LIB4164-050-R1-K1-G7
cgaattcgagctcggtacccggggatcctctagagtcgacctgcagtagaggtcgtatttacagcgaacttatgagttttttgtgttgttcattaaatgtgaatgtactgtattattgagtgttttcggttttcgaatatatgttattgtcttttgtcatgttaatagccgtgattatgtttgatatttcagatcattgaaacatttcctgttatcgtcttactttgctttacgtagaaggaaatttaatagctgctatttggacttgataatgtttatctctgtggccaagatttcttctgttaaatccatgaaattgttataatttgacagaggtaccaatatttttaccatctgtatattttctctcttcctcttggtgacccggtggggcataggttctagctgcaaagctgcctcttcttttgtggcagtagtgctgcgtacaatacgtctaaccctctgcggaccttatgcttaatcttattaaaataagctgtgccttactcaaaaagtttatgagcctaactgattttgtcaagtaggttgttaaaagagtggcaagcagggaattggattctgctgttgccattgttaggcctccgggtcatcatgcagaacaacaagagctatgggattttgtctgttcaacaatgtggcagttgctgcaagatatctcttagacaaaaagtgagtaacgtaactcctnctaccaattcccatatttgaaaaacttttagcctttaattaacagtttggttactgtattgacacctttgcttttctggtttttgccgtctg

SEQ ID NO: 27402 - DNA, 740 bp, Glycine max
  unsure (1)..(740): unsure at all n locations
  Clone ID: TF_GmC46078_1
atttgatgctgcaagaggtgatcnnnnnnnatgttgtgatattactcnnnnnnnntatgcacatatgacaaatatgttgaatgcnnttnnnggcnnnaaattgcttgttattcttgaggggggctataatcttcgttctatatcgtcttctgcaactgcagtaatcaaggtattactgggtgagagtcctggatgtgaactggaaaatagcttcccttccaaagctggcctgcaaactgttctggaagtcctcaaaattcagatgaacttttggcctgccctgggtcccatttttgtgactttggagtcacaatggagggtgtactgttttggaagaaaaaggaaacagattaagaaacgacgccgagttctggttccaatgtggaggtggggacgaaaaagtttgttattccattttctgaacggccaccttaatgtaaaatcaaagttatgttgagctgatgaattttgtaagcacgggaaatacgtagtagttatcagcatgctgtacattccatcgtcaggacaatatgatttttgtgggatcgtgcaaatgatagatttgtgcggaagggtgagacaactcggggaaagaaggggagggtggcaagtgtaaaggataaaaatgatttcccagttccttgtttgaacatcgaattttgatagttaccaaatgggaaatatgagaaattaaagcactttctgctccaacgaatctttaataaacaacataaattttt

SEQ ID NO: 27403 - DNA, 1760 bp, Glycine max
  unsure (1)..(1760): unsure at all n locations
  Clone ID: TF_GmC1863_1
cggctcgaggtggaacattccattttttcggtgccattcatgatttttatcaaccgctggctcgagggcatcgagtatccgagttaagcaaggtgagttaagcttcgtcgattcacgaaattcccggaaatcgttactgagtcaactcggtatttcggtggctcgtccaatttgcacaaggttcgccgccgtcaaagcgtttccgattctccaccaccgccgtagctgccgccgtcaaccgtcgccatcgatgtcgtcttcttccgccaacgatgccgaggctctccggcgcaaccgcatcctctccagcaagctctacttcgacgtgtctccgtccaaggttccgctaatctactccgcgtcttacgacatagagtttctcggcatagagaaactgcatccgtttgattcgtcgaagtggggacgcatttgtggattcctcgtttcgtttggtattcttgacaaaaaatgcgtcgttgagcctttggaagcttccaaggatgatcttctagtggtacactctgaatcgtatttgaataccctgaagcagagttcaaaagttgctatgatagttgaggtccctcctgtggcattaattcccaattgtcttgtgcaacaaaaagttctttttccattcangaagcaggtaaattaactgttttattgaattctttttagcatctccaaaaatctcatcttgctcctaatcaaatggtaggttggaagaactatattggctgcgaaacttgcaaaggagagaggatgggccattaacatgggaggtggttttcatcactgttctgcacaaaaagggggtggattctgtgcttacgcagatatttctctatgcatccactttgcttttgttcggttgaatatatcaagggtgatgatcattgatcttgatgcacatcaaggaaacggtcatgaaatggacttcgcttatgatagccgagtctatatcctggatatgtacaatcctggaatatatcctttggattatgaggcgagaaactacataaatcagaaagttgaagtaaagagtgggacagttactgaagagtacctgcaaaaattagatgaagcacttgaggttgctgggcataggtttaaccctgagttggttatttataatgctggaactgacatcctagaaggtgatccattaggaaggttggagatcagtcctgaaggaattgcccttagagatgagaaagttttccggtttgctcgtgaaaaaaacattcctatcgttatgctcacttcaggtggttacatgaagtccagtgctggagtcattgcagattcaatagtcaatctttcgaagaaatgcttgatagaaacgagtggagctccaaagtctacgtaaagtgctcctgtgttttactgatcatgaatggtcccttgtaagagttttccagatcctttgtgtatttgggtatagaatgtttccattttagtggaaactttgatgtacagtattttaatataaaaaagaacttagtgtagatgaaaatgtgttctacgtgagttgtaacaagtccgtaaatgctgctggtatattagtactacataatgcataaatgagttgtatattatttcatccatttaaataataattattcgttattattctcttatatattaatttttctaccaaaaanaacttttcttttttgtgtattataattttatttttttttaaataatatttcatttttttttcgccaataatttataattttatttttatttttcca

SEQ ID NO: 27404 - DNA, 1407 bp, Glycine max
  Clone ID: TF_GmC129_1
ccacgcgtccgacggctgcgagaagacgacagaaggggaagcagtgagaagtcgcaaggaggtgcagaatggctgatgcaggtgcagaaggagcatcttcttccacggtaggccaaattgacgttttctggcacgaagggatgctgaagcatgacacgggcaatggcgtgtttgacacggggatggatccaggcttcttagaggtgttggagaagcaccctgaaaactcagacagagtgaaaaacctagtgtctattctcaaaaggggtcctatctccccttacatttcttggcaccttggtacacctgcaaaaatccctgagcttttttcttttcacactcctgaatacataaatgaactggtagaagttgataaagaaggggggaagcagctttgtggtgggacatttttgaaccctggatcatgggatgctgcacttcttgctgctgggactacactatctgcgatgaagcatttactgaatggggatggaaaagtttcctatgcattggttaggccccctggtcaccatgctcagccttctcaggccgatggctactgtttccttaacaatgcaggtctagctgtgcaattggctttagattccggctgcaagaaggttgcggtcatagatattgatgtgcattatggaaatggaacggcagaggggttttatcgatctaataaggttcttaccatctctcttcatatgaaccatggatcatggggtccatctcatccgcaaagtggctctgttgatgagctaggtgaaggagaaggttatggctttaacttgaacatacctctaccaaatggaactggggacaagggatatgtacatgccttcaatgagttggttgttccatccatccaaaagtttgggcctgatatgatagttttggttcttggacaagactctaatgcatttgatcccaatggaaggcaatgcttaacaatggagggttatagagaaatagggcgaattgtccatcttcttgcgaaaaggcacagtgcaggacgccttctaattgtccaggaaggtggatatcatgtcacatattctgcatattgtttacatgcaacacttgagggggttctcaacctaccaatgcctctactagcggatcctattgctttttacctagacgacgagacattttctgtccaagttatagaagccattaagaattatcaaaaagataaagtgcgctagtggagaaactcactagacacttcctctctgtgcgtgtgaaataaatgttgatacttttcaagaagggttaatatttatcgtgtaactattgagggattttcaaggttattttaaataaatttaatcttgtccagttgatcttttgattaaaaaaaaaaaaaagcggccgaaatagagaaaagaaaaagggcgt

SEQ ID NO: 27405 - DNA, 2212 bp, Glycine max
  Clone ID: TF_GmC305_3
aacttgctgaatttattgatagtttcttcctttgctgaattgattttctcctatctgttgtatgttactgggcagcgcgtgctgtatgttgacattgatgttcaccatggtgatggtgttgaggaggccttttacaccactgatagagtgatgacagtgtctttccataagtttggggactttttccctggcacaggacacgtcaaggacattggggtgggatcaggaaagaattatgcagtcaatgtcccattaaatgacggaatggatgatgagagtttccgtagtctgtttcgaaccatcattcaaaaagtcatggaggtctatcaaccagaggcagttgttctacaatgtggagctgattcattgtctggggacaggttgggttgcttcaacttgtctgtgagaggtcatgcagattgccttcgttttcttagatcgttcaatgttcctttaatggtcttgggtgggggtggatatacaattcggaatgttgcccgttgttggtgttatgaggtctgcttctttctcttttagtctggattataatgtgacttggtacttgtttaatttacttatttggttacatgctttttctttgttttagacagcagtggcagtaggagtggagcctgagaataagttgccttataatgaatattatgaatattttggcccagattatactctctatgtcgatccaagcaacatggcgtaacctaaacacacccaagggtatggaaaaaataaggtgtttatactattaatttcatctggttgagttaaatcgatgattctcatttcaattttattatttctcttaattatatggaaaaataatggtcataaattgttaagacagtaattccttaaatgcattacattttgctgcatccatgtcacatcctttctacaaatgatgacgttttcagaaacttactagtagttgcatagacaagctatatttcataataactgaattgttattttcatattggttgtgaagacatattgtattgtctagatataaaatatttcctatgggtttctggaaattgtacctctgtctgtggcagaagccaggaggcccaggactgaaccttagtcagaatttatatttcccttgtctcatgtgtaaaatattcagagatttcctatcatttctctggattaagcagtgacttacatgggttttccccccattaaatttcaaggaacacactactagaacagatttctcaacttcccccatgctcccggtgtaccttttcagacaacacccacctaccttacaacttccggaagaggtcagtacttaataacagttgcagttattgttcctttgcaattctcttctttttgttgattttattatgtattcaggcagaagaggacatggatagaagacctaaacttcgcaaatgggatggtgaagattatgattctgatcctgatgaaggtggaaaggctaattccaagtttccaaacgtcactgcccatatgaggtaatgattatatattgttttgaagctgaatataaacccatttggtttgtaagttcctttttcagtggataaacgtgggttgttccttgagaccgatacctatgtgacacctgctagcttgatagatattcctagagtcagtttgaatggaagttttttctggtaatggagctcactatgctataacacaagtttcttcttagccgtttgaagtgaatttaataatcatttggctcctttttttaaagcagaaatgttctctttttgctgcaggggcatttcagatgaaatggaagaagagaaaccagaagtgcatccatcatcttgttgttgatagaacagagcaagttcttgcacagcatgtttgtattgttatctttattccgtttatgggggagatcattactaaacagtaccacatgcagctgttgagaatgcaaatataatcaatacattgtgcaaatgtaatatagtgtaaaacattgttttggtctctctcgtaaactatttttgtttaagtcattttcttttatttggtccctggcttacacttagtttcgttttagtctgtcatggtcaatttagttgattttgaatattctcatttgtgcatactttcatttggtcaaatggatacatccctttaatttggttcttgtaacttttccctgtatgatgaggatattaaagaaagtgaggaaggttcc

SEQ ID NO: 27406 - DNA, 1151 bp, Glycine max
  Clone ID: TF_GmC1634_1
ttacggctgcgagaagacgacagaaggggaaaatcctctcgtctatagtctattgcactctgacagacactatcagatttcagaggcggaggcggaggctggagctgcctcaactcaagtcttcaactatctgaatctgaactcatccactcactcgttagcgctgctagaacgaaaactgagtaatggaaagtggagggaactcccttccatcagggtcagatggtgtgaagagaaaggtttcatatttctatgatccagaggttggaaactattattatgggcagggacacccaatgaaacctcataggattcgaatgacacatgctcttttagcccactatggattgcttcaacacatgcaggtcctgaagcctacggctgctaaagatagggacctttgcaagttccatgctgatgattatgtggcctttttgagaggcatcacccctgaaacgcagcaagatcaattgagacagctgaagaggtttaatgttggcgaagactgccctgtatttgatgggtctttactccttctgccagacatatgcaggaggttctgtttggtggtgctgctaaaattgaaccacgggagcatgcgatgtcgcaataaattgggctggtggtctacatcatgcaaagaagtgtgaggcttctgggttttgctatgttaatgacattgtgctggctattttggaacttctcaaaatacatgaggtttccctaattaattccccacactatcttattgatgcatggctgttctcattttaatttagattgaatttactctttacatgaccaacatctgcaaaattccataacatccgtttggaactgtgaggttccaaaattgaaagtgtattttagaagaaagagggataagtgagtatgtgctagagaacagtggtaatgtggacgggttataatagctagtggttagtggtaattagtaagggaagtatataaatataaatactgttacaatcttgagtagggattgtttttggcttcttggcttcacttggctgtttttgttgtgactgattgatgtactgcattgtggtttactattttgctttattatggtgttgaaatgttgaattattatattggtgtagaggaggccttttacaccactgacagggtca

SEQ ID NO: 27407 - DNA, 1881 bp, Glycine max
  Clone ID: TF_GmC81_1
ggatactgcatactcgctggatctcccaatctggcttcaaactcaacaatggcatacgccgcacctccgctggacccgccaggaataggcacgaactcgccttcgtctcagaagaagagagtggcttatttctatgacagcgacgtcgggaactatgcctaccagtcgggacatctgatgaaaccccatcgaattcggatggcgcattcgcttgttatgaactatggactgtacaacaagatggagatttaccgggccaaaccagcgtcaaaatacgagatgacacagttccatacggacgaatacgtggactttttgcagcgtgtcactcccgacaatgaacatcttctggctaaagagtgcgccaagcacaatgttggggaagattgtcctccgttcgacggcgtctttgagttctgcgcgattagtgccggtggcagtatggaaggagcggcaagactcaatcgtgccaaatgtgatatggcgatcaattgggcgggcggactgcatcatgcgaagaaaaacgaggcatctggcttctgctatattaatgatattgtcctcgcaatccttgagctgctccgcttccatgcacgagtattgtatatcgacatcgatgtgcatcatggcgacggtgtcgaagaagccttctataccactgacagggtaatgtgtgtctcgttgcataaatacggcgaattctttccaggaactggcgaccttcgcgatattggaatcgggcaagggaaacattactcagtcaacgtaccactgcgagatggtatcgacgacgccagctataaagacgtcttcgaatcggtgacgacgtgggctgtggagttctttcaacctggggcgatcgtcttacaatgcggagctgactctctgtctggggatcgccttggtgcgttcaacttgagcctggctgggcatgcgaactgcgtcaacttcgtgaagaaattcaacctgccgacgcttttcctgggaggtggtggctatacaatacgaaatgtcgctcgagcatgggcatatgagactggacagatagttggtgttgagctgtctcgctcgatgccatttacagactattacgagtactactcgccagacttcgaactagacgtcaagccgagcaatatggacaaccggaacagtgctgaatacctggcgaagatcaagtcatttgtttataccaatcttcgtcaagcacaaccggtcccctctgtgcagcttcaagacgtgccgcggtatccagtcggcatgagcgaacatattgacgatatggacgacagactggatgatgaagatgctgacgaggagacctccaaagatcaacggctcacggaacgggtggaagatcggatgattgaggatgatatggatatgtctggcttggaagacgcgagaggagtggactcgggagcagatgctgatcacggaagcccgtccatagtgggtgagggtggcagcgggtgtaaggttttgtcaagcgatcatgatacagaccagataactgagccggtcccatcgattgacccaggcaacgatcctgaacctgacagaacgacaatgatgctgcaggaagcgattcgtgacgagagcaacgaagtttcccagcccacgaacgttgaacaaacagtagtccagagggacgcccctgcggaacatgtcgagatcatcgcacagccgtcaatcgttctggaatcagcgccaatgcagcccgagccgcctatcgtccaatgtatgaacagagtagacagtcacacgcttgggcttagtgacgctgcagaagctgtggaagctatggagaacaatcacaaaggcggaaacgagaatatcggtctttcatagaggtacaaatatacacttgaagcatttttg

SEQ ID NO: 27408 - DNA, 1284 bp, Glycine max
  Clone ID: TF_GmC141697_2
attagcatggtattccgaaaggacagatagttttgtaagaaagagctcctgagccaatcaaacaatctctctgtcttcccttgaagaaggagaaatggggggaaattaaaagggaaaaaggcatataaccggaaacaatcgcgtttcgaattcaaaatcactcgtttctcgcttctactttccatgaatcttcactctccgagaaaccatggagcgtgaaaacgagaacagcgtcaacgctcaacgccgcgtgggtttactctacgacgagactatgtgtaagcaccacacaccagacgacgaggaccatcccgagaaccctaatcgcatcagagccatttggaacagactccaaagcgccggcgttctccaacgatgcgtgattttggaggccaaagaagctgaagacaaacatctactgttggtgcattctataaaccatgtgaatctgattaagaacatcagctcaaagcagttcaattcgcggaggcataagattgcctcaaaattgggttccatatactttaacgaaggttcatcagaggctgcgtaccttgccgctggctctgcagtagaggttgttaaaagagtggcaagcagggaattggattctgctgttgccattgttaggcctccgggtcatcatgcagaacaacaagaagctatgggattttgtctgttcaacaatgtggcagttgctgcaagatatctcttagacgaaagacggctcgagggtgtgaagaaaatattaattgttgattgggatgtccatcatggaaatggtactcagaaaatgttctggaatgattctcgagttttattcttttccgttcacaggcatgagtttgggagtttttatccagctaatgatgatggattttataccatgattggagaaggagcaggtgctggatataatataaatgtcccctgggagaatgggcgatgtggtgatgcagattactttgcagtgtgggaccacatcttgcttcctgttgctaaagaatttaatccagacataattatagtttctgctggatttgatgcagctgttggtgaccctctgggaggatgccgtgtcacaccatttggttattctgttctgttagagagttgatgaattttgctgaaggtaggattgtactgattttagaaggaggatataaccttgattccatcgcaaaatcaatgcatgcctgcttggaagttttgctagaggacagcctgttattggatcctcagaggcctatccatttgaatctacgtggcgtgtgattaaagcgg

SEQ ID NO: 27409 - DNA, 428 bp, Glycine max
  Clone ID: TF_LIB3242-368-Q1-K1-E12
ggaaaaaatatgtgagttggatgacattaagggcgcttgtggtttgtatcaccctgaataaaatatggtagtcctatgaatcaggctaccttatatttagtgatattacaataaataaatggcaaaaattttattaattgaaacaacattctacctcatagcaccaacaacgagcaacattccgaatggtgtagccaccaccacctagtatcaagaggggcacattgaatgatctcatgtatttgacacactctgcatgacccctaattgaaagattgaaacatcccaatcggtctccaaataaataatcaccaccgcactggagaactactgcaccaggccggaacacttccattatttttccgattattggtttgaacaaaaaatgataactcttatcatcaatgccatcatcaagtggaacatta

SEQ ID NO: 27410 - DNA, 292 bp, Glycine max
  Clone ID: TF_15812308
ccaatctgtcacaaccttggctcccgtttacttgtgctcacctctcgactacctatctgttgtagcgctagaactggctgtgaatgctccacctgacaccgaaaagaacaagaatattcctagacatgcgctattgcttgcaacgatcgatctggagatgctgaaatagcttgcttccgtgatcattgctcatgatggagtgctatcgaacatcaagcctgcactgttgacgaataagactgagacctcttccaaggagctctagactacatcctccgactataaatctcct

SEQ ID NO: 27411 - DNA, 239 bp, Glycine max
  Clone ID: TF_LIB3039-034-Q1-E1-H5
ggaacctttgaattcaatccattaaggattcagcaggtgctttttgaaaccagaaaccgaaatatttcgaaatggcccgtacaaagcaaactgctcgtaggtcaggtggaggaaaagctcacaggaagcatcttgcaaccaaggctgcacgtaagtctgcaccaacatctggtggtgtgaaaaagcctcatcgttaccgccctgaaagtgttgctcttcgtgatattaggaaataccag

SEQ ID NO: 27412 - DNA, 308 bp, Glycine max
  Clone ID: TF_LIB3040-010-Q1-E1-B10
ggtgtcccacgagtccataaagctgcaaaatgagaaattcgtcgtcactttcacactttctctcgcattcactcatgcacacgtatcattgcataaaggtgacggaaggcgcttcgtgcatcgaaaatcaccgcggcgaattctgacaaagctacggacagtaacaaacctaattctcgctcttcccgtgctgaaatccagtttcctgtcggacgtatccataggcagctgagacagatggtccaatccaactagacatgttgaggcaacagctgcactgtacttagcctcaactctagagtatctga

SEQ ID NO: 27413 - DNA, 417 bp, Glycine max
  unsure (1)..(417): unsure at all n locations
  Clone ID: TF_LIB3107-078-Q1-K1-F5
gaacacagacgggggttacatatttattctatgcgtggaacaggcagtaagagcgttgtggaagcagagaccgagatacttaaaaatggtcacttcgaagcgaactgctctgtactcaactggatggaaaagctcccacgaagcagtttgaaaccaaggatgtacagtggtactgcaccaacaactgatggggtgaacaagcctcatcgttattggcctagatctgttgctctttgtgagattcagaaagagcagaggagtactgtgctcttaatcaggaagctatctttccagaggatgattcgtgtaattgcgcacaatatgaagactgatctgcgttttcagagtcatgccgtgcttgcattgcaaagaagctgntgaggcttaccttggtgagctctttgaggacactaactt

SEQ ID NO: 27414 - DNA, 258 bp, Glycine max
  Clone ID: TF_LIB3170-033-Q1-K1-F2
ggaccctttgactcctatgcattgaagactgaactggtgcgtactggaagctcataccgacatacttcgagatggcccgttcaaagcatactgcttgtaagtcaactggaggaaatgctccgagatagcagcttgcaacctgggctgaacgttagtctgcacgaacaactgctggtgtgaagaaacctcatcgttatcgacctataactgttgctcttcgtgagattacgaaataccagaatagcactgagctcctaa

SEQ ID NO: 27415 - DNA, 358 bp, Glycine max
  Clone ID: TF_LIB3039-023-Q1-E1-D9
gatagcagtatctttgctcatctatattcaccaatgtacactgcatttcacttcggcgtttgcgatcatcagagcaatggcacgtgtcaccatgacgctcacacgtctaacagatgaaatgctccgaagaagcaattggcatccaaagcctctcccaaatgagccccggcgaccttcggagtgtacaatcgacacagcttcaggccattaacggtggcactaacggagattctacagtagcagcatagcacgaatcctctgatgacgaaactcccatatcagacgctcgtcaaataaatcgctcaggatatcaaaacgcatcacagctttcagtccaacgccatgtcggatcttcatg

SEQ ID NO: 27416 - DNA, 265 bp, Glycine max
  unsure (1)..(265): unsure at all n locations
  Clone ID: TF_700988871H1
cctagattcagccacagttggaaaaaaaaaaaaagttgttcganatggcacgtacgaagcaaactgctcgtaagtcccacaggaggaaaggcacctaggaagcagctcgnaaccaaggctgcacgtaagttctgcaccaactactggnggtgtnaanaagccanatcgttatcgtcctggtaccgttgctcttcgtganattaggaaatcccagaagagtnccgagcttttgatcaggaagctccccttccagaggcnggttcgt

SEQ ID NO: 27417 - DNA, 411 bp, Glycine max
  Clone ID: TF_jC-gmX3042004B07sg10K4b1
gctggcccgcccctgcaggtccacggctccggaatttcccgggtttgtcccacgcgcccgaataggctgcccgaagaccacagaaggggatcgcacaacattattctttcgcaccttgcagaatcaatattctctctgaatcgactttcatggctcgggccaagcaaaccgggtcgcaaatacaccggcgggaaggctcctacgaagcaactcgctcaccaaggctgcaagaaaatctgcacctaccaccgggggagtcaagaagccttatcgctatcggactgtaactgttgctcttcgagagatccgaaaataccaaaagaggacatagcttctgcaccgcaggcacccctcatgcgcgttagatatgcaaacgctccaagactaccagactgagctgtggagacagag

SEQ ID NO: 27418 - DNA, 349 bp, Glycine max
  Clone ID: TF_LIB3167-080-P1-K1-D7
ccgggcctggatttccgggtcggaccaaggcttccgccaacgcttccgtcaacgcttccgttcaaagcttccgttattttcaaagattaaggtccggggtttcggaagcagccacagttggctcgtccaaagcaaaccgttcgtaagtccacaggaggaaaggctcctaggaagcagttggcacccaaggttgaacgtaggtttgaaccaactactgggggggtgaagaagcccaaccgttttggtcctggtcccgtggtttttgtggaatttaggaattcccagaagagtcccgagcttttattccgaaagctccctttccaaaggttgttccgggaattggttaagg

SEQ ID NO: 27419 - DNA, 429 bp, Glycine max
  Clone ID: TF_jC-gmXLIB3564P090de03a1
tttgttttggtgttgggagaaaccctaggaatgcaattgactcctctgagtaacatggttttataactaaggtggagagagtaatatgtgacattctaaattgccacacagatggagaggattcctacaaccaaactcccaaacacattctggatgaccataaccctaaccctaagcacctaacacccaaacctctcaaccttgtttataaggactcgtaactctgacccttgatgcaagctggatatccttggccattatggttacccttttagcatgaatcgtgctgaggctagtgttctttaccaacccaacaatgtatgccttaacagcctcctgaagcgcggaacacagctctgtttttgaaacgaaaataaggacttgaaatcttgcgcaatttgtctcacgagcctatataatggaagcttc

SEQ ID NO: 27420 - DNA, 509 bp, Glycine max
  Clone ID: TF_jC-gmle01810084c01a1
atcacaacaagacgaaaagcacgcctcgcaaccatcgcaccacttggaacactctcgcgacctttgcgctagtgatcaccgtctgttcctagccgaattgttccatccggccccggcgcatcgacgcgacgcgatattcaccgggcattggccttacatttcacaatcacaacacgctttggatctttgtcgcgtacctcagaaatcgttgtaacgacaagtgcgcattgaaaaagagcagtgcgcatatccggaagccatggcgcgaacacaagcaagttctgctgctcaaagagggcgaccaagcacaggcggcaaaggcaggcccagcgacgctggaaagagcagacctagcgagtctggcaaggaagtcacaaaagcgccgcgaaggagtagtggtggcaagacacctgcaagtcccggaactcgcaaaaagccgcgctacaagccaggcacggtggcattgcgcgaaattaggagataccagaagtcgacggatctcctactac

SEQ ID NO: 27421 - DNA, 251 bp, Glycine max
  Clone ID: TF_13790103
gcaacgcttaacctctctcattccccatttcctcacctccttcaaccgctgctaaattctagggttccgaaatggacgctggcggaaagatcaagaagggcgccggaggtagaaagggcggcggcccaaagaagaagccggtttcaaggtccgtcaaagccggtctccaattccccgtcgggagaattggcccgtatttgaagaagggaaggtccctcagcgtgtcggtcccgggcccccgtatactgggc

SEQ ID NO: 27422 - DNA, 340 bp, Glycine max
  unsure (1)..(340): unsure at all n locations
  Clone ID: TF_jC-gmfl02220103c09a1
ggctcgagaccttgttgggctctttgaagtctctttttattgtgccattcacgcctatcgtgtgactgtggtgcccaaggatattcaactggcaagaaggattcttggcgagcgggcttgagttggagaatcctgtgttagtgaagatggattgttggtgggtgctgatggtagttcgtactaagatttttttttgaggaaaccgatttgctataagatccttcaacgtgtttacttggcagtcctattaattgacattggtatcaactgcctacatacacttngaaggcctggttgatagaaatttgccatgtgtgttgattttatggatcctttattt

SEQ ID NO: 27423 - DNA, 268 bp, Glycine max
  Clone ID: TF_uC-gmflLIB3260P045a12b1
gggcccgcccgcaataccgggccgaaaacgcgggcggaaaacgcggccgccaaagttttggagcttgttgagaacgctcaaacggacaacaagaggacgaggaagggaccaaggcacaaacaagtggcggataggaaccaccaggaggcgagcaaactgatgggagcagggaccatagccaaacggtggcggggcgcctaacattgaccaaaattcgccgcccaacaagggcgctggcaacgggaagaccgacatcggaacggctacc

SEQ ID NO: 27424 - DNA, 172 bp, Glycine max
  Clone ID: TF_5688045
ggacgctggcggaaggatcaagaagggcgccggaggtgtaaagggcggtggtccacagaagaagccgggttcaaggcccgtcatagccggtctccaatttcccgtcggaagatttggccgctatttgtctgaaggaaggctcgctcagcgtgtcgcgaccgggctcccgata

SEQ ID NO: 27425 - DNA, 393 bp, Glycine max
  Clone ID: TF_LIB3040-017-Q1-E1-C5
agtccaggcgtcagacggctgcaagaggagtacagaaggggattcacaccttcactccctctattgctttctcaaattccattttccaattcagaagcctatctccgtgcgaagcagcacatcgggatggcaccaaaggcagataggaagccagtatagaagaagcctgtggaggagaataaatcgactgtgggatacaaagctccggcagatatcaagtcagcggccggagagaagcttccgaaagagggaggagccggcggagaatgtatgaagaataagagaaataagaatagcgtggagacatactagatctagatcggaaacgttcagaagcacgttcacactgacattggtatctcaaccaaagcaatgggaatcataagcagattc

SEQ ID NO: 27426 - DNA, 431 bp, Glycine max
  Clone ID: TF_uC-gmropic007g05b1
ttgacgcgtgggtaaatttctgccactgcgaactctcgatcccgcgtttttcacatcaacaacatcaatcgccatttcgaccgatcggctaccgcgttcgaacccgtattgattcatccccaaatttttgatacttttatcttacgactttttttacgcgatcatctcgacaatgcctggtggaaagggaaagtcttctggcggaaagagctccggcggcaagacgagcgctgctgagggcaccaagaagcagcagagtcactctgctcgtgctggtcttcagttcccttgcggtcgtgtcaagcgttttctcaagcagaacacccagcagaagatgcgtgtgggagccaaggctgccgtgtacgttacagctggtctggagtacctgactgcccaagtcctcgagttggcaggcaacgctgcaaaggatc

SEQ ID NO: 27427 - DNA, 309 bp, Glycine max
  Clone ID: TF_LIB3049-043-Q1-E1-G8
gatagcatatcatgaggcgttcgcaacttgcacactcaattttctcactcaagcgtcgttcaaggctcgtacaaatgaagcggttcgcaagtctacgggtgggaacgatcctaggaagcacatcaccaccatggctggagtaaactctgtatctacgaccgattgagtcaagacgactcatcactatcttcttgcaactgttgctcttcgagagatcatgggctaccaaaatagcacagagcttcggatgcgcaagctcgactttcagcgtcctgttcgtgagatcgcgcaagaagtcaggactgattt

SEQ ID NO: 27428 - DNA, 399 bp, Glycine max
  Clone ID: TF_uC-gmroLIB3258P119f12b1
gttataggcactgacgatatcaagctaagacggattgctggtaccaaacagagcgctcgtgaatctacaactatatagtctgctaagaaggagatgtctaccaaatttgtgactattgtatggaccaactgcagatggagtgaggaatatactctgggatgtattgactccgttgctcttagtgagactgctaattaccagaggatgaccgaacttttgatgctgaatctcctcttacacatgctgaattgggaagttgctcatgaattaaagacatgatctgtgttctcagatccacgccgttcttgcatggtgagaagctgctgaagtatacctagttgggctctttgaggacactaacctgtgtgccattcatgccaagcgtgaaaccaattatgc

SEQ ID NO: 27429 - DNA, 272 bp, Glycine max
  Clone ID: TF_701136208H1
tttgctttctaggtttttttttttttttcttgctctttctctgtgtcgatggcgggaaaaggaggaaaggggtttttggccgaaaaaaccagggaagcgaaaaaggacaaagacaaggttaagaaaaggcctgtctctggttaatcccgtgctgggatccattttcctgggggtcgaatccataggcatttaaaccaaagggtgcaaccaaatggacttttgggggcgactgctgctgtgaacttggccccaattctggaatatctgactgc

SEQ ID NO: 27430 - DNA, 346 bp, Glycine max
  Clone ID: TF_GmC411_4
ccacgcgtccgaattgagcaagcttcttggtgacgtcaccatcgctaacggtggcgttatgcccaacattcacaatcttctccttcccaagaaggccggtggctcatccaagggcgctgctgctgacgatgactcttaaatagggattcgcttttcttgatttttttattatcaaatttagattatcttttggcctctctgttttgtagtttcttttttagttttgataattatgctctgtagttgtagttaggttttcattactgatgtgaatagagaatgctcttgttcttcaagaaagattgttgaaaatttgaatcattttaatttgtaatttttcagtctc

SEQ ID NO: 27431 - DNA, 391 bp, Glycine max
  Clone ID: TF_LIB3049-056-Q1-E1-C3
gactgacagagtcaaagtctctggttgtgttcacttgttatgtttaacgcttactggcgtcgtggcacgctctaagcgttacaatcgtgggtctcttcgacgaagggtgccatgcaacatgttgccacgatggtgcaggtttgtctgcaacaacttctggtggtgtgcattatgccgaccgttattgtcgtgtttgcgttgctcctctttacattaggatgatgccacaacagttccgtccttttgatcaggtagctccccttctagaagctggttcgtgaaagtgctcatgacttcaacactgatctgcgtttccagagccacgccgtgcttgcattgctagaacctgctgaggcataccttgttgggctctttgagggacactaactgt

SEQ ID NO: 27432 - DNA, 414 bp, Glycine max
  unsure (1)..(414): unsure at all n locations
  Clone ID: TF_LIB3242-257-Q1-J1-B9
attaaatgtcaaagttctttcaaaaactaaattaatgtctattttatctttgagttcnaatcacacaaggctggattcaatccacaagggggctacccttaaccaactttcaactaataccttcctcaagtcttctccttcgaccgccctagtgaagaagccacacatgttcatgccatgaaccgttgcccttatggatatcaagaagtaccataacagcactgaacttctgatccaaaagcttccttttcaacgtttttttcatgaaatcgctcaagacttcataactcatctttctttccataacatcacccttttctttctccaataatcccttgaagcttactttttttttcttttttaaaaacactaaccttttttcttttcacactataattgtttaccattttttcc

SEQ ID NO: 27433 - DNA, 705 bp, Glycine max
  Clone ID: TF_LIB5068-070-A1-XP1-E5
tcgggaaccatagtcgtgtctcattatcactcaccattggacaaccgacttcacttctccgttacccactatgagagatacggcatcgtaccaagctcaccgcgtccaagtgcaccgatacgaaaggctgcgaggaagcagttgccgaacaaagtagatcgcgagtcaaccacggcgaccggcggagagaaggaaacccgccgcttaatgccaaaaaggatgactctggagggacattcaaacgtgccacaagatgaccgaacttccgatcagaaaactcacattccgaggatcgccagagaaatcgctcaagattgctgaaccgatctcaggtgtcaaaggagcgccgattcagttcttgaagaagccgtagaggttaatctcggtgaaatcattgaggacactacccactgcgctattctggctaaacgaggtaccactatgtccaaggacatgcccctcgatcggatagtctaaggagagatagcttatcattatgggtgcatgtgatgagacattagaaagaggttactggtgattggactgcgagatatcttcaaatgcctctgaattgaaagatgcaacttatgtcatgcagagtatattcacatagtggagctgcacaactgagatgatgatgcacaacgacatgaatctctactatcatatatccttccgtgacaaagagaaaaggaaaaggccccg

SEQ ID NO: 27434 - DNA, 414 bp, Glycine max
  Clone ID: TF_jC-gmro02910047e01d1
ttttttttttttttttttttttttttttttttttttttttttttttttcttgggttttttttttttggaaaggaaaaaaaatcccttttggtttaaccccctattcctttcaaagagggatccaaaaatcccctttttttaaataacaaatggcttccacccaaacaaaaaaagtaaccacccctttacctaaaaagattttctaaaaaaaaacccctcattcgaaccaagggggcctaatatctaaataaaaagccagtgtacttggggaccgccttgtacccctaaaaaacggggttcttggccaattcaccgggaaaaaaaatcctaacccgggggtaaatttcccttgaagagagggggggcctttttttgtaatcggccagattaaaaatatcctgggcaatcttcttc

SEQ ID NO: 27435 - DNA, 562 bp, Glycine max
  Clone ID: TF_LIB4202-003-Q1-K1-F3
ccacgcgtccgctcatcctctctgatccaaccctttgaacttctgccttctgcccccttcgacccccgtttttctctagacaccatgtactgcacgctctccgcacgatctagatggtcgccggatgtagaaagggcggaggtctaaaaaatacgccagtttgaaggtacaccaaagccatgctccaattccccgtgggaagaatcggccgttgttaggaataaaggaaggtccgctcatcgtgtcgggaccggggcttccgaatacttgggtggagatatagaatacctagctgcccaagtgcttgagtgggctgggaatgccgcacgtgacaacatagaacaacaggatcattccaagacacactgcttttggcactgaggaacaatgaatagttggggaaatgggtcgctggaatgacaattgcacatggaggcgtgcttacaaacatgaactctgttctgttgcctaaaaagactgacagggcttgcaaggaacctaaatgtacatccaaggctaccaaatctcctaagaaagcttagatgacttagatattgtccat

SEQ ID NO: 27436 - DNA, 193 bp, Glycine max
  unsure (1)..(193): unsure at all n locations
  Clone ID: TF_LIB3170-005-Q1-K1-C11
gatcccataaaaaacacacgcgcnaaaaaaagggggaaaaaaaaaaaaaaagcgggcgcccaaagaagaaaccggtttcaaggtcgcgtcaaagccggtctccaattatcccgtcggaagaataatccgttattttaagaaaagaagatgctctcatcgtgtcggtaccgccgctcccgtatacttggctgca

SEQ ID NO: 27437 - DNA, 372 bp, Glycine max
  Clone ID: TF_jC-gmfl02220064c06a1
ggctcgaggttttttttttaacttttttaatttctaaacctcatcttcctgatcatgaacaggcaccatattcataaattaaaggccctactttgttttccaagtgccatgcgcatacttcagaactggcagcgagaaattccccttgatgcaaggcatcatccactgctaagacactccatggtagactagtagatcatagacttgtgaatgccaagatattgtcctacaccagcaattgatccttttatcagggtctccaactcttccttcaggcagattgtttgttgttaacgccggggagtcttacgaatcgacttcatatccttgcttgcattccgtgccagctccaatacctcagcatgtgagacc

SEQ ID NO: 27438 - DNA, 274 bp, Glycine max
  Clone ID: TF_LIB4367-023-R1-K1-D7
tgggccacccaagacctgacaccatgcacaaagcattcttgccatctgggccacccaagttatctagatgggtgcacgttgagggttacccgaattgctgatcgacctcttggtgaggctactgacccaatctatccagactggcaccgtctcacccattaaacccaccatcactaccagggaacttcagaccgcttgcaggcttgtgctccccggtggataggccaagcacgccgtccctgttggtgcgccggcctggccccaagttcgctag

SEQ ID NO: 27439 - DNA, 232 bp, Glycine max
  Clone ID: TF_10845002
gtgtctatctaatcaaactgcttggatgtccacgccgggaaaggcgccccataagcagctggcgactaaggcggatcgcaagtcggctccggcgaccggcggcgttaataagcagcacaaattcaggcccgaaaccgtggcgctgctcgagatccagaatattcagagaagcacggctactttgatggcgaagcttccggaaaatcagtcgatcacagagatagagctagaa

SEQ ID NO: 27440 - DNA, 416 bp, Glycine max
  Clone ID: TF_jC-gmXLIB3563P053bb05d2
gggaaagaaaaaaaaaccctcttttttttaccacctttttccttacaaagaggggtcaacaaaccccttttttttcatttaaaaatgggtttccccaaaaaaaaaaaataaccccccccttcaacataaaactttttcctaacaaaaccccctaaatcgaagggagggggcttaatagccatttaaaaaccttgggaacttggggacccccttggccccctaaaaaacggggggtttggccatttccccgggcaaaaaaaccctgaccgggggttaaatttcccttgaagggagggggggctttttgttggaccggccaattttaaaaaattccggggcaaccttctcaaaaatggcgtgaaaaaaacttgtcataatccccagggccttgtttgaaaaaccaagggggggggggc

SEQ ID NO: 27441 - DNA, 335 bp, Glycine max
  Clone ID: TF_LIB3242-722-P1-K1-G12
tcgtcggctgcgagaagaacaaaggggctgttcttggttaacaaatacaggggggattccaattcgaaacctattcatttatggaaccattggagtgtcgtcatggtccaaggcatgtagagcctgtggaatttagcccgcgtggaaatatgtcacggtgggagacaaggtccggcggataagaagccataggccggaaagaagctctcgtaggagggaggcgccgtcggtgaagggatgaagaagaagagaaacatgatgagcgtggtgacatacaagatctacatcttcaaggttctgaagcaggcccaccttgacattggtatcttaggcaa

SEQ ID NO: 27442 - DNA, 491 bp, Glycine max
  Clone ID: TF_GmC1625_2
ccacgcgtccgcgaaatgcaggtgttggagctggccgggaacgctgcacgtgacaacaagaagaataggattaaccctaggcacgtgttgctggcggtgaggaatgatgatgagctggggaaactgcttcaaggtgtgactattgctagcggtggagtgttgccgaacattaacccggttttgttgcctaagaagagtaccactgcgccttctgagaagtcctctactcctaagtcccccaaatctcctaagaagaaatagaagtttcattttgtaaaggcttatcgttttttatttttattttttgggggtaggggttggtaacattaccatatatatatatatagttcttaggttaggtgaaatatgatggtgtaatttagcgccaggtgttcgcttttttgctttttttggtcaccccatcgatggctgaatatgatgttaaatgtagtgggttgccaattcgtgtatggaagaagcctttttcattt

SEQ ID NO: 27443 - DNA, 571 bp, Glycine max
  Clone ID: TF_LIB4204-007-R1-N1-H9
gttttgggtttttgggggttttttttttttgggcgacgaaaacaacactccttcatttaaatttcaattgaggggttacattttctgagcaaacatagcttcgggtgggacagaacaaaccaaaacctaaactaaacttcacgcgaattcaaaagaaccaatgggggaggcggcgacacaggcattaaacctaaagattctattctttaacctccaaaacgcatagagggggcttccctggctcttgagagcgtaaacgacatccataggaggaacaggtttcctcctagcgtgctcagggggggggacaggatcgggaatcagggggtccaaaaatatcttcagaactcctctgggttcctcggaaatcaaaccactggtcctcttcacgcgacctcttctcggtaacctacgaatcggaggggttcggagtccttgaatggggggacgaagaacctttctgggcctcttaactgctccctttcccaaacccttcccaccttttccacgggctgggattgtgggggggaaatttggggggaacttaagttggggtccccttttggggggt

SEQ ID NO: 27444 - DNA, 360 bp, Glycine max
  Clone ID: TF_LIB3040-009-Q1-E1-E8
gacagcaaagcaattttcaaactcaattacaattcaataaccaaacctccccttggtttccaattcaaaaagaagtggcacttccaagccaaaccgcccacaattcaaccgggggaagggccccggggacgcaattggagactaaagccgctcacatgtcagctcgggacaccggcggtgtgaaaaagccccagcgtttcaggcccgaaactgtggctctgagggatatcagattgtaccagaagagcactgatcttctgatgcgaaaactcccattccagaggctcgtcagaaaaatcgctcaggatttcaaaacatatcttcgtttccagagcagcgctgtttctgctcttcaggaag

SEQ ID NO: 27445 - DNA, 280 bp, Glycine max
  unsure (1)..(280): unsure at all n locations
  Clone ID: TF_16282480
caccgaaaccgtagaaagtcctgcctttccttttgagagcataaacaacatccatagcgggaacggtctttcttttagcgggctcggtgtatgtaacagcgttccgaataacgttctcgaggaagatcttgaggaccccacgtgtcttctngtaaatgagaccactgatttttttaacaccacctttggggaccaaacgcccaattggcggtttggtgataccctggatgttgtaacaaaacacctttctgtgctctttgcttctctcttttccaacacc

SEQ ID NO: 27446 - DNA, 604 bp, Glycine max
  Clone ID: TF_jC-gmXLIB3563P053bb05d3
gggaaaggaaaaaaaaccccctttgttttaccccccaatcccctccaaagaggggcccccaacccccatttttttccctaacaaagggcttcccccaaaaaaaaaaaatacccccccccttcaccaaaaaacattttcccaacaaaaccccctaaatcgaagcgagggggcttaatagccagtccaaaacctagggaactgggggacccccttggccccccaaaaaacggggggctgggccaattccccgggcaaaaaaaccctgaccgggggttaaattccccttgaagggggggggggctttttggtggaccgggcaattttaaaaaatcccggggcaaccttctcaaaaatgtccttaaaaaaactgttaataaaccccagggccctgctggaaaacccaagggggggggggccccccttcaaaaccttgaaaaagaaaatctgggttgccccccccccctttgggggtctttttttttttttcccttttccggggggccccccctttttaggaagcttttttccggccttgggttttttccccgccggacccttgtcccccccggggactttttctcctccgggggcttttttcccgggg

SEQ ID NO: 27447 - DNA, 387 bp, Glycine max
  unsure (1)..(387): unsure at all n locations
  Clone ID: TF_LIB3039-047-Q1-E1-H1
caaaaagggaatcaaaactttaaccaatcctcaatccaacaattccaattcccaatccaaaacctaatactttaaagaactaatattgatcaattttggaacaagaagaaaagcacgaaaaaaccgttgagaaaaatcacgtggaaaaagtccngcgaaaaagccaggccggaaaaaagcttccaangaggaagacccgccggaaaaagggggaagaggaaaagaggaacaagaagagcgtggagacatacaagatatacatattcaaagttctgaagcaagtcaaccctgacattggtatctcaagcaaaggcatgggaatcatgaacagcttcatcaacgacatcttcgagaagcttgctcaagaatctttcagacttgcccgct

SEQ ID NO: 27448 - DNA, 662 bp, Glycine max
  Clone ID: TF_GmC40_15
ggaattcggcacgaggaattgctcaggacttcaagactgatctgcgtttccagagccacgccgtgcttgcattgcaagaagctgctgaggcataccttgttgggctctttgaggacactaacctgtgtgccattcacgctaagcgggtaaccattatgcccaaggatatccagctggcaagaaggattcgcggtgaacgtgcttgaggtggtggttgtgaagatgaagatgaagatgggttgctgcgggtggtgtttttgttgttcaaattcctttttttttttttttttcaatggatagggttgttagggagtgtaggtgttttacggtattacccattaattgtgatacaggcaaatactgccaagtgtccgtgactgtgttttcctccttttagaaaattggcttgtaattgatttttggacatgtgtgtcataatgtttctgtttttagtttttacctacgggatgtagtcactttggaattgtattggacaacattcagttgccatctaatctcgtttaagctaagtttgttgtgctaattaaactgacctcccttcttggttttgaaatgagaggatttgaatatagtattacagaactggcaaaaaaaaaaaaaaaaaaagaaaaaaaaaaaaaaaaaactcgagactagttctc

SEQ ID NO: 27449 - DNA, 352 bp, Glycine max
  Clone ID: TF_LIB3170-009-Q2-K1-H1
cgatcctgtggattctattcttcaagatacacacggctcgtacgaagcgcaccgctcgtaagtgcacaagaggaaaggcttctctgaagcagcttgcaaccaaaggtgaacgtaagtctgtaccaactactgttggcgtgaaaaacccccaccgttatcaaactggtaccgctgctcttagtgagattaagaaataccagaagagtaccgagcttttgatccacaagctgcccttacagaggatgaaccgtgaaattgctcatgactttaagactgatatgcttttccagagccaccccacgcttgcatttcaagaagctgatgaggcataccttattaggctctttgatga

SEQ ID NO: 27450 - DNA, 315 bp, Glycine max
  Clone ID: TF_LIB3049-016-Q1-E1-F3
agggggagtcaatgcattcaggattcaccaattgcgttttggatccagataccggtattcttcgagatggcacgtactcacccaagtgctcgtatgtcaactggacgaaaagctcccaggaagcagcttgcaaccaaggctgcacgtaagtctgcaccaacaactggtggtgtgaagaagcctcatcgttatcgccctggaactgttgctcttcgtgagattaggaaataccagaagagcactgagctcctaatcatgaagcttcctttccagatgttggttcgtgaaattgcccaggatttcaagactgatctg

SEQ ID NO: 27451 - DNA, 423 bp, Glycine max
  unsure (1)..(423): unsure at all n locations
  Clone ID: TF_LIB3092-022-Q1-K1-E10
tttcttaacaaatgttttttggttttcacanaccgaaatacttcgcgccggcccgcacaattcaaacgcgctcataactcaactanattaaaatctccacataagcatcttgcaaccaattctgcacgtaattctgcaccaacaactgatggtgtgaacaatccttatctatatctccctgtaacttttgctcttcttgagattattaaataccacaagagcactgatctcctaatcaccaatcttcctttccacacgtttcttcctcaaattgcccaaaattttaagactgatcttcttttccaaatccatgctatactttcattgcaatacgcttcttaagcatatcttgttttcctcttttatgacactaactttgtttccattcaccccaaacgttttactattattcccaatgatatt

SEQ ID NO: 27452 - DNA, 361 bp, Glycine max
  Clone ID: TF_12015491
ggcaccaaaagcagagaagaagcccgttgaggagaagaagtccactgtgggagacaaggctccggcggagaagaagccataggccggaatgaagcttcttaaggagggaggcgccggcggagaagggaagaacatgaagaggatcatgaatagcgtggagacatacaagatctacatcttcaatgatatgaaacaggttcaccctgacattggtatctaaagcagagccatgggagtgatgaacatgttcattaacaacatttatcttaagctcgtctcaaaatcttatttacttgcccgctacgtctagagacttatcatcacttgtagggaggtagagaccgctgtcaagcttgagctg

SEQ ID NO: 27453 - DNA, 399 bp, Glycine max
  unsure (1)..(399): unsure at all n locations
  Clone ID: TF_LIB4367-010-R1-N1-C7
ctcctattgccgccggggagaaggggggaagaagaaaaagaggaaagaagagcgtggagacatacaagatatacatattaaggttntgaagaggtcaccctgaattggtatntaagcaggccatgggaatatgaacagttatcaagacatcttgagaaagttgtcaggaatgttcagacttgccgttacaacaagaagcccaccatatttnaagggagatncagaccggggtaaggcttgtgctggcnggtgaactggncaagcacgccgtttntgagggtaccaagggcgtgannaagttgaacagttgttgaacaaaatatgttaattttgtttacgtgggtgttgttttggttgatgtgtatgtgttagatgtagggaaggtatgtttaggtttga

SEQ ID NO: 27454 - DNA, 451 bp, Glycine max
  Clone ID: TF_uC-gmflLIB3260P039c07a1
aaacccccaacccattctaaaatgccggggttcctataaaaaaaaggaatcctaccccttccataaacaacttaaccactaacatttctttaattacaaaggctaacccccaaaccccccaaaaaacctactggttaaaatttaaacattggcccaacccccttaaatacaaaaacaagaccctgaaaaaatcaataaaatttattttgttcaaaacctggtgaacttggggacggccttggtcccctaaaaaacggggtgtttggccaattcaccgggcaaaaaaatcctgaccggggtgtggatttcccttgaagggagggggggctttttgttgaaccgggcaaatttgaaaaattcctgaacaagcttctaaaaaatggccttgataaaactgttaattattcccagggccttgtttgaaataccaagggcgggggggccctgcttc

SEQ ID NO: 27455 - DNA, 1182 bp, Glycine max
  Clone ID: TF_GmC1341_4
gcacactgatgtggctgtcctgctcgacaatgaagccttacaaagcagatgaagagacttttgaatcatctcatgaagcgttcaaatcagcttttcctagagggtttgcttgggaagtgatcaaagtttatagtggaccacctgaaattgctttcaagtttaggcactggggcttctttgaaggtccttttaagggacatgcccctaccgggaagatggcccaattctatggcttgggaactgtcaaggtggatgactctttgaaggttgaagaggtggagatttactatgacccggcagagcttcttggaggccttctttcagggaatcacgaagcccgcgattcggcgtctggcgcgacgtggtggcgtgaagcgtatcagtggtctcatctatgaagaaactcgcggtgttctcaagatcttcctcgagaacgtcattcgcgacgctgtcacctatactgagcacgctcgccgaaagatttccacttgcatggacgttctttacgctctcaagtgacagggcaggtctctctatagtattgacaattagagatgtgtcatgtagatcattttacctcaggctcaatcacaatcatgactcatgaggtttattggctatacaggtggatgactctttgaaggttgaagaggtggagatttactatgacccggcagagcttcttggaggccttctttcagggaaccacataaatcacccaattgaagaggatggcaccaaaacttcagcaccttcccaaggatgtcccttctccaaataattacaatgatgtttttaagtgaatggtgtcttgggatccagctatatttcttgaattaattaatgtggcagctgagatttgaaggcaaatatagtatttgtgtgaaattgggtccattgaataaaattggaaacatgtcaaaatgaattatttttccccccgctttatatggaaaattatggcaaataaatgtgatgtgttggaaagcaatgtgcatgatacaatgtcggtttggctttgctgttgcatagtttagaagttataagttattttattttattttatttttgggagggagagctttctagcaatctgatgaagagatcgatccaataagggaccaagttagctcatgtggcagcaaaatctattatattgttgaatgaaagcatttgaagatc

SEQ ID NO: 27456 - DNA, 346 bp, Glycine max
  Clone ID: TF_7233625
gagaaacaccgagaatgggaaaaacagcgacgcggagaagaagccaatttggaaagccggcagatccaatctggaattgcgcgtgcaaagaattgccggggtggggagaagaagaaatacgctcacatatcggaccaaggctcccatatacttagctacacttctcaaatacgtggctaccggaaggcgggagttaacgtaaaataccacacgtgacaacaggaaggacgggattattccaagacacgtacttttagcaaggaggagcgatgaagagtgggagaaagtactgactggagtaacgaggacgcatggtaacggacttgcgaacatcagccctgtggtt

SEQ ID NO: 27457 - DNA, 438 bp, Glycine max
  Clone ID: TF_LIB3242-704-P1-K1-A9
accggtgcgagaagaccacagaagggggaacctttgcattatattcattcaagattcagcgagtgcgttttggaagcaaagaccgaaatacttagagatggcccggacaaagcaaactgctcgtaagataactggaggaaaagctgccaagaagcagctttcaaccaaggctgaacgtaagtctgcaccaacaactggtggtgtgaagaagcctgatcgttatcgccctggaactgatgctcttcgtgagattaggaaataccagaagagcactgagctcctaatcaggaagcttcctttccagagggtggttcaggaaatacgcccaggatttcaagactgatctgcgttaacagagccatgctgtgcttgcattgcaagaggctgctgacgcataccttgatgggctctatgaggacactaacttgtgtgccattc

SEQ ID NO: 27458 - DNA, 392 bp, Glycine max
  unsure (1)..(392): unsure at all n locations
  Clone ID: TF_LIB3170-032-Q1-K1-A8
aagactacatttttttttttctttgcattctattcattcaggggtcaggtggttttttttggaagcanagaccaaaatacttcaaaattgcccgtacaaagcaaactgctcctaagtcaactgcaggaaaagctcccattaagcatcttacaaccaatgctgcacgtaagtctgcaccaacaactgctgatgtgaataaccctcatcgttatcgtcctgaaactgttgctcttcatgagattatgaaataccagaacagcactgaactcctaatcaagaagctttctttccataagttgaatcctgaaattgcccaggatttcaagactgatctgcgtttacagagccatgctgtgcttgcattgcaagaagcttatgaggcataccttttt

SEQ ID NO: 27459 - DNA, 528 bp, Glycine max
  Clone ID: TF_LIB4204-012-R1-N1-E12
ggggcaaacccctaggggaaaaacccgggggaaaaaagaggaatcttacaaaaaaaaggcattggaaaaaaacacttccctcccgtagcagaaaccaaattttaagggcaaaggacacgaaaccctaaacttaaccccccccccctttgattttggaaacaaattaaaggcccttgggcataaggggaaccccataaaaggaaaaagcccaaaggttagggccccaaaaaagcccaaaaaaaaaagcccccggggtttcctaaaaaaccaaaacgggcctgctttaaaagcggaaaacggttttaaaaacctgaacaatttctttgacaaacctttgaaaagggagttttcgaaaaaaaagttcggggctctttgggaactttaaaaaccccctaaaaaccaccgttcctggcctaaaacgggggggctttttaactccgccggtccccggggctaacttgaaaacggttttggttgccaattgcttcctcggagcctttcctccgggggacttgcaagcggtttgct

SEQ ID NO: 27460 - DNA, 467 bp, Glycine max
  Clone ID: TF_LIB3049-054-Q1-E1-D7
ccggggtcgacccacgcgtccgaacaggcgtcagtagagcagcgaaaggggtacagaagggatcgcatttcatggtactcaacctcaatatgatcacaaatgcatatccactaccttttttcgaagtctctgattgtcctaaaggcaccggtaatggaagagaagaagccggcggagaataaaccagcgtcggagaatgtaactgtggagaagaatccgaacgctgataataagatctcgactgaaggaaggagctagaagtatacgatgcgcacgatgaagagcgtggagacatacaagatgtacatcttgaaggtcctcaaacaggttcagccagacattggtatttccatcagcgccatgggcagcatgaacagcttcatcaatgatcttctctataacctcgccctagaagcgttgcgtttggcccgcttcgacatgaatcccaagatcacctcgagggagat

SEQ ID NO: 27461 - DNA, 424 bp, Glycine max
  unsure (1)..(424): unsure at all n locations
  Clone ID: TF_jC-gmX3040038G02sg9C1b1
ttctctgctgcgagaagacgacagaaggatgcggctgttagaacaccacaggggggggatcctttgaatactattcttcaagattcacacggctcgttcctagcacaccaatcgtaagtgcacaagagggaaggctcctctgaagcagcttgaacccaaagctggacgtctgtgtgtaccaactactggtggtgtgacaaagcccaccctatatagaactggtaccagcgctgttcaatggagcaagacttaccataagagtgccgagcttttgatccggcctcttcccttccagaggctagatcgtgaaattggtcangactgctagactgatctgcgtatccagagccgcaccgagcttgcattacaagaagctccttatgcataccttgatgggctctgtgtggacactaacctgtgtgcc

SEQ ID NO: 27462 - DNA, 464 bp, Glycine max
  Clone ID: TF_uC-gmflLIB3275P077d12b1
actggattataattgcctatccaagataatcgctctgtttgggagctagaaaggatagtcccgctcaaaacggacacctaccacgcgcacctttggggaggcgccgacgaatacagtggcgactaaaaccgatcgcaagtcacactcctgccaccgtaggactgaataagccttacacgctttaagcccggaacggtgggtctggaggatatcagacagtgccttaagagcactgaactattgatactagaactaccattccggatgctcttcacaaagatcaatcacgatttcaaaacatatcttcagttccagagcactgatgtttctgaccttgaggaaaccgcagatgattatctctatggactgttgaacgacaccaaactctgcgatatttacgccaagagagtcaccattatgcccaaggatatgaaacttgctcgcagaatcataagcgatagagc

SEQ ID NO: 27463 - DNA, 344 bp, Glycine max
  Clone ID: TF_LIB3040-041-Q1-E1-E10
ggatcccttgtattctattcttcgggattcacatggctcgtttcaagcacaacgctcttaagtccacaagaggatacgctctctacgaagcagcttgcaaccgaagctgcacgtatttctgcaacagctactggtggtgtgaagaccccccaccgttatcatcctgttaacgttgctcttcgtgtgattaagctgtacctgaagattaccgaccttttgatgcggaatctctccttccagtagctggttcttgaaattgctcatgacgtcacgactgatatgcgtttctagagtcacgccgtgcttgcattacaaggaactgctgtggctttccttgttaggct

SEQ ID NO: 27464 - DNA, 374 bp, Glycine max
  Clone ID: TF_LIB3040-010-Q1-E1-F10
gatcggatgtcagagcactcaacctcagtaccgctacgaaagcataaccaaaagcttttgacgaagtctcagattttcctaggggctccggcaaaggcagagaagaagccggcggagaagaagccagcggaggagaaggcaccggcggagaataagccgaatgcggacacgaagatctcgaacgaaagagggagcgacaagaataagaatcgcacgatgaagagcgtggagacctagatgatctacatcttcaaggtcctcaagcatgttcaccccgacattggtatttccagcagggccatgggcatcatgaatagcttcatcaacgacatcttcgagaagctcgcccaggatgcgtcgcgttgggctcgcta

SEQ ID NO: 27465 - DNA, 467 bp, Glycine max
  Clone ID: TF_jC-gmle01810041e09d1
aaaacaaaaaacttttaaaatccagcagcattacaatcccaggggtttcacaacagggaagttaaaagccaatagaatgaccttttacccaataacattaacatttgttcataaacaggaaagaagggctactacactaacttcttcataaacataaaggaacacttttttggggaaacaaagggggatttgattttcattttttggcaactttgttgatcaagggcttgggaatgggagggataacaccccccccaggaaggggccctttgatgaggggggaaagcttttcgtctcccctgatagcgagttgcaagggccttggggggatccttttcaccttaaaaattttggtaagattccccgccaggttcaggaccttagaagtgagattttccaaaatggaggccaagaacaccgcagcagtcgcccccacacgtccatttggttgcaccctttggttcaac

SEQ ID NO: 27466 - DNA, 284 bp, Glycine max
  Clone ID: TF_LIB3065-016-Q1-N1-E12
ttcatgtactgcgtttcggaatcagacacagatttatcgtactgagcaaagcgctcataagttcacaggatgaaaggctcctacgaagcatcttgcaaccaaggctgcacgtaagtctgcaccaactactggtgttgtgaataagccccatcgtattcgtcctggtaccgttgctcttcgtgagattaggaaataccataagagtaccgagcttttgatccgtaagctccccttccacaggctgattcgtgaaattgctcatgacttcaagactgatctgcatt

SEQ ID NO: 27467 - DNA, 425 bp, Glycine max
  Clone ID: TF_LIB3039-046-Q1-E1-C12
ccggctcgacccaagcgtaagaagacgacagaaggggagtacagaagacgcagttctcaccatttccctctcgattgtgagacttgatgttgttaactgaacttttctgagcaagaatgtctgggcgtggaaagggaggcaagggtttgggaaagggaggagcgacacgacaccgtaaggtgctgcgcgataacattcacggaatcaccaagcccgcgattcggcgtttggctcgtatgggtggcgtgaagcgtatcagtggtctcatctacgaagagacacgtggcgtgctcaagatgacagaagggggtgcacaagtgagtttgttgatcgagatatctagaaccagtgtgatgaacatgaacgtccctgttatcttcgttgctacaaatttggtagcatggcaatgacatgcgtacgatatg

SEQ ID NO: 27468 - DNA, 362 bp, Glycine max
  unsure (1)..(362): unsure at all n locations
  Clone ID: TF_LIB3049-054-Q1-E1-A10
ggaacctttgcaatccattcaatcaagaatcaacaagttccttttgggaagcaaaaaccgaaatacttcgagatggcccgtacaaagcaaactgctcgtaagtcaactggaagaaaagctccaggaagcagcttgcaaacaaggctgcacgtaagtctgcaccaacaactggtggtgtgaagaagcctcatcgttatcgccctggaactgttgctcttcgtgagattangaaataccagaagagcactgagctcctaatcaggaagcttcctttccagaagttggttcgtgaaattgcccaggatttcaagactgatctgcgtttccagagccatgctgtgcttgcattgcaagaagctgct

SEQ ID NO: 27469 - DNA, 308 bp, Glycine max
  Clone ID: TF_LIB3242-095-Q1-J1-E12
gaggagtacccagcttttgatccggaagctccccttacataggctggtgcgtgaaattgatcaggacttgaacactgatctgcgttaccagagccacgccgtgcttgcattgcaagaagctgctgacgcataccttgctgggctctttgaggacactaacctgtgtgccatgcacgccaagcgggtaaccattatgcccaaagatattcagctggcaagaaggattctgggagagcgagcttgagttggtggttggaaagatgactatgatcggtggctgcggttggagtacttgttattcagattcc

SEQ ID NO: 27470 - DNA, 446 bp, Glycine max
  Clone ID: TF_LIB3170-017-Q1-K1-H8
aggggctacagaaacattgcaagagatagaaaaagcaaaactgggttatcgcatttactccgaaacaaaccgtttcgctcgtgtgtcggatctgcgatggaagccccacccaaaggcgctgctataagaagaggcgacaggaataagtccggatccaaatacatcaatgctggcgtgcaattccacctctgccgcgtcgtcagttactagaagaaaggacgactctgttgccgacttgggaccggcgctaccatttatctacccgccgttctcgaatatgtcgtcgcagaaaagcagaagctggccgggaacgctgcacgtgacaaccagaagaataagattaaccctttgcacatgttgctggccgagaggaatgatcatgagctgtggaaactgcttctaggtgtgactattgatagcggcggaatgaagccgaacattaaccc

SEQ ID NO: 27471 - DNA, 425 bp, Glycine max
  Clone ID: TF_LIB3106-096-Q1-K1-A12
attaaacattcagcctgtgcgttttggaagcagagaccggattacttagagatggcccgtacaaagcaaactgctcggaagtcaactgcaggaacagctcccaagaagcagcttgcatcctaagctgcacgtaagtctgcaccagcaactgctggagtgaaaaagcctcatcgttatggatcttgaactagtgctactcgtgagactatgaaataccagaatagcactgagctcctaatcacgaagcttgctttacagaggttggttcgagaatattgccactatttcaagactgatctgcggtaacagagccatgctgagctcgcattgcaagaggctgatgaggcatgacccgtatgagctcttgaggacactaactcgtgtgccattcacgccaagcgcgtgactattatgcccaaggatat

SEQ ID NO: 27472 - DNA, 452 bp, Glycine max
  Clone ID: TF_jC-gmXLIB3563P075bc11a2
acggctgcgtagagacgacagaagggggatcctttgtattctattcttcaagattcaggtactgcgttccggaagcagacacagatggctcgtacgaagcaaaccgctcgtaagtccacaggcaggaaaggctcctaggaagcagcttgcaaccaaggctgcgcgtaagtctgcaccaactactggtggtgtgaagaagccccaccgttatcgtcctggtaccgttgctcttcgtgagattaggaaataccagaagagtaccgagcttttgatccggaagctccccttccagaggctggttcgtgaaattgctcaggacttcgagactgatctgcgtttccagagccacgccgtgcttgcattgcaagaagctgctgaggcataccttgttgggctctttgaggacactaacctgtgtgccatttacgccaagagagtaaacattattccca

SEQ ID NO: 27473 - DNA, 301 bp, Glycine max
  unsure (1)..(301): unsure at all n locations
  Clone ID: TF_6725068
ctccacaaatacgacatacaagttaaatatcctttaacataataatcaccctcttaacataaatcgcacacaagttaatatcctcaaacaaacccaccaagtaagcctccacagcttcctaaancgcaataacancgtgactctggaacctcaaatcgatcttgaagtcttacgcaatttcacgaacaagacgctagaaaggaagcttacggatcagaagctctatactctttgngtattttcgaatctcacgaagaacaacagttccagacgaatagcaatagaacttcttaactgcacc

SEQ ID NO: 27474 - DNA, 665 bp, Glycine max
  Clone ID: TF_GmC45_9
ttcttcgcgtccgcccacgcgtccgcccacgcgtccgcttttaacaatccacacccaaattctagggttccgaaatggacgctggcggaaagatcaagaagggcgccggaggtagaaagggcggcggcccaaagaagaagccggtttcaaggtccgtcaaagccggtctccaattccccgtcggaagaattggccgttatttgaagaaaggaaggtacgctcagcgtgtcggtacggctgcgcccgtatacttggctgcagttctcgaatacctagctgccgaggtgcttgagttggctgggaatgcccgtgacaacaagaagacacaggagtattccaagacacgtgcttttggcagtgaggaacgatgaggagttggggaaattgcttgctggtgtgacaattgcacatggtggtgtgcttccaaacattaaccctgttttgttgcctaagaagacggagagggctgccaaggagcctaagtctccatccaagggtactaaatctcctaagaaggcctagattatccctttttttttttttttttttaaatctagtgttgtatatcggtgcttagatgcttttggtgtaacaggaaatttgatgtgtttcttaaacaaaaaaaaaaaaaaaaaaaaaaaaaaaaaagcggccgctttagagga

SEQ ID NO: 27475 - DNA, 543 bp, Glycine max
  Clone ID: TF_uC-gmflminsoy091f03b1
ggaagcagagaccgaaatactttgagatggcccgtacaaagcaaactgctcgtaagtcaactggaggaaaagctcccaggaagcagcttgcaaccaaggctgcacgtaagtctgctccaacaactggtggtgtgaagaagcctcatcgttatcgccctggaactgttgctcttcgtgagattaggaaataccagaagagcactgagctcctaatcaggaagctttctttccagaggttggttcgtgaaattgcccaggatttcaagactgatctgcgtttccagagccatgctgtgcttgcattgcaagaggctgctgaggcataccttgttgggctctatgaggacactaacttgtgtgccattcacgccaagcgtgtgactattatgcccaaggatattcagctggcaagaaggattcgtggtgagcgtgcttgagttggtgcgttctgtgctgtgaagatggaatgctggtggctgccgattgtgttttgttactaaagtttcctttttgctaaagcctataggttatttaggaaaaata

SEQ ID NO: 27476 - DNA, 808 bp, Glycine max
  Clone ID: TF_GmC1224_1
acgagccggaaacaaaagtccgcccacgcgtccgctcaattccgcgctttaacaacagaaagaaatccacacatttccctttcaatggcacgaaccaagcaaacagcgcgcaagtccaccggcggcaaggctcctcggaagcagctcgccacaaaagccgctagaaagtccgctccggcaaccggcggagtaaaaaagccgcaccgttttaggcccggcacggtggcgctgagggagatccgaaagtaccagaagagcacggaacttctgatccggaagctcccgttccagcggctggtgcgcgagatcgcacaggatttcaaaaccgatttgcggtttcagagtagcgctgtttccgcgcttcaggaagcggcggaggcttatttggttgggttgtttgaggatactaatctttgtgccattcacgcaaagcgcgtcaccatcatgcctaaggatattcaacttgcaaggaggatcaggggcgagagggcttgaggttttaaaatgtttcgtcaccgctaggatacgttaaaataggatctggttcatgtagtttggggttttggtgtatttagtctatcgtgagggttgggattgttagtatgaagatgtggagttaaagatatctggcttattagtagtttagtgattactttgaattttctgattgggttaatgaattgaaaggttgattgcaatgaattttggcttcatctagttcttcttccattttggtttgcaaaatcatgcattccgttttgtattatgaggttgatggcatttgctttagcaattttaagtggtagtt

SEQ ID NO: 27477 - DNA, 1128 bp, Glycine max
  Clone ID: TF_GmC127_1
cccacgcgtccgcccacgcgtccgacggctgcgagaagacgacagaagggggcagtttcaaattttcttttccttcactttcccgagaaaaaaataacacttttcactttcttcactacgttctcacttcgatatggctcgtacgaagcaaaccgctcgcaagtccaccggtggcaaggcgccacgtaagcagctcgccaccaaggccgctcggaagtccgctccggcgaccggaggagtgaagaagccccaccgcttcaggccgggaaccgtggcgctgagggaaatcagaaagtaccagaagagcaccgagcttctcatcaggaagcttccatttcagaggctcgtgagagaaatcgcgcaggatttcaagaccgatttgcgtttccagagcagcgctgtttccgcgcttcaggaggctgctgaggcttacctcgttgggttgttcgaggacactaacctctgcgcgattcatgctaagagggttaccattatgcccaaggatatccagcttgcacgcaggatcagaggcgagagggcttagaaacaaggttgagaggtttgggtgttaggtgcttagggttagggttctggtcttgaaggatgtgtttgggagtttggttgtaggaatcctctccatctgtgtgtttatgtggaatgtgaaatgtgaatctctttgcttttgtaattatattgtgttactatgaggagttaatgaaaatgctatggttattgaagaaaaaaaaaaaaaaaaaaaaaaaaaaagcggccgatttaaaggaggaaaaatcaactattctaagagctacatagcagtgtgcgcttgttactaagatgtgaatggtcttgaaggacttgatcccggagaaattaaaactattctaagagtgacaatcaacatagcagtttgcgtgctttttatgtgtaaaattgcacttttttttcctttgcattctctaaaagagaagcattcaatagtttggagtttcttagcaggatgtttctgtttgtcccggtcgtcggtgacattgtaaatctcgcagtttgtcatgagattatgggacttgggtcctttttgaaagaaacgaatgattcaatgaaaccgcttgtggattttattgccctggc

SEQ ID NO: 27478 - DNA, 882 bp, Glycine max
  unsure (1)..(882): unsure at all n locations
  Clone ID: TF_GmC127_2
gtgcggcgctcagggccgggccgggacaccttcgaattttcttttccttcactttcccgagaaaaaaaaaacactctttcactttcttgactacggtctcacttcgacatggctcgtactaagcaaactgctcgcaagtccaccggcggcaaggcgccacgtaagcagttggcgaccaaggccgcccggaagtccgctcccgcgaccggaggagtgaagaagccccaccgcttcaggccgggaaccgtggcgctgagggaaatcagaaagtatcagaagagcaccgagcttctcatcaggaagcttccgtttcagagactcgtgagggaaatcgcgcaggacttcaagaccgatttgcgttttcagagtagcgccgtttctgcgcttcaggaagctgctgaggcctacctcgttgggttgttcgaggacactaacctttgcgcgattcatgcaaagagggttaccattatgcctaaggatattcagcttgctcgcaggatcagaggcgagagggcttaggttggttagggttctgattttgaaggaggcgagacggcttagaaaaagaatcatctatctatgtgcttatgtgggcatgtgaaacgtgaatctgtttgcttttgtaattatctcgtgtttcttagacaagttaattaaaatgctatgttggttctcggagaaaaaaaaaaaaaaaaaaaaaaaagcggccagagttgttgttaagttttaaagaaattggtttcggagaaattttgtttattttaaaaattaagggattgtgagacttttatgtttaactataatgtatttgtgattagagaaataaagattgttgtaaagcctataaatataacagcgttgattnttttntttatgnaaaaa

SEQ ID NO: 27479 - DNA, 870 bp, Glycine max
  Clone ID: TF_GmC1607_1
ccacgcgtccgcccacgcgtccgtacggctgcgagaagacgacagaaggggaggaacaagaagcgaaaatataacaaataatttgtactttcatcaaaacaaaatcccgttgtatttttctcagatggctcgaacgaagcaaacggcccgcaagtccaccggcggcaaggcgccgcggaagcagctggcgactaaggcggctcgcaagtcggctccggcgaccggcggcgtgaagaagccgcacagattcaggccgggaaccgtggcgctgcgcgagatccggaagtatcagaagagcacggagctactcatccggaagcttccgttccagcgcttggtccgcgagatcgcgcaggacttcaagaccgacctccggttccagagctccgccgtctccgcgctccaggaggccgccgaggcttacttggtcggtctcttcgaagacacgaacctctgcgccattcatgccaagcgtgttactatcatgcccaaggacattcagctcgccaggcgcattaggggcgaacgcgcttaaacctaatccctgtccttttgtatagataatttcaagcgttcttagttagattgaattgcggttttctttgagaattctgtaatgttaacgctttaccaatgaaattatcgcttttgttcttcaattgaatttggttctcttcaattttaaagcttgtttatacgatgtagagttctgttgaatgcttgtcaaagctatttgagtgaattcaagatttaacgtctgccctctctgtatgaaagaataagggccaccatgcgggtttaaacatacctcttttcatgaagattgtatatttgaaacgtgaaatttgttgaactatatggtttgatatt

SEQ ID NO: 27480 - DNA, 665 bp, Glycine max
  unsure (1)..(665): unsure at all n locations
  Clone ID: TF_GmC1638_1
ccaaaaagctctgttctgaaaatagagaaaacacaaaaagttctgttctttttcccacccaattcagttttctcaaatggctcgtacgaagcaaacggctcgcaagtccaccggcggcaaggcgccacgtaagcagctggccaccaaggcggctcgtaagtctgctccggctaccggcggcgtgaagaagccgcacagattccgtccgggaaccgtagcgctccgcgagatccggaagtaccagaagagcacggaacttctgatccggaagctcccgttccagcgattggtccgtgagatcgcgcaggacttcaagaccgaccttcgatttcagagctccgccgtctccgccctccaggaagccgccgaggcctacttggttggtctcttcgaagacaccaatctctgcgctattcacgccaagcgtgtcactatcatgcccaaggatattcaactcgctaggcgtattaggggcgagcgcgcttaaatctaattattgattctctgtatagacgatttcaatttcaagcgttcttagttagaacttttgatttggttttcttgttgttgaggattctgtaatgctgctgtgatgttaacgctttattaatgaaattatcactttttgtcttcagaaaaaaaaaaatttatnaaannnccccnna

SEQ ID NO: 27481 - DNA, 1459 bp, Glycine max
  unsure (1)..(1459): unsure at all n locations
  Clone ID: TF_GmC1655_1
cgaagctagcttatgctcatgatgttctgttcttcgatcccagcttacaccgtgctgtactcacggccgcgcaccatttgagttcatatcattcgtcttcttcttcttacaagctcagctcatagcattcttcttcttccaacgagaatcagtctttgtgttccaaatggctcgtacgaagcaaacagcaagaaagtccaccggaggaaaagctccaaggaagcagctgcgccaccaaggcagcacgcaagtccgcgatataacactgtcactcttacaatctcagctcatagcattcttcttcttccaacgagaatcagtctttgtgttccaaatggctcgtacgaagcaaacagcaagaaagtccaccggaggaaaagctccaaggaagcagctcgccaccaaggcagcacgtaagtccgctccggcgacgggcggcgtgaagaagccccaccgtttcaggccggggacagtggctctgagggagattcggaagtaccagaagagcacggagcttctcataaggaagcttcctttccagaggctcgtaagggaaatcgctcaggacttcaagaccgatctacgcttccagagcagtgctgtctccgctcttcaggaagccgctgaggcctacctcgttgggctctttgaggataccaacctctgcgctattcatgctaagagggttaccattatgcccaaggacattcagctagctcgtaggattaggggcgagagagcttagggtttatgatttacaaagccgtagtgttttctaagggttattattttgcaatcgattccttcagcttagtattagggtgaaagtccttgttttattgtgactgtattggaaactcgtttctgtaacgtgagaaatattaatgttgagtcctctcattttaagcttaaacctgcttggatctgtagaattacatcgtgtttggtcgttattctgatttcataacataattaatagatgtttgggatttttctggaactggattgtaagattgtaaaattgttgttgatgcactatcgactaggacaaagggtgaaagtccttgttttattgtgactgtattggaaactcgtttctgtaatgtgagaaatattaatgttgagccctctcattttaagcttaaagctgcttggatctgtagaattacatcgtgtttggtcgttattctaatttcataacataattaatagatgtttgggatttttctggaactggattgtaagattgtaaaattgttgttgatgcactatcgactaggacaaagggagtagatgaatttcgttgtgttgtggaaaattgcaaatctctcctacaataaccattttcaaatttcaggcgggtttagtttggaggcaagtcaaatgagttgtgattttcttgcagggatatttgatntatgctgagtaatcatgtttcacatatttccattgattggta

SEQ ID NO: 27482 - DNA, 1196 bp, Glycine max
  Clone ID: TF_GmC1655_2
cgggtgcggccgcccgaggggggggggggatactttccccctcaccatttgagttcatatcattcgtcttcttcttccaacgtgaagcaatctctgtgttcgaaatggctcgtacgaagcaaaccgcaaggaagtccaccggaggaaaagctccgaggaagcaactcgccacgaaagcagcacgcaagtccgctccggcgaccggcggcgtgaagaagccacaccgtttcaggccgggtacggtggcgctgagggagatccgaaaataccagaagagcaccgagcttctcataaggaagcttcctttccagagactcgtaagggaaatcgctcaggacttcaagaccgatctccgcttccagagcagcgctgtctccgctctgcaggaagccgcggaggcctaccttgttgggctgttcgaggacaccaacctctgcgccattcacgccaagagagttaccattatgcccaaggacattcagcttgctcgtaggattaggggcgagagggcttagggtttgttcgtgtgatgtacaaagctgtagtactttcttagtgttattgttttgtaatcgattatgaaacttctattttcactgtgactggattggaaaatcatttgtagtatggaaagtgtcagtggtgaatcttgagaattacatcgtctttggtctttaatctggtaatataatatcccttctagtaagattaattgggattttgaaagcaattaacagataataatttttttttctttcctaaaatatagtgtgaggctttgattctcaaagcaggtaaaatttgatgattatgctttggaaggatttaatcattgattattaattgagagaatatgaaagttaataacgtacctatatggactgggcttatttttgtgggccgatttatgcaattacttgtagcggagctcattctattggcgggaaagaggttttagcagagaggatagtatattttcccttttgtttttgctattgtgatgcaaaaactaagatgtgaacttaaagctcgagaaaatggaaaaaaatacttgggtttcacataaacaaccaattggagaggttcagccccttcgaaggtaaatttgttcttcgtgtgttcgatttctgtttgttgacataggtcttgagatttgttatgctataaactttcatttggaggttgcattggaagag

SEQ ID NO: 27483 - DNA, 1133 bp, Glycine max
  Clone ID: TF_GmC1680_1
cacgcgtccgcttccgaattcgaagttaatttgcaagatggctaaggaaaaggctcagataacattgtggtggttggtcatgtggaccctgaggaggcaaccaccattaacgagctgaagaagcctgttgtggagaaagaagctccagggcatgccatatgagggcatgcacgtacggcctcggaggggaaccagaaaattatgttaacaaaataatctggaaccctaatgtatcagtgtcatcatcagtgtgtagtttaagctagctttgctatggttacgttctttgagatgagagtcttgatgaacagtaccattctgatgtattgctttccttgaaagttaatgcatgcttcttatcttctgtctaaaaaaaaaaaaaaagggcggccgcacgcgtcctacggctgcgagaagacgacagaaggggattccagcaaagcgcaaagcattctccactacgattcgctcttccagaagcttccagaaaactccagatggcgcgtacaaagcaaacagcccgtaagtcgaccggcggcaaggctccccggaagcagctggcgactaaggccgcccgcaagtctgctccggcgaccggcggagtgaagaagccacacaggttcaggccaggaaccgtggccctgagggagatcaggaagtaccagaagagcacggagcttctgatccgaaagcttccgtttcagcgtttggttcgtgaaatcgctcaggacttcaaaacggatctgaggttccagagcagcgccgtttcggcgctccaggaagccgctgaggcttacttggttggtctctttgaagacactaacctttgtgctattcacgctaagagggttaccattatgcccaaggatattcaactcgccagaagaatcaggggcgagagggcttagttaaataattcactttggtttggggtttaagtgtctttgttttaacgccttgtgtgtgaatctagatcgttgagcagttgctgattagatttcttgtaatgatggtcttatatatgtaatcaagtatttgtctcttaggtaaaaaaaaaaaaacctgttaactgctatggttgtttgcctgttagttgtatcacttgatcaattaaatcaggtgaagtggttcat

SEQ ID NO: 27484 - DNA, 790 bp, Glycine max
  Clone ID: TF_GmC1680_2
cctgcccattattcctttgtctacccacgcgtcagacggttgcaaaaagacaacaaagggggccgggaaaaagcaatctcaacttccaagttaggtcactcttccagatggcgcgtacaaagcaaactgctcgcaagtccaccggcggcaaggctccccggaagcagctggcgacgaaggccgctcggaagtctgctccggcgaccggcggagtgaagaagccgcacaggttcaggcctggaacagtggccctgagggagatcagaaagtaccagaagagcacggagcttctgatccgaaagcttccgtttcagcgtttggttcgtgaaatcgctcaggatttcaaaacggatctgaggtttcagagcagtgctgtttcggcgctccaggaagctgctgaggcttacttggtgggactctttgaagacaccaatctctgtgccattcacgctaagagggttactattatgcctaaggatattcaactcgccagaagaattagaggggaaagggcttaattttgtgatcccttttggttttagggtttacatgtttttatttagccctttctggtttccgtctctgaatctttcaaggtttagatttattgtaatgatgccattctgattgaagtattgaaattatgcgtattctcttcaagtgaatgtaaacgatttgtatggtctttgtggttgacttgttgactgttggctcagttgattatgcaaattgggtggtgttgtccaaaaaaaaaaaaaaaaaaaagaaagaaagccgccgctctagagga

SEQ ID NO: 27485 - DNA, 1163 bp, Glycine max
  Clone ID: TF_GmC578_1
acaagaacagaacaggtccgagcacagcagcgtcaatacggctgcgagaagacgacagaaagggggacagcaaaacaattttcaaactcaattaccattccataacctaaatctcctctttgtttccgagtcagagagcaatggcacgtaccaagcaaaccgctcgcaagtccaccggggggatagcaaaatcgtttctccaatttaatcaccattgtacaacccaattcccttcgtcgttttcgattaagagagcaatggcacgtaccaagcaaaccgctcgcaagtccaccggaggaaaggctccgaggaagcaattggcaaccaaagccgctcgcaagtcagccccggcgaccggcggagtgaagaagccccaccgcttcaggccaggaacggtggctctgagggagattcgaaagtaccagaagagcaccgaacttctgatccgaaaactcccattccagaggctcgtcagagaaatcgctcaggatttcaaaaccgatctccgctttcagagcagcgccgtttcggctcttcaggaagccgcggaggcttatctcgttggactctttgaggacactaacctctgcgctattcacgctaagcgagttaccattatgcccaaggacattcaactcgctcgcagaatcagaggcgagagagcttaagtttagggtttcgtgtcatttgacattaaaattaggttactgcttattgtaattcgtgttttcttcaaatgcctctttattgtaagattcatcttatttcatcaggtatattcccatatggatctgcacaactgagtttatgttgaaaaacgagataattctctaattttatatatccttcggtgatgatagaaaaacaacacctcctctgcactctgcatacagtgcagaattttctgtgcactgctatcacttgactctctggaacacttgggtgtaacttcattggaagtttggcgcaatccctgagtataagttgagagaagaactcaattggttccggatttctgtcatattcgatttaatctgtctagtccatattcatgtacgttcatggtttgtatatgcaaaaattacccaggtgcacaagtaccaataatgagatatatagcccaggtagatgaccttttgtggatagtaaaaaaaaaaagaaaa

SEQ ID NO: 27486 - DNA, 724 bp, Glycine max
  Clone ID: TF_GmC578_2
cccacgcgtccgcccacgcgtccgcccacgcgtccgtacggctgcgagaagacgacagaagggggacagcaaaacaattttcaaactcaattaccattccataacctaaatctcctctttgtttccgagtcagagagcaatggcacgtaccaagcaaaccgctcgcaagtccaccggcggaaaggcgccgaggaagcaattggcgactaaagccgctcgcaagtcagctccggccaccggcggagtgaagaagccccaccgcttcaggcccggaacggtggctctgagggagatcagaaagtaccagaagagcactgaacttctgatccgaaaactcccattccagaggctcgtcagagaaatcgctcaggatttcaaaacagatcttcgtttccagagcagcgctgtttctgcgcttcaggaagccgcagaggcttatctcgttggactcttcgaggacaccaacctctgcgctattcacgccaagagagtcaccattatgcccaaggatattcaacttgctcgcagaatcagaggcgagagagcttaaaattaggtttcattgtgtgatctagaattaaaattaggttactgcttattgtaattcgtatttttcaatcgcctttttgttgtaatattcatcttatttcgaagtatatgctcatatggatctgaacattttaacttatgtcagaaaaaaagataattctctaattcttatggg

SEQ ID NO: 27487 - DNA, 811 bp, Glycine max
  unsure (1)..(811): unsure at all n locations
  Clone ID: TF_GmC913_1
cgcgtacctcacgcgtccgcccacgcgtccgtacggttgcagaagactacagaaggggacaaccactcaaatctcaatacctcaattcttcgctttaacgaaaaaggacacattttcccttacaatggcacgaaccaaacaaactgcgcgcaagtccaccggaggcaaggcacctcggaagcagctcgccacaaaagccgccagaaagtcagctccggcgaccggcggagtgaagaagccgcatcggttccgccctggcacggtggcgctgagggagatccggaagtaccagaagagcacggagctcctgatccggaagctccccttccagcgcctggtgcgcgagatcgcgcaggatttcaagaccgatttacggtttcagagtagcgctgtttccgcgcttcaggaagcggcggaggcttacttggtagggttgtttgaggacactaatctctgtgccattcacgccaagcgcgtcaccatcatgccgaaggatattcagcttgcgcggagaattagaggcgagagggcttgaggattttttaatgatttgtcactgctaggatacgttaaaactggatctggtttatgtagtttgtggttttggtgtatttattcgaccgtaagggttgtggttgttagtatgaagatgtagagttaacattatctggctaattagttggttaatgtttactttgaatttgctgtttgtgtgaatgaattaaaagggttgattgcaatggattttggttatttttaaccctttttacattttggcttgcataatcatgaattcccatttgagttttna

SEQ ID NO: 27488 - DNA, 999 bp, Glycine max
  unsure (1)..(999): unsure at all n locations
  Clone ID: TF_GmC1626_1
acccggtcccggnactttccccggaaccatcttcgtttttcagcatttctactctccaaacactcgaattcgcattctcttcactctttccccaatccatggccaagggagagaagaaaccggcggagaagaagcccgcggagaaggctccggcggagaaaacaaaagccgagaagaagatcccaaaggaacccgcctcgggcgagaagaagaagaagaagagaaacaagaagagcgtggagacgtacaagatctacatattcaaggtgctgaagcaagtgcaccctgacatcgggatctccagcaaagccatggggatcatgaacagcttcatcaacgacatcttcgagaagctcgctcaggaatcttccaggctcgcgcgctacaacaagaagcctaccatcacctctcgcgaaatccagactgcggttcgtcttgttctccctggcgagctcgccaagcacgctgtctccgaaggcaccaaggctgtaacaaagttcactagctcttgaacgggtttctgagaattttagggtttacgagatgtatattttgggagaattttaattttatatttatcctcttttattaccgtttttcttctttcaacaggtctatgttgatcctcttattcttttctcctcttaaccatgcgccggattctcaacgtcttaaatggtttaaatgagtgtgcaatttgaaattttgttgagttgtggcagttaacgttctgctgcatcatggtgatgactacaattcaattcatcgaaaaatgttgttgtcatagcttattgagtagagtggatggtgttttgtagattttgtggtaacctatattggaacctgattttgttttgttcttttaaatggattgtatctatgtatacatgcttatgttcttgtgcaattgtattatagaattgcaggggttgcattgtattattgcaggttggttatgtgatagagctggtagcacgatggagtgctgtatgttgtatg

SEQ ID NO: 27489 - DNA, 627 bp, Glycine max
  unsure (1)..(627): unsure at all n locations
  Clone ID: TF_GmC1626_2
taccggtccgnattcccgggtcgacccacgaacccgcttcgtttttcagcatttctactctccaaacactcgaattcgcattctcttcactctttccccaatccatggccaagggagagaagaaaccggcggagaagaagcccgcggagaaggctccggcggagaaaacaaaagccgagaagaagatcccaaaggaacccgcctcgggcgagaagaagaagaagaagagaaacaagaagagcgtggagacgtacaagatctacatattcaaggtgctgaagcaagtgcaccctgacatcgggatctccagcaaagccatggggatcatgaacagcttcatcaacgacatcttcgagaagctcgctcaggaatcttccaggctcgcgcgctacaacaagaagcctaccatcacctctcgcgagatccagaccgccgttcgtcttgttctccccggcgagctcgccaagcacgctgtctccgaaggcaccaaggctgtcacaaagttcactagctcatgagtgggtttctgagaatttagggtttattagatgtatattttcaatcttcgcggtgtaacggaacggcatattttgggagcaattgaattttatatttattttctttaaa

SEQ ID NO: 27490 - DNA, 400 bp, Glycine max
  Clone ID: TF_LIB3028-002-Q1-B1-F11
cgcaattcaaaactctcactccgttataagcaccaaatcctgatggcaccagcggcagagaagaagccagcggagaagaagcccgcagaggagaagaagtccacggtgggagacaaggctccggcggagaacaagccataggccggaaagaagcttccgaaggagggaggcgccggcggctaaaggaagaagaagaagagaaacatgaagagcgtggagacatacaagatctacatcttcaaggttctgaagcaggttcaccctgacattggtatctcaagcaatgccatgggaatcatgaacagcttcatcaacgatatcttctataagcttgcccaggaatcttctatacttgcccgctacaacaagaatcgcaacatcacttcaagggaaattcaga

SEQ ID NO: 27491 - DNA, 370 bp, Glycine max
  Clone ID: TF_LIB3054-001-Q1-B1-C7
cagaagagcactgagctcctaatcaggaagcttcctttccataggttggttcgtgaaattgcccagtatttcaagactgatctgcgtttccagagccatgctgtgcttgcattgcaagaggctgctgaggcataccgtgttgggctctttgaggacactaacttgtgtgccaatcacgccaagcgtgtgactattatgcccaaggatattcagctggcaagaaagattcgtggtgagcgtgcttgagttggtgcgttctgtgtttgtgaagatggattgttggtggctgcggatggtgttttgttactaagttatctttatgttgaagcctatatgttattacggaaaaatacgtgtttacttggtagtc

SEQ ID NO: 27492 - DNA, 648 bp, Glycine max
  Clone ID: TF_LIB5068-035-A1-XP1-G6
ttcgggatcccatttcatagacactcaccctcattaccttcgcttaaagcatatgcattaccttttttcgattgctctgattttcctaatggctccggcaaaggttgagaatacgccggcggtagaacaatcctgtggcggagaaggcaccggcggcccacgaagcgccaaggcgcgatacaaaagatctctgaatgaccgcagggatcgagaaaaacaatatccgcactatcaataccgtggacacctacgagatctacatcttcccggttctcccgaaagttcaccccgacattggtatttccatgaacgtcatgttcatcatgaacagcttcatcaacgacgtcttcaacaagctcgcccagcatgcgtcacgtctgcctctctacaactggaagcccaccatcacctccagggacattcagacctccgtgcgtctcgtgctccctgatgaattgtgcaaactcgccgcttctgaatgtaccaaggagtctaccaagattaccagctcttgaattaaggtttgttacgcgtatgtgttgcacgatctagggccttctgtggatttcttttcttacaaattaggttgtagatgtagtgctctgaacagatgttaatgcactgtttcgtttgaaaaactccaacgac

SEQ ID NO: 27493 - DNA, 372 bp, Glycine max
  Clone ID: TF_LIB3170-020-Q1-K1-H3
gaagtttattggcgactatattcattttggcatgggggatgaatctggtcggagagagaaaaaccataaccatttctggaataggaaaggggggcaggggtctaggaaagggaggagcgaaacgacacccgaagggtctgagggataacattcaacgcataacgaagaccgcaattcgccgtctcgcgagacgtgggaccgtgaagcgtatcaatggtctcatgtacgaagaaacccgaagcgttctgaagatcttacttcagaacgtaatacgcgacgctggaacctacactgagcacgctcgacgcaagaccgaaaatgccatggacgatggttactccctccagacgcaagacaagaccctctaccgtt

SEQ ID NO: 27494 - DNA, 409 bp, Glycine max
  unsure (1)..(409): unsure at all n locations
  Clone ID: TF_jC-gmX3040037G03sg8F24b1
ttcccttttcttcccacgcgtccgactgcttcagaacanacagaaggggatcccgtgggattttaaacaaaagggggggaacaaaaaaaccaacaaagcggccgcccaaagaagaagccggtttcaaggtccgtcaaagccggtctccaattccccgtcggaagaattggccgttttttgaagaaaggaaggttctctcagcgtgtcggtaccggtgctcccgtatacttgggtgcagttctcgaatccctatctgccaaggtcctttagctggctgggaatgcctcacttgacaacaagaagaacaggatttttccaagacccctgctttttgcccttaggaactaataaaagttggggaaattgttagctggagtgccaattgcccaatggtggcttgcttcaaaca

SEQ ID NO: 27495 - DNA, 403 bp, Glycine max
  Clone ID: TF_6667484
tcgtacgaagcaaaccgctcgtaagtgcacaggaggaaaggctcctaggaagcagcttgcaaccaaggctgcacgtaagtctgcgccaactactggtggtgtgaagaagccccaccgttatcggcctgagaccgaagctcttcgtgaaaggaggaggtaccagaggactaccgagcttttgatccggaagctccccttccagaggctggttcgggaaattgctcacgacttcaagactgatctacgatgccagagccgcgccgtgcttgcattgcaagaagctgctgaggcataccttgtggggctctgtgacgacactaacctgtgtgccgtgaacgccaagcgggtgaccattatgcccaaggatagcgagctggcaagagagattccgggtgagcgtgct

SEQ ID NO: 27496 - DNA, 612 bp, Glycine max
  Clone ID: TF_GmC128_3
gatatcaccctttttgtttctctctttgtcattgaaaccttttcacccccttcatatatccttaattcagcaatggcgagccacgacaaagcccaaggatctagcacaaccaaaaagggcatctcgcgaagcaacaaagctggtctccaattccctgttggtcgtgttgctcgataccttaagactggcaagtatgctgagcgtatcagttctgctgctcccgtgtatctcgcctctgttcttgaatatcttgctgctgaggttttagagttggccggaaatgctgtaatggacaacaagaagactcgaattatgcctcgccatatccaattggcagttaggaatgatgaagagttaaacaagcttctcggagatgtgaccatcgctaatggtggtgtgatgcctaacattcacagcatgttgcttcctaagaaggttgggacctcgacctcaacctttatgggtgctagtgtcaatgacaatgatgcttaaatgttttttttttttgccttaagtttgacccatgttccccttttgtaatatgggttctttatgattgaataattcataatgtcaagattggcataatatgataacaaattgggttgatgc

SEQ ID NO: 27497 - DNA, 324 bp, Glycine max
  Clone ID: TF_LIB3242-505-P1-J1-D11
ttggaattggctggaaacgctgccagagtctacaagaagactcgaattgtgccgcgggacattcaattggcggtggggaacgactaggagttgagcatgctactcggtgacgtcaccatcgctaacggtggcgtcatgcctaacattcacaatcttctccttcccaagaaggctggtggatcatccaaggctgctgctgcagacgatgactcttaaataggggttttttttccgagaaaagtgatcgaatttattctctttggattctctctgaatttgtagtttttcagggttcgataattgtgtactggacatgtagatagg

SEQ ID NO: 27498 - DNA, 1615 bp, Glycine max
  unsure (1)..(1615): unsure at all n locations
  Clone ID: TF_GmC411_7
gccacctgaatgctttgtaaaggatgtgacaaaatgtgccaaagcctccacactacagctagctgtgttctatggtgcactttacactctagcagggggaactggaggaaccaagcccaacatctccaccaattgaagaaggatagcttgtgtaacttctctttagggtgaaaatcatcaaattgatcagctcctatggtggcgttcctatcatcacttctcaaatctcgaaccctctcgttcgtgccgatcactaggtcacacttcgaaaatggcgggtagaggcaaaaccctcggtgccagcgacagcgcggtcgtatagcagcgccgtttacctcgccgctgtctcgaatatctcgcagccgaggttttggagttggctggaaacgctgcgagagacaataagaagactcgaattgtgccgcgccacattcaattggcggtgaggaacgccgaagaattgagcaagcttcttggtgacgtcgccatcgctaacggtggcgttatgcccaacattcacaatcttctccttcccaagaaggccggtggctcatccaagggcgctgctgctgacgatcactcttaaatagggattcgcttttctagattcgtctagttatccagtatagattatcttttggcctctctggttgggagtttcttttttagttttgataattatgctctgtagaggtagttaggttttcattactgatgtgagcagaggaatgcatcactttcagcaccaatagatgtgatgacactgggacgaggaacacgtttgtggtgnctgtctcncttgcagtcctccaggctggtggaagtacactacttccctcaaagccattcccatcgttactanagtcatcaattgcagaaaaaagtttatccgatgaaccatccttaagggattcaatttggattgggtgccctattattgacttcccatctaacttactagtgatagaaacaatggggacaggtgctttccgatagcttgcttgaaccttcaagtccacatctaccagcattgacctcatccttccatcaaaatgataactatcactatataatcgagcaaaccctttattttcccaatatcctttaaaagcagtctgatcctcccaagcccattcatcccaatcaacaccatgaccaattttattttgaccttttgctagtgctttggaagttggagaatattcatcttcaaacccaaacatttgatcggtgtcagcaaaaacatcactaataccattcccataataatgcatactaggcaccaacctcttgtgatttaaacggcttcttaatccttcaacatctgcttcatataaaacaacacctttcccatcagcagcaccaacagacctttttacaagattacgattattcctttttccttttaacttccatttggatacagcttcattgcatgatatatgcggacgaggatagaggtgaggcatgtctctagaaattgccaactcatcaagttcctcactgctagtgctttcttgttcttcagtatcgcaaccagtttctgaaagagtagtcatctcatcatccttgtcaagttccatttcaaaggaatcagaatcagcattagcagaac

SEQ ID NO: 27499 - DNA, 586 bp, Glycine max
  unsure (1)..(586): unsure at all n locations
  Clone ID: TF_LIB4164-023-Q1-K1-A7
gcgtccganggatctgcgtttcggagcagaccagatggctcgacgaagcaaccgctcgaagtcccaggaggaaaggctcctaggaagcagcttgcaccaaggctgcacgtaagtctgcaccaactactggtggtgtgaagaagccccaccgttatcgtcctggtaccgttgctcttcgtgagattaggaaataccagaagagtaccgagcttttgatccggaagctccccttccagaggctggttcgtgaaattgctcaggacttcaagactgatctgcgtttccagagccacgccgtgcttgcattgcaagaagctgctgaggcataccttgttgggctctttgaggacactaacctgtgtgccattcacgccaagcgtgtaaccattatgcccaaggatattcagctggcaagaaggattcgtggtgagcgtgcttgagttggtggttggaaagatgaagatgattggtggctgcggttggtgtttttgtttttcagattcctttttttattcaatagatggggttgttagggagggtaggttttttgcttgtatgtccatttattgggatataggcaaatact

SEQ ID NO: 27500 - DNA, 369 bp, Glycine max
  Clone ID: TF_LIB3040-029-Q1-E1-D5
gacatctttcactcgttctctgaaattttaattgacttttctcccctcataaaaaaaacctaccaatggctcccgcaaaggcagagaagaagcccgcggagaagaagccggcagagaaggccccagcggagaagaagccgaaggcggagaagaaaagatatcgagggagggaggaagcgagaagaagaagaagagaataaagaacagcgttgagacgtaggatatctacatcatcagggtgtagaagcatgtggaccacgacatggggatctcgagcaaggctatgggggatatgaggagtttcataaacgacatcttcgagaagctcgcccaggaatcatcgcgtcccgctaggtacaacaagaagcc

SEQ ID NO: 27501 - DNA, 407 bp, Glycine max
  Clone ID: TF_jC-gmfl02220091h12a1
ggctcgaggattcagcaagtgcgttttggaagcattagaccgaaatacttcgagatggcccgtacaaagcaaactgttcgtaagtcaactggaggaaaagctcccaagaagcatcttgcaaccaaggctgcacgtcagactgtaccaacaactggtggtgtgaagaagcctaattcctatcgccctggaactgttgctcttcgtgagattaggaaataccagaagagcactgcgcttctttttaagaagcttactttccatgaggttggaaacgtgaaattgcccaggattaaaggactgaactgcgtcaacagagccatgctgtgcttgcattgcaagaggctgttgaggcttacctcgtcgggctttttgaggacactaacttgggtgccattaacgacaagcgt

SEQ ID NO: 27502 - DNA, 325 bp, Glycine max
  Clone ID: TF_10842835
gtcagggaaaggcgcaaagggtttgataactgctaaggacaaatataagaaaaaaccaatttctcgctcctcaacatccagtcttcactttcctgttgaacacattcatcatcttctaaagtcaaaggtgacagcacataaaagagttaaagcaacaactacattttattctactaccatcctaaattatttaactacataagtgttaaagttaactaacaatgcaagcaaagatctaaaagtaaatcatattaccccaatacatctacagcttaccatccataaatataaataacttaataccctcatcaaaagaacaatatct

SEQ ID NO: 27503 - DNA, 281 bp, Glycine max
  Clone ID: TF_LIB4202-005-Q1-K1-B9
aggaattcccgggtcgaccacgcgtccgctaggtgacactttatcaatggcgggtggaggcataaccctaggatccaacgccgctaagaaggccacgtgaaggagcagaaaagccggactacaattccccgtctaacgtatcggcagggtgctgaagggcggaaagaacaccaagcgcgttgacaccgaagcccacaagtacctggacgacgtagtcggatatgtggctagtgaggtttaagaattgggtggaaacgctgggagagatgacatgaagactg

SEQ ID NO: 27504 - DNA, 927 bp, Glycine max
  Clone ID: TF_GmC1660_5
tatagaaaaccctcgtattacacgcccatataaaaaacaaatcaactgttccatcttttccacatcgcatatcaattattcttcggcatcttcgaaaatcaattttctgtcttctctgcgtcttcttcctctatcaatcgttttccatggctcgtaccaagcaaaccgctcgcaaatccaccggtggaaaggctcctaggaagcaactcgccaccaaggtactattttttttattatttagggtttcgttttttttttctagttagggtttctcgatttcaattaccttttattcctaatttcccgaaggtttattgacaattgattcttcaattacgtaattatgtgattttggatattaataattgaataaacgcgtgatttctgtgtaggctgcaaggaaatctgcaccgacaaccggtggagtcaagaagcctcatcgctatcgccctggaactgttgctcttcgtgagatccgaaaataccaaaagagcacagagcttctgatccgcaagctcccctttcagcgtcttgttcgtgaaatcgcgcaagacttcaagcaaatcactgacattttttgttgatatcgttgccaatgtgaccgatatgattccagactgatttgaggttccagagtcacgcggttcttgcgcttcaggaagctgcggaggcttacttggtgggtttgtttgaagacaccaacctttgtgcgatccacgccaagagagtgaccatcatgcccaaggacattcaactcgcacgccgcatccgtggagaacgtgcttaggcttataataatgataatagcatagttgtcgccttttcgttttgcaatacatttcttgtttcttagggttttagtgttattttccagtttgttatgttttgtatagaagatagatatatcaacagcaacagcttcttacc

SEQ ID NO: 27505 - DNA, 240 bp, Glycine max
  Clone ID: TF_LIB3108-050-Q1-K1-B1
ctttctcattccccatctcctcaccttattcagtcactgatcatttctagggttccgcaatggacgctggctgtaagatcacgaagggcgccgcaggaagaaagggcggcggccctaagaagaagccgctttcaaggtccgtcaaggccggtctccacattcccgtcggaagaattggccgatatttgaagaaaggaaggtactctcagcgtgtctgtaccggcgctcccgtttacttgg

SEQ ID NO: 27506 - DNA, 258 bp, Glycine max
  unsure (1)..(258): unsure at all n locations
  Clone ID: TF_700980281H1
ctcaggacttcaagactgatctgcgtttccagagccacgccgtgcttgcattgcaagaagctgctgaggcatacctngttgggctctttgaggacactaacctgtgtgccattcacgcaagccgtgtaaccattatgccaaggtattcagctggcaagaaggttcgtggtgacgtgttgagttngtgtggaagatgagatgattggtgntgggttggtgttttnntttcagattcttttttattccaataatgggtgt

SEQ ID NO: 27507 - DNA, 619 bp, Glycine max
  unsure (1)..(619): unsure at all n locations
  Clone ID: TF_GmC127_3
ccccccgcttcaggccgggaaccgtggcgctgagggaaatcagaaagtatcagaagagcnccgagcttctcatcaggaagcttccgtttcagagactcgtgagggaaatcgcgcaggacttcaagaccgatttgcgttttcagagtagcgccgtttctgcgcttcaggaagctgctgaggcctacctcgttgggttgttcgaggacactaacctttgcgcgattcatgcaaagagggttaccattatgcctaaggatattcagcttgctcgcaggatcagaggcgagagggcttaggttggttagggttctgattttgaaggaggcgagacggcttagaaaaagaatcatctatctatgtgcttatgtgggcatgtgaaacgtgaatctgtttgcttttgtaattatctcgtgtttcttagacaagttaattaaaatgctatgttggttctcggagaaaattgttgttgagtcttaaagaacttgatctcggagaaattaaatctatcctaaaactcaagagattgtgtgccttttatgtttaacaatacagtatttgagaagagagtatttatgcttcttttaaagcctactaaataaatgtgagataattttattgg

SEQ ID NO: 27508 - DNA, 696 bp, Glycine max
  Clone ID: TF_GmC1230_4
gcaaattccaattcccaattcccaattcgaaacccttattcctttcaaagaaccaaattgagtgatcgtgatggcaccaaagcagagaagaagccagcggagaagaagcccgcggaggagaagaagtcgacggtgggagacaaggctccggcggagaagaagccaaggccggaaagaagcttccgaaggagggaggcgccggcggagaagggaagaagaagaagagaaacaagaagagcgtggagacatacaagatctacatcttcaaggttctgaagcaggtccaccctgacattggtatctcaagcaaggccatgggaatcatgaacagcttcatcaacgacatcttcgagaagcttgcccaggaatcttctagacttgcccgttacaacaagaagcccaccatcacttcaagggaaattcagaccgcggtcaggcttgtgctgcccggtgaattggccaagcacgccgtctctgagggtaccaaggctgtcaccaagttcactagctcttgaactgactattatgccccttcgcttcgatctaggtgtctctgttaggaatatgttttatgttgaagcgttggtttattttttctttttggtgaaaaaaaaatgtaagtgaagaatatgggatttgttgatccttctttgtatggaattagttgctaatacagagacgtatattattcctatc

SEQ ID NO: 27509 - DNA, 792 bp, Glycine max
  Clone ID: TF_GmC110_2
tacggctgcgagaagacgacagaaggggacaccgcaaactctctctgtaaagtgcaaagcctctattttttcttgtgaatttgaaggacgatgagttccacagaggtcgcagccacaacgaagaagggtggaagagggaaacccaagaccacaaagtccgtttcccgttcctccaaagccggccttcagttccccgtcggccgcgtcgctcgctacctcaaggccggtcgctatgcccagcgcgttggttccggttcccctgtttacctatctgcggttctcgaataccttgccgctgaggttttggagcttgccggcaacgctgcgagggacaacaagaagacgaggatcgttcctaggcacattcaacttgcggtgaggaacgatgaggagttgagcaagctgatggggtctgtgaccattgccaatggtggtgttctgcctaacattcaccagaatttgttgcccaagaaggccgctggcaagggaaagcccgagattggatctgccagtcaggagttttagattcttagggtttcatcttgttagtatttagagtgcaaaattgaaagaaaatggaactagttttggtatgtagttggccgcgtagtacagtgagactaggattgacattgaatgatgtatagtcattttatatgtgagaataactagttgttttggtttatgatttggtttcctgcatagttttcgttctatttgaattttgcttgtatttagcgcctttttctattattattttggtcaaattagtcttgattttagtgttaaaaa

SEQ ID NO: 27510 - DNA, 1026 bp, Glycine max
  Clone ID: TF_GmC732_1
ccacgcgtccggcgcgcgtccggctgcgagaagacgacagaagggatcgcatttcatagcactcaccctcattaccaacacgaaagcatagccaaaaccttttttcgaagtctctgattttcctaatggctccggcaaaggcagagaagaagccggcggagaagaagccagcggcggagaaggcaccggcggagaagaagccgaaggcggagaagaagatctcgaaggaaggagggagcgagaagaagaagaagcgcacgaagaagagcgtggagacctacaagatctacatcttcaaggtcctcaagcaggttcaccccgacattggtatttccagcaaggccatgggcatcatgaacagcttcatcaacgacatcttcgagaagctcgcccaggaagcgtcgcgtttggctcgctacaacaagaagcccaccatcacctcgagggagatccagaccgccgtgcgtctcgtgctccctggtgaattggccaaacacgccgtttctgaagggaccaaggcggttaccaagtttaccagctcttgaattagggtttgttaggcggttgtgttgcagatctagggttttctgtggatttcttttcttaaaaattagtttgtagatgtaatgatctgaacagttgttaatggaaggtttcgtttgaataattataattgcatgactgtggattactttttcgtcctttttgtttatggtttgggcggtgattagggttagggttgttggattgactcttaagatgtataatagataagaggagtgtggggttgtgtcaatttgatcatatcgttccctaatttccgctctgtttgccgcaatttgaagaacaacagttcacactattctttgttttttggctattgttttctgattttcgaaatgaacgccgttttgaaggatgtggttttcgttgtttcggaagatcggtgagggcttgaatgtattttggctgcttaatggacgtgctgcaataattatcgcagcctatttttagaaattgattctc

SEQ ID NO: 27511 - DNA, 725 bp, Glycine max
  Clone ID: TF_GmC45_2
ccgtacgcccgcgagaagacgacagaagggggatcgctctcacgcttctgattattcctcttcccattctagggttccgaaatggacgctggcggaaagatcaagaagggcgccggaggaagaaagggcggcggccctaagaagaagccggtttcaaggtccgtcaaggccggtctccaattccccgtcggaagaattggccgttatttgaagaaaggaaggtacgcccagcgtgtcggtaccggtgctcccgtttacttggccgcagttctcgagtacctagctgctgaggtgcttgagttggctgggaatgctgcacgtgacaacaagaagaacaggattattccgagacatgtgcttttggctgtgaggaacgatgaggagttggggaaattgcttgctggtgtcaccattgctcatggtggtgttcttccaaacattaaccctgttttgctacctaagaagactgagagggctcaaggaacctaaatctccatccaaggctaccaaatctcctaagaaagcttagatgtttttattttattttaatgaatatgtatatcagtgtttagatgctttttatgtaaaagaaaatattatctgttgcaaacactgtaattcttatcgtcttgcatgtaggagtttgctaaattaatgaaaatttcttattattttgggtcaaaaaaaaaaaaaaaaaaaaaaaacaaagcggccgctctagagaa

SEQ ID NO: 27512 - DNA, 390 bp, Glycine max
  Clone ID: TF_LIB3053-009-Q1-N1-B6
cttacagctcatgtgtttcttgtaaagaactgctttcaccgtagatgggttcaacatcatgaccttgactctatctattcgtacagcttctatctgttcttggcgattaacgatttcacttaatggatcgataggattgatcacacgcaaaacctccgccgccatcaaagacagggactagaagaaacccatttcatgtacacatagtgccgtccttcaattcacagcaggatgaattcaccgccttatgaagtcaatgacagccgctcatgatagattttgggccacatctgctgtctactatgctgctatcttggagtatctcactgctgaagtattgcatctggcccggaatgctagcaaggatctcatcgtaaaacgtattactac

SEQ ID NO: 27513 - DNA, 370 bp, Glycine max
  Clone ID: TF_LIB3039-015-Q1-E1-B9
agggaacgttcaagagttagtcgtgagcaatcaggcagtgtatcgtgaggagaatatcaagttgttcgtacgcatcattcctcgcgtagttccaggtagcagagacgctcctatgaacagctgcaacagtgctccactgagtcagcaccagctacggtgagcgtgaagcagccgcatcgttagcatcctgcaagcgttacgcttcgtgagattaggccctaccatacaagtaccgaacttatgatccggaagctccccttccagacgctggttcctgatattactcaggatttcaagactgatctgcatttccagatccacaccgtgcttgcattgcacgaacctgctgacgcataacttgtttggctcc

SEQ ID NO: 27514 - DNA, 386 bp, Glycine max
  Clone ID: TF_LIB3051-079-Q1-K1-C3
cggacgcgtgggcggacgcgtgggcggacgcgtgggcggacgcgtgggcaccttcgaaaatcaattttctgtcttctctgcgtcttcttcctctatcaatcgttttccatggctcgtaccaagcaaaccgctcgcaaatccaccggtggaaaggctcctaggaagcaactcgccaccaaggctgcaaggaaatctgcaccgacaaccggtggagtcaagaagcctcatcgctatcgccctggaactgttgctcttcgtgagatccgaaaataccaaaagagcacagagcttctgatccgcaagctccccttccagcgtcttgttcgtgaaattgcgcaagacttcaagaccgatttgaagttccagagtcacgctgttcttgcgct

SEQ ID NO: 27515 - DNA, 276 bp, Glycine max
  Clone ID: TF_uC-gmroLIB3259128g02a1
gatccacgcgttcgattcatttatgatacaccttgtgcgtcgcgcaagcaggtacctatatacttatagaagggccacacaaagctgactgatattttgtcaacagggaggtatacctcccaggaagcagcttagaacctaggctccacgtaagtatgtaccagccactggtggaacaaccaaacctaaacgttatcttcctggaactgtagctctgagagtgattaggacataccagaataccactgatcttctaatcaagaagcttactttaca

SEQ ID NO: 27516 - DNA, 750 bp, Glycine max
  Clone ID: TF_GmC137292_1
cctagattcagccacagtttcggaggagaagaaaatagtcgttcgaggttagtttttcttctgagatttgggattttagggtttatatctttgtctttttggtttctgttgatttccaaatcgcgtatcttagataagacagttgaatttttattcttctctagtcacaacgttctgattcttacgcctccgagtcaatattttcggttagtaatttctagggtttcagatgttttgttttggagaattagtcgataatttcatccggccaacgtatgtgtctttaatttcttaattaaacaaagattatggataaatataagttttgaagattaggttatgcgatagaagggggtaagaaaggttctattgttgtttgtttgaaattgatgtttctgaaattactttttgggcgtcgacacagatggcccgtacgaagcaaactgctcgtaagtccacaggaggaaaggctcctaggaagcagcttgcaaccaaggtctcttctataatcacaacaacaattaattaatcattgttcatattgatttgctttgattttatctgagagcttaattcctttgttttacttttaggctgcacgtaagtctgcaccaactactggtggtgtgaagaagccacatcgttaccgtcctggtaccgttgctcttcgtgagattaggaaataccagaagagtaccgagcttttgatcaggaagctccccttccagaggctggttcgtgaaattgctc

SEQ ID NO: 27517 - DNA, 592 bp, Glycine max
  Clone ID: TF_GmC1607_2
tacggctgcgagaagacgacagaaggggaggaacaagaagcgaaaatataacaaataatttgtactttcatcaaaacaaaatcccgttgtatttttctcagatggctcgaacgaagcagctggcgactaaggcggctcgcaagtcggctccggcgaccggcggcgtgaagaagccgcacagattcaggccgggaaccgtggcgctgcgcgggatccggaagtatcagaagagcacggagctactcatccggaagcttccgttccagcgcttggtccgcgagatcgcgcaggacttcaagaccgacctccggttccagagctccgccgtctccgcgctccaggaggccgccgaggcttacttggtcggtctcttcgaagacacgaacctctgcgccattcatgccaagcgtgttactatcatgcccaaggacattcagctcgccaggcgcattaggggcgaacgcgcttaaacctaatccctgtccttttgtatagataatttcaagcgttcttagttagattgaattgcggttttctttgagaattctgtaatgttaacgctttaccaatgaaattatcgcttttgttctcc

SEQ ID NO: 27518 - DNA, 448 bp, Glycine max
  Clone ID: TF_LIB4366-015-R1-K1-C10
cgaataccttgccgctgacgttttggagcttgtgcccaacactgttaggaacaacacgaagacgaggattgttgctatgcacattatacttgtggcgaggaaccatgtggagttgagcgccctgatggggtctgcgaccattgccattggtggcgctcttgctaacatttaccacaatttgatgcccaagaaggttgctgtccaggggaagccccatactggatctgccagtcaggaaatctaaattcttagggattcatctttgttgggattataggggaccaatggaagaaaatggctctaaggtctgcggagcagataggccgcacctttaagcttgctaatgccctgtactacattgaggagttgcttctcctctcaacaaaataaacatgctgcctatgctatctatattgtaataaagatgccgttcaaattaggggcacct

SEQ ID NO: 27519 - DNA, 358 bp, Glycine max
  unsure (1)..(358): unsure at all n locations
  Clone ID: TF_LIB4367-014-R1-K1-H4
cggggagaagggaagaagaagaagagaaacaagaagagcgtggagacatacaagatctacatgttcaagggtctgaagcaggtccaccctgacattggtatctcaagcgaggccatgggaatcatgaacagcttcatcaacgacatcttcgagaagcttgcccaggaatcttctagacttgcccgttacaacaagaagcccaccatcacttcaagggaaagggggaccgcggncaggcttgngctgcccgggcgngggggcggggggggcggcggggggggggggggggggggggggcggnnggccggggggggtggggggggggggggggggggggggggggggggggggggggggg

SEQ ID NO: 27520 - DNA, 370 bp, Glycine max
  unsure (1)..(370): unsure at all n locations
  Clone ID: TF_7589938
tccggcggagaagaagccgaaggccaaaaagaagcttccgaaggaaggaagagccggcggagaaagggggaagaagaaaaagaagaacaagaagagcgtggagacgtacaaaatatacatatgcaaagtactaaagcaagtccaccctaacattaatatctcaagcaaagccatgggaatcataaacagcttcatcaacaacatcttcgaaaancttactcaagaatcttgcagacttgcccactacaacaagaancccaccatcacttcaaaggaaatccaaaccacgatcaagcttatgcttcccggtaaattaaccaagcacnccatgtctaaggataccgaaaccatcaccaagtggaccagctca

SEQ ID NO: 27521 - DNA, 388 bp, Glycine max
  unsure (1)..(388): unsure at all n locations
  Clone ID: TF_LIB3108-045-Q1-K1-E12
cggaggagaagaaaatagtcgttcgagattctccgtacgaagcaaactgctcgtaagggcagattatgaaaggctcctatgaagcagcttgcatccaatgctgcacgtaagtctgcaccaactactggtggtgtgaagaagccacatcgttaccgtcctggtaccgttgctcttcgtgagattaggaaataccataagagtaccgagcttttgatcaggaagctcccctttcagaggctggttcgtgaaattgctcatgacttcaagactgatctgcgtttccagagccactccgtgcttgcattgcaagaagctgctgaggcatacctngttgggctctttgaggacactaacctgtgtgccattcacgctaagcgggtaaccatta

SEQ ID NO: 27522 - DNA, 483 bp, Glycine max
  Clone ID: TF_GmC958271_1
ctggtaaccctctccgcctaactcgccgtggcacgttcgaagcagactgcccgggaatctaccggaggaaaggctccccgaaagcagctcgccaccaaagctgcacctaagagcgcaccttccgctggaggagtgaacaagcctcatcgtgacaggcccggtgccgtcgctcttcgggaaatcaggcgttaccagaagtccactgagttgctgatccgcaagttgcctttccagcgacttgtccgtgaaattgcacaggacttcaaaactgatctccgtttccagagcgctgcgattggtgcccttcaggaagctagtgaggcctacttggttggtctgtttgaagataccaacttgtgcgctattcacgctaagcgtgtgacaatcatgccgaacgacatccagttggcgcggcgaattcgtggagaacgtgcttaaattactggcagctgttttttaagttttgtttttaacactatatgg

SEQ ID NO: 27523 - DNA, 787 bp, Glycine max
  Clone ID: TF_GmC1230_16
actcatacccactctttattctcccaattcaaaactctcactccgttagaagcaccaaatcctgatggcaccaaaggcagagaagaagccagcggagaagaagcccgcagaggagaagaagtccacggtgggagacaaggctccggcggagaagaagccaaaggccggaaagaagcttccgaaggagggaggcgccggcggcgaagggaagaagaagaagagaaacaagaagagcgtggagacatacaagatctacatcttcaaggttctgaagcaggttcaccctgacattggtatctcaagcaaggccatgggaatcatgaacagcttcatcaacgacatcttcgagaagcttgcccaggaatcttctagacttgcccgctacaacaagaagcccaccatcacttcaagggaaattcagaccgcggtcaggcttgtgctgcccggtgaattggccaagcacgccgtttcggagggtaccaaggccgtcaccaagttcactagctcttgaacaaaatatctttgcctggctcttgtttttcttcatgtgtttctgttagatctagcgacctatgcttagatttgaacagttaacttttttattattatttgtaattgaagtattgggattaggttcatcctctgtgtatggaaatggtagaatcgatcgtataggggtaatttgatacatggaatggctgttttgactattttatgtactcgtgattgtctctctaacttcgttcgaggtcgatattcctttttaaaaatgtttatttgtatgccc

SEQ ID NO: 27524 - DNA, 834 bp, Glycine max
  Clone ID: TF_GmC1230_18
ggctcgagcccattcttcattctagccattcgaattcccaatctaaaaccctaataccttcaaagaacgaagtagtggatcagtgatggcacctaaggcagagaagaagccagcggagaagaagcccgcggaggagaagaagtcgacggtgggagacaaggctccggcggagaagaagccgaaggccggaaagaagcttccgaaggagggaggagccggcggagaaggggggaagaagaaaaagaggaacaagaagagcgtggagacgtacaagatatacatattcaaggtactgaagcaggtccaccctgacattggtatctcaagcaaggccatgggaatcatgaacagcttcatcaacgacatcttcgagaagcttgctcaggaatcttccagacttgcccgctacaacaagaagcccaccatcacttcaagggaaatccagaccgcggtcaggcttgtgcttcccggtgaattggccaagcacgccgtttctgagggtaccaaggccgtcaccaagttcaccagctcatgaaccgactattatttggattttgtttctggttgcacacacaaatctgttctatgtatctggagacttatgtttggattttgatcagtaattgtgcatgaacgttgtagtggtgctgatatagttagtatattcttggtatggtacatggagtgggctgtttcagtattaatgcatttaagattctctaaaaaaaaaggaaaatctaccaaagtatgaaaaggagctagaacttaaagtagccaaagcacaactggaggaaccttaagaaggatgctctcggggcaatggaaactcaaaaa

SEQ ID NO: 27525 - DNA, 810 bp, Glycine max
  Clone ID: TF_GmC1230_19
tcatcggcacgctgcggcgcggcctgatgcgcatcctccgcgccaccgatccgcaagcttccggcgaagccagagaaagaaaaaaagaagtaaaaactaaataagacaacttcacccactcttcattctatcaattccaatcaccaattcaaaacccttcttcccttggaacaaattgagagatcgtgatggcaccaaaggcggagaagaagcccgcagaggagaagaagtccacggtgggagacaaggctccggcggagaagaagccaaaggccggaaagaagcttccgaaggagggaggcgccggcggagaagggaagaagaagaagaggaacaagaagagcgtggagacatacaagatctacatcttcaaggttctgaagcaggttcaccctgacattggtatctcaagcaaggccatgggaatcatgaacagcttcatcaacgacatcttcgagaagcttgcccaggaatcttctagacttgcccgctacaacaagaaacccaccatcacttcgagggaaattcagaccgcggtcaggcttgtgctgcccggtgaattggctaagcacgccgtctctgagggtaccaaggccgtcaccaagtttactagctcttaaactgttgtttatgggcttgttgcacgcccaagtctgttctatgtatctggacacctatgttcagattttaatcaattgtaggggtggtgatatagtatagtgtagcatattgttggtacggtacattgaattgctgttgagaattaatacatttgagattctctaacttattcgcttatgcaatttcgaa

SEQ ID NO: 27526 - DNA, 835 bp, Glycine max
  Clone ID: TF_GmC1230_20
aggcgtcagacagctgcaaaaagagtacagaatgggactcagaacttcaatccctcttttgcttttccaattccaatttccaattcaaaaccctaactccgttcgaagcaccaaatcgtgatggcaccaaaggcagagaagaagccagcagagaagaagcccgcggaggagaagaaatcgacggtgggagacaaggctccggcggagaagaagccaaaggccggaaagaagcttccgaaggagggaggcgccggcggagaagggaagaagaagaagagaaacaagaagagcgtggagacatacaagatctacatcttcaaggttctgaagcaggttcaccctgacattggtatctcaagcaaggccatgggaatcatgaacagcttcatcaacgacatcttcgagaagcttgcccaggaatcttctagacttgcccgctacaacaagaaacccaccatcacttcgagggaaattcagaccgcggtcaggcttgtgctgcccggtgaattggccaagcacgccgtttctgagggtacgaaggctgtcaccaagttcactagctcttgaattagctatcttatcgctttccaaagactcttttctgtcccaatttgagattttaatcagtagtagactttttttttttgtttgataggatttgtaattgaaagaatggtcctgggttgatccttttgtgtattgaagtggcaagatgtattgattatataggaacgcagtattgtttagtattatactttcaagaatctccaatcggccattcgttaataattgttttttcggatatttgtttgcttgaactttccagttagttatt

SEQ ID NO: 27527 - DNA, 896 bp, Glycine max
  Clone ID: TF_GmC1230_21
tacggctgcgagaagacgacagaaggggattcacaacttcaatccctcttttgctttaccaaattccattttccaattcaaaaccctaactccgttcgaagcaccaaatcgtgatggcaccaaaggcagagaagaagccagcagagaagaagcctgtggaggagaagaaatcgacggtgggagacaaggctccggcggagaagaagccaaaggccggaaagaagcttccgaaggagggaggcgccggcggagaaggtaagaagaagaagagaaacaagaagagcgtggagacatacaagatctacatcttcaaggttctgaagcaggttcaccctgacattggtatctcaagcaaggccatgggaatcatgaacagcttcatcaacgacatcttcgagaagcttgcccaggaatcttctagacttgcccgctacaacaagaaacccaccatcacttcaagggaaattcagaccgcggtcaggcttgtgctgcccggtgaattggccaagcacgccgtttctgagggtaccaaggctgtcaccaagttcactagctcttgaattagctatcttatcgcttttctaagactcttttctgtcccaatttgagattttaatcagtagtagactttttttttgtttgataggatttgtaattgaaagaatggtcttgggttgatccttttgtgtattgaagtggcaagatgtattgattatataggaacgcagtattgtttagtattatactttcaagaatctccaatcggccattcgttaataattgtttttttggatatttgtttgcttgaactttccagttagttattaatagtgtgcaaatcttttgaaaactgtaacatttatcgtataggaatcattttccctaaaaaaaaaaaa

SEQ ID NO: 27528 - DNA, 1148 bp, Glycine max
  Clone ID: TF_GmC1230_24
ggtgaatcagtgatggcacctaaggcagagaagaagccagcggagaagaagccggtggaggagaagaagtcgacggtgggagacaaggctccggcggagaagaagccgaaggccggaaagaagcttccgaaggagggaggagccggcggagaaggggggaagaagaaaaagaggaacaagaagagcgtggagacatacaagatatacatattcaaggttctgaagcaggtccaccctgacattggtatctcaagcaaggccatgggaatcatgaacagcttcatcaacgacatcttcgagaagcttgctcaggaatcttccagacttgcccgctacaacaagaagcccaaccatcgcttcaaacatttctcattcacaactttacccactcttcattctagcaattcgaattcccaatccaaaaccctaataccttcaaagaacctagtagtgaatcagtgatggcacctaaggcagagaagaagccagcggagaagaagccggtggaggagaagaagtcgacggtgggagacaaggctccggcggagaagaagccgaaggccggaaagaagcttccgaaggagggaggagccggcggagaaggggggaagaagaaaaagaggaacaagaagagcgtggagacatacaagatatacatattcaaggttctgaagcaggtccaccctgacattggtatctcaagcaaggccatgggaatcatgaacagcttcatcaacgacatcttcgagaagcttgctcaggaatcttccagacttgcccgctacaacaagaagcccaccatcacttcaagggagatccagaccgcggtcaggcttgtgctgcccggtgaactggccaagcacgccgtttctgagggtaccaaggccgtcaccaagttcaccagctcttgaacaaaatatcttaactttgtttacctcgctcttgttttgcttcatgtgtatctgttagatctagcgaccctatgtttaggtttgaactggtagctttttggtttttaatttgtaagtgaagaattaggattgggttgatcctctgtgtatggaattggtagaattgatcatataggagcaatttgataaaaggaatggttgtttatgaactcatgattctctatcttcgctctaaaa

SEQ ID NO: 27529 - DNA, 767 bp, Glycine max
  Clone ID: TF_GmC1230_27
ccacgcgtccggttgtctttagcctattccaattcgcaattcccaattcgaaacccttattcctttcaaagaaccaaattgagtgatcgtgatggcaccaaaggcagagaagaagccagcggagaagaagcccgcggaggagaagaagtccacggtgggagacaaggctccggcggagaagaagccaaaggccggaaagaagcttccgaaggagggaggcgccggcggagaagggaagaagaagaagagaaacaagaagagcgtggagacatacaagatctacatcttcaaggttctgaagcaggtccaccctgacattggtatctcaagcaaggccatgggaatcatgaacagcttcatcaacgacatcttcgagaagcttgcccaggaatcttctagacttgcccgttacaacaagaagcccaccatcacttcaagggaaattcagaccgcggtcaggcttgtgctgcccggtgaattggccaagcacgccgtctctgagggtaccaaggctgtcaccaagttcactagctcttgaactgactattatgccccttcgcttcgatctaggtgtctctgttaggaatatgttttatgttgaagtgttggtttattttttctttttggtgaaagcaatttgtaagtgaagaatatgggatttgttgatccttctttgtatggaattagttgctaatacagagacgtatattattccgaaaaaaaaaaaaaaaaaaaaaaaaaaaaaagcggccgctctagaggatcca

SEQ ID NO: 27530 - DNA, 706 bp, Glycine max
  Clone ID: TF_GmC1230_5
cccaatccaaaaccctaataccttcaaagaacctagtagtgaatcagtgatggcacctaaggcagagaagaagccagcggagaagaagccggtggaggagaagaagtcgacggtgggagacaaggctccggcggagaagaagccgaaggccggaaagaagcttccgaaggagggaggagccggcggagaaggggggaagaagaaaaagaggaacaagaagagcgtggagacatacaagatatacatattcaaggttctgaagcaggtccaccctgacattggtatctcaagcaaggccatgggaatcatgaacagcttcatcaacgacatcttcgagaagcttgctcaggaatcttccagacttgcccgctacaacaagaagcccaccatcacttcaagggagatccagaccgcagtcaggcttgtgctgcccggtgaattggccaagcacgccgtttctgagggtaccaaggccgtcaccaagttcaccagctcttgaacaaaatatcttaactttgtttacctcgctcttgttttgcttcaattgtatctgttagatctagcgaccctatgtttaggtttgaactggtagctttttggtttttaatttgtaagtgaagaattaggattgggttgatcctctgtgtatggaattggtagaattgatcatataggagcaatttgataaatggaatggttgtttatg

SEQ ID NO: 27531 - DNA, 346 bp, Glycine max
  Clone ID: TF_LIB3093-050-Q1-K1-G7
cccacgcgtacgacacagatggctcgaacgaagcataccgctcgtatgtccacatgatgtgaggctcctaggaagcatcttgcaaccaatgctgcacgtaagtctgcaccaactactggtggtgtgaataagccctacattaatccgactggtaccgttgctcttcatgagatcaggaaataccatattagttccgagctattgatccggaagctcctcttacagaggctgggtcgtgaaattgctcatgacttcaagactgatctgcagttacagagtcacgccgtgcttagcattgcacgaagctactgatgcattcattgtcgggctcaatgaggacactaac

SEQ ID NO: 27532 - DNA, 274 bp, Glycine max
  Clone ID: TF_700944518H1
cagagaccgaaatacttcgagatggcccgtacaaagcaaactgctcgtaagtcaactggaggaaaagctcccaggaatcagcttgcaaacaatgctgcacgtaagtctgaaccaacaactggtgctgtgaagaagcctcatcgttatcgacctggaactgtgcccctccgtgagattaggacataccagattagcgctgtgctcctaatcaggaaccttcatatccaaatgttggttcgcgaaattgcccaggatttcaagactgatctgcgtt

SEQ ID NO: 27533 - DNA, 367 bp, Glycine max
  Clone ID: TF_LIB3040-006-Q1-E1-A8
ggatcctttgtattctattcttcaaaattcatgtactgcgtttcggaagcatacatacatagctcgtaggaatcaaaccgctcgtaagtccacaagatgaaaggctcctatgaagcagcttgcaaccaatgctgcacgtaagtctgcaccaaccactggtgatgtgaataagccccaccgttatcgtcctgataccgttgctcttcgtgagattaggacataccagaatagtaccgagcttttgatccggaagctcctcttccagaagctggttcgtgaaattgctcaagacttcaagactgatctgcgtttccagagccacgccctgcttgcaatgcaagaaactgcttaagcataacttgttagg

SEQ ID NO: 27534 - DNA, 552 bp, Glycine max
  Clone ID: TF_LIB4204-003-R1-K1-B3
cccacgcgtccgacggctgcgagaagacgacagaagggtacggctgcgagaagacgacagaagggtacggctgcgagaagacgacagaagggtacggctgcgagaagacgacagaagggtacggctgcgagaagacgacagaaggggacccaactctctaaacaacacattaacctttctcatacaagatgacctaacgttattcaagacataaataatttctacggttccaaaatggacgctggcggaaagatcaagaacggcccctgaagaagaaacggcgttacgtcctaagaagaagccaggtttaaggtcctgtataggcggtctaaattacccgactggagaattggtcactatttgaagaaatgaaagaacgcccagcgtgcccaaaccagtgctcccgtttacttggccgcatttctcgagtacctaaatactgaggagcttgagttgactgggaattcctaacgtgacaacaagaagaacaggattattgccagacatgtgctattggctgttaagaacgatgaggagttggggaaattgctt

SEQ ID NO: 27535 - DNA, 376 bp, Glycine max
  unsure (1)..(376): unsure at all n locations
  Clone ID: TF_LIB3074-039-Q1-K1-H10
ttggggatcctttgcattctattcattcaacgttcatcgtgtactttttggaagcacanacccaaatacttcgagatggcccgtacaaagcaaactgctcgtaagtcaactggaggaaaagctcccatgaagcagcttgcaaccaaggctgcacgtaagtctgcaccaacaactggtggtgtgaagaagcctcatcgttatcgccctggaactgttgctcttcgtgagattaggaaataccataagaacactgaactcctaatcaggaaacttcctttccaaaggttggttcgtgaaattgcccaagatttcaagactgatcttccttttcaaaaccatgctgtgctttcatttcaagaggcttcttaagcatacc

SEQ ID NO: 27536 - DNA, 905 bp, Glycine max
  unsure (1)..(905): unsure at all n locations
  Clone ID: TF_GmC45_7
gacccacgcgtcagcccacgcgtccgaagacgacagaagggggatcgctctcacacctgtgattattcctcttttaacaatccacatccaaattctagggttccgaaatggaccccacgcgtccgcccacgcgtccgcccacgcgtccgcccacgcgtccggcttaatctctctcattccccatttcctcacctccttcaaccgctgctaaattctagggttccgaaatggacgctggcggaaagatcaagaagggcgccggaggtagaaagggcggcggcccaaagaagaagccggtttcaagggattctccnggttccaataataagcnccncccggnggggtttctccaattccccgtcggaagaattggccgttatttgaagaaaggaaggtacgctcagcgtgtcggtaccggtgctcccgtatacttggctgcagttctcgaatacctagctgccgaggtgcttgagttggctgggaatgccgcacgtgacaacaagaagaacaggattattccaagacacgtgcttttggcagtgaggaacgatgaagagttggggaaattgcttgctggagtgacaattgcacatggtggcgtgcttccaaacattaaccctgttttgttgcctaagaaaacggagagggctgccaaggagcctaagtctccatccaaggctaccaaatctcctaagaaggcttagatttttttttttttttttttaaatctagtgttgtatatcggtgcttagatgcttttggtgtaacaggaaatttgatgtgttttttaaacattgtaattcttgtcccattgtgttgcttgtaggagtgagtttgctttattaatgaaaagtggaaacctcttgttttcaaaaaaaaaaaaaaaaaaaaaaaaaggcttaccc

SEQ ID NO: 27537 - DNA, 312 bp, Glycine max
  unsure (1)..(312): unsure at all n locations
  Clone ID: TF_LIB3106-049-Q1-K1-H12
cgcttctgattattcctcttcccattctattgttcccaaatggacgctnncggaaagacgaagaatttctctctatgaagaaaggtccacatccctaagaagaaaccgttttcaaggtccgtcaaggccggtctccaattccccgtcggaagaattggccgttatttgaagaaaggaacgtacgcccagcgtgtcagtacccgtgctcccgtttacttggccgcagttctcgagtaacctaactgctgacgtgcttgagttggcttggaatgctgcacgtgacaacaacaagaacaggattattccgagaca

SEQ ID NO: 27538 - DNA, 409 bp, Glycine max
  Clone ID: TF_LIB3242-761-P1-J1-F5
gggtcgagctttaagattcaagtactgcgttactgaagcatacacatatggctcgtacgaagcataccgctcgtaagtccacaggaggaaaggcttctaggaagcatcttgcaaccaaggctgcacgtaagtctgcaccaactactggtggtgtgaagaagccccaccgttatcgtcctggtaccgttgctcttcgtgaaatttaggaaataccagaagagttcctagcttttgatccggaagctctcctttcataggctggttcgtgaaattgctcaggacttcaagactgatctgtgtattcagagccacgccgtgcttgcattgtaagaagctgctgaggcataccttgatgggctctttgaggacactaacctgtgttgccattcacgccaagcgtgtaaccatt

SEQ ID NO: 27539 - DNA, 409 bp, Glycine max
  Clone ID: TF_LIB3073-018-Q1-K1-G7
gatcgcatttgatagcactcaccctcattagcgacacgaaagcatatccgaaaccttctttggaagtctctgattatcctaatggctcctgcaaaggcactgaagaagccggcggagaataagccagcggcagagaacgcacctgcggagaagaagccggaggctgcgaatacgatctcgaaggaaggatggagctagaagaagaagaagcacacgaagaagaacctggagacctacaagatctacatcttcaacgtcctcaagcaggttcaccgcgacattggcatttacagcaaggccatgggcatcatgaacagcttcatcaacgacatcttcgataagctcgctcaggaagcgtcgcgattggctcgctactacaagatgcccaccattacctctagggagatcc

SEQ ID NO: 27540 - DNA, 277 bp, Glycine max
  Clone ID: TF_LIB3049-012-Q1-E1-F3
aggggaaactttgcaatccaatcaatcaagattcagcaagtgcgttttgggagcagagaccgaaatacttcgagatgggccgtacaaagcaaactgctcgtaagtcaactggaggaaaagctcccaggaagcagcttgcaaccaaggctgcacgtaagtctgcaccaacaactggtggtgtgaagaagcctcatcgttatcgccctggaactgttgctcctcgtgagattacgaaataccagaagagcactgagctcctaatcaagaagcttccttt

SEQ ID NO: 27541 - DNA, 538 bp, Glycine max
  Clone ID: TF_GmC335946_1
cagcattacgtccaaggatcatattcaaaactctgcattcgcaaacaagttcgattacaagccatggccggagactcgttgctcaatgaacaatgttagtcagccacaatgaaaaaggcataacaaaatccagaagtacaaggaaaaacacctccaactccaccgctaaaatcagacgatagcacagtcgtcaagaacgaccgccaaaaccttgcccaataaccgtgccagtttgacacgattccctcctcttccacgttttcatagagctccccgtagtcgtctagcgagctgaatgtctttttgcatgatggtaacgcgtttcgcatgcagggcgcagaggtttgtgtcttcgaaaagatgcacgaggaaagcctcggcggcctcttggagcgcttggatggcttgagactgccatcgatggccttctaacgatgcaggcgctacgttatatgcgacttcgcggaccaaacgcgagaaaggcaatttgagtagtaggagatccgtcgacttctggtatctcctaatttcgcgcaat

SEQ ID NO: 27542 - DNA, 193 bp, Glycine max
  Clone ID: TF_9205495
tcgtgaaattgcccacgatttcaagactgagctgcgttgccagagccatgctgtgcttgccttgcaagatgctgctgaggcataccttgttgggctctttgaggacactaacttgtgtgccatacactccaagcgtgtgactattatgcccaaggatattcatctggcaagaacgattcgtggtgagcgtgct

SEQ ID NO: 27543 - DNA, 403 bp, Glycine max
  unsure (1)..(403): unsure at all n locations
  Clone ID: TF_18734538
gcggacaaagcaaacagcccgnaagccgaccggcggcaaggcnccccggaagcagcaggcgacnaaggccgcacgaaagncagcnccggcgaccggaggagagaagaaggcacacaggggcaggccaggaaccgcgggccagagggagaccaggaagcaccagaagaggattttttttctgaaccaaaagcaaccgattaagcggatggatcgtgataaagcccaagagtccaaaacggatctgaggttccagagcaaagccgaaccggcagcccaggaagccgctgaaggttacccggaaggaatcctaagaagacaaaacattggtggtattcacgccagaagggtaccaattatgcccaaggataatcaaatcgccagaagaaccaagggcgagagggct

SEQ ID NO: 27544 - DNA, 250 bp, Glycine max
  Clone ID: TF_10845090
ctataaggtgttaattcaagtgcacctcgacatcgggatcttccgcaatgctatggggtacatgaacagtttcatgacgacatgtctcagaaggtcggccattggtcttagtatttgtcataggtacaacaagaaactcaccatttcttccagggagatcctctcggcggtgcgattggtcctctctgtggatttgtgctagcttgccgcttctgaaggcgccaaagctggctcctaattcaccaggtct

SEQ ID NO: 27545 - DNA, 273 bp, Glycine max
  unsure (1)..(273): unsure at all n locations
  Clone ID: TF_700971521H1
cctagattcagccacagttggaaaaaaaaaaaaagttgttcgagatggcacgtacgaagcaaactgcnccgtaagtccacaggnggaaaggcncctaggaagcagntcgcaaccaaggctgcacgtaagtctgcaccaactactggtgtgtgaagaagccanatcgttatcgtcctggacaccgttgctcttcgngagattaggaantaccagaagagtaccgagcttttgatcaggaagctcccttccagaggctggttcgngaattncnca

SEQ ID NO: 27546 - DNA, 389 bp, Glycine max
  Clone ID: TF_LIB3242-401-P1-J1-B5
ccggctcgagaaaaaaccgaccctacctttccctcatcaccaaccaatggctcccccaatggccgagaagaagcccgcggagaaaaagcgccgcagagaaggctggggcggagaagaagcccaaggccgctgaagaagatatcgaaggaaggaggaagcgagaagattaagaagagaacaaagaagagcgtggagacctacaaaatgtacatcttcaaagtgctgaagcaggttcaccccgacataggaatctcaagcaaggccatggggatcatgaacaggtccatatacgacatctccgagaagctcgcccaggagtcgttgcgaatggctaggtataacaagaatcctaccattaacttcagggagatccaaacggcagagcgttt

SEQ ID NO: 27547 - DNA, 454 bp, Glycine max
  Clone ID: TF_GmC136_3
aattcggctcgagtacggctgcgaaagacgacagaagggggagactttccttcagtccttcaccttctttctctctaggcgcaaaacctcgtactgtttgtggcggctaaggatgtcagggaaaggggcgaaggggttgatcacaggcaaaacctccgccgccaacaacaaagacaaggacaagaagaaacccatctcgcgttcttcacgtgccggccttcagttcccagttggccgtatccaccggcttttgaagtcaaggacaaccgccaacggtagagttggggccacagctgctgtctactctgctgctatcttggagtatctcactgctgaagtattggagctggcggggaatgctagcaaggatctcaaggtcaagcgtattactccccggcatctacagctagcaatccgtggggacgaagagctggataccctgataaaaggaaca

SEQ ID NO: 27548 - DNA, 567 bp, Glycine max
  Clone ID: TF_jC-gmfl02220051a07a1
ggctcgagcttcaagattcaggtactgcgtttcggaagcagacacagatggctcgtacgaagcaaaccgctcgtaagtccacaggaggaaaggctcctaggaagcagcttgcaaccaaggctgcacgtaagtctgcaccaactactggtggtgtgaagaagcctcaccgttatcgtcctggtaccgttgctcttcgtgagattaggaaataccagaagagtaccgagcttttgatccggaagctccccttccagaggctggttcgtgaaattgctcaggacttcaagactgatctgcgtttccagagccacgccgtgcttgcattgcaagaagctgctgaggcataccttgttgggctctttgaggacactaacctgtgtgccattcacgccaagcgtgtaaccattatgcccaaggatattcagctggcaagaaggattcgtggtgagccgtgcttgaattggtggtttggaagatgatgatgattggtggcttgctgtggtgttttgttattagattccttttatatctaaagatggtgttgtagggatggaggtttctgctggt

SEQ ID NO: 27549 - DNA, 959 bp, Glycine max
  Clone ID: TF_GmC1625_1
ttccgcccacgcgtccgacggctgcagaagacgacaggacacggctacaaaaacattgaaagaaatagaaaaagcaaaactggtttctcgcatttcctccgaaacaaaccgtttcgctcgtttctcggatctgcaatggaagccccacccaaaggcgctgctggaagaagaggtgacaggaagaagtccgtttccaaatccatcaaagctggcctccaattccccgtcagccgcgtcgccaggtacttgaagaaaggccgttactctcgccgccttggcaccggcgctcccatttatctcgccgccgttctcgaatatctcgccgcagaagtgttggagctggccgggaacgctgcacgtgacaacaagaagaataggattaaccctaggcacgtgttgctggcggtgaggaatgatgatgagctggggaaactgcttcaaggtgtgactattgctagcggtggagtgttgccgaacattaacccggttttgttgcctaagaagagtaccactgcgccttctgagaagtcctctactcctaagtcccccaaatctcctaagaagaaatagaagtttcattttgtaaaggcttatcgtttttttatttttattttttgggggtaggggttggtaacattaccatatatatatatatagttcttaggttaggtgaaatatgatggtgtaatttagcgccaggtgttcgcttttttgctttttttggtcaccccatcgatggctgaatatgatgttaaatgtagtgggttgccaattcgtgtatggaagaagcctttttcatttacttgccggttttatttattaatttattatctaacttgctgcgtttgtatcctgctaaatttattgtttaagcctttaagtggtggcttacttgcaatgtaagggatatgaccaattgtcaattgtatggatttctatcattaaaaattattctgggt

SEQ ID NO: 27550 - DNA, 381 bp, Glycine max
  Clone ID: TF_LIB3167-003-P1-K1-C9
cccacgcgtccgcccacgcgtccggttactcagcatcacctccttttacactctcgaattcgcattctcttcactcattttccaatccatggccaagggagagaaaaaacctgcagagaagaagcccgcggcggagaaggctccggcggagaaaacaaaagccgagaagaagatcccgaaggacgcagcctccggcgagaagaagaagaagaggacgaagaagagcgtggagacgtacaagatctacatcttcaaggtgctgaagcaggttcaccctgacatcgggatctccagcaaggccatggggatcatgaacagcttcatcaacgacatcttcgagaagctcgctcaagaatcttccagactcgcgcgctacaacaa

SEQ ID NO: 27551 - DNA, 348 bp, Glycine max
  unsure (1)..(348): unsure at all n locations
  Clone ID: TF_LIB3028-015-Q1-B1-D2
ctcgttctctgaaattttaattgacctttcccccctcattgcgaatctctatcaattgctcacgcatccgctcattattcaccctctgataagaaaccggcatcaaacggcccaacttgagaagaagccggcttgtcgangtgaaggtatcgatggaacgaggatcccagaagatgaagcagataataaaggacaacgtgtgagacctacaagattcacatcgtcaaagtgttgaagcaagttcatcccgacatctggatcttcatcaaggctatagggatcatgaacaatttcataaacgacatcttcgagaaactctctcaagagtcatcacgtctcgctaggtac

SEQ ID NO: 27552 - DNA, 345 bp, Glycine max
  Clone ID: TF_LIB3051-117-Q1-K1-G3
cgtgatggcaccaaaggcagagaagaagcctgcctagaggaagccttgggaggagaaaaagtcgccggtggaagacaaggttccggcggagaaaaagccaaaggccggaaagaagcttccgaaggagggaggcgccggcggagaaggtaagacgaagaagagaaacaagaagagcgtggagacatacaagatctacatcttcaaggttctgaagcaggttcaccctgacattggtatctcaagcaaggccatgggaatcatgaacagcttcatcaacgacatcttcgagaagcttgcccaggaatcttctagactttgccgctacaacaagaaacccaccatcac

SEQ ID NO: 27553 - DNA, 1023 bp, Glycine max
  unsure (1)..(1023): unsure at all n locations
  Clone ID: TF_GmC45_6
ccacgcgtccgcggacgcgtgggcggacgcgtgggcgatgaggagttggggaaattgcttgctggtgtcaccattgcacatggtggtgtgcttccaaacattaaccctgttttgttgcctaagaagacggagagggctgccaaggagcctaagtctccatccaaggctactaaatctcctaagaaggcctagattatcctttttttttttttttttttaaatctagtgttgtatatcggtgcttagatgcttttggtgtaacaggaaatttgatgtgtttcttaaacattgtaattcttgtcccattgtgttgcttgtaggagtgagtttgctttattaatgaaaagaaaccgtggaaaccaagagaaaatacaaaaatggtgatgatgaaactcaagacaggaatacatcaagaaaacaagatgctgtgcaaacatcataacatgcacatttatgagaggaaagagagacgggtaaaggtgaagtctcataatgaagaattaacagcaaagaggagatgttcaagaagtcgagagcgtgaggatagaaggtccccttctttttcaccaagggagcaaaaacgtacttatcaagatggagagcgcaaagagttgtcaatgcattccttgaaagatagttctagaactaagaaccctgatattgatagaaatagagtatcaactaatggttcaagtggtcaccatcatcgacatggtgtctccacaagtggacttggtgggtattctccaaggaagaggaaaagtgaagccgctgccaagactccttctccatctaagcattctcttgagaagaaacgtgctggatgggatcttccccctgcagggacaaataatccttctgctgttgtttcttcaagttttccagtatcaaattgtgctgtgttgtctaatatgcatgatgtggtttcaactagttctcttgatctagcccttgtgaagcctctgcctgtgtcttttccaagtgatgtatcaacagggaagaataccannacattgattctgt

SEQ ID NO: 27554 - DNA, 402 bp, Glycine max
  Clone ID: TF_LIB3242-241-Q1-J1-F9
ggtactgcgtttcggaagcacacacagatggctcgcacgaagctaaccgatcgtaagttcacatgatgaaaggctcctaagaagcatcttgcaaccagaagctacacgttaaatctgcaccaactactggtggtgtgaaaaagccccaccgttatcgatctgttaccgtggctcttcgtgagattaggaaataccagaagagtcccgagcttttgatccgcaagctccccttacagaggctggttcgcgaaattactcaggacttcaatactgatctgcgtttacagatccaccccgggcttgcattgctagaagctgctgatgcatacctcgttgggctctttgaggacactcacctgtgtgccattcacgccaagcgtgtaaccattatgcccaatgata

SEQ ID NO: 27555 - DNA, 382 bp, Glycine max
  Clone ID: TF_12489081
ggacgctggcggaaagatcaagaagggcgccggaggtagaaagggcggcggcccaaagaagaagccggtttcaaggtccgtcaaagccggtctccaattccccgtcggaagaattggccgttatttgaagaaaggaaggtacgctcaacgtgtgtgtaccggagctcccggatacttgggtgcagatattgaatacctatctgcccgagtgctttgatttgcgtggaatgccgcacgcgacaacaataagaacaagattattccaaaacacgtgcttttggcagtgaggtaccatgatgaattgcggaaatagcttgctggagtgacaatcgcaccttgtggcgtgctgcgcaacatcaaccctgttgtgtgcctaaaaaga

SEQ ID NO: 27556 - DNA, 313 bp, Glycine max
  Clone ID: TF_jC-gmX3049027C02sg12M8b1
tgctcggctgcgggcagccgacaggaggggagaatatttgattcttttcccctagattcatccacagttccggaggagatgaaaatagccgttcgagatggcccgttcgaagcaaactgctcgcaagtccacaggaggaaaggctcctaggaagcagctcgcaaccaaggctggacgtaagtctgcaccaactaccggtggtgtgaagaatccacatcgttaccgttccggcaccgttgctcttcctgtgattaggaattaccagaagagtaccgtgcctttgatcaggaagctgcccttccagaggctggtt

SEQ ID NO: 27557 - DNA, 409 bp, Glycine max
  Clone ID: TF_19937397
gaagcccatcgacgacaataattccacggtgggagacaacgctcccgcggagaaaaacccaaagggcggaaagaagcttcccaaggacggaggcgcccgcagacaacgcaacaacaaaaacagaaaccccacgatcgtgaaaacatacaaaatctacatctacaacgtactgaatcacgctcaccctgacattggaatctctagcaaggacatgggaatcatgaacagcttcatcaacgacatcttcgagaagcttgcccaggaatcatctagacttgtccgctacaacaagaagcccaccatcacttcaagggaaattcaaaccgcagtcaagcttgtgctgaacggtgaattgtccaatcacgtcgattctgacgctaccaacgcccgataccagctcactagctcc

SEQ ID NO: 27558 - DNA, 401 bp, Glycine max
  unsure (1)..(401): unsure at all n locations
  Clone ID: TF_LIB3170-028-Q1-K1-H7
ggatcctttgtattctattcttcaagattcaggtactgcgtttcggaagcagacacagatggctcgtacgaagcaaaccgctcgtaagtccacaggaggaaaggctcctaggaagcagcttgcaaccaaggctgcacgtaagtctgcaccaactactggtggtgtgaagaagccccaccgttatcgtcctggtaccgttgctcttcgtgagattaggaaataccagaagagtaccgagcttttgatccggaaagctcccctacagagggctgttcgtgaaatngctcangacttaagactgatctgcgtttcagagcacgccgtgcttgcattgcagagctgtgagcataccttgtggctcttgagacatacctgtgtgcatcaccnagcgtgtaccatat

SEQ ID NO: 27559 - DNA, 441 bp, Glycine max
  Clone ID: TF_LIB3242-723-P1-J1-D10
tggatcctctagagcggccgctttttttttttttttttttttttttttttggggcaactgaatgttgtccaatacaattccaaagtgactacatcccgtaggtaaaaactaaaaacagaaacattatgacacacatgtccaaaaatcaattacaagccaattttctaaaaggaagaaaacacagtcacggacacttggcagtatttgcctgtatcacaattaatgggtaataataccgtaaaacacctacactccctaacaaccctatccattgaaaaaaaaaaaggaatctgaacaacaaaaacaccacccgcagcaacccatcttcatcttcatcttcacaaccaccaccttaagcacgctcaccgcgaatccttcttgccagctggatatccttgggcataatggttacccgcttagcgtgaatggcacacaggttag

SEQ ID NO: 27560 - DNA, 872 bp, Glycine max
  Clone ID: TF_GmC1624_3
cggacgcgtgggtttctcagttctctcacacactcattcggtgctccgaatctcagattctagggttagggttcccaatttctccaccgatcagaaaatgagttcaactggtggttctaccaagggcggaaggggcaagcccaaagcctccaaatccgtttcaagatcgcagaaagctggtctccaattccccgttggaagaatcgctcgattccttaaggctgggaaatacgccgagcgtgttggtgctggtgctcctgtgtacctctctgcagtgctcgaatatctcgctgctgaggtttgttttgggtttccgattaggtttagatttgattagtcatcgtgttttttgtcaatctgttttttcttgttttaatttttgttttaagggtctgatttttttttatgttctgattgacctaatttatttttttttcaattgttgatgattgatgtgtttttttttattttttaaggttttggaattggctgggaatgctgctagggataacaagaagaatcgtattgttcctaggcacattcagcttgctgtgaggaacgatgaggaactgagcaagcttttggggtctgttaccattgccaacggaggtgtcttgccgaacattcaccagactctgcttcccaagaaggctggaaaggggaagggcgaaattggatctgcctctcaagagttttagggtttttgttttacccatttggactatagtcctcttttattgcgtttgtaacatacatgtttcggttattttctacatgtcttctctgagaaattaggtgcttctcagtctgatgaactggatggtgtattatcacttttgaatcagatgtgaatgtgaagtgctatttggatt

SEQ ID NO: 27561 - DNA, 744 bp, Glycine max
  Clone ID: TF_GmC1660_4
ccagcgtccggcaccttgcagaatcaattttctctctcaatcgtctttcatggctcgtaccaagcaaaccgctcgcaaatccaccggtgggaaggctcctaggaagcaactcgccaccaaggctgcaagaaaatctgcacctaccaccggtggagtcaagaagcctcatcgctatcgtcctggaactgttgctcttcgtgagatccgaaaataccaaaagagcacagagcttctgatccgcaagctcccctttcagcgtcttgttcgtgaaatcgcgcaagacttcaaggtatgttctaaattcaaaaccaaggttttaaatattggttgcggtcctgttgtggtttcattgagaccgttgatattgcagcaaatcactgacattttttgttgatatcgttgccaatgtgaccgatatgattccagactgatttgaggttccagagtcacgcggttcttgcgcttcaggaagctgcggaggcttacttggtgggtttgtttgaagacaccaacctttgtgcgatccacgccaagagagtgaccatcatgcccaaggacattcaactcgcacgccgcatccgtggagaacgtgcttaggcttataataatgataatagcatagttgtcgccttttcgttttgcaatacatttcttgtttcttagggttttagtgttattttccagtttgttatgttttgtatagaagatagatatatcaacagcaacagcttcttaccaatataa

SEQ ID NO: 27562 - DNA, 1747 bp, Glycine max
  Clone ID: TF_GmC1341_1
ttttacggctgcgagaagacgacagaagggtacggctgcgagaagacgacagaaggggaaccaagtttgcttgcgtgtatattcattttagcatcaaggttgaatctcagagaaaaagaaacatcgacaagcatgtctggaagaggaaagggaggcaagggtctcggaaagggaggagccaaacgacaccgtaaggttctgagggataacattcagggaatcaccaagcccgcgattcgccgtctggccagacgtggtggcgtcaagcgtatcagtggtcttatctatgaagaaactcgcggtgttctcaagatctttctagagaacgtcattcgcgacgctgtcacctacactgaacacgctcgccgcaagaccgtcactgccatggacgttgtttacgccctcaagaggcaggggaggaccctctacggatttggcggttagacaattggggatttcagcactgcgtcctcgattagggtttcttatagtgtcaatttcgatgtttatatcctgcaatagttctttagctgtagcttgaggtttagcaactgctcttgtttcgctttgggttgtagctatgagaacttttaatatggtaatcaagattaacttcaactttttatgatagcggctgccactggtgaaatgattgtatattcattttatcactaccgcagcagccttcttcgccagtttcagcatcaagaggccaccagcaggtaagatatggtaaagcataaaaaagttatccccgaataggaacggcaggaaacctctctccgcagcagccacacttcttcgccgtttcagctgaagagccatccgcaggtaagcaatggttaagcataataatgttatccccaatgggcacttccggaaacactggcaaaactatgtgaagacttggtttaatcaaccagcccgaaagaccagaagacggttggctcggcagaagaaggctgtcaagattttccccaggcctactgctggatctctcaggcctattgttcatggccagactctgaaatacaacatgaaagtcagagccgggagaggattttcactggaagaattgaaggctgcaggaattcccaagaaacttgctccaactattgggatttctgttgatcaccgcagaaagaatcgttctttggagagtctgcaggccaatgtgcagaggctcaaaacctacaaggctaagttggttgtgttcccaagaagggcacacaaggtcaaggctggtgattctagccttgaagagctggcaaatgccactcaagtccagggtccattcttgcccattgtgagggagaagccaactgttgaccttgttaaggtaacagatgaaatgaaggccttcaaagcatactataagcttcgtcttgaacgcaccaacaaacgccaccatggtgcccgcctaaagaaggctgctgaagcagagaaggaggacaagaaataaggtccttgagaagacagtttgtaatccatattatagttgtgagaaatttttgtttgatggtctgcgcccttagctttatggagatcatgagttttaaagcaccacccttacaatttttgtttgaactcaagtctgttaatttaattagcactctggtctgttttgattatttctttgattttgtccttggttgttcaagttgtcttttttaattgttagcatgcacgctttccaggcctcgcggcccggctggctcttggctcttgttgaatgaaagcatttaag

SEQ ID NO: 27563 - DNA, 418 bp, Glycine max
  unsure (1)..(418): unsure at all n locations
  Clone ID: TF_7692361
gcagacacagatggctcgtacgaagcaaaccgctcgtaagtccacaggaggaaaggctcctaggaagcagcttgcaaccaaggctgcacgtaagtctgcaccaactactggtggtgtgaagaagccccaccgttatcgtcctggtaccgttgctcttcgtgaaattaggaaataccagaagagtaccgagcttttgatccagaagctccccttccagaagctgattcgtgaaattactcaagacttcaagactaatctacatttccagagccacgccatacttacattgacaaaanctactaaagcataccttattaaactctttaaaaacactaacctatttaccattcacgccaaacatataaccattatgcccaaaaatattcaactaacaagaagaattcgtagtaagcatact

SEQ ID NO: 27564 - DNA, 846 bp, Glycine max
  unsure (1)..(846): unsure at all n locations
  Clone ID: TF_GmC732_6
gacatctttcactcgttctctgaaattttaattgacttttctcccctcataaaaaaaacctaccaatggctcccgcaaaggcagagaagaagcccgcggagaagaagccggcagagaagaagatatcgaaggaaggaggaagcgagaagaagaagaagagaacaaagaagagcgttgagacctacaagatctacatcttcaaggtgttgaagcaagtgcaccccgacatcgggatctccagcaaggctatggggatcatgaacagtttcataaacgacatcttcgagaagctcgcccaggagtcatcgcgtctcgctaggtacaacaagaagcccaccattacttccagggagatccaaacggcggtgcgtttggtcctccctggggagttggccaagcatgccgtttctgaaggcaccaaggccgtcaccaaattcaccagctcttgattggtttcgtgtgtttatgtcagggttttctgttagcccgatttaattaggggtttcttttcctttttatttctttgagtatgtagatgtaaaattaaagccttttatttttaaataatataattgccgttttgccgcaagcgcaaactctcgctgcttcctcttctgcgccgcagaatcctccattatcgttccttcctccaacctcaacatcatcaacaacacttgtcttgctctgtaactcttttatatatatatatatatataaggtgtgtgtgtgtagaatgatgatatgaaactaggtgtctgaagtatgcataaatcccgatttaagnaatggcgcaaaaataaggtaaaagggatgtgggaataaagagccgcctcgagccgaattccg

SEQ ID NO: 27565 - DNA, 378 bp, Glycine max
  Clone ID: TF_LIB3040-021-Q1-E1-C2-F1A
tttttctctttttacttatatcttttggagaaaaagagcgttctctattcacatcagtgactgaaaacctaacgacatctacagaacaccattatcacaaactgaacaactactaaaacagtgagcatccatagtctctcaattcgatacacttttcacggtaacaaaacccctatttaagagtcatcgtctgcagcagcagccttggatgatccaccagccttcttgggaaggagaagattgtgattgttaggtctgacgccaccgttagcgatggtgacgtcaccgagtagcttgcttactccttcgtcgttcctcagcgccaattgaatgtggctcggcataattcgagtcttcttgttgtctctcgcagcgttt

SEQ ID NO: 27566 - DNA, 403 bp, Glycine max
  Clone ID: TF_9900962
acgtacgaagcaaactgatcgtgagtccacaggaggaaaggcacggaggaagctgctcgcaacgaagggtgcacttaagtctgcaccgtctactggtggtgtgaataagccgcatcgttgtcggcctggttccggtgctctacgttagattgagatataccagagaagtaccgggcggtggatcaggaagctccccttgcagaggctggtgtgggaaattgctcaggactgcaagactgatctgaatgtacatagccatgctgtgcttaggttgcatgaagcgtgtgatgcataccttggaggactcttagaggatactaatgtgtgggccatgcgagcgtagcgtgtgtctgttatgccgatagatatgcacgtggcgagatggattctgggtgagcgtgct

SEQ ID NO: 27567 - DNA, 748 bp, Glycine max
  Clone ID: TF_GmC120_1
tcgacccacctcgagctgcggctgcgagaagacgacagaaggggacaacgcaactattgacaatctctctttattctattcactccctccatttcttcaaactaaatttcctgagaatggcgaaggctgcggagaaaaagcctgcggccgagaaggctccggcggagaaaaagccaaaggcggagaagaaggttccaaaggaaggcagcggcggagagaagaagaagaagaggtcgaagaagagcgtggaaacgtacaagatctacatattcaaggtgctgaagcaggtacatcctgacatcggcatttcgagcaaggccatggggatcatgaacagcttcatcaacgatatattcgagaagcttgcgcaggaagcagcgcgtctcgcgaggtataacaagaagccgaccattacatccagggagatccagaccgctgtcaggttggtgctgcccggggaacttgccaagcacgctgtttcggaaggaaccaaggctgttacaaagttcactagctcttagggttaggggttttttcgtttaggtattttttttgtaaagcttagtcgtagttagtggcttcatttggtattctatatgctaatgaaaatttttatttaaaagtattcgtgcctcctgacttagttgatttgacaagtgaataatgctcgcataacacgaatagcattaggtggcgttcttacgcattaccacgttaacgaatgaattaaaccatcacattctagccc

SEQ ID NO: 27568 - DNA, 665 bp, Glycine max
  unsure (1)..(665): unsure at all n locations
  Clone ID: TF_jC-gmXLIB3563P040dh07a2
tcctctagagcggccgctttttttttttttttttttttttttttttgggttaaataaaaattttcattagcatatagaataccaaatgaagccactaactacgactaagctttacaaaaaaaatacctaaacgaaaaaacccctaaccctaagagctagtgaactttgtaacagccttggttccttccgaaacagcgtgcttggcaagttccccgggcagcaccaacctgacagcggtctggatctccctggatgtaatggtcggcttcttgttatacctcgcgagacgcgctgcttcctgcgcaagcttctcgaatatatcgttgatgaagctgttcatgatccccatggccttgctcgaaatgccgatgtcaggatgtacctgcttcagcaccttgaatatgtagatcttgtacgtttccacgctcttcttcgacctcttcttcttcttctctccgccgctgccttcctttggaaccttcttctccgcctttggctttttctccgccggagccttctcggccgcaggctttttctccgcagccttcgccattctcaggaaatttagtttgaagaaatggagggagtgaatagaataaagagagattgtcaatagtntgcgttgtccccttctgtcgtcttctcgcagccgtacggacgcgtgg

SEQ ID NO: 27569 - DNA, 853 bp, Glycine max
  Clone ID: TF_GmC45_4
cccccttccttaacctcgaatttcggttcaagtctcgctgcttgcaattagtcctcttccaacaatccgcacctaaactctagggttctgacatggacactggtggaaagatcaagaagggcgccggagaagaaagggcggcggcccaaagaagaagccggtttcaaggtccgtcaaggccggtctccaattccccgtcggaagaattggccgttatttgaagaaaggaaggtacgcccagcgtgtcggtaccggtgctcccgtttacttggccgcagttctcgagtacctagctgctgaggtaacatatcactaatttgcatcacttaatcttgattgactatgattaattatgtgttgtgaaattgaattgtcttgattggattgtgaaggtgcttgagttggctgggaatgctgcacgtgacaacaagaagaacaggattattccgagacatgtgctattggctgtgaggaacgatgaggagttggggaaattgcttgctggtgtcaccattgctcatggtggtgttcttccgaacattaaccctgttttgttgcctaagaagactgagagggcttccaaggagcctaagtctccatccaaggctactaaatctcctaaaaagtcttaactgacttagtttattgtttctctatttagtgtgcacaaaatgtaaatctgtgtttaggttccttcttgtatcaccattatttgtagttctcaagtcgctgtttctttttcacattttcattcaatctgttgagacagcaagctctcagtaatggattgatttaattttcttatattcgtataattgtatcccgccttctctctatcgaaagattgcgcaat

SEQ ID NO: 27570 - DNA, 348 bp, Glycine max
  Clone ID: TF_LIB3108-040-QI-K1-C8
ctgacgcgtgggctcttttgctttaccaaattccaatttccaattcgggaccctagggccgttcgaatcaccaaatcgtgatggcaccaaaggcatagaagaagccagcagagaagaagcccgcggaggagaagaaatcgacggtggtagacaaggctccgtcggagaagaagccaatggccggaaagaagcttgcgaaagaggtaggctccggctgataagggaagaagaagaagagaaacaagaagagcgtggagacatacaagatctacatcttcaagggtctgaagcatgttcaccctgacattggtatctcaagcaaggccatgggaatcatgaacagcttca

SEQ ID NO: 27571 - DNA, 278 bp, Glycine max
  Clone ID: TF_701064730H1
ttcaggtactgctttcggatgcagatacagatcgctcgtacgattcaaaccgctcgtaagtcgacaggaggtaaggcttctaggaacgaagttgcaaccaaggctgcacgtaagtctgacccaactactggtggtgtgaagaagccccaccgttagcgttctggtaccgttgatcttcgtgagattatgaaattccagaagagtaccgagcttttgatccggaagctccccttccagaggctggttcgtgaaattgctcaggacttcaagactgatct

SEQ ID NO: 27572 - DNA, 412 bp, Glycine max
  Clone ID: TF_15201339
gagtccggccatcgcagagacaaagccggtgtgagaagaatccttcggcgtgaaaagaaccttatcgagaagacatcgaaggctcgacaagaagatctcgaaggaatgagggatcgagatgattaagaagcgcacgaataagagcgtggagacctacttgatctacatcttcaaggtcctcgaggaggatcaccccgacattggtatttccatggacgccatgggcatcatgaacagcttcctcaacgacatcttccataagctcgtccataaagcgtctcgtttggctcgctactacaagatatccaccatcgcctcgatggatatcctgaccgccgtgcctctcctgctccctggtgatgtgtctcaacacgctctttctgaagggaccaaggcggataccgatattacc

SEQ ID NO: 27573 - DNA, 379 bp, Glycine max
  Clone ID: TF_9902832
ggctccggcgaaggcagagaaaaagccggcggagaaaaagccatcggcggagaaggcaccggcggagaaaaaacccaatgcggagaagaagatctctaacgaaggagggagcgagaagaataaaaagcgcacgaagaagagcgtggagacctacaagatctacatcttcaaggtcctcaagcaggttcaccccgacattggtatttccagcaaggccatgggcattatgaacagcttcattaacgacatcttctagaagctcgcccagcaagcgtcgcgtttggcttcgtactactaaaagactagcatcactctttaggagatactgaccaccgtgcttgtattgctatgtggtgaattagtcaaacgcgcagtgtct

SEQ ID NO: 27574 - DNA, 419 bp, Glycine max
  Clone ID: TF_LIB3051-027-Q1-K1-D2
cctagattcagccacagtttcggaggatatagaatatagtcgttcgagatggcccgtacgaagcagactgctcgtaagtccacaggaggaaaggctcctaggaagcagcttgcaaccaaggctgcacgtaagtctgcaccaactactggtggtgtgaagaagccacatcgttaccgtcctggtaccgttgctcttcgtgagattaggaaataccagaagagtaccgagcttttgatcaggaagctccccttccagaggctggttcgtgaaattgctcaggacttcaagactgatctgcgtttccagagccacgccgtgcttgcattgcaagaagctgctgaggcataccttgttgggctctttgaagacactaacctgtgtgccattcacgctaaacgggtaaccattatgcccaagga

SEQ ID NO: 27575 - DNA, 442 bp, Glycine max
  unsure (1)..(442): unsure at all n locations
  Clone ID: TF_22541444
ggcaccaaaggcagagaagaacccagcggataagaagcccgcggaggagaagaagtccacggtgggagacaatgctccggcgganaaaaagccaaaggcctgaaagaaacttccgaatgatggatgcgccggcggataatggaagaagaagaagaaaaacaagaaaagcgtggagacatacaaaatctacatcttcaaggttctaaancangtcaaccctgacattgatatctcaagcaaggccatgggaatcataaacagcttcatcaacgacatcttcgagaagcttagcccaaaatcttctatacttgcccattacaacaataaacccaccatcacttcgaagaaaattcagaccactatcatgcttatgctacccaataaattaaccaancacaccatctctaaaggtaccaaagctatcaccaaattcactanctct

SEQ ID NO: 27576 - DNA, 1042 bp, Glycine max
  Clone ID: TF_GmC110_3
tctattctttgaaaccaaagttcaaactctgtcttccctgggttctatttcgaaatcaacgacgatgagttccacagaggcagcagccacagagaagaaaggtggaagagggaaaccgaagacttcaaagtccgtttcccgttcctccaaagctggccttcagtttcccgtcggccgtgtcgctcgctacctcaaggccggtcgctacgcccagcgcgttggctccggttcccctgtttatctctccgcggttctcgaatacctcgctgccgaggttcgtcattttcttcctttaattttcgatttgtcttttttgtgtattgtgaccttaatgtgttttggggctttaggttttggagcttgcggggaacgctgcgagggacaacaagaagacgaggatcgttccgaggcacattcaactggcggttaggaacgacgaggagttgagcaagctgatgggatctgtgaccattgccaacggtggtgttctgcctaacattcaccagaatttgttgcccaagaaggtcgctggcaaggggaagaccgagattggatctgctagtcaggagttttagatttaaggctcttgttttcgtatgtagttggttgccttatatagtaagattaggattgacattggatgatgtatagtcctttaacatttgaaaataattagttgttttctaacatggttcctgcatagttttcatttatttgagtttctcgtgaatcgagatatctattctctttttatttgtgtgtttgggcataattttagtgtggtgtttatgttgaaaaaaaaaaaaaaaaaaaaaaaaaaaaaaaaaaaaaaaaaaagaaaagaaaaaaaataaaagaaaaaaaaaacccgaaaaaaaaaaacaaaccaaaaccggggggggcccccacttaggggattctgaaccccggaaataaattccggcccggaccttgaaggcttcccacttttccttatggggagccgtttaaaatctggcccaacatagggccatgatggtttcctggggaaaattgttttccc

SEQ ID NO: 27577 - DNA, 294 bp, Glycine max
  Clone ID: TF_LIB3242-090-Q1-J1-H4
aagaatcaagaatcagcaagtgcgttttggaagcagagaccgaaatacttcgggggggcccttacaaaggagagggggggcaagacaactggaggaaaagctcccaggaagcagcttgcaaccaaggctgcacgcaagtctgcaccaacaactggtggggagaagaaacctcaaacgaatcgccctggaacagatgcactaagggagacaaggaaacaccagaagagcactgaactcctaaataggaggctaacttgccagagggaggcccgtgaaaccgcccaaaaatacaag

SEQ ID NO: 27578 - DNA, 314 bp, Glycine max
  Clone ID: TF_LIB3108-025-Q1-K1-A5
agataattacagagtactatcctcatggtagtaggggtccggttgtggctctccgtctggctcccagacacgctgtgctgttgcctgaccttattactcacgttgacgaatatgcaccaccggtgataaatccgaaggctgctaataagatctctaatgaaggagggagcgagaataataaaaagcgcacgaagaagagcgtggagacctacaatatctacattttttaggtcctcaagcatgttcaccccgacatttgtgttttcagtctggccgtggtctttattaacagcttcatcaacgacattttttag

SEQ ID NO: 27579 - DNA, 811 bp, Glycine max
  Clone ID: TF_GmC1660_1
aagtcccggcgcgaaccactcgtccgtacggctgcgagaagacgacagaaggggagatcgcacaacattattctttcgcaccttgcagaatcaattttctctctcaatcgtctttcatggctcgtaccaagcaaaccgctcgcaaatccaccggtgggaaggctcctaggaagcaactcgccaccaaggctgcaagaaaatctgcacctaccaccggtggagtcaagaagcctcatcgctatcgtcctggaactgttgctcttcgtgagatccgaaaataccaaaagagcacagagcttctgatccgcaagctcccctttcagcgtcttgttcgtgaaatcgcgcaagacttcaagactgatttgaggttccagagtcacgcggttcttgcgcttcaggaagctgcggaggcttacttggtgggtttgtttgaagacaccaacctttgtgcgatccacgccaagagagtgaccatcatgcccaaggacattcaactcgcacgccgcatccgtggagaacgtgcttaggcttataataatgataatagcatagttgtcgccttttcgttttgcaatacatttcttgtttcttagggttttagtgttattttccagtttgttatgttttgtatagaagatagatatatcaacagcaacagcttcttaccatttgtagtgtgcctaaacggaaatatttgaataattagattcactttggccaaatcaaaaaaataaaaaaataaaattaactttgccgattttgacgaaaaaaaaaaaaaaaaaaaaaaaaaaaaaaaaaaaaaaaagcccct

SEQ ID NO: 27580 - DNA, 762 bp, Glycine max
  Clone ID: TF_GmC1660_2
tcgtctcgcgtccgtacggctgcgagaagacgacagaaggggacatcgcacatcaattattctttcgcaccttcgaaaatcaattttctgtcttctctgcgtcttcttcctctatcaatcgttttccatggctcgtaccaagcaaaccgctcgcaaatccaccggtggaaaggctcctaggaagcaactcgccaccaaggctgcaaggaaatctgcaccgacaaccggtggagtcaagaagcctcatcgctatcgccctggaactgttgctcttcgtgagatccgaaaataccaaaagagcacagagcttctgatccgcaagctccccttccagcgtcttgttcgtgaaattgcgcaagacttcaagaccgatttgaggttccagagtcacgctgttcttgcgcttcaggaagctgcggaggcttacttggtgggtttgtttgaggacaccaacttgtgtgcgattcacgccaagagggtgaccatcatgccaaaggacattcaactcgcacgccgcatccgtggagaacgtgcttaggctaataataagagtaataacgtagttgctgctgctttttttcgttttgcaatacatttcttgttttagggttatttttagtgttatgttccggtttgtctgttatgggatgtatagaagatagatatatcaatcaacaacttagcatttgtaatgatcctaaactgaaatatttgaataattagattcactttgggtaaaaaaaaaaaaaaaaagggccccta

SEQ ID NO: 27581 - DNA, 1120 bp, Glycine max
  unsure (1)..(1120): unsure at all n locations
  Clone ID: TF_GmC40_13
gttgcgcccgaagcattaggccgagggcacgcctgcctgggtgtcacacgaacctttgcattctattcattcaagattcagcaagtgcgttttggaagcagagaccgaaatacttcgagatggcccgtacaaagcaaactgctcgtaagtcaactggaggaaaagctcccaggaagcagcttgcaaccaaggctgcacgtaagtctgcaccaacaaccggtggtgtgaagaagcctcatcgttatcgccctggaactgttgctcttcgtgagattaggaaataccagaagagcactgagctcctaatcaggaagcttcctttccagaggttggttcgtgaaattgcccaggatttcaagactgatctgcgtttccagagccatgctgtgcttgcattgcaagaggctgctgaggcataccttgttgggctctttgaggacactaacttgtgtgccattcacgccaagcgtgtgactattatgcccaaggatattcagctggcaagaaggattcgtggtgagcgtgcttgagttggtgcgttctgtgtttgtgaagatggattgttggtggctgcggatggtgttttgttactaagttttctttttgttgaagcctataggttattagggaaaaataggtgtttacttggtagtcatattaattgtcattggcaaatactgcctaagacactgtgaaggtctggttgttagaaatttggcatgtatttgatttttttggatcctttatttctcgttttatttctggttgtgcagccactttgggaattgtattggacaactttctgttgccatctaatctagttgaagctagcttatcgtgtcaaaaaaaaaaaaaaaaaaaaaaaaaaaaaaaaaaaaaaaaaaaaaaaaaaaaaaaaaaaaaaaaaaaaaaaaaaaaaaaaaaaaaaaaaaaaaaaaaaaaaaaaaaaaaanaggggggggcccttttaagggaccaaagtttacttcccggggcttggaaggtaaaagttttttttaggggcccccaaaataaaataccggggccgcggtttaaaaagggggggagggggaaaacccgggggtacccaaattaaatggctttgaaaaaaatccccttt

SEQ ID NO: 27582 - DNA, 993 bp, Glycine max
  Clone ID: TF_GmC40_20
tgtgcggcgctcaggcggcggtcgggaaatttttgattcttttcccctagattcagccacagtttcggaggagaagaaaatagtcgttcgagatggcccgtacgaagcaaactgctcgtaagtccacaggaggaaaggctcctaggaagcagcttgcaaccaaggctgcacgtaagtctgcaccaactactggtggtgtgaagaagccacatcgttaccgtcctggtaccgttgctcttcgtgagattaggaaataccagaagagtaccgagcttttgatcaggaagctccccttccagaggctggttcgtgaaattgctcaggacttcaagactgatctgcgtttccagagccacgccgtgcttgcattgcaagaagctgctgaggcataccttgttgggctctttgaggacactaacctgtgtgccattcacgctaagcgggtaaccattatgcccaaggatatccagctggcaagaaggattcgcggtgaacgtgcttgaggtggtggttgtgaagatgaagatgaagatgggttgctgcgggtggtgtttttgttgttcagattcctttttttttttcaatggatagggttgttagggagtgtaggtgttttacggtattattacccattaattgtgatacaggcaaatactgccaagtgtccgtgactgtgttttcttccttttagaaaattggcttgtaattgatttttggacatgtgtgtcataatgtttctgtttttagtttttacctacgggatgtagtcactttggaattgtattggacaacattcagttgccatctaatctcgtttaagctaagtttgttgtgctaattaaactgacctcccttcttggttttgaaatgagaggatttgaaaatatagtattgacagaactggcagaaaatctactcaatttgctcataaatacttaattacccatgttggttttggcttcaaattttgttgaatttcatctcacttgtgtt

SEQ ID NO: 27583 - DNA, 982 bp, Glycine max
  Clone ID: TF_GmC40_23
caccctacggctgcgagaagactacagaagggggatcctttgttttctattcttcaagattcagggactgcgtttcggaagcagacacagatggctcgtacgaagcaaaccgctcgtaagtccacaggaggaaaggctcctaggaagcagcttgcaaccaaggctgcacgtaagtctgcaccaactactggtggtgtgaagaagccccaccgttatcgtcctggtaccgttgctcttcgtgagattaggaaataccagaagagtaccgagcttttgatccggaagctccccttccagaggctggttcgtgaaattgctcaggacttcaagactgatctgcgtttccagagccacgccgtgcttgcattgcaagaagctgctgaggcataccttgttgggctctttgaggacactaacctgtgtgccattcacgccaagcgtgtaaccattatgcccaaggatattcagctggcaagaaggattcgtggtgagcgtgcttgagttggtggttggaaagatgaagatgattggtggctgcggttggtgtttttgtttttcagattcctttttttattcaatagatggggttgttagggagggtaggttttctgctggtagtagcattaattgggatataggcaaatactgctaagtgtccgtgactgtgttttcttcctttaagaaaattggcttgtaattgatttttggacatatgtatgtgttagaatgcttctgttttagtttttacctgcgggatgttgcagccactttagaaactgtattggacaacattcagttgccatctaatctcgtttaagttagtttgttggcttgcctcgttcttactcgggatttccatcccagtttggttactgggtttcttatttattgttcactgtacattatttatggattacctccataaaagaaaagagcgttaatcaaagctgtcagatttaaaagttaatataatttttagttt

SEQ ID NO: 27584 - DNA, 1075 bp, Glycine max
  Clone ID: TF_GmC40_26
ctgtgcggcgctcaggcggcgggtccactttgattctattcttcagatttgcaagtgcgttttggaagcagagaccgaaatacttcgagatggcccgtacaaagcaaactgctcgtaagtcaactggaggaaaagctcccaggaagcagcttgcaaccaaggctgcacgtaagtctgcaccaacaactggtggtgtgaagaagcctcatcgttatcgccctggaactgttgctcttcgtgagattaggaaataccagaagagcactgagctcctaatcaggaagcttcctttccagaggttggttcgtgaaattgcccaggatttcaagactgatctgcgtttccagagccatgctgtgcttgcattgcaagaggctgctgaggcataccttgttgggctctttgaggacactaacttgtgtgccattcacgccaagcgtgtgactattatgcccaaggatattcagctggcaagaaggattcgtggtgagcgtgcttgagttggtgcgttctgtgtttgtgaagatggattgttggtggctgcggatggtgttttgttactaagttttctttttgttgaagcctataggttattagggaaaaataggtgtttacttggtagtcatattaattgtcattggcaaatactgcctaagacactgtgaaggtctggttgttagaaatttggcatgtatttgatttttttggatcctttatttctcgttttatttctggttgtgcagccactttgggaattgtattggacaactttctgttgccatctaatctagttgaagctagcttatcgtgtctgtttgttctgattttgaatttccatccttaatgttatttctcgcatatttggccgaattgcgcaacccgtccagcgtaatttggtttataacacaagacgaatttaacgtttcgttagatgaaacaatcataagtaatacttgtaatcccctttttactattatgtcttgccaactaacttgtaatgtttgaatttgaaagtgttgtaaattggaaatgatgttggggtttctttcttataaatttagttgatcttttaagt

SEQ ID NO: 27585 - DNA, 557 bp, Glycine max
  Clone ID: TF_uC-gmrominsoy113e12b1
cccacgcgtccgtgcgtttcggaagcagagaccgaaatacttcgagatggcccgtacaaagcaaactgctcgtaagtcaactggaggaaaagctcccaggaagcagcttgcaaccaaggctgcacgtaagtctgctccaacaactggtggtgtgaagaagcctcatcgttatcgccctggaactgttgctcttcgtgagattaggaaataccagaagagcactgagctcctaatcaggaagcttcctttccagaggttggttcgtgaaattgcccaggatttcaagactgatctgcgtttccagagccatgctgtgcttgcattgcaagaggctgctgaggcataccttgttgggctctttgaggacactaacttgtgtgccattcacgccaagcgtgtgactattatgcccaaggatattcagctggcaagacggattcgtggtgagcgtgcttgagttggtgcgctctgtgttgtgaagatggattgctggtggctgcggatggggtttgctactaagtttttttttggtgaagccataggtattaaggaaaata

SEQ ID NO: 27586 - DNA, 367 bp, Glycine max
  Clone ID: TF_LIB4391-050-R1-K1-H12
aagatatttagaagaccaattggctcgtaccaagcatatcgctctaccgaccgcaggaggaagggctgctatgaagcagcttgcaaccaaggctgcacgtaagcttgcaccatctactggcggcgagacgaagccccaccgatatcattctggtaccgatgctcctcgtgagattaggaattaccagaggagcacctagcttctgatgcggaagctgcccttccagaggctggatcgtgaaacacgctcaggacttgaagactgatctgcgtgtccagagccacgccgcgcttgcattgcaggagggtgctggtgcataggttgctgggcaatttgaggactctatcctgagtgctattcacgccaa

SEQ ID NO: 27587 - DNA, 322 bp, Glycine max
  Clone ID: TF_7146544
ggactctggcggaaagatcaagaagggcgccggaggaagaaagggcggcggccctaagaagaagcctgtttcaaagtccgtccatgccgggctccaattccccgtctgaagaattggtcgttatctgaagaaaagaaggtactcccagcgtgtcggtaccggggctcccgtttactgggccgcaattctcgagtacctagctgctgaagtgcttgagtaggctgggaatgctgcacgtgacaacgaagaaaacaggattatttcgagacatgtgctattggctgtgaggaactatgaggagttgggaaattgcttgctgggt

SEQ ID NO: 27588 - DNA, 612 bp, Glycine max
  Clone ID: TF_GmC128_1
tacggctgcgagaagacgacagaaggggatatcaccctttttgtttctctctttgtcattgaaactttttcacccccttgataccgcttcaattcaccaatggcaagtcgaggaaaaacccagggatctggcacaaccaaaaagggcatctcccgaagcaacaaagctggtctccaattcccagttggtcgtattgctcgatacctcaagattggcaagtatgctgaccgtatcggttctggcgctcccgtgtatctcgcctctgttcttgaatatcttgctgctgaggttttggagttagcggggaatgccgcaatggacaacaagaagactcgtattatgcctcgccatatccaattggctgttaggaatgatgaagagttgagcaggcttctcggagatgtgactatcgccagtggtggtgtgacacctaacattcacaacatgttgctgcctaagaaggttgggacctcgacctcaacctttatgggtcctagtgccgatgatgacgacgcttaaatgttttcccccaaaagtttgacccatgtttcccttctgtaaaatgggtcctttattgaataatactaaatgtcaagattgacataatataat

SEQ ID NO: 27589 - DNA, 347 bp, Glycine max
  Clone ID: TF_GmC156942_1
cccaattctttctttttaaagaccaaccaaaaacacatcaaacaatggcgcccaagaccgcagacacgaagcagaccgcctccaaggcccccgccaaggccccggcctcgaaggccccggccaaggcccccgcgaagaagccggccagcggcgacaagaagaagtccaagaagcgtgtcgagtcttacacctcgtacatcttcaaggtcctgaagcaggtgcacccggacactggtgtctcgaacaaggccatgtcgatcatgaactcgttcgtgaacgacatctttgagcgtgtcgccgacgaggcgtcgcgcctggccgcgtacaacaagagatccacgatctcc

SEQ ID NO: 27590 - DNA, 512 bp, Glycine max
  Clone ID: TF_GmC732_13
ttttacctttaatgaatttccaataaaaacctgatttccgattcaatttcatagcactcaccctcattaccaacacgaaagcatagccaaaaccttttttcgaagtctctgattttcctaatggctccggcaaaggcagagaagaagccggcggagaagaagccagcggcggagaaggcaccggcggagaagaagccgaaggcggagaagaagatctcgaaggaaggagggagcgagaagaagaagaagcgcacgaagaagagcgtggagacctacaagatctacatcttcaaggtcctcaagcaggttcaccccgacattggtatttccagcaaggccatgggcatcatgaacagggtcatcttggtcctctttggggagctcgcccagcacgccgtgcgcttggcccgctacccctagaagcattcgatcatcttgattggtctcgtgtgtgtctgtcaaggtattctgtcaaccctatttgattggggtttctccaccttcagattacg

SEQ ID NO: 27591 - DNA, 936 bp, Glycine max
  Clone ID: TF_GmC1624_1
cagtttctcagttctcacactcattccgtgctctaaatctcaaattctagggttagggttcccaatttctccgccaatcagaagatgagttccaccggtggttctaccaagggcggaaggggcaagcccaaagcctccaaatccgtggtctgcgcctgatttctcagttctctcacacactcattcggtgctccgaatctcagattctagggttagggttcccaatttctccaccgatcagaaaatgagttcaactggtggttctaccaagggcggaaggggcaagcccaaagcctccaaatccgtttcaagatcgcagaaagctggtctccaattccccgttggaagaatcgctcgattccttaaggctgggaaatacgccgagcgtgttggtgctggtgctcctgtgtacctctctgcagtgctcgaatatctcgctgctgaggttttggaattggctgggaatgctgctagggataacaagaagaatcgtattgttcctaggcacattcagcttgctgtgaggaacgatgaggaactgagcaagcttttggggtctgttaccattgccaacggaggtgtcttgccgaacattcaccagactctgcttcccaagaaggctggaaaggggaagggcgaaattggatctgcctctcaagagttttagggtttttgttttacccatttggactatagttttgattttattgcgtttgtaacatacatgtttcggttattttctacatgtcttctctgagaaattaggtgcttctcagtctgatgaactggatggtgtattatcacttttgaatcagatgtgaatgtgaagtgctatttggattatctgtcgaattaatttattttataacgatagtgtttcataagctggcgcacattgctttttcaactttgaacagtcaattgttttaaaaaaaa

SEQ ID NO: 27592 - DNA, 782 bp, Glycine max
  Clone ID: TF_GmC1624_2
ccggaattcccggccgggcatctgcgcctgatttctcagttctcacactcattccgtgctctaaatctcaaattctagggttagggttcccaatttctccgccaatcagaagatgagttccaccggtggttctaccaagggcggaaggggcaagcccaaagcctccaaatccgtttcaagatcgcagaaagctggtctccaattccccgttggaagaatcgctcgattccttaaggctgggaaatacgctgagcgtgttggtgctggtgctcctgtgtacctctctgcagtgctcgagtatctcgctgctgaggttttggaattggctgggaatgctgctagggataacaagaagaatcgtattgttcctaggcacattcagcttgctgtgaggaacgatgaggagctgagcaagcttttgggatctgttaccattgccaatggaggtgtcttgccgaatattcatcagactctgcttcccaagaaggttggcaaggggaagggcgaaattggatcagcttctcaagagttttagggtttttgttaggcctatttggactatagtttttattttattgcggttgtaatatacatgttttggttaatttttagatatctgctctgaggaattaagtgtttctcagtcttttgaactggatggtgtaatctcacttttgaatcggatgcgaatatgaagtggtatttggattatttttaatgggttgtgaatgaaaataacgttacctgttgagatcgtaaaaaaaacaaaaaagggcgaccgc

SEQ ID NO: 27593 - DNA, 458 bp, Glycine max
  unsure (1)..(458): unsure at all n locations
  Clone ID: TF_LIB5068-020-A1-XP1-B7
ccggcgacccagcaaagcgcaaagcaccccccaccacgacccgcccccccagaagcccccagaaaaccccagacggcgcgcacaaagcaaacagcccgcaagccgaccggcggcaaggccccccggaagcagccggcgacaaaggccgcccgcaagccagccccggcgaccggcggagcgaagaagccacacaggcccaggccaggaaccgcggccccgagggagaccaggaaccaccagaagagcacggagcgcccgacccgaaagcccccgacccagcgnaaggaccgcgaaaccgcccaggaccccaaaacggaccagaggccccagagcagcgccgaaacggcgccccaggaagccgcagaggcccaccccggaggacaccccgaagacaccaacccaagcgccacacacgccaacacgggcaccaaaaggcccaaggaccaacaacccgccac

SEQ ID NO: 27594 - DNA, 506 bp, Glycine max
  unsure (1)..(506): unsure at all n locations
  Clone ID: TF_LIB4202-010-Q1-K2-B3
agcagacacatatgggggcggggggggggggccaataataantcccagggggaaagggtcctangaagcagcttgcaaccaagggtgcacgtaagtctgcaccaactactgggggggtgaagaagccccaccgttatcgtcctggtaccgttgctcttcgtgggagggggggaggccanaanagtacccagcttttnatccggaagctccccttccagagggggggtcgtgaaattgctcaggacttcaagactgagctgcgtttccagagccacgccgtgcttgcattgcaagaagctgctgaggcataccttgttgggctctttgagggactaacctgtgtgccattcacgccaagcgtgtaaccattatgcccaaggatattcagctgggaagaaggagtcctggggagcgtgcttnagttggtgggtggaaagatgaanatgattggggcctgcgggtggtgtttttggttttcagattcctttttttattcaatagatggg

SEQ ID NO: 27595 - DNA, 983 bp, Glycine max
  Clone ID: TF_GmC1660_3
gatcgcacaacattattctttcgcaccttgcagaatcaattttctctctcaatcgtctttcatggctcgtaccaagcaaaccgctcgcaaatccaccggtgggaaggctcctaggaagcaactcgccaccaaggctgcaagaaaatctgcacctaccaccggtggagtcaagaagcctcatcgctatcgtcctggaactgttgctcttcggtaatttgctcctttcagtaattgttttgttttttcttctccttcgcgttttgaattttcgcgaattattgttttttttttcgtggtttcagtgagatccgaaaataccaaaagagcacagagcttctgatccgcaagctcccctttcagcgtcttgttcgtgaaatcgcgcaagacttcaaggtatgttctaaattcaaaaccaaggttttaaatattggttgcggtcctgttgtggtttcattgagaccgttgatattgcagcaaatcactgacattttttgttgatatcgttgccaatgtgaccgatatgattccaggtcgtgaacagttaaaaccatgttcaaaaccctagtttttgacccatacctttttttaattattataattaagtttttgtcttttgtgcagactgatttgaggttccagagtcacgcggttcttgcgcttcaggaagctgcggaggcttacttggtgggtttgtttgaagacaccaacctttgtgcgatccacgccaagagagtgaccatcatgcccaaggacattcaactcgcacgccgcatccgtggagaacgtgcttaggcttataataatgataatagcatagttgtcgccttttcgttttgcaatacatttcttgtttcttagggttttagtgttattttccagtttgttatgttttgtatagaagatagatatatcaacagcaacagcttcttaccatttgtagtgtgcctaaacggaaatatttgaataattagattcactttgac

SEQ ID NO: 27596 - DNA, 385 bp, Glycine max
  Clone ID: TF_uC-gmflLIB3260P099c12b1
cccacgcgttcgtttacgcgtccggccgcagaggcttatctcgttggactcttcgaggacaccaacctctgcgctattcacgccaagagagtcaccattatgcccaaggatattcaactcgctcgcagaatcagaggcgagagagcttaaaattaggtttcattgtgtgatctagaattaaaattaggttactgcttattgtaattcgtatttttcagtcgcctttttgttgtaatattcatcttatttcgaagtatatgctcatatggatctgtacacttgagggtcagtgatattcgatttaatctgtctagtccataatcatgtaagtctcctgatttgtatatgcaaaaattacccacgtgcacaagctcaaaaaataaaa

SEQ ID NO: 27597 - DNA, 458 bp, Glycine max
  Clone ID: TF_GmC745551_1
ggcaagattcagcaagtgcgtttcggaagcagagaccgaaatacttcgagatggcccgtacaaagcaaactgctcgtaagtcaactggaggaaaagctcccaggaagcagcttgcaaccaaggctgcacgtaagtctgctccaacaactggtggtgtgaagaagcctcatcgttatcgccctggaactgttgctcttcgtgagattaggaaataccagaagagcactgagctcctaatcaggaagcttcctttccagaggttggttcgtgaaattgccccggatttcaagactgatctgcgtttccagagccatgctgtgcttgcattgcaggaggctgctgaggcataccttgttgggctctttgagggcactatctggtgtgccattcacgccgagcgtgtgactgttatgcccaaggatatgcaactggcaagaaggattcgttgtgagcaggct

SEQ ID NO: 27598 - DNA, 445 bp, Glycine max
  unsure (1)..(445): unsure at all n locations
  Clone ID: TF_LIB4165-005-Q1-K1-G1
gggacccacgcgtccgtcactctcgctcttgcagttattcctcttctcgcagtccgcgctaaaattctaggggtcccaaatgggcgctgacggggagagcaagaagggggcccgcggaagagaggggggggggccaaanaagaagccgggttcaaggggcgtgaaagccgggctccaattccccgtgnggagagattggcgtgatttgaggagaagggggggcgctcagcgtgtgngggccggtgctcccgtatacttggctgcgggtctcgagtacctagctgccgaggtgcttnagtgtggtgggaatgcggcacgtgacaacaagaagaacaggagtattccaagagacgtgcttttnggantgaggagctatgaggagttnnggaaattggttncgtgggtgacaattgcgcatggtggggtgcttccaaacattaaccct

SEQ ID NO: 27599 - DNA, 250 bp, Glycine max
  Clone ID: TF_700754394H1
cacagttggaaaaaaaaaaaaaagttgttcaagttggcccttacaaagcaaactggtcgtaattccacaggaggaaaggcacctaggaagcttttcgcaaccagggttgcccttaagtctgcaccactactggtggtgtgaaaaagccaaatcgttatcgtcctggtaccgttgctcttcgtgagtttaggaaatcccagaaggttaccgagcttttaatcaggaagctccccttccagaggctggttcg

SEQ ID NO: 27600 - DNA, 541 bp, Glycine max
  Clone ID: TF_LIB4204-012-R1-N1-H3
gaaccaagagacgataagtactaaacaatactggcgttcctatataaacaatgcatcttgccacttcaatacacaaaaggaccaacccaacaccattcgttcaatcacaaaccctatcaaacaaaacaaagcctactactgaaaaaaaattcaatgggtgacaaaaaagagacttagaaacgcaataaaatagctaatacacgagctaatgaccttggcgacagccttggaaccctgagaaacggtgggctcggtcaaaaaaccgggcattacaaacctgaccggggactgaattcccctccaagggatgaagggtcctttgatggagcgggcaattctagaagattcctgcacaagcttaacaaacatggccaagctgaagctagacatgattcccaaagccttgcttgagataccaatgccagggtgaaactgcttcagaaccttgaacatgcataacaagcttgaatacacacacttcgtgtgtctctactttttcttaccttctccgccggcgcctaccttcttcggaagcttcttt

SEQ ID NO: 27601 - DNA, 998 bp, Glycine max
  Clone ID: TF_GmC394_1
tacggctgcgagaagacgacagaaggggggaggcaaaccgcttcattttgaaaatcccgggtcgacccacgcgtccgcccacgcgtccgtacacgcgtccgtacggctgcgagaagggcacaaagcgggaccgaaaaccaaatccgaagagtgaaggttcgttgaatcccatggcgagagtgaagcacacgccagcttctcgcaaatccgctaaaaagcaagcgccacgcgcatccacttccacgcagccgccaccacaatcccaatcgcctgcaactagagagaggaggagagctcaacaagtggagccgcagcaggagcctgaggctcagggaaggaagaagaggcgcaataggtcgggaactgtggcgcttcgtgagattcggcattttcagaggagttgtgagcttctcatcccggctgctccctttatcagatgtgtcaaacagattacaaatcaattctctacggaggtgtctcgttggacacctgaagctgtggtagcacttcaggaggcagctgaggaatatctggttcacttatttgaagatggaatgctctgtgcaattcatgcaaggcgtattactcttatgaaaaaggacattgagttggcccggaggcttggaggaataggaaggccttggtgagtggacgatactagtagaagaccattggttcttttgtttgtaaaagttcacacagtagggggatttcaatgaagggaggcattggtgcttctgtactccgcactctaattgcagtgattatttgatattaaatgttaggaactagacactaactaatgtatgccaatggttatatctctgtaggtgaaacaaccattatagaatggttgctactataactttaaattgatgagtgaggtaatagtgtaacattgtagcaatgaagtattctaagattattgtcattcatgttgattttctgtgcccaaaaaaaaaaaaaaaaaaaaaaaaagaggaggccgctctagagga

SEQ ID NO: 27602 - DNA, 547 bp, Glycine max
  Clone ID: TF_uC-gmroLIB3259P159d11a1
agctagcttcaactagattagatggcaacagaaagttgtccaatacaattcccaaagtggctgcacaaccagaaataaaacgagaaataaaggatccaaaaaaatcaaatacatgccaaatttctaacaaccagaccttcacagtgtcttaggcagtatttgccaatgacaattaatatgactaccaagtaaacacctatttttccctaataacctataggctctaacaaaaagaaacaccatccgcagccacaacacagacggcaccaactcaagcacgctcaccacgaatccttcttgccagctgaatatccttgggcataatagtcacacgcttggcgtgaatggcacacaagttagtgtcctcaaagagcccaacaaggtatgcctcagcagcctcttgcaatgcaagcacagcatggctctggaaacgcagatcagtcttgaaatcctgggcaatttcacgaaccaacctctggaaaggaagcttcctgattaggagctcagtgctcttttggtatttcctaaatctcacgaagagcaacag

SEQ ID NO: 27603 - DNA, 537 bp, Glycine max
  Clone ID: TF_LIB4392-018-R1-K1-D6
attcaagattcagcaagtgcgttttggaagcagagaccgaaatacttcgagatggcccgtacaaagcaaactgctcgtaagtcaactggaggaaaagctcccaggaagcagcttgcaaccaaggctgcacgtaagtctgcaccaacaactggtggtgtgaagaagcctcatcgttatcgccctggaactgttgctcttcgtgagattaggaaataccagaagagcactgagctcctaatcaggaagcttcctttccagaggttggttcgtgaaattgcccaggatttcaagactgatctgcgtttccagagccatgctgtgcttgcattgcaagaggctgctgaggcataccttgttgggctctttgaggacactaacttgtgggccattcacgcccagcgtgtgactattatgcccaaggatatttaactggccaggaggattcctggggagcgtgcttgagtttgcggcgtgtggttgcgaaaaatgaatgttggggggctgccggatggcggttttgttactaaagtttttttt

SEQ ID NO: 27604 - DNA, 279 bp, Glycine max
  unsure (1)..(279): unsure at all n locations
  Clone ID: TF_700567927H1
cctagattcagccncagtttcggagnnagaagaaaatagtcgttngagancgcccgtacgaagcaaactgctcntaagttccacaggaggaaaggctnctaggaagcagcttgnaacnaaggctgcacgtaagtactgcaccnactactggtggtgtgaagnnncccacatcgttaccgtcctggtaccgttgctcttcgtgagattaggaaataccagaagagtaccgagcttttgatcaggaagcaccccttccagaggctggttcgtgaattgctc

SEQ ID NO: 27605 - DNA, 408 bp, Glycine max
  unsure (1)..(408): unsure at all n locations
  Clone ID: TF_LIB3040-041-Q1-E1-E10.R5
ttttgccgtgcttgcattcagnagctgctngagcataccttgttgggctctttgaggacactaacctgtgtgccattcacgccaagcgtgtaaccattatgcccaaggatattcagctggcaagaaggattcgtggtgagcgtgcttgagttggtggttggaaagatgaagatgattggtggctgcggttggtgtttttgtttttcagattcctttttttattcaatagatggggttgttagggagggtaggttttctgctggtngtngccttnnttgggnttttggcccctcctgctnngtgtccgtgcctgtgttttcttcctttnngannnttggcttgtnnttgntttttggccctntgtntgtgttngnntgcttctgttttngttttttcctgcgggntgtt

SEQ ID NO: 27606 - DNA, 447 bp, Glycine max
  Clone ID: TF_jC-gmro02910067f08d1
aaacaaaaacccaggggggcaaatccatttgggaatatccccggggaaaaaagaggaatcttccaataaaggggcttttgaagaaaacccgaattccaataggccgtaccctaattttaatggcaaaggacccgaaaccctaaacttaagctttttcccctttgattttgcgagcgagttgaatgcccttgggcataagggaaactcgcttaacgggaatagcgcaaaggttagggtcctcaaagagcccaacgagaaaagcctccggggtttcctgaaaagccaaaacggggtttttttgaaagcggaaatcggttttgaaatcctgagcgatttctttgacaagcctttggaaggggagttttcggatcaaaagttcggggcttttttgggcctttaaaatctccctcaaaaccccccttcctggcctgaaagggtggggttttt

SEQ ID NO: 27607 - DNA, 349 bp, Glycine max
  Clone ID: TF_LIB3049-044-Q1-E1-D7
gactgatctgcgtttccacagccactccgtgcttgcattgcaagaagctgctgatgcataccttgttgggctctttgaggacactaacctgtgtgccattcacgccacgcgtgtaaccattatgcccaaggatattcagctggcaagaaggattcgtggtgagcgtgcttgacttggtggttggaaacatgaagatgattggtggctgcagttggtgtatttgtttttcagattccattttttattcaatatatggcgttgttagggatggtaagttttcagctggtagtatcactaactggtatacatgcacatactgctaagtgtccgtgactgtgttttcttcctt

SEQ ID NO: 27608 - DNA, 372 bp, Glycine max
  Clone ID: TF_LIB4204-008-R1-N1-H5
aaaaaaaacatcttcgcccttcaatacccaaaagggtcaacccaaaaccattttttcaattacaaatcctatcaaacaaaaaaagcgtactactgattaaaatctcaaattgggacaaaaaaaagtcttaaaaaaccgataaaatagctaattcaaaagctaaggaacttggggacacccttgggaccctcaaaaacggggggcttggccaattcaccgggcagcacaagcctaaccgggggctgaatttcccttaaaaggagggggggtttcttgttgtaccgggcaagtctaaaaaattcctggccaagcttctcaaaaatgcggttgataaagctggtcatgcccttctggcgtcttttcccagccgta

SEQ ID NO: 27609 - DNA, 471 bp, Glycine max
  unsure (1)..(471): unsure at all n locations
  Clone ID: TF_jC-gmst024120e12a1
ggttcgattagcttcttttgataccaaaatagccgtacgagatggcccgagggaagcatacagttcgtttgggcacatgaagaaaggctcctaggaagcagcttgcaaccaaggctgcacgttagtctgcaccaactactggtggcgtgaagaagccacatcgttaccgacctggtaccgttgctcttcgtgagattaggaaataccagaagagtaccgagcttttgatcaggaagctccccttccagaggctggttcgtgaaattgctcaggacttcaagactgatctgtgtttccagagccacgccgtgcttgcattgcaagaagctgctgaggcataccttgtcgggctctttgaggacactaacctgtgtgccattcacgctaagcgggtaaccattatgcccaangatatccagctggcatgaaggattcgcggtgaacgtgctcgaggtggtggttgagaagatg

SEQ ID NO: 27610 - DNA, 668 bp, Glycine max
  Clone ID: TF_GmC92043_2
ccacaactacttctccatctccatctaccaacaacatggcccgcactaagcagaccgcccgcaagtccactggtggcaaagccccccgcaagcagctcgcatccaaggcagctcgtaagagtgcgccgtctaccggtggtgtcaagaagcctcaccgctacaagcccggaactgtcgctctccgtgagatccgtcgctaccagaagtcgactgagctcctcatccgcaagctgcccttccagcgtcttgttcgtgagattgcccaggacttcaagtccgatctccgcttccagtcctccgccatcggtgctcttcaggagtccgtcgaggcctacctcgtctccctcttcgaggacaccaacctctgcgccatccacgccaagcgtgtcaccatccagagcaaggacatccagctcgcccgccgcctccgtggtgagcgtggttaagcttctcaacaacacatcgacacgacatgacaacttcttcgggtcagtgattggattgtgtctttagtggttaggatatcaaggcgtttatagggtttcatggttcacggtcttcaactcggtttatgagtgcacacgagcggtgctgagcatgtagtatatccaggttaatcagtgatggtcactggcgatattatctcgaaatcaacagatttctacttc

SEQ ID NO: 27611 - DNA, 269 bp, Glycine max
  unsure (1)..(269): unsure at all n locations
  Clone ID: TF_700787362H2
ctcgggcaacgttcagcgctagctatcatacagtcncgatggaccgcacgaagcagacggcgaggaagtccagtggcggcaacgcgccaaggaagcagctggccaccaaggcggcgcgcaagtctgccccggcgaccggcggagtgaagaagccccaccgtttccgccccggaacgtcgcgctccgggagatccgcaagtaccagaagagcacggagctgctgatccgcaagctgccgttccagcgcctggtgcgtgagatcgcccagg

SEQ ID NO: 27612 - DNA, 397 bp, Glycine max
  Clone ID: TF_jC-gmfl02220084b08a1
ggctcgtgcatatagagtgatcgtgatggcaccaaaggcagagtagtagccagcggagttgttgcccgcggtggtgaagtagtcgacggagggtgacaaggctccggcggagttgtagccaaaggccggattgtagcttccgaaggatggaagcgccggcggagtatggtagtagttgttgagatacacgaagatcgtggtgacatacaagatctacatcttcaaggttctgaagcaggtccaccctgacattggtatctcatgcaaggccatgggaatcatgaacagcttcatcaacgacatcttcgatatgcttgcccaggtatcttctagacttgcccggtacaacaagaagcccaccatcacttcaagggaaattcagaccgcggtcaggctt

SEQ ID NO: 27613 - DNA, 358 bp, Glycine max
  Clone ID: TF_9900407
cgccggacgaagaaatgtcggccgtcctaagaaaaagccagtttcaacgtccgtcaaggccagtctccacttccccatcagaccaatcggccgttctttcaagaaaggacggtacgcccaccgtgtcggtaccggcgctcccgtatacttaaccaaacttctacagtacttatctgctaaggtgcttaagttttctgaaaatgctgcacgtgacaacaagaagaacatgattattcctatacatgtactgttggctgtaaagaacgataatgatttataaaaattacttactgatgtcaccattactcataataatattcttgcagacattaaccctattgtactacctaagaaaact

SEQ ID NO: 27614 - DNA, 671 bp, Glycine max
  Clone ID: TF_GmC92043_1
aaataacacacacccacacccgcatccacatccacatctctcacccccgccacaaccacaacaacatcatctccatcactttccagcaccagcttcattagcaatggctcgcacaaagcagaccgcccgcaagtccactggtggcaaggccccccgcaagcagctcgcttccaaggctgcccgcaagagcgccccctctaccggtggtgtcaagaagcctcaccgctacaagcccggtaccgtcgctctccgtgagattcgtcgctaccagaagtcgactgagctcctgatccgcaagctacccttccagcgcctggttcgtgagattgcccaggacttcaagagcgaccttcgcttccagtcctccgccatcggtactctccaggagtccgtcgagtcctacctcgtctccctcttcgaggacaccaacctgtgcgccatccacgccaagcgtgtcaccatccagtccaaggacatccagcttgcccgccgcctccgtggcgagcgcaactaagctatccgcgtgatacccggttgcggataatgactcgttttgttctttgacacgatggaaatggttctggggataatcatggcgttacgatgagaaactggctttgctctacagttgggatgtacattaaacaatacgcagcctttgcatgctgctg

SEQ ID NO: 27615 - DNA, 440 bp, Glycine max
  Clone ID: TF_LIB3051-063-Q1-K1-F7
ggacgtagtcaacgcgagctgatgactcgcgcttactaggaattcctcgttgaagaccaacaattgcaatgatctatccccatcacgatgaaatttcaaagattacccggacctgtcggccaaggctatagactcgagttggaaaaaaaaaaaaagttgttcgagatggcacgtacgaagcaaactgctcgtaagtccacaggaggaaaggcacctaggaagcagctcgcaaccaaggctgcacgtaagtctgcaccaactactggtggtgtgaagaagccacatcgttatcgtcctggtaccgttgctcttcgtgagattaggaaataccagaagagtaccgagcttttgatcaggaagctccccttccagaggctggttcgtgaaattgctcaggacttcaagactgatctgcgtttccagagccatgctgtgcttgc

SEQ ID NO: 27616 - DNA, 507 bp, Glycine max
  unsure (1)..(507): unsure at all n locations
  Clone ID: TF_16278806
gcacgagctttagcaaattccaattcccaattcccaattcccaattcgaaacccttattcctttcaaagaaccaaattgagtgatcgtgatggcaccaaaggcagagaagaagccagcggagaagaagcccgcggaggagaagaagtccacggtgggagacaaggctccggcggagaagaagccaaaggccgaaagaagcttccgaaggaggaggcgccggcggagaagggaagaagangaaagagaacaagaagagcgtggagacatacaagatctacatcttcaagggtctgaagcaggtncaccctgacattggtatctcaagccaagccatgggaatcatgaacagcttcatcaacgacatcttcnagaaacttgccccagaatcttctaaacttgcccgttacaacaagaagcccaccatcacttcaaggggaattcaaaccgcggtcaggcttgtgctgcccggggaattggccaaccacgcccgttttgagggtcccaag

SEQ ID NO: 27617 - DNA, 403 bp, Glycine max
  Clone ID: TF_7925666
tcgtacaaagcaaaccgctcataagtccacaagaggaaaggctcctaagaagcagcttgcaaccaaagctgcacataagtctacaccaactactggtgatataaagaaaccccaccattatcgtcctagtaccattactcttcataaaattataaaataccagaaaactaccgagcttttaatccaaaaactccccttccacaaagctattcataaaattactcaagacttcaatactaatctacatttccacagccacaccatacttacgttacaaaaacctactaaatcataccttattaaactctttagaaacactaacctatatgccattcacaccaagcatataaccattatacccaaatatattcagctatcaataaaaattcataataagcgttct

SEQ ID NO: 27618 - DNA, 403 bp, Glycine max
  Clone ID: TF_8669694
ccgtacgaagcaaactgctcgtaagtccacaggaggaaaggctcctaggaagcagcttgcaaccaaggctgcacgtaagtctgcaccaactactggtggtgtgaagaagccacatcgttaccgtcctggtaccggtgctcttcgtgagattaggaaataccagaagagtacctagcttttgatcaggaagctccctttccacaggctggttcgtgaaattgctcaagacttcaagactgatctgcgtttgcagagccacgccgtgcttgcattgcaagacgctgctggcgcataccttgtcgggctctttgaggacactaacctgtgtgccattcacgctaagctggtaaccattatgcccattgatatccagctggcaagaaggattcgcggtgaacgtgct

SEQ ID NO: 27619 - DNA, 271 bp, Glycine max
  Clone ID: TF_6070218
cggagtgaataagccacacaggttcaggcctggaaccatggccctgaaggagatcaagaagtaccagaagagcacggagcttctgatccgaaagcttccgtttcagtatttggctcgtgaaatcgcttaagacttcaaaacggatctgatgttacagagcagctccgttgctgcgctccaggaagccgctgatgctgacttggttggtctctgtgaagacactaacctatgtgatatcatcccttagagggttacagttatgcccacggat

SEQ ID NO: 27620 - DNA, 346 bp, Glycine max
  Clone ID: TF_LIB3108-022-Q1-K1-E11
tgttcctcgacatgtgtgtctggcggtgaggaatgatgaggagcttgggaggttgttgggtggggttactattgctcatggtggagttttacccagcatcaaccctgtcctgctgccgaagaagactggcaaggagggggtggagcccaagagtccgaagaaggcggctaagtccccaaagaaggcttaaatctgtgctctgggactgttagccgtagaagtcttaaagttgtgctcttaggctgttagctgtagatatatggcgtggatcagctggtctatgcattgtggtttctggtatttgactgtattccatgtttctatggtttagtgttaacatatgttt

SEQ ID NO: 27621 - DNA, 600 bp, Glycine max
  Clone ID: TF_LIB5118-014-A2-PF1-F6
gattccttgcattctattcattcaagattcagcaagtgcgttttggaagcagagaccgaaatacttcgagatggcccgtacaaagcaaactgctcgtaagtcaactggaggaaaagcagccaggaagcagcttgcaaccaaggctgcacgtaagtctgcaccaacaactggtggtgtgaagaagcctcatcgttatcgccctggaactgttgctcttcgtgagattaggaaataccagaagagcactgagctcctaatcaggaagcttcctttccagaggttggttcgtgaaattgcccaggatttcaagactgatctgcgtttccagagccatgctgtgcttgcattgcaagaggctgctgaggcataccttgttgggctctttgaggacactaacttgtgtgccattcacgccaagcgtgtgactattatgcccaaggatattcagctggcaagaaggattcgtggtgagcgtgcttgagttggtgcgttctgtgattgtgaagatggattgttggcggctgcggatggtgtcttgctactaagctttcttctcgtcgaagcctataggttatcagccaaaaatacccgtctacccgc

SEQ ID NO: 27622 - DNA, 573 bp, Glycine max
  Clone ID: TF_LIB4392-013-R1-K1-G4
ttcaagattttgtactgcgtttcggaagcagacacagatggctcgtacgaagcaaaccgctcgtaagtccacaggaggaaaggctcctaggaagcagcttgcaaccaaggtctcttctataatcacaacaacaattaattaatctttggtcattttgatatgttttgaaattttatccgagagtttaattcctttgttttaattttatgctgcacgtaagtctgcaccaactactggtggtgtgaagaagccccaccgttatcgtcctggtaccgttgctcttcgtgagattaggaaataccagaagagtaccgagcttttgatccggaagctccccttccagaggctggttcgtgaaattgctcaggacttcaaggtattgtaatgtgtattattgtttaatgtttgtgtgttttgttgttgaacttgttaacaagggaattttgttgtgcttttgttgcagactgatctgcgtttccagagccacgccgtgcttgcattgcaagaagctgctgaggcatacctttgttgggctctttgaggacactaacctgtgtgccattcacgccaagc

SEQ ID NO: 27623 - DNA, 241 bp, Glycine max
  Clone ID: TF_8827097
agagaaaaaacctgcagagaagaagcccgaagcggataatgctcctgcggagaaaacaacagcctagaagaatatcccgaaggacgcaacctccggcgaaaagaagaagaagatgacaaagaatagcatggagacgtacaagatctacatcttcaaggtcgctcaacagttcaccctacgtctgtatctccacaaggccagggtgatcatgcaaagtttaatgaacgagattttcgagaaa

SEQ ID NO: 27624 - DNA, 472 bp, Glycine max
  Clone ID: TF_jC-gmfl02220084h12a1
tattcggctcgagaggtactgcgttaagggagcagactcagatggctcgtacgaagcaaaccgctcgcaagtccacaggaggctaggctcctacgaagcaacttgcaaccaaggctgctcgtaagactggaccaactactggtggtgtgacgaagcccgaccgttatcgtgctggtaccgtagctcttcgagagagtaggatataccagaagagtaccgagcttatgatccggacactgcccttacagaagctggttcgagaaagggctcaagactcgacgactgagctgcgagtgcagagccacaccgtgcttgcattgcaagaagcggctgaggcgtaccttgaagaactctgtgaagacactagcccgcgggccattgacgccaagcatgtgaccattatgccgaatgatattcagctgacaggaaagattcgaggcgagcgtgctagagatggaagctggaaagatga

SEQ ID NO: 27625 - DNA, 502 bp, Glycine max
  unsure (1)..(502): unsure at all n locations
  Clone ID: TF_LIB4164-029-Q1-N1-C3
cttggggtgttgtggtttttttttttttttttttttttttttttttttttttttttttttttttttttaaattaaaggttggtgggatgcctttggaaatcaaaggctggatcaagactcaaggggggccttaaaataatttaaattttgaacaacctttgggggggggggagagccttctttaaacccatttggctggaaacctaactgctgctgcaaggggcccaattttcattcctcccattnaaaggggaaaaaaaaggggggccaccctagaatctaaattcaagaactttgggaacagggaatccctttttaagggggatcggcgggagcagcccccttgggtgggcccccagcctttttgggaagaagaaggttgggaatgttaggcataacaccgccgttggcagtgggaacatctcctagaagctgggtcaacttttcggggttcctcaccgccaattgggtgtgggggggaacaattcgaggttttttgttt

SEQ ID NO: 27626 - DNA, 460 bp, Glycine max
  Clone ID: TF_15001070
tctattcattcaagattcagcaagtgcgtttcggaagcagagaccgaaatacttcgagatggcccgtacaaagcaaactgctcgtaagtcaactggaggaaaagctcccaggaagcagcttgcaaccaaggctgcacgtaagtctgctccaacaactggtggtgtgaagaagcctcatcgttatcgccctggaactgttgctcttcgtgagattaggaaataccagaagagcactgagctcctaatcaggaagcttcctttccagaggttggttcgtgaaattgcccaggatttcaagactgatctgcgtttccagagccatgctgtgcttgcattgcaagaggctgctgaggcataccttgttgggctctttgaggacactaacttgtgtgccatccacgcccagcgtgtgactattatgccccaagatatttcgctggcaagaaagattcctggcgag

SEQ ID NO: 27627 - DNA, 434 bp, Glycine max
  Clone ID: TF_jC-gmXLIB3563P041dc06d1
cgacccagcgtccgaccacttttcgaaccgactgcaaggggggactgcaggggatcgcactaacacctgtgatagtgtctactatttaacaatccacacccaaaatctgggcgctcgaaataggacatctggcaggacgatcaagaagggcgccggaggtagaaagggcggaggcccaaataagaggccggttaaaacgttcgggggggcgggctccaataacccgtcggaagaattggacaggattggaagaaaggaaggtacgctcaggggctccggaccgctgctcccgtatacttggctgcctatctggaatacctctctgccgaggtgctagagtcggctgtgactgccgcacgagcacggctagaagaacaagactatctcaagacacgtgcttacgacaaagaggaacgataatgagttgcggaaat

SEQ ID NO: 27628 - DNA, 766 bp, Glycine max
  Clone ID: TF_GmC128_2
ccacgcgtccggaaactttttcacccccttgataccgcttcaattcaccaatggcaagtcgaggaaaaacccagggatctggcacaaccaaaaagggcatctcccgaagcaacaaagctggtctccaattcccagttggtcgtattgctcgatacctcaagattggcaagtatgctgaccgtatcggttctggcgctcccgtgtatctcgcctctgttcttgaatatcttgctgctgaggcaatttttcttaatcgcctttgatttttgttttcgtgtgttgtcattggatttagggtttataaattagggcttattttcctaaagtttagtggatggttttggtttaatgatcaaccttgaataattgaaatgataaatttactttaatcaatattaattacttttttgaaaggtttatatcacacttggtgtgttcaggttttggagttagcggggaatgccgcaatggacaacaagaagactcgtattatgcctcgccatatccaattggctgttaggaatgatgaagagttgagcaggcttctcggagatgtgactatcgccagtggtggtgtgacacctaacattcacaacatgttgctgcctaagaaggttgggacctcgacctcaacctttatgggtcctagtgccgatgatgacgacgcttaaatgttttcccccaaaagtttgacccatgtttcccttctgtaaaatgggtcctttattgaataatactaaatgtcaagattgacataatataataa

SEQ ID NO: 27629 - DNA, 213 bp, Glycine max
  Clone ID: TF_LIB3170-016-Q1-K1-C5
agggaggatcgttcccaggcacattcaacttgcggtttggagcgaccaagagtttagccagctgattggatcttttaccatttcccacgggggtgttctggctaacattcaccaaaatttgttgcccaaaaaagtcgcttgccagggggaaacccaaatttgatctgctagtcaggagttttaaatataaaagccttggtttcccatgtagtt

SEQ ID NO: 27630 - DNA, 386 bp, Glycine max
  unsure (1)..(386): unsure at all n locations
  Clone ID: TF_LIB3139-043-P1-N1-D5
aagagcangacggccacggccgccgccgaagctcgaattcgctcgagctcaagatcatgtactgcgtttcggaagcagacacagatggctcgtacgaagcaaaccgctcgtaagtccacaggaggaaaggctcctaggaagcagcttgcaaccaaggctgcacgtaagtctgcaccaactactggtggtgtgaagaagccccaccgttatcggcctggtaccgcagctcttcgtgagattaggaaataccagaagagtaccgagcttttgatcctgaagctcccctttcagaggctggttcgtgaaattgctcaagacttcaagactgatcttgcgttccagagccacgccgtgcttgcattgcaagaagctgctgaggcataccc

SEQ ID NO: 27631 - DNA, 332 bp, Glycine max
  Clone ID: TF_LIB3073-002-Q1-K1-G3
gatcgcatgacatagcactcaccctcattaccaaggcgagggcatagccaaaacctactttcgaaggctctgattttcctaatggctccggcagaggcagataagaagccaccagagaagaagccagctgcggaaaaagcaccgacggataagaatccgaaagcacgacaagaagatctcggatgaaggaaggcgcgagaagaaaaagacgcgcacgaagaagagcgtggagacctacaagatctacatcgtcaaggtcctgacgcaggttcaccccgacattggtatcaccagcaaggacatgggcatcatgaacagcttcatcatcgaca

SEQ ID NO: 27632 - DNA, 388 bp, Glycine max
  unsure (1)..(388): unsure at all n locations
  Clone ID: TF_LIB3049-047-Q1-E1-D10
ggattctttgtattccaatcctcaagattcaagtactgcgtttccgaagcagacacagatggctcgtacgaagcaaaccgctcgtaagtccacaagaagaaaggctcctaagaagcagcttgcaaccaaggctgcacgtaagtctgcaccaactactggtggtgtgaagaagccccaacgttatcgtcctggtaccgttgctcttcgtgggattaggaaataccagaagagtaccgagcttttgattcggaagctccccttccagaagctggttcgtgaaattgctcaagacttcaagactgatctgcgtttcccagagcacgccgtgcttgcattgcaagaagctgccgaggcataccttgttgggctctttgangacactaacctg

SEQ ID NO: 27633 - DNA, 442 bp, Glycine max
  unsure (1)..(442): unsure at all n locations
  Clone ID: TF_LIB3138-084-P1-N1-C6
cccttccttaacctcggattccgcctcaagtttccatccaaaattctctttttccgttttggaaccaaaaccggaagtgcttctatttggcccgtccaaaccaacctgctcgtaagcaaactggaggaaaagctcccaggaagcagcttgcaaccaaggctgcacgtaagtctgcaccaacaactggtggtgtgaagaagcctcatcgttttcgccctggaactgttgctcttcgtgagattaggaaataccagaagagcactgagctcctaatcaggaagcttcctttccagaggttggttcgtgatattgcccatgatttcaagactgatctgcgtttccagagccatgctgtgcttgcattgcaagaggctgctgaggcataccttgttgggctctttgaggacactaactngtgtgccattcacgccaagcgtgtgac

SEQ ID NO: 27634 - DNA, 552 bp, Glycine max
  Clone ID: TF_LIB4164-023-Q1-N1-A7
ctttccttttttttttttttttttttttttttttttttttaacttaaacgagattagatggcaactgaatgttgtccaatacagtttctaaagtggctgcaacatcccgcaggtaaaaactaaaacagaagcattctaacacatacatttgtccaaaaatgaattacaagccattttttttaaaggaagaaaacacagtcacggacacttagcagtatttgcctatatcccaattaatgctactaccagcagaaaacctaccctccctaacaaccccatttattgaataaaaaaaggaatctgaaaaacaaaaacaccaaccgcagccaccaatcatcttcatttttccaaccaccaactcaagcacgctcaccacgaatccttcttgccagctgaatatccttgggcataatggttacacccttggcgtgaatggcacacaggttagtgtcctcaaagagcccaacaaggattgcctcagcagcttcttgcaatgcaagcaccgcgtggcttttggaaacccaaaatagtcttgaagtcctgagcaatttc

SEQ ID NO: 27635 - DNA, 399 bp, Glycine max
  unsure (1)..(399): unsure at all n locations
  Clone ID: TF_4405547
gaagcaaaccgntcgnaagnccacaggaggaaaggctnctaggaagcagctagcaaccaaggctgcacgnaagnctgcaccaactactggaggngngaagaagccccaccgnnatcgncctggnaccgnagctcttcgngaaattaggaaataccagaagagtaccgagcttttgatccggaagctncccttccagaggctgggtcggagaaaatgctcaagaacttcaagactgattctgcggtttccagagcccacgcccgngccttgccatttgcaagaaagcttgctgaggccatacccttggttgggcctcttttgagggacacctaaccctgttgtgcccatttcaacgccaagcggtggtaacccattattgccccaagggatatttcaagc

SEQ ID NO: 27636 - DNA, 619 bp, Glycine max
  Clone ID: TF_LIB5068-030-A1-XP1-F6
ccgggagtggtgagaacaaccctcatcggtatcgccctggaactgttgctcttcgtgagattacgaaataccagaagagcactgagctcctattcaggaagcttcctttccagaggttggttcgtgaaattggccagcatttcaagactgatctgcgtttccaaagtcatgatgtgcttgcattgcaagaggctgctgaggcataccttgtgtgggctctgttgaggacactatcttgtgtgccattcacgccaagcgtgtgactattatgcccaacgatattcatctgggaagaaggattcgtggagagcgtgcttgatttgctgcgttctgtgtttgtgaaaatggattgttggtgactgcgaatggtgtgttgttactaagtcctctgtcttgttgaagcctatacgttatctatcggaccaataggtgtttacttggtagtcctattaatcgtcattggtcaatactgcctaagacactgtgaagtgctgaatgctataaatttggcatgtattcgatttttctggatcctttattctctcgatttatttctggctagtgcagccactttgagaattgtattgcagcacttttctgttgccatctcatctatgtg

SEQ ID NO: 27637 - DNA, 411 bp, Glycine max
  Clone ID: TF_LIB4390-022-R1-N1-A8
ggaccttaaaaaaattaaaattttgaacaaccttttttgaggcgaaaaagctttttttaaacacctttgactgaaaacctaactactactacaaggggcccaattttcatacctcccaataaaagggaaaaaaaaaaagagagcaaccttagaatttaaattcaaaaactttgggaacagggaatccctttttaaaagtcatgggcagcagcagcacccttggaggagcccccaccctttttggaaaaaaaaaggttgggaatgttaggcataacaccgccgttagcaaggggaacatctcctaaaagctggctaaacttttgggggttcctcaccgccaattgggggggggggggaacaattcgagtctttttgttatttttcggagggtttccagccaattccaaaacc

SEQ ID NO: 27638 - DNA, 249 bp, Glycine max
  Clone ID: TF_LIB3242-404-P1-J1-C11
cgcttcttccatttaacataaaaggacacataaacccttacaataggaacataccaaacatactatcgcgcaagtggcaacctatgcaaggcgagcctcggaagcatctcaccacaaaagccgccaaaaagtcagctccaacgaccgacctaatgaagaagccgcatgacttccatcctagcacaatggcgctcatgaagatccggaagtaccaaaagaacacggagcttctgatccagaagctcccat

SEQ ID NO: 27639 - DNA, 381 bp, Glycine max
  Clone ID: TF_LIB3167-079-P1-K1-H5
gcagggccgggcacagccgtacgccaaggcttttgccaaggcttccgtataattggtcctttaataaaaccaaaatcccgtggatgtttggtaaaagggttggaacgaaccaaacggcccgaaggtaaaccggcggaaaggccccgcggaagcagttggcaactaaggcggttggaaggtcggttccggcgaccgggggggtgaaaaagccgcccagattcaggccgggaaccggggcgctgtccaggatccggaagtcccaaaagagcccggggctcctaatccggaagcttccgttccagcgctggttccaggggatcgcgcaggacttaaggaccgacctccggttcaagagctcctccgttttccgcttcaaggagg

SEQ ID NO: 27640 - DNA, 355 bp, Glycine max
  Clone ID: TF_10234512
ggcggatatgaagcctgtcgcggacaatactatttcgatggatggaagaagctacatgataagtatgagaacagagaagagcgttccgacctacaagatctacattttcaatgtgtagaaccaggtgctcccttacatgagcatcttcggccaggctatggtgatcatgatcagcttcgtaagcaacatcttcaagaagctcgcccaggagtcatcgcgtcttgctaggtaccacatgaagctctccattacttccatggagatccatgctgcggcgcgtttggtgctccctgggtagttggccatgcatgccgcttctggcggtgccttagtcgttgctatattctccatctct

SEQ ID NO: 27641 - DNA, 411 bp, Glycine max
  Clone ID: TF_jC-gmX3039042H07sg7A3b1
agaagaccacagaagggggaacctttgcattatattcattcaagattcagcaagtgcgttttgggagcagagaccgaaatacttcgagatggcccgtacaaagcaagctgctggtcagataactggaggaaaagctgccaggaagcagtttgcaaccaaggctgcacgtaagtatgcaccaacaactgttggtgtgaagaagtctcatcgttatcgccctggaactgttgctcttcgtgagattaggaaataccataagagcactgagctcctaatcaggaagcttacttttcagaggttggttagagaaattgaccagtattgcaagactgatctgcgttaccagagacatgctgtgcttgcattgcaagaagcttgtgatgcataccttgatgggctatttgaggacac

SEQ ID NO: 27642 - DNA, 435 bp, Glycine max
  Clone ID: TF_LIB3242-723-P1-J1-H12
atcctctagagcggccgcttttttttttttttttttttttttttttttagcagatccatatgggaatatacctgatgaaataagatgaatcttacaataaagaggcatttgaagaaaacacgaattacaataagcagtaacctaattttaatgtcaaatgacacgaaaccctaaacttaagctctctcgcctctgattctgcgagcgagttgaatgtccttgggcataatggtaactcgcttagcgtgaatagcgcagaggttagtgtcctcaaagagtccaacgagataagcctccgcggctttctgaagagccgaaacggcgctgctctgaaagcggagatcggttttgaaatcctgagcgatttctctgacgagcctctggaatgggagttttcggatcagaagttcggtgctcttctggtactttcgaatc

SEQ ID NO: 27643 - DNA, 708 bp, Glycine max
  unsure (1)..(708): unsure at all n locations
  Clone ID: TF_LIB4204-007-R1-K1-D5
cccacgcgtccgtacggctgcgagaagacgacagaagggtacggctgcgagaagacgacagaagggtacggctgcgagaagacgacagaagggtacggctgcgagaagacgacagaagggtacggctgcgagaagacgacagaagggtacggctgcgagaagacgacagaagggtacggctgcgagaagacgacagaagggtacggctgcgagaagacgacagaaggggataacactgtcactcttacaatcccagctcatagcattcttcttcttccaacgagaatcagtctttgtgttccaaatggctcgtacgaagcaaacagcaagaaagtccaccggaggaaaagctccaaggaagcagctcgccaccaaggcagcacgtaagtccgctccggcgacgggcggcgtgaagaagccccaccgtttcaggccggggacagtggctctgagggagattcggaagtaccagaagagcacggagcttctcataaggaagcttcctttccagaggctcgtaagggaaatcgctcaggacttcaagaccgatctacgcttccagagcagtgctgtctccgctcttcaggaagccgctgaggcctacctcgttgggctctttgaggataccaacctctgcgctattcatgctaagagggttaccattatgcccaaggacattcagctagctcgtangattaggggcgagag

SEQ ID NO: 27644 - DNA, 534 bp, Glycine max
  Clone ID: TF_LIB4164-052-R1-N1-C9
gaggaaaaaaaaaccgtttttgttttaacaactaattcccaacaaagaaggggcaaaaaaccccatttttttcacttaaaaaggggtttccccaaaaaaaaaaaaaaaacccaccctttaacaaaaaaaattttcctaaaaaaaacccctaaatcgaagggaaggggcaaaaaagtcagttaaaaaactagggaacttggggacagccttggccccccaaaaaacggggggcttggccaaatcaccgggcaaaaaaagcctgaccgggggctaaaattcccttgaagggagggggggctttttggtggaacgggcaaatttaaaaaaatccggggcaaccttttaaaaaaagtcgttgaaaaaactgttcaaaaatcccaaggccttgcttgaaaaaccaaagggaggggggacccgcttaaaaaccttgaaaaaggaaatcttggttggccccccccccttcggggttctttttttttttttcccttttccggcggggcctcccttctttggaagcttttttccggcctttgg

SEQ ID NO: 27645 - DNA, 289 bp, Glycine max
  Clone ID: TF_18731884
ggatcgaacgaaacaaaccgcctgcatgcacatcggcggcaaggcgccacggaagcagctggcgacaaaggcggctcgccagttggtttttttttttggcggcgtgaagaagccgcacagatacaggccggtatccctggccctgcgcgagatctgtatgtgtcacaacagcagggagcgacttctccacaagcttccgtgcctacgcttggtgcgcgagatcgcgcgggactgtatgaccgacctccggtgcaaaacctccgccgtgtccgcactcctggaggccgcg

SEQ ID NO: 27646 - DNA, 400 bp, Glycine max
  unsure (1)..(400): unsure at all n locations
  Clone ID: TF_6667439
tcgtacaaagcaaaccgctcgtaagtccacaagaggaaaggctcctaagaagcagcttgcaaccaaggctgcgcgtaagtctgcaccaactactggtggtgtgaagaagccccaccagtatcatgctggtaccattgctcttcgtaagattgaaaaataccagaaaagtaccnagcttgtgatgcagaaactccccttgcaaaagctgggttcgnagatgactgaagacttcaagactgatctgcatgtccaaagccgcncgatgcttgcattacgaaaagctgctgaagcatacgttggtaagctctgtagagacactaacctaggtacgatgcacgccaagcgtatagccattaggcgcaaggatattcggctagcaagaaagattggtggtaagcgt

SEQ ID NO: 27647 - DNA, 579 bp, Glycine max
  unsure (1)..(579): unsure at all n locations
  Clone ID: TF_LIB5118-005-B1-PF1-B11
atttcctaagatgcttttcccctagatcagtcccgtttcggaggagaagaaaatagtcgttcgagatggcccgtacgaagcaaactgctcgtaagtccacaggaggaaaggctcctaggaagcagcttgcaaccaaggctgcacgtaagtctgcaccaactactggtggtgtgaagaagccacatcgttaccgtcctggtaccgttgctcttcgtgagattaggaaataccagaagagtaccgagcttttgatcaggaagctccccttccagaggctggttcgtgaaattgctcaggacttcaagactgatctgcgcttccagagccacgccgggtttgtttgccgacgntcctgaggataccttgttgggctctttgaggacactaacctgtgtgccattcacgctaagcgggtaaccattatgcccaaggatatccagctggcaagaaggattcgcggtgaacgtgcttgaggtggtggttgtgaagatgaagatgaagatgggttgctgcgggtggtgtttttgttgttcagattcctttttttttttcaatggatagggttgttagggagtgtag

SEQ ID NO: 27648 - DNA, 380 bp, Glycine max
  Clone ID: TF_LIB5068-015-A1-XP1-H12
tttcgggatcctttgtattctattcttcaagatctcaggtactcgcgtttacggaagcagacacagatggctcgtacgaagcaaaccgctcgtaagtccacaggaggaaaggctcctaggaagcagcttgcaaccaaggctgcacgtaagtctgcaccaactactggtggtgtgaagaagccccaccgttatcgtcctggtaccgttgctcttcgtgagattatgaaataccacaagagtaccgagcttttgatccggaagctacccttccagaagctggttcgcgaaattgctcaggacttccagactgatctgcgcttccatagtcacgccctgcttgtatttccataaactgctgatgcctaccttgttgcgttctt

SEQ ID NO: 27649 - DNA, 331 bp, Glycine max
  Clone ID: TF_LIB3049-053-Q1-E1-A8
ggaacctttgcattccactcactcaagattcagcaagtgcgttttggaagcagagaccgaaacacttcgagatggcccgtacaaagcaaactgctcgtaagtcaactggaggacaagctcccaggaagcagcttgcaaccagcgctgcacgtaagtctgcaccaacaactggtggtgtgaagaatcctcatcgtcatcgccctggagctgttgctcttcgtgagattatgacataccagaagagcatctgagcacctaatcaggacgcatcctttccagacgttggttcgtgaaagtgctcaggatgtcacgactgatatgcgtttccaga

SEQ ID NO: 27650 - DNA, 364 bp, Glycine max
  Clone ID: TF_uC-gmroLIB3258056g05a1
cgccctttatttctttttttttaatttaacaccgcgcctggatatataaagccagggaatggtctcgtttttcaacataatctctttttttcagacacatatgggattataccgtggtgaaataagatgaatcttaccatgaagaggccttggaagaaaacacgaattactttaagccgtaacctaattctaatggaaagcgacacgagaccctaaacttaagctctcttgcctctgattctgcgagcgagttgaatgttcttgggcataatggtaactcgtttagcgtcgatagcgcataggttagtgttctcaaagagcccaacgagataagcctccgcggtttcctgaagagcctgaaacg

SEQ ID NO: 27651 - DNA, 892 bp, Glycine max
  Clone ID: TF_GmC80_1
acccgccgtaaccaagacgaggtcgggaaaaggggcaaagggattgataacaggtaaaacctcagcttcagccaaagacaaagacaaaagacaagaagaaacccgtttctcgttcttctagagctggtcttcagtttgctgttggacgaattcaccgtcttttgaaagcctagaatagaaaaagctgtgctgtggctgacacagggaaaggcgcggttgaaagattgaaagctcgacatgtcagggaaaggcgcaaagggtttgataactgctaaggacaaagataagaaaaaaccaatttctcgctcctcaagagccggtcttcagtttcctgttggacgcattcatcgtcttctgaagtcaagggtgacagcacatggaagagttggggcaacagctgcagtttattctgctgccatcctggagtatttaactgcagaggtgttggagttggctggcaatgcgagcaaggatctgaaggtgaagcgtattaccccaagacatctacagcttgccatccgtggagatgaagaacttgataccctcatcaaaggaacaatagctggtggaggtgttattcctcatatccacaagtcccttatcaacaaatcttcgaaggaatgaggaaggtttataacttataagttatttgaatcaaagatgaaaatcactgtaaatttaattatatcttttacctgtggataatttgccccttgcattattagtttggttgaactagaaccatccttcaaaagaaatctgaaaatttctgatttcttcatttgaattttgtgaactgatgtgctgacttttgtgctatggtactgcatgttagatgatactgcctgtctgtctagtctttattgtggaagatggttcttgtgtctcgttt

SEQ ID NO: 27652 - DNA, 843 bp, Glycine max
  unsure (1)..(843): unsure at all n locations
  Clone ID: TF_GmC732_2
cgggtcagcccactcgtccggtttttttctcccatcatagaaaaccgaccctctcctttccctcttcaccaaccaacgtacgggagaacccacgcgtccgtacggctgcgagaagacgacagaaggagatctttcactcgttctctgaaattttaattgacttttctcccctcataaaaaaaacctaccaatggctcccgcaaaggcagagaagaagcccgcggagaagaagccggcagagaaggccccagcggagaagaagccgaaggcggagaagaagatatcgaaggaaggaggaagcgagaagaagaagaagagaacaaagaagagcgttgagacctacaagatctacatcttcaaggtgttgaagcaagtgcaccccgacatcgggatctccagcaaggctatggggatcatgaacagtttcataaacgacatcttcgagaagctcgcccaggagtcatcgcgtctcgctaggtacaacaagaagcccaccattacttccagggagatccaaacggcggtgcgtttggtcctccctggggagttggccaagcatgccgtttctgaaggcaccaaggccgtcaccaaattcaccagctcttgattggtttcgtgtgtttatgtcagggttttctgttagcccgatttaattagggtttcttttcctttttatttctttgagtatgtagatgtaaaattaaagccttttatttttaaataatataattgccgttttgttaaaatgcgttttctacttcccccccccaaaatatattcatcccncttgaaaagaatcatgaaattattggggacgaaatgagtaatttgaccatgattttt

SEQ ID NO: 27653 - DNA, 820 bp, Glycine max
  unsure (1)..(820): unsure at all n locations
  Clone ID: TF_GmC732_3
tcgagggccggcnncgggccgggtacaaaaaaaannaaaaaaaaaaaaaaaacggctgcgagaaaaaaaaagaaactcgttctatctaattcagtttttttctcccatcataaaaaaccgaccctctcctttccctcttcaccaaccaatggctcccccaaaggccgagaagaagcccgcggagaaaaagcccgcagagaaggctccggcggagaagaagcccaaggccgagaagaagatatcgaaggaaggaggaagcgagaagaagaagaagagaacaaagaagagcgtggagacctacaagatttacatcttcaaggtgctgaagcaggttcaccccgacatcggaatctcaagcaaggccatggggatcatgaacagtttcataaacgacatcttcgagaagctcgcccaggagtcgtcgcgattggctaggtataacaagaagcctaccattacttccagggagatccaaacggcggtgcgtttggtcctccctggggagttggccaaacacgctgtctctgaaggtaccaaggccgtcaccaagttcaccagctcttgattcgttttgtttcctgtgtttcgattagggttttctgttgaccccgatttgattcgcatttttaaattagggttttattttcctttttgttgcttttgagggtgtagatgtaaaattaaagctttatttttaaataatataaatgccgttttttaatatgccttgttttgaattgtgatccgatcgaaacgtctttttgcgtcttctttggttttctggtttctgattgtggaaatcgaattggctgtttgaccc

SEQ ID NO: 27654 - DNA, 837 bp, Glycine max
  Clone ID: TF_GmC110_1
cctcgcgagacaacaattccacaacgcgatctctctctattctttgaaaccaaagttcaaactctgtcttccctgggttctatttcgaaatcaacgacgatgagttccacagaggcagcagccacagagaagaaaggtggaagagggaaaccgaagacttcaaagtccgtttcccgttcctccaaagctggccttcagtttcccgtcggccgtgtcgctcgctacctcaaggccggtcgctacgcccagcgcgttggctccggttcccctgtttatctctccgcggttctcgaatacctcgctgccgaggttttggagcttgcggggaacgctgcgagggacaacaagaagacgaggatcgttccgaggcacattcaactggcggttaggaacgacgaggagttgagcaagctgatgggatctgtgaccattgccaacggtggtgttctgcctaacattcaccagaatttgttgcccaagaaggtcgctggcaaggggaagaccgagattggatctgctagtcaggagttttagatttaaggctcttgttttcgtatgtagttggttgccttatatagtaagattaggattgacattggatgatgtatagtcctttaacatttgaaaataattagttgttttctaacatggttcctgcatagttttcatttatttgagtttctcgtgaatcgagatatctattctctttttatttgtgtgtttgggcataattttagtgtggtgtttatgttgaaggtgctgttgatggttgatgatatcatgtgttgatggttttcgtttttttactttttttatctttattcttctctttttttc

SEQ ID NO: 27655 - DNA, 691 bp, Glycine max
  Clone ID: TF_GmC16229_1
tacggctgcgagaagacgacagaagggggatcacaacacaagtattcaaaatatctctatatattccctccatttctgagaatggcgaaggctgcggagaagaagccagcggctgagaagtctccggcggagaagaagcctaaggcagagaaaaagattccgaaggaaggcggtggcgagaagaagaagaagaggtcgaagaagagcgtggagacctacaagatctatatcttcaaggtgctgaagcaggtacaccctgacatcggtatttctagcaaggccatggggatcatgaacagcttcatcaacgacatcttcgagaagctcgcgcaggaagcggcgcgtctcgccaggtacaacaagaagcctactattacctccagggagattcagaccgcggtcaggttggtgctgcccggggagcttgccaagcacgccgtttctgaaggaaccaaagccgttaccaagttcactagctcttagagttagggttttttttttttttttttttttctgtaaagctaagtcgtatagctagtggcttcttttcggattctatatgcctatgaatttgtgattctattagtcccgatgaaaatttatattcagagtaatcgataaaaccaaaaataatcgatttgacaagtgaataatactcgcgttgcaggaaaaaaaaaaaaaaaaacttgag

SEQ ID NO: 27656 - DNA, 653 bp, Glycine max
  Clone ID: TF_9259414
aattcgcggccgcagaaattttttttttttttttttttaaaaatgaaatatagcctttttttttattaacttccatttcatttctacacgtctgaaggattgtacaagcaagaatgtccacttgcatgtgctggtagcacatagtggaaacaaattgatcttttaaactttgaaaaattaaagtaaaagagcagatgaagtgtgatctcatgtcttgtatagctgctgagttaaaacatccaaaactgaagtcaaaggggccatgctggttggaagaaagaaactcctccatacccttctttcttatactttcctagctcttttgcctcggatgcccttgctctctgcattgtttccaaagcatctgtctcggaattgaagtcataaaaggtacttgctgcagtaagcttcaaagaaaggaactctacttgatgctgcaaggactgcacatagtttatgatttcatccaacattactgccatacccatggtcttgtaacatcctggaacaatgttctgtaagcaccttaatttctcattgattttccctcttctaaccctttctgctaaactgtgactatcagtagcttgacctcttctggctctgacatgaaccacttcccttgctttctcctcttctgttacattgctttt

SEQ ID NO: 27657 - DNA, 809 bp, Glycine max
  unsure (1)..(809): unsure at all n locations
  Clone ID: TF_GmC700886_1
tcgcgatctacctgattcatcccagaaagacaatgacttaggtgcatcacgaaaggttctaaattttcctcacttttcaacaccccgtaataatgtttcttcagcacctggtagtacacagtttagggaaaaaactactgctaacttgtcacaaagtgaggctagagagtactcagtgatcacagttggttcaagtcactgtggcagcagtcatatccctcaggagaaagatgtaagcagggtttcaagcagtgctgtttgggctactaataataataatagtttatctgctgagcctgaagctgtcagagattgtgtccagagaccaatttgtcctaggagtgacaaaggaaaatcagagatgattgaaccaactgtgacttcatcttctggtggctcaggcagtaccggtattggaagaacttgttccctatcaacaagagatcatggccaaaagagaaaagggacagaagaagaagcatctgaggaacaaagtgaggccacagaacttaaatcagctgatggaaacaaggcttctcagcggacggggtcttccaaaaggaaccgtgcagctgaagtgcataatcaatcagaaaggagaagaagagataggatcaacgagaagatgaggacattgcagcaactgatacctaacagtgacaagacagatgaagcatcaatgttagaagaggcnaatcgaatacttgaaatcgctccagtttcagcttcaggtaatggtgnatggggtctgcatgacaccagtgatgttcccaggaattcagcactatatgtcacaaatgggtatgggg

SEQ ID NO: 27658 - DNA, 1088 bp, Glycine max
  Clone ID: TF_GmC1214_2
ctccctctcggaactttgaaaacgtgcaagcaaaccccacacccccgacaacagtccccgtttgttccgctgcaaaacaaaaacaccgcgtcttccccgtgcggggaaaaagaaaagaaaagaaaagaaccctcaattttccgggaaaaccctccccacaatggtttcccgggaaaacaccaattggctcttcgattacggcttgatcgacgatattcccgttccggacgccaccttcggcgtcaattcctccgccttcacatggccccctaacgccttgaacgcttcctccaatgtcggcgttgaaattgatggctcgttgggggattctgacagtctcaaagagtctggctcaaagaaaagggttaggtctgagtcatgtgctgcttctggctccaaggcatgtcgggagaagttgagaagggataggcttaatgacaagtttgttgaattgggcgccattttggagcctggaaggcctgccaaaacagacaaggctgctatcctgattgatgctgtccgaatggtgacccagttacggggtgaagcccagaagttgaaagacactaatcagggtcttcaagaaaagattaaagagttaaaggctgagaagaacgaacttcgcgatgagaaacagaggctcaaggcagagaaggagaaactggagcagcagctgaaatctttgaatgcacagcctagtttcatgcctccccctgctgcaatccctgctgcatttgcggcacaaggccaagcccatggcaacaagttggtaccttttattagttatcccggagttgcaatgtggcaattcatgccacctgctgcagtggatacctcacaggatcatgttctccgtccaccagttgcctaagctggcactgtacaattctctgggccagcattttggctcaaggttgtatccattttaccaataccttcttggctttgttagttctcttctaagtattctaactggacccagtggtgacttctgactatatctggcatatgatactattatgattaatgctggtagttgcatgtaaatcagtcaatgttaaataaccctgtctggctgtcttcacccc

SEQ ID NO: 27659 - DNA, 818 bp, Glycine max
  Clone ID: TF_GmC1444_1
aatggagaacaaccctagttcatccagagttgacagaaaattcattgagaggaatagaagaaatcaaatgaaagctctctttcgcaaactaaactcacttgtgcctcatcaaagatcaaaggaggccattccactgccggatcagctagaagaagccacaaactacataaagaaactacagattaatctggagaaaatgaaggacaagaagaacatgctactaggaaatgaaaggccaaatgagagaatgaataatgatggaaggagggtgggattaaaatctccacggattgaaatccaacaaatgggttcagccttagaggttgttctaataactgggttggattctcagttcatgttcggtgaaaccattcgtgttcttcatgaagaaggagtagatgttgttaacgctagttataaagttattgaagatgcagttttccattcaatacactgtcaggacaaggaagaaactgccaacggagctgcgaggatatctgagaggttgaagaacttcatccatgattctagctacaatgctttttaaatgggagtcattattattattatatactcaatttttcttccatttcattttacataagttttctttctactttatttttcttatatcatttcttttatgtatcactttcttcttctttttctctgtttttcttttacttccatctgttccccccatatatggaatgtacacgtagccttaactttttccctagtgtaagacgcgtaaattgggaatgtttgctgtaaccattttggtggaaatctaattaaatacggataattctagaggg

SEQ ID NO: 27660 - DNA, 1293 bp, Glycine max
  Clone ID: TF_GmC1305_1
gttttaagagtaccatgcttcctttgtttcgaggcaatgagctggttatgcagttttctaataggccccagcgccagcaacacaaaatctccgaagatctaattctggatgattatgcttctctgaatgtcaatgattctaaccaaaaattcatcactagtagcagcagccaaccaacaaagaaacttttctatggggcaaataaaaagaatcatgactcacccgaacaagcgaagaagatgattcataaggagattgagaggcaaaggagacaagaaatggctaccttctatgcctctcttagatcccttctccctcttgagttcatcaagggaaagcgttcaatatctgaccacatgaacgaggcagtgaattacataaagcacatgcagaaacatatcaaagagcttggtgccaagagagatgaactgaagaaactctccaatcattccaataatatggaaaataaccatgagggcttgcatacatcttgcaacttcactgtccacgagaaaaatggtattattggaatagaaatcaccagtgtcttcagagaggaaaagcctaaaatttcaaagttactacagtttttgactgaagaaggacttgaagttgttagtttcttttcaacagaagtcaatggcagattgctccacagtgtgcagtgtgaggtgaaccattccaacagtgtagatccatctgagctgagaaagaaagtttccaaagcattttcaacctttagatgctctgattgattttgtcgttgaagctagctagcctcacaatctggctaataacaggaaatttacccatagcatgcattttaaacggagagctactctaactatggtactatagaaaaaatctaagagttttagtattgttatttttttggattaatagttgaatgagtttgagaagtgaaaaagagagagggagaaagagagattcattaaatggaagctcgtttaactattggtaaaaaaaatatcagtactaaaaccttaaatttcttaggctaccatagaatttctcttttagacttttctaacttgatagactttgtttggatgagtttgcttgcaaattttaaattggcaactgtccccttttttctctttgatttggactctgctgctttctttgtgaagaatgagggaagaagacagtaaaatcgtacaactcaaaaatgaactctatcccaattccttttgtagcttttctgcaataaaatggattcagtttctgtcttttttttttttcctttcaaaatttacagatgtgcgttaaaaa

SEQ ID NO: 27661 - DNA, 804 bp, Glycine max
  Clone ID: TF_GmC5053_2
ggtccccggtggtttctcggagcagcattgacgatggaatgctttccttcacttccctgccggctgcaaatataaaatcagttaacggtgcttgtgtcggtgccggtgattcggatcactcggatctggaagctgaaccaaagattctatgctctacgagctgtagttccaaatgtatccaagatggacaaggcatcgctgttgggggacgccatattgtacattaacgagttgaaatcgaagctcaacgtgctggattcagagaaaacggaattggagaagcaattggattcaaccaagaaggaactcgagctcgcaactaaaaaccctcctccaccgccaccgccgccaccaccaccaggaccgcctccatctaatagcgtagaaccaaagaagacaacaagcaagctcgctgatttggagttagaggtgaagatcattggttgggatgcaatggtaagaatccaatgcagcaagaagaaccaccctgcagccaggttgatggcagcattgaaagatcttgacttggaagtgcatcacgccagcgtgtctgtggtgaatgatttgatgatccaacaagccacggtgaacatgggaaacaagttttacacgcaggaacagcttctgtcggcactatcatccaaagttggcgatgaactacgatagttccttctgtactattattggtagcagtagctgtagctttctatgtaaattagtgttcttatttttggttagtcctttttggtagcttggactaaattaattttattgaggtaatttgatttgggaagctgaatgatc

SEQ ID NO: 27662 - DNA, 818 bp, Glycine max
  Clone ID: TF_GmC234074_1
cttgcatgcctgcagattgttgatcttctcagaagttctttcatgtaatcaatagtgtctccaagtatagatgttctatccatctgtgatatgcattcaacacaacaaattagatctacacattatgtaagtacagctctcattgaatgaatggctctcactcactgcatagtgcataccttactaatcttggggacaattgctcttagcatcgagagccggtcgtttaacctctttcttcttctcctctccgccattagattcttggagggttgcccctgaagcttctttgatcggttctttctttccagacccgttcccatgttgaaaaccggcatttcagaggattgggttggctccattttacatgtggtttgcagctccaaattcttaagctcttccccaagcaaaccctgctcctcttcttccatcatagacaatattggataatcctcttgaccaagaaatggaggggtattgagtggagtatcaagggtgctatagaatgaatccataatctgtggtgatgattcatcaagtaaggagccatagatttcactgaaggggtagtcgttattgtaagtttgaggaacttcttgaccacaagaagagtttggaaggtaaggtagagagttttgatcaaagcagtcaaaactcccaccatcaaagaactggttttcttctgttcttggattggtgtcccatgtttctcttcttagtgtcattaattcctccaagaaatcctggtcataaaactccatatctctctctttctttctctaaatgcctgtgtgtgtgtgttgtgacaaacgcgtcca

SEQ ID NO: 27663 - DNA, 842 bp, Glycine max
  unsure (1)..(842): unsure at all n locations
  Clone ID: TF_GmC1214_4
taccggttcgagaagacgacagaaggggccacgcgtccgttcccattttggcagccactctttctctctaccctccaacgtgctctccttccaatcacactcacaataacaaactaaccaattcaaagttcacacacacacacagcttgggaagaaaatcgagaattttccgagaaaatccgaagaaggcgggccatggtttccccggaaaacagcaattggctgttcgattacccgctgatcgacgacgttattcccgtcggcgacgcctccttttccgtctccgcctccgccttctcctggcccccacctcccgccaatgtcagtgttgaaattgatgcttcgcttggggattctgatggccccaaagatactgctttgaagaaaagggctagatgtgattcaagtactgcttctagctctaaagcgtgtcgggagaagttgcggagggataggcttaatgacaaatttgttgaattgggctccatcttggagcctggaaggcctcccaaaacagacaaggctgccattctgattgatgctgcccgaatggtaacacagctgcgggatgaagccctgaagttgaaagactcaaatacgagtcttcaagagaagattaaagagttaaaggctgagaagaatgaacttcgtgacgagaaacagaggcttaaggcagagaaagagaagttggagatgcaggtaaaatcaatgaatgctcaacctgctttcttgccaccccctcctgcaatccctgctgcatttgctccacaaggccaagcccccggcaacaagttgatgcctttcatcagggtacccggagttgccatgtggncatttatgcc

SEQ ID NO: 27664 - DNA, 494 bp, Glycine max
  Clone ID: TF_21888659
gcacgaggtttcagacactcaccattcttacttagttccaaacacacacacactccaaacccactataagaaagaacaaaacaaccccatttcccatttcacgtgctatttgtgaaatcacctacccttttgaacattaactttattattgttattgaggcatggaaatggaagattttttatggggtggtggcattgatgttgatgtcaccaagaggaaaagtgatggttttgaaggaagcaatggcgtgattggaagtgggtggtgtggttcatctttctctctggtattggatagggagagaggggagcttgtggaggaacctgtgagattggaaaagaaaggggtgtccactgagagaagcattgaagctttgaagagccatagtgaggcagagaggaaaaggagggcaaggattaatgcacatcttgatacacttcgcagtgtgattccgggtgctatgaagatggacaaagcatcattacttggtgag

SEQ ID NO: 27665 - DNA, 2127 bp, Glycine max
  unsure (1)..(2127): unsure at all n locations
  Clone ID: TF_GmC253_1
ctcgagccgttgtcattgggaattgattcctaaaatttgacgaaaaagagattacaggngaagtgggaaaacagtagatgatcccaatgggaattggcaaaattggagatcatcgacatcaagatgctcaaccgacccccagctcgctttccctttctttctctgataaagcgtcgtaacagaacaccactattcccctacggaagagggcacaaggtccattcttagaaaattggtcacacgcatacacaaaactttaagaaaatcatatatgtaaaagtaatatacaatggatttttgtagtaaggttattttaggttaatgttacgcgaacaacatgtgtttgatgggaaattgatgagctattgctctgttaggcatctgaagctgtatattttgatttactaaattttcttttcaacctcatctagctatttggttatgttactcataggatttacatataaatcttctgctgacttctgctgagtacaaaattgaaagcaaacaagttttggcttccaaaagtacaagactacgagttgataagaacatattcatctactgccaaaggcctgaagttgaaccatggattgttcagctgcaagaaaaacacaaaaggctgaccgtgaaaagttaaggagggatcgactcaatgaacaattcgtagaactgggtaacattttagaccctgataggcccaaaaatgacaaagcaaccattctatgtgatacaattcaattgctaaaggacctaacttctcaagttagtaaactcaaagatgaatatgctatgctaaatgaagaatctcgtgagttgactctagagaaaactgatctcagggaagagaaggcttctcttaaatctgatattgacaacttgaataatcagtatcagcagcagctcaggaccatgtttccatggactgcaatggatcattcagttatgatggctccatcatcgtatccatatccagtgccaatggcagtacctcctggtccaattcccatgcagccataccccttctttgctaatcaacatcctgcagtcatctccaacccctgttcaacttatgttccttatttagcccccaataccattgttgaacaacaatccaccctgtacgtatcccctccactacatccttgtgctcggtccaatgtgtcaggaaaacaagagtccaagagcaagtcatccagggagagcatggctgaaaagaatgaggattctaatgatgtcactacagaccttgagttgaagactcctgggtcttctgctgatcaggatttatcatccggacaaagaaaatctagcaagttgtcaaggagggaaagcagttgcacagaaggaagttcattaggtaggtgttcttcttctcgcagtgttcaggacagctcatcgagcagtgtggcggcaagcagaaaggataatgaatgaaaaagtagacaagttagtcaagttctcatgccttgaagccgctgaaatttttcattgtgcatctgctgctactctggaggtgtaagtcattctgttctaatcccaaaataaaagtcacttctgctatctcttcctgaccaagaatttggtccaagtaggtttaaatcttacataatttaagcataaacttccccttttgggggaaaaacttgaaatttcagctggaaaatcaccaaattgaccagtgtggctatcgtgtaggtttgtaaactctttcatagttgttagaatgcatgattcgatacaattcagcaagctaacaatttgtatcatgcaatgaattgtcgatgactttgatctgtacaatacttgcattaattgatgatatcaatgcaatttcatatagtcagttcaaactctggagaatcgagattcggcacaagttgtcgctcatacaatatatgcaccatttggctacatgcacctcacaatattatgtggctcctaaaggcaaagaaaaaacagaagaatgtgacttgagaacactgtattgtccaatgtctacaatgtgagtgaacttaggatgttaaaaatgtgagaaccttgtccttcaccgcaaaatctctcaaaagatccatatatgaaaaaatgttaacaatgcatttttttatccaatattctctaactaat

SEQ ID NO: 27666 - DNA, 1211 bp, Glycine max
  Clone ID: TF_GmC253_3
ggaccttcatttgtcattgggaattgattcctaaaatttgacgaaaagagattacagggaaagtgggaaacagtagatgatcccaatgggaattggcaaaattggagatcatcgaccatagatatcaaggtctgaagttgaaccaatggattgtacagctgcaaggaaaacacaaaaggctgaccgagaaaagctaaggagggatcgattcaatgtacagtttgtagaactgggtaacattttagaccctgataggcccaaaaatgacaaagcaaccattctaggtgatacaattcaattgctaaaggaccttacttctgaagtcagtaaacttaaagatgaatatgctactctaaatgaagaatcttgtgagttggctcaggagaaaaatgaactcagagaagagaaggcttctcttaaatcggatattttgaagttgaataatcagtatcagcaacagctcaggactgtgtctccatggactgcaacggatcgttcaataatgctagctccaccatcatatccatatccagtgccaatgccaatacctcctgctcctattgccatgcagccataccccttctatgctaatcaacattctgcaatcatccctaacccttgttcaacatttgttccttatttagtccccaatacccttactgaacagcgatccacccagtacatgtcgccacctgttcatccaggttttcggtcccatgtgtcaggaaaacaagagtccagaaacaaatcatccaaggagagcaaggctgaaaaacatgaggattctaatgatgtcactctgactcctgggtcttctgctgatcaggatttatcatctggacaaagaaaatctagcaagttgtcaaggaaggaaagcagttgcactgaagtgagttctttagataggtgctctttgtcttgtagcgttcaggatagttcatcaagtagtgtagttcacaagcacaaaggctaatgaatgagaaatggtacaattttggtcaagtgcttatgatgaagtttttccattgttttaactgctgcaactgtctggaggcataagttatttgtggtcttattaaaaaagaagtaacttctgtaagtctctccctggctaggaatttattcttaagtaggtttaaatactaaaaaacaaaaaaaaatcctatacccaaactttttcttgctggggaaaatattggaaggtttggatc

SEQ ID NO: 27667 - DNA, 782 bp, Glycine max
  unsure (1)..(782): unsure at all n locations
  Clone ID: TF_LIB4165-033-Q1-K1-D8
ccacgcgtccgctcctgagcactggatcgatcgagtttcaatttcctctattatctttgttgctttccatgtaaccccacctcttatccatatatatccattcttcttcctcacacttgtttaatttgcacaaatatattatactccaaataaaccgtctcataatggaggagtcaggggaaaattggccttccgataattcttatctggatgaggtcaacgatgaatttggtagtgaagatgaagagggaggttcattttctggaatgggcgagaccgacagaaagaagagaaagcgagaactcgcagagaggttccttgcactttcagccaccatacctggcttcaccaagacggacaagacttcaatcctggccaatgctagtagctatgtgaaacaacttcagcaacgtgtgagggagctagagcaagaagttcaatccaacgtttctagcaatgaaggtgccaccagctcttgcgaagtgaactcatccaatgattattactctggttggtggaccaaatgaaattcttcccgaggtcaaagtaaagagtgttacagaaagggacgttctcatcataatcccactgtgagaaacagaagggcatcatgctcaaaatactttcccagcttngaaaatgttaatctcttctgtagtcaaagttagcgtcttgcgaattgggaaaatcactctcgacatcacccattatgcttaaggtttataatttttttatcgaccaatgttaattattttttttgttaaatggaaagaattcccacc

SEQ ID NO: 27668 - DNA, 612 bp, Glycine max
  unsure (1)..(612): unsure at all n locations
  Clone ID: TF_LIB4165-033-Q1-N1-D8
gttggaatctttccattaacaaaaaantaattaacatttgtcgataaaaaaatataaaccttagcaataatgggtgagtgtcgagagtgattttcccaaatcgcaagacgctactgttgactacagagagattaacattttcaagctgggaaagtattttgagcatgatgcccttctgtttctcacagtggattatgatgagaacgtccttctgtaacactcttactttgacctcgggaagaatttcatttggtccaccaccagagtaataatcattggatgagttcacttcgcaagagctggtggcaccttcattgctagaaacgttggattgaacttcttgctctagctccctcacacgtntgctgaagttgtttcacatagctactagcattggccaggattgaagtcttgtccgtcttggtgaagccaggtatggtggctgaaagtgcaaggaacctctctgcgagttctcgctttctcttctttcttggcggtctcgcccattccagaaaatgaacctccctcttcatcttcactaccaaattcantcgttgacctcatccagataagaattatcggaaggccaattttcccctgactcctccatta

SEQ ID NO: 27669 - DNA, 426 bp, Glycine max
  Clone ID: TF_jC-gmXLIB3563P088Aa07a1
ggggcccaacccacccttttccagaagagagccgcgctcaggaagaacatgaacatgagtgacaataagaagaggaaggagaaggatgaggtggtggttgaggatgtgagtttcgacgggtctggcttgaactacgattctgacgacttaactgagagtaattataatgaccctaaggagaagaatggtggtgggggggttagttccaatgccaacagcaccgtcaccggtttggatcagaaagggaagaagaagggaatgcctgctaagaatttgatggcccaaccacgccccccgaagaagctcaatgacagactctacatgctgaggtccgttgttcccaagattagcaaaatggacagggcttcaattcttggggatgcaattgagtatctgaaggagcttctgcaaaggatcaatgatctg

SEQ ID NO: 27670 - DNA, 883 bp, Glycine max
  Clone ID: TF_GmC253_4
cggtcatcctatgcccttattgagaatttgagaaattggatggagaaagggtcaaggctcaaaatatggaagcagtctgatataactcgaaacattcattaacttagctctctgttggttttccagttttcatcatgtcatcatttatgtgtgatctgtccattcctagaaaatcggtcacacacacacacaacacttttagaaaatcatatattttaaagtaatatacagtgggtttttgtagcaaggttattttatgttaaatttaggcagaccaaatgtgcatgatgagaaattgattagctatgctctgtcagccatctgaagccgtatattttgatttacaaaattttctgttcaacctgaggtagctatttggttaagtaactcaaaggatacattttgatcttctgctgacatctgctgggtacaaaattgaaagcaaacaagttttggcttccaaaagtacaaggctactagtagataaggtagttattaattgatctctgttaacttctgttgcagttataattggttaagtagctcaagggatacattttgatcttctgctgacatctgctgggtacaaaattgaaagcagacaagttttggcttgcaaaagtacaaggctactagtagataaggcctgaagttgaaccaatggattgttcagctgctagaaaaacacaaaaggctgaccgagaaaagttaaggagggatcgaatcaatgaacagttcgtagaattgggtaacattttagaccctgataggcccaaaaatgacaaagcaaccattctgtgtgatacaattcaattgctgaaggacctaatttctcaagttagtaaactcagagatgaatatgctatgctaaatgaagaatctc

SEQ ID NO: 27671 - DNA, 806 bp, Glycine max
  unsure (1)..(806): unsure at all n locations
  Clone ID: TF_GmC253_6
ccggattccgcctcgaccacgcgtccgggaaatgttattagtggagaaatacgacaacacgaatccgtcgtttgttcaaaccgaaacgacaaggcagttcgctttccctttctttctctgagaaggcgtcgtaacagaacacgacgattccccaaggaagtgggcaaaaattgaagatagggatcagtgacagagagagataacaaacgagttataattggttatgtagctcaaaggatacattttgatcttctgctgacatctgctgggtacaaaattgaaagcagacaagttttggcttccaaaagtacaaggctactagtagataaggcctgaagttgaaccaatggattgttcagctgctagaaaaacacaaaaggctgaccgagaaaagttaaggagggatcgaatcaatgaacagttcgtagaattgggtaacattttagaccctgataggcccaaaaatgacaaagcaaccattctgtgtgatacaattcaattgctgaaggacctaatttctcaagttagtaaactcaaagatgaatatgctatgctaaatgaagaatctcgtgagttgactctagagaaaactgatctcagggaagagaaggcttctcttaaatcagatattgacaacttgaataatcagtatcagcagcagctcaggaccatgtttccatggactgcaatggagcattcagttatgatggctccatcatcgtatccatatccagtgccattggcagtacctcctggtccaattnccatgcagccataccccttctttgctatnaacatcctgcagt

SEQ ID NO: 27672 - DNA, 685 bp, Glycine max
  Clone ID: TF_GmC2714_3
gttagaagggaaaaaattagtgagagaatgaagtatttgcaagatttagtgcccggttgcaacaaagtcacgggaaaagctggaatgcttgatgaaatcatcaactatgttcaatctcttcaacgacaagttgagtttctctcaatgaaattagctgctgtgaacccaaggcttgacttgagtattgatgatctatttgacaaagatgttttttctacttgtgctacaaattttccaaacataggaatttcatcaacatcagacatttctaaccctgcctatcttcagtttaattccccacaacaaattttttcatatgatggattagacccatccgatatggggctcagaaggaccataagtgctcctgtatcaatgcctgaaacatatcttcaatcgtcctgtttcacacaaatgctaccctcctcaacatgggaaggtgatttccaaaacctttgcaattttgattttgatcaagcacgggctacatctttcccttctcagctgttatcaggtctggttgaagctggcaatctaaagatggagatgtagactagagcttctatttccttctgcaacttatcaagattctttttgttttgttttcaagtacatagcatatataaattgtttgtaactgctccataatataaataaaatttattaataccagttaacttcagtc

SEQ ID NO: 27673 - DNA, 552 bp, Glycine max
  unsure (1)..(552): unsure at all n locations
  Clone ID: TF_GmC206749_1
gccagttgggcaaggtcttcttggtgctggggaagacagaatggagcaatcatattcatgggagaattgggctcttgacaaggaaatgggggaggatgaggaggagttccttcgcgacatccttagtaaaccggctttttcttccgagagtgaaagtcaagcaccagttgtctcatgctctgccaaaagcaaaagggctccgatgacatacattttgtcttttgataactccaccataacaccagcaccttcttccccccccaccctagaggcccaacctggaaagagggctaaaagagcttcccacattatggctgaaagaaaaaggagacagcaactcacccagagcttcattgcactttcagccaccatccctggcttgaacaagattctgctctcatctctcgcctcggtactggaaatgaaatagcggaatcctatgtagagattttagtatattcttttttttttttaattcttttctttgtagattaacttttttagagacgttattagaatattagttccgtacttaanaaaaaaaaaanaana

SEQ ID NO: 27674 - DNA, 644 bp, Glycine max
  unsure (1)..(644): unsure at all n locations
  Clone ID: TF_LIB4164-021-Q1-K1-C4
gacccacngcgtccgctagtgagttttttttcccttcatcgtctttctcttgaaggtatatanttgaagttgttttgttatgtgtttgcccgagggagagagagacagagagagagccatggcactagaagcagtggtatttccacaatcacaagacccttttggtagtggttacggatcagtgaatactaaggacttctacaactacaccttgttggctgctacttatgaacaacaacacatcaacaaagaagaagaacaaggtggtgcttctatctctacttttcaaccagagactagtaattacccttatggagattggaccaccagttcctcctcatccatgttaccccacttgaataatgaacttcaagaaaccactactactactagtaacaccttagatagcttaaacactcgtcccaagaggcgcagagccaaaagcagaaagaacaaggaagagattgagaaccaaagaatgactcatattgttgtcgagcgcaatagaagaaagcagatgaatgagtatctttctgttcttcgctctctcatgccagactcttatatccaaaggggtgatcaagcttctataattggagggtgctgttaacttttgtgaaggagcttgagcagaaggtgcattt

SEQ ID NO: 27675 - DNA, 1013 bp, Glycine max
  Clone ID: TF_GmC234612_1
cggctgcgagaagacgacagaaggggactcacacactttctatagctaccctcaatctatagctagctagcaatattctctcaatatgatgcatcgtcagattgagatggagaattctgagctcttccaattcctcacaaacaccaacgatagctttcttcaacactgcatcatatggcctccctgcggcacctgcagcatcaaccatgcagcacagcttctctggctccttttcttattaccctttggaagcatctcatgatcatcatgccccttctcatgaagacaaagcccttgctgctttgaggaaccacaaagaggctgagaagagaagaagggaaagaatcaactcccacctcgataagcttcgcacccttcttccttgcaattccaaggtatatatatgatatttcattttgtagttcaatctatgcatactctatcaatcttctcattcgtatgtatttgcatcatcttcgttttaaattaaacttattttaaagaaaaaaagttatttactgtttagagaattaaaagaacagttgctaagaaacagtgggtgtgaaagggtagtaacttgtaaaatctttctcgctttttgttcgcaaaggttgcatactttttgacccaccaaagctaaatgggtgcaccagttgactacagtgtaaaagctaactagtgtgtaacagttaacaactggcaatttattaaacttgatagtttaggagaccgagagttgcatgaatccaacttatagacacgtaataagaattcatctcatataaaaattgataataaaatatttataaataatatatcaattaaatattttaatattataataaagtaaaataataaattataaatttcataatacttaaataataaatttaataatatattactgttagataataatttataaataattatagtagtgaaagaacatttcaatcaagagtttgatgctatacaatgatttaatgttattaaaggtgataatattttgattc

SEQ ID NO: 27676 - DNA, 1758 bp, Glycine max
  Clone ID: TF_GmC6699_1
cccacgcgtccgctctctataaccggcctcctaattaaactcacttgttggtggaaaattaattaaagtacttcttcattcaatggatcagcttggaatcattcaaccatcttcttcaaccaaggttgaaagaaggctagtggagaaaaacagaagaaatcaaatgaagaacctgtacaacaaactcaactctcttctccctagctataaccccaaggaagcattaccactgcctgaccaagtggatgaggcaatcaactacatcaagagtttggaggcaaaggtgaagatggcacaggagaagaaagagaatttgcagggaattagaaagagatcccgtggttgcttctccaataatagtgccaattttgctgcaacttctggtttcccaaaatcgccacaacttgagattcacgaagtgggttcttctctacaagttgttctgacttgtgggctagaccaccagttcattttctatgaaatcattcaaatactgcatgaagagaacattgaggtcagaagtgtcaattcctcgctcgctggagactcagtgcttcatgttgtgcatgctgagattcctcagtcttttcttcaatttggagctaccaaagtaagtgagagattaaaaaggtttgtgaatgggtcctgcagtgatgtggaaacacagcccgagttgtgggattttgaaattggtactgatgatatgtggggtttctagatcttacaaggatgcatttaccaaaagttttgtaaaataagaaaaaaaaatgttagctataatactacaacaagctttaagagtactgtatcaaacatattttgcccatgttccaacaggttttgacgggaattaactaacgagatggtttatcttttgtttgtttgtttgttatgatttgtaactttcaacattaattcagaaaacaaagttctcctcttcacattaaatattgatacctaacataattaagaggtggacggtggtcagtttcattgactgtcttataagtatctactatcctaaatcaggttcccaaaaccataggcacatgcatattaattatatgtctggatcatgaattgcactcattctaatgacaaatttcataagcttcttctaaaactctctcaatatgaggttctatttgatgtcaacaagcaaataaaatattgatggaaaagacagtagtgaaccgaatgaagatgttggctaggatttaataagtagatgggagcacataaatatgttaattgcttcgctgtggattagacagttcacagaagaagattcaatagaaccttgctgagtttcttttccaattcccttgtactactgtccgccattggttttcaatgctcaagggctacacatcttgattcatttcactaatttttggcctttgctaaaacttaacataatataaccaagcatcatataactagctaaatttaattataagaaatttaattaactcatgcggaagaagtctttttctgttcgtatatagggtttttgtttagcagacctttctttgcaaaaaacaataggaaaatcaggtaagttgttctaatctttctcaacatatatatacttggtttggcgtaatgcaagctggaccaactcttatgtttttatgagcataaactaaaattgtaaatgcttttttcctcagtgtgttgtgtatctagggttctgtaatggttaaagaaaattttgttaatttatatattaataaaaaaattggagctgacacttct

SEQ ID NO: 27677 - DNA, 488 bp, Glycine max
  Clone ID: TF_17518532
cttaatcatatctaaaaatgggtcaacaacaacagggaagtcaaccttctccaaccaaagtcgaaagaaagattgtagagaaaaacaggagaagccagatgaagaacctctattccgaactcaactctcttctccctacccgtaatcccaaggaagcgatgtcactgcctgatcaaatagatgaagcaatcaactatatcaaaagcctagagacaaaagtgaagctggagcaggagaagaaagaaaggttaaaggaaaggaagagaactcgtggtggctgttcgagttcttctgaagcacaaggaagcctgaaatcgccaaatatccagattcacgaaacgggaaatttgcttgaagtcattctaacatgtggggtcgatagccagttcatgttctgtgaaattattcgaattttgcatgaagagaacgtcgaggtcatcaatgccaattcttcaatggtcggagatttagtgattcatgttgtgcac

SEQ ID NO: 27678 - DNA, 620 bp, Glycine max
  Clone ID: TF_GmC2279_10
aagctaagtcgaccaatctccctttttttccgttattgttgcttctcgtgtgaacacgtacactttgcatgacaatctgaaagtgtctgaacttgcttttgaaggtctttgatgtaatccacagccaagtccaacatatcagctgtgttagtttgcttgtccatgtttgggacaagatcctgaagtttccgaactagtagttttttttttttttttttgacaaacgccatgagtatgaactacaataagttccttacacaatatagtcttcgaacaaatggaaaatattaaaaactcaaaacattgtttttgcctcaagaaaataaaacactaattaattggataaattgaacctaggcagagcatacacctcagaatccaagcttggtgcgacgccagtgacggcgcttcgcgttgtacctgatggtgttatcggtcctcatgcggatccagtagggaatgggcctgttctgcctcatcttcttcgccaacttcttcttgattctgaatgtcttgtgcgacggcattttcgattcgtcttctggaggctcgactgcgcaccggtcagcgaaaaccctaataaccaaaccctccccttctgtcgtcttctcgcagccgta

SEQ ID NO: 27679 - DNA, 1651 bp, Glycine max
  Clone ID: TF_GmC60110_1
tcccggggctttctcccaacgcgaacaaagtggtgtctcccttgagagctacacttgcacttttccacttgaaaaaaaatttcaactttttccaacaagtgacaataaaaacaatggccctagaggccgtggttttcccacaagatccattcacttacggttgcaacaacaaagacttcttgtactcgttagtaggaggtgatggtggtggtggaggaggaagccacgagtacggtttccaagcatcatcagaagacaaaccccatgtgggaatcattatcaacaacaacaacatagaccacaccctgcatgcaaattgggattcatcttctccttcggtgttgcaaagtgtcaaagaacaatgggattcacactcctcccctgaagcttgcactgttgatcaatccctccccagagccttccctcttcctccttcttcttcatcccccgaagccgcttcctccgccaccggccgccgcaaacgacgtcgtaccaagagcgccaagaacaagaaggagatcgagaaccataggatgacccacattgcagttgagtgcaatagaaggacgcgaatcaacgagtaccttgccgtgcctagatccttaatgcctccttcttaagtacaaaggggtgatcaagcctctattattggtggcaccagtaacttcgtgaaggagctggagcagcttctgcagtgcatgaagggccagaagaagagaacaaaggagggtagtggcttctctgactcttcacccttttctgagttcttcatgttcccccagtactcgacacgtgccacacagagcagcagcagcagcagcagcaaaggctaccctggcacgtgcgaggccaataacaacatggcacggaacccttcatcatgggccgtggcggacatagaagtgaccttggtggatggccatgccaacatgaagatactctgcaagaaacgaccagggatgcttttgaagatggttgttggtcttttaagtcttggtctcagcattctccaccttaatgttaccactgttgacgatatggtccttacctcagttagtgttaaggtagaggaagggtgtcagctgaacacggtggatgaaattgcagctgctgtgcatcaattatcacgcacggttcaggaggaagctgtgttcagctgatcattaaactttgaaatactaaaaggctaggtattgcaccatcttttatcaataattgtgcaaaacagctttgatacccttgttgaaatgcgttcaagtttgtagggtgtggcccgtgaaggcatatagaacaacaagggataggcatgtacatgcatcagtgatctcaaacgagatatataaatgttccatttcaataagctaggagatgccaattaaagtatataggtttactcttttctcattttatattttttttcctcttttatgcttttcctcaatttataacccgagagggaaaaaaggtgtgttggaagcgacaaccaatttatgttgtggaggcccccccttactgaactgtgtatccacttgtgaattattagcgttattttccaaagcatggagctttgttaatttctttggaaaaactgtggacctcttacaattattttctcctgtagaaagatttctatacattaaacaatttcatc

SEQ ID NO: 27680 - DNA, 2447 bp, Glycine max
  Clone ID: TF_GmC1214_1
ttttaaattaaatattaatagcctaatagccacagcaacaacaaggcacttgatataactttcttgaactactaatagcctaatagcgagtattggtatttaactagactgcatgtgatttcatgaataggattagataatgcttctaaaaaaacttataataaacatgagaatgtatattcccttgacaataaaattaaaaaaaaatcctaaacgatttttttttatttctacactgcaacgtgctctcttgcctactgcagcttattcaaatctgtctcattttgtctaccaaatcacactctcaattacactaacacacactgaacttgagagttattttgctcacattcgattctatatatttatagccatagattcccattttggcagccactctttctctctaccctccaacgtgctctccttcccatcacacccacaatatcaaactaaccaattcaaagttcacacacacacacagcttggagaagaaaatcgagaattttccgagaaaatccgaagaaggcggggcataggtttccccggaaaacagtaccttggcatgctcgaatacccgttgatcgactacgttattcatgtacgctacttcccctttttcggtacccgcatccgcggttctctcgatccccacccgccgtcaatgggagcctcgaaattcattcgtagcttcgggattccgatggccccgcagttaaagcattcgatagaccgcgttgacgctaggatctatctgcctctcttccaaactccactgcataaaaaacagttctcgatttttctctccccaaatcacactttcaattacagtaacaccacactcagcttggaaggattttccccaaaaataccaagagctcgcgccatggtttccccggaaaacagcaattggctgttcgattacccgttgatcgacgagcgacgttattcccgtcggcgactcctcctttgcagtctccgcatggagcttctcctggcccccacctcccaccaatgtcagtgtctaaattaatgcttcgtcttggggattctgatggcctaaaaaatcctgctttgaagaaaaggactaaatctgattcaagtactgcttctagctccaaagcgtgtcgggaagatagttgaggagggataggcttaatgacaagtttgttgaattgggctccatcttggagcccggaaggcctcccaaaacagacaaggcttccattctgattgatgctgcccgaatggtgacacagctgcgggatgaagccctgaagttgaaagactcaaatacgagtcttcaagagaagattaaagagttaaaggctgagaagaatgaacttcgtgatgagaaacagaggcttaaggcagagaaagagaagttggaggtgcaggtaaaatcaatgaatgctcaacctgctttcttgccaccccctcctgcaatccctgctgcatttgctccacaaggccaagcccctggcaacaagttggtgcctttcatcagctatccgggagttgccatgtggcaatttatgcctccggccgccgtggatacctcacaggatcatgtactccgtccaccggttgcctaagttggcattgtacaattatttgggcttccattttggctcaaaagttgtaatcattttcctatagctttttagttattatcttctaagtgttccaagtaactggattcagtggtggctttgactgtatttggcatctgatactattatgaagtaatggctggtatttgcatgtaaatgttaataagcatgtctggctgtcttcacagcggctttgatggttgttactgtttttgatataacccaaaggcagaaccaaaataatgacaataataataaaaggtcaagcacagcgacttgttattttcgtgaaccaaagtcaatatacttcccttttgtgttgcaaagggtagctgaaagaagagagatgaagtgaaagatcttcgagtttgaaagagccattgtgggtaagaaaaaagagaaagagaataataatgtgtgtgcttaaactcacagatcgcctcgctaattgcgttttcccttttctcgctttcgttctcgcactctctgatttcgcctctttttgcttattattgatgattagggtttcttaatcggtgtttgattgtgttggttttgtgaatgtttggttttagggttttgtgtttcggaagttctgtgccgtacagaattttgtggtcttggaagaaatgtgatttttttaaaataaaaaaatttgggatttcttagtcaccggtggttgttggtttggtttttgttttttgaatgttacgtggctgaatttggtatttttgtgtgtaaatgtctggtcagaattaatgctggtgcctcaggacattcttgcacgtgcgagtcttaattgcttctgcagatttcacattgcttaattttctg

SEQ ID NO: 27681 - DNA, 1031 bp, Glycine max
  Clone ID: TF_GmC1094_1
tttacttcatcacaagcccaatatcaaacggcaaaatttgaagagaaacccaactgccccaatactctattaaacaagctcaagagagaagaatcaccagacgcagcgaagaaaaattctcctgagcctgcattcaagaggcaaagaattgagactccatctccattaccaacttttaaggttaggaaagaaaagctgggggaccgcatcactgctcttcagcaattggtttcacctttcggaaagacggatacagcatccgttcttcacgaagccatcgagtacatcaagttcctccatgaccaagtcagtgttttgagcactccatatatgaaaaacaacggagctcccattcaacaccagcaggattgtgataatctgaaggactcagaaggggcaaaacaagatttgagaagccgagggctgtgtttggtgccgatttcaagcacattcccagtggctaatgagaccagtgttgatttctggacgtctacatttggaggcgcactcattggcaggtagagacaagtggagaactcgtgacaataataactatatatttataaataaactaaaaggaagaagaagaagaagaaaacacgattatgctaaagagaaaattaaagctgaagagaacaaaagagcaaaaaagaaaaaggaagctactcttcaaagaggacacgtaaagcagaatgatgtacactagtaaatgattagtgactactggaagagatcgaataatagattaattagctataggtgctttaagaagttttagtgtttttattattaacatcgatgaggggcaggaacaagtgctaaattcagaggcatttgacatattagattagagtttttgttgctgctgtggttagagagtcagtattatatgcctgaatttagcagatggggctagctagctaacacgccttttgttcctgctataatcgatgtattattgtagtatatattttgaatcattaaaggggttttacaccaactttaattttttttattatttatatgaaaaa

SEQ ID NO: 27682 - DNA, 507 bp, Glycine max
  Clone ID: TF_GmC1094_2
gaattgagactccatctccattaccaacttttaaggttaggaaagaaaagctgggggaccgcatcactgctcttcagcaattggtttcacctttcggaaagacggacacggcatccgttcttcacgaagccatcgagtacatcaagttccttcatgaccaagtcagtgtattgaggactccatatatgaaaaacaatggagctcccattcaacaccagcaggattgtgataatctgaaggactcagaagggccaaagcaagatttgagaagccgagggctgtgtttggtgccggtttcaagcacattcccggtcgctaatgagaccattgttgacttctggacgcctacatttggaggcgcactcattggcaagtagagacaagtggagaactcgtgaccataataactatatatttatatatatatgtgtaaactaaaaggaagaagaagaagaaggcacgattggcaaagagaaaattaaattaaagctgaagagaacaaaagag

SEQ ID NO: 27683 - DNA, 2364 bp, Glycine max
  Clone ID: TF_GmC5663_1
cacgcgtccggggcacggagtggaggacgcgtgactctgtctagaggaacttcacgtatttgtaagcttcttccagaagcatcgcttggtccgttttcttgtcccacggcatcagcttctggagacaccgtgttttctggcttagcttctgacgacgttggcgagccaggttgctctgcgggatcaccggaggtcattacgactccacgcgctgccacttctgctccggcgagtagaggggagggaggcggaggtgtatctcattaagggtatttttgactttcagaaagaaatgacaggtgcaagatacactataggtagtgtaggattcaaaacctcaagtttgaaggatccaaatccacccactataaaggttacttctcacccacccaattacattaattttataactaactaccaaaagattcattatgctcataataattatttttataatccataatttttgtccaaaatcacaattattctgacaagagattccaaagtttattgttaattttttttctttagattccttatattagactagtcaacctcagattaaaaattaaactcctaacaccacgagcatgattcctagtattagttaaatggcctggtacaacacattctttatagatggatgtgtgccatcccacctgctatttggtgttagataacaactcatggtctcacactagcttttccttatgtttatttttattatattacttttacttcaaggtgcaaccaagtgaagccaccctcctatgaaatgccttcaaacgaaaaagctaagcagtcagtttggcagtaccaatcataataggctcaaatagttgcaacattttccttaacaaaaatgtggtacccttaaagcatctaagtttagtttatattacattaatttcacaatccctccacttcattctggtgcctccaacttgtcattcaattccaccctgaagattgtgcttcaggtggttcaaagaagatgggctcactagaaagatcaaagaagaaagtccttctatggaagaaggccatgctccatttttctctatgttttgtgatgggggttttcacaggcttggctccaacaggtaaatcttctctcttttccaccacagttggtgtctcaaataggacagaatttgcaccacaacctagtgaaatgttacacctcacaacaaatgtcaatagaatttggatagctccaatgccagataccatgcccgtgaagcctagaatccttgaaaatgaaaagaaaaaaacaacaaaaagttgcatgcaaaaaaacagccccagttgaagcctagaagactcataatcattgtaacaccaacaagcacaaaactaccccaccaagcagtgtttttgagaaggttggcaaatactataaagctggttcctcaaccattgctgtggattgttgtggaagctaaaaccaattccaaagaactgccagagatactaaggaaaactggcatcatgtataggcatgtggttttcaaggaaaatttcacggaattagaagctgaactcaatcaccagaggaatcttgcgcttaagcacattgagcaccacaggctcaatggcattgtacactttgctggcctttccaatgtttatgatctccaattcttccatcagcttagagatattgaggtctttggaacatggccaacagctttgttagctgcacacaggaagaaagtgaaaatcgaaggacctgtatgtgattcatcacaagtcattggttggcatcttaagaatatgaacaatgaaactgatactatcactcccccaattcatatttcaagttttgcttttaatagctccatcctttgggactctgagagatggggtcgcacttcctctgttcaagacacttctcagaattcgatcaagttcgtgaaacaagtagttctagaggatgaggctaaattaaagggaattccaccagaggattgctccaaaatcttgctctggcgtttcaattttcgtgccagaactcattaatttctagattttagtccaaggcaaaggggaaagacataaaataacgagtgatgaagcaatatagaaattggcagtacagaaattactttcctactactatatagaatttattcattttttttttctctttttcaaatttatcctatgtttaattgtttatagttttattggttcttcctgttttcaaatttttgttagcttatgtaagtgagagggtcttctgctaagaagcaaaaacatttaaagcataaatgaactttttcgaaaaaaaaaagggcgggaacttcccgaggtgtagggcattttttttttttaatttggagaacctaaattgttgtaaaa

SEQ ID NO: 27684 - DNA, 477 bp, Glycine max
  Clone ID: TF_LIB4164-013-Q1-N1-E8
gaagatggacaaactctacttgcatctacatatctttcattattaattattaaacagaagctcaaactctaacatagaaggaaaaaaatcaagcaaaacatttaaaaatgacagtatgacttttttgacagctctacaagaagcaccaatgatttgataataacattttacgttccatcaaattaaacaaaccataatatattcaattgaagcttcaatcctcagtgataaccaacatactacaatgttaaaaactttccaaagtgtaccaaagcataaacgagaaattaagcaaaggtcaaccttattgcaatttggtataagttcctgtaacgcacgcatcttctcattgatccggtctcttcgtctcctttcagatagattatgcacttcggctgaacggcttttcttggctccatttcgtcgtgcaggaacttccttgttgacaccaactgattctttctcaacatcctaaaa

SEQ ID NO: 27685 - DNA, 2098 bp, Glycine max
  Clone ID: TF_GmC298_1
catgacgaagaagatgtcgaagtcgcggaatgagcatccagttaaatcacgtcgtgtccttcccacgcgtcggagtaggttggttctaactattccccatctcgagattacattacacttctcttcatctggggaaacaaatggctaggtctgcgaaagggcatcaagatgaattcgacgacgatgatgaagaagaactcttaactgctaataacacctctttcaaagtgaaggtggatgaacccagcacggggaagagggtgaacccacagcgttcaaagcattcagaaaccgagcaacgtagaaggagcaagattaacgaaaggcaagctttaaagaaaagaagaagaaaaaattctttttgttgagttaattgtttgtgtgtaggttttgagtggaagtttgatgtaattctatattatttggcaatatatgctcgcttgaaaaaattgtgtttttgagccaggtttcaggttctgagagatctgatacctcaaaatgatcaaaaaagagataaggcatccttcttgttggaggtcattgagtatattcagttcctacaggaaaaattacaaatttatgaacagacttatgaaggatggaatcaggagcccacgaaattaactccatgggtaaagttatttggaatggtgcaatgcgaacattttttgtatctgtatactctggaccttgatttatgaaatgttaggcaatgcattatgcatggcaatgcaagtgtgcactatagcagctttcccgactgatagtggtgccacctcaacattgttagacttgtgattttctgattgtataaggattcattttgtatagactgcaaaagaaagagcatcaactaggaagccttattcccactaagtagggtcaccaacatggatttgggaacaccgatgtacttggtcatgtgccatgtactcatgatgccaactgcaaaaaattctcataaagagtttaagttcctttcatgtttaggatttcactactttatgctgtttctttgaattcatgtctgcttgttttctttttttatttatttacaatgtccttttcttccagagctagtagcccagtatgcatatttgaatgagttcaggatggcattgtggcaacttcagtgatctatttgtcacaatggttggttgtgacttagtgtcttgaaattgtaacaatggctttttatctgaagtttattgttctcatctgtttttttttcagagaaataatcacgggcctgcagaaaatactacagatccttctcaagctactcaaaatgggtctgttgatgagaaaaataacaatgtctctccattgttgcccaaaaatgtacagaacccgatagagtctgacttctcaatgacaactattcagaagggcaacatccctggttcaactacagaagcagttcccctgcccatgcaaatgcgattggacatgtttgatccagttgttagcagtagtatggcaacccaacatctgctggaacctgtatctaatgttaacatgctttcccatacccagcctcaattgtggcttgataaacgaaacaagggcaactatattcttccacataatgatacaatgaaggaacaggaggagctggtgaatgaaagtgggtcagatagcatctcaagtgcctattctcagggaattttagattctctcacacaagcactgcactcttcaggcgtagatatgtcccagactaatgtctcagtgcaaattgatgttggtagacaagaaaatgctgggctgatcccctctgcatctacttcaaagggtcatgaaaaccaatctgtgagcaatccagcaatagcacgttccggagttgattactgcaatattgattctgaacaaagttcaaagaggctcagacaagaagcaagctagagattcctctcatgttcattttgtcaggagtttctttttttgctgtttgtcttcagatgagagtaagaggaattgggtggatcggttcatttttgccatgctggttagggccagatcaaatgtaaattttcacgattctggttttgggactaagacattctgaaataaaatgttatatatgcttgcttcaaaa

SEQ ID NO: 27686 - DNA, 411 bp, Glycine max
  Clone ID: TF_LIB3167-024-P1-K1-G12
caagatcgagtttcaatattcgaccccttaatttcatcttttattctctctctatgggtctcttgctttctttgtaaccccacctctgatccattctttcttcctcacacttgtttaatttgcacaaatatattctactccgaataaaccacctcataatggaggagtcaggggaaaattggccttccgattcttatttagatgacttcgtcaacgatgatttaggttttgatgatgaagaatttggtagtgaagatgattcattttctgggatgggcgagaccgacagaaagaagagacagcgagaactcacagagaggttccttgcactttcagccaccataccaggcttcaaaaagacggacaagacttccatcctggccaatgctagcagctatgtgaaacaacttt

SEQ ID NO: 27687 - DNA, 756 bp, Glycine max
  Clone ID: TF_GmC582_1
ggaaaagattagtgaaaggatgaaaattcttcaggatttggtccctggttgtaataaggttattgggaaagcattggtccttgatgagataattaattatattcaatctcttcagcgccaagttgagtttttgtcaatgaagcttgaagcagtgaattcaagacttaactctggtattgaagcgtttcctcctaaagattttggtcagcaagcatttgatcctgctggcataccattcggttcgcaagctccaagagagtatagcagaggttcttcaccagactggttacatatgcagataggaggtagttttgaaagaacaacgtagtctacgagatcccttggtaataaatacataaaccagtggtattccattcttcagtagcacccagaaaacatcaatggtatactcggggaagcaagtacaatgggcacctcattcccattttctacactaggcatggagctgtcactgtttttcacaggactgcttcagtttctatttaagcatctccatatgttggtgtgttggaaaatgaattcatttactcaatatatgtagtatagtggacttttaggctttgtattctgctactcaacataacccttaaaatgatcattcttcttgtaaaagaatgctgcttcatcttaatacatgatgcttacagattgtgtaatactctcaatattggggtttgtgaaacaatgttgaataaattaacctcatagtactgtacaattctgtttttggttttt

SEQ ID NO: 27688 - DNA, 437 bp, Glycine max
  Clone ID: TF_LIB3242-176-Q1-J1-D9
aatttgtgttgtgtgtgcatatggaaagttactactattctggctggcctctggctcaattcaactctgcaccaaacagtgatcaattatctcctttttcagtcccaacaacaacacaacaaacactccctcttgttgctacttcaacttctgaccctgcagctgcagcctctcttcaatttggtgagttcccttcgtggcctgcccccattgcagcagaagatagagctgcaagtgcttccaagagccacagccaagcagagaaaaggcgcagggacaggataatgcacagcttgcaactctcagaaaactcattcccatgtctgataagatggacaaagcaacattactagggagtgtggtagaccatgtgaaagatctaaagcgaaaagccatggatgtcagcaaagccattactgttccaactgaaactgatg

SEQ ID NO: 27689 - DNA, 673 bp, Glycine max
  Clone ID: TF_GmC819708_1
gatagactctacatgctgagatccgttgttcccaatattagcaaaatggacagggcttcaatccttggggatgcaatcgagtatttgaaggaacttctgcaaaggatcagtgagcttcacaatgaattggagtcaacaccagcaggtggctcttcaagctttcttcatcatcctttgacacccactactctaccagcccgtatgcaagaagaactttgtctcagctcgttgccaagccccgagggccatcctgctaatgctagggttgaggttgggttgcgcgaaggaagaggtgtaaacatccacatgttttgcgaccggaaacccggactcttgctctctaccatgacggctctcgacaaccttggactagacattcagcaggcagttatcagctatgtcaatggatttgctatggatattttcagagctgagcaacgcaacgaaggtcaggatgtccatccggaacaaatcaaagcggttttgttggattcagctgctggcttccatagcatgtcctaattgcaaaaaacaaactactactgaaaataccttttcaattagtcaatttagcaatcttaatgtttttaacgctcaaaattcaactgtactatatacaggctcttttaacttctgctcagttgaattaggagaaaatttattttaccaatta

SEQ ID NO: 27690 - DNA, 1058 bp, Glycine max
  Clone ID: TF_GmC710842_1
gcttatggcttacctaaaacaatttatttatttaacaactttcaaacagcatcttacacaaaggctttgctttcttcatatgtcatgaactacttatcccagaaccccaaagttgttattattcacgggaagagaattcgtgactgaagaaccttttgactaccaaggtacaatatggtagaaagagtccactaattctgtctatggtcaaaagagtaaagttgctatctgtgactgtgaatgctcccaagacatgtacaaacccagattctgattcacatgattagtacaaactttccctaacaagtgaaaaggctatttgctaatgccactcactcactccctcttcatattcagatatatgccatgcatatggattatggagatttaaattacatatttaagaagaaaagttctcaaaagaaatctcctatagatgaagaactgaatatagaaatcctccttctcttcctgctttctaacatgtcctgtgaaacagaaaatctatctaacactgatcttagagcttgatgaacagaccctgccagaaactggcggtactcgggatcttcaatattttgttctttgcagctaattatcacaaacacactattcatccttcctcccaaggttgcaatctcagcccttattatcataagatgaagtgcatcaagtgcttgtcttatatcggccaataacccgggtttgtattcacaacatagtgatgccttgattgagtaagggaaaccattcaatccaccctcctgttcttcaactcttatttcatcactgtccttcggtatcattaggccttcactagcttgtgtcgcattcgttttcagctctttcaaatgtctaataacctcacccagcaaggttgctttgtccaacttcttagcaccaggaatgacagagcgaagtgtatcaagatgtgcattaattcttgctctccttctcctctctgcctcactatggttcttcaaggcttcaatgcttctctcaggagacacacccttgcgttccaatttgacaggggcctctacaagctctcccttctc

SEQ ID NO: 27691 - DNA, 1313 bp, Glycine max
  Clone ID: TF_GmC2302_1
gaaagttagtactagtaattgtgtagttgggatttggcgaagctcggttcagggtggaaaaggatcacaatgacggtttgcgctgtgcgcctttccctcacccacactccctcctaattgccatttaataaatccacctcactccttcatccaatgaatgattcctgactccacattctcccccgcttactctctcgccgagatttggcccggaatgccccatttcccccctcccttcccccacccctcctccgccgatcactccaccctcaccgacctcaccgccaccccccgcaagacaaaggactgctcctcctcctcctcctccgcctccaccgccgccgccgacgaggacgactgctccaaggtcctctcctccaccaccaccgccactgccaacctctccaataatgattctggtagcaataaacagatgaagttaggagggtccagtgttgaaaacgatggtttcaaagctgaggcagaagcgagttctgcgggtggtaacaagtcaagtgagcaaagcaataaaccttgtgaggcacctaagcaagactatattcatgtgagagcaagaaggggccaagcaaccgatagccacagtctggcagagagagcaagaagagaaaagatcagtgagaggatgaaaattcttcaggatttggtgccagggtgtaacaaggtaattggtaaagcacttgttctagatgagataatcaattacatccagtcactgcagcgtcaggttgagttcctttcaatgaagcttgaagcagttaattcaagaatgaacatgaaccctactattgatgggtttccttcaaaagatgttggtactcagccatttgacattgctggaatggtatttggatcacaagcagcaagggggtatgctcagggatcatcacctcctggatggctgcatatgcagataggaggtggtttcgagagaacaacataattcagagaagcctcattgggaatgacagatgaatcgataggattgattttctattaaaaaaacaaaaaaatagtgggttgattacagtgtgcttttttaacaacctagtcaactgttgtcgaatgttgtaggtttgcatttcccattgttatagtatgaaattatttatagaaagtgcatcttaatcgcatgtgcttcattgtattagcaattagcaagtagaaaacaatcttagtgtggttttcgtttttaatcctgttgtgataggactcctgcctcctgatttgatttgtataactatatatattgcaggtatgcaattgtgtattttgagtgatgatagtttctgaca

SEQ ID NO: 27692 - DNA, 1154 bp, Glycine max
  Clone ID: TF_GmC1355_1
ggttttccccccgagggaagacgcgagagaaggagaaggacgaggaggttgaggatttgagtttcgatggctccgggttgaactatgattctgatgacttgactgagagcaattataataatgtttctgagggtaatactgggaagaatggtggggttagttccaacgcgaacagcaccgtcatcaccggtttggatcaaaaagggaagaagaagggaatgcctgctaagaatttgatggccgaacgacgccgtaggaagaagctcaatgatagactctacatgttgaggtccgttgttcccaagattagcaaaatggacagggcttcaattcttggggatgcaattgagtatctgaaggagcttctgcaaaggatcaatgatctgcataacgagttggaatcgacaccagtgggttcttcactcactcctgtctcaagtttccatcctttgacgcctactcctcctacgctgccaagccgaatcaaggaagaactgtgccccagctcattgcccagccccaatggccaacctgctagggttgaggttcggctgcgcgaaggaagggctgttaacatccacatgttttgtgcccgcaagcctagtctgttgctctcaaccatgagggctttggataaccttggattagacattcagcaggctgttatcagctgcttcaatggatttgctatggatatttttcgagccgagcaatgcaaagaaggtcaggatgtccatccggagcaaatcaaagcagtactcttggattcagctggctacaatggcatgatgtaactagttttgacaagaaacaaactggtagctgctatttcacagtcaatttggcaagttaaatcagaatcagtttttactttgttatgttcacaattcaagtgtacgatactagctctggtaacttgagttaaagttgaggtagaagaaattttcacatgaattttaccccctgcagcggcagttactatttggtacctttcacttgctcatgtcgaaccgaatcttgatgctactacttcgagttcaattagttcagggacatttctgaaggcgcgttttgacgtgaagtttgtatttatgtttgtcgaacctattgtcctctttatacagttttcgccaaggacaaaactttaaagcaaa

SEQ ID NO: 27693 - DNA, 1804 bp, Glycine max
  Clone ID: TF_GmC1598_1
gaccgagtggaagtgaagtggtggaatagcctagaatagcaaaagaaagtgttgctgctaattccattatttcagtgacccctaattatgatggaggaattgaacaaaccaatggacggatcagcaaccagctggttatccgatttggaaatggatgattacaatttatttccagatgaatgtcccttgaacttgaacatgtttgatgaccgagagtttctctcacaagacattgctagtgcctttcaagaacagacacagaccttgcaacagcaatctttgtcttcagagtgcccttcaaaaactgtgagcaactcatccaccgatgaaaccacctttgactttgagagaccatccaagttgctgaaaacgacaacaagcactagttctaactttgactcatccaccatcaccaaaaccctttcccccaaactttccccatcatcttcctttcaatctcagattctctcttttgacaacaccaacacgccattcttatgagtcaaactttccccatcgtcatctttttcctcatttcagtctcagattctctcctttgacaatcctaacccaacctcatcttccaacaccaccacccagttttatgggtttgactgtaccttaaacccaacacagaacgagatggtgtcagtgtcagtccccaacatgagaaaaccacggttcccaactcaaaccgcaaaaggttcaccgaaaaatcaaaactttgaaacaaaaacctcacatggtaagaggtctccagctcatgctcaagatcacatcatggctgaaagaaaacgaagagagaaactcagccagagcttcattgcccttgcagctcttgttcctggcctaaagaagatggacaaggcttctgtgttaggggacgctatcaaatatgtgaaagagcttaaagagcggttaacagtgcttgaagagcagagcaaaaaatcaagggcagagtcagtagtggttctgaacaagccagacctctctggcgatgatgattcttcttcatgtgatgagagcattggtgctgatagtgtcagtgactcactgtttgaagtggaatcaagagtatcagggaaggagatgctgctcaggatccactgccagaagcaaaagggtcttttggtcaaattactggccgagattcaaagccatcacttatttgttgctaatagcagtgtattaccctttggtgattctatccttgacattaccatagtggctcagatgggagaaagttacaatttgaccactaaggaacttgtcaagaacctacgcgtggctgcattgaagatattgtcataacatgaacgtggcttgagtatggaggataccctcatgacatatgatatggattggaactctgaatcacatttaatgcgccagccaccgagtaaatcacaaccaaaatggaagccttgttattaatgtgtgatttccgctacaacctgcagtgttccccaatatgtagattcagcttgatcccaagtgatcttgtctttttcgtgttatgttttggtttctcaggccttcagtgtgtgcctgctcgagggaaaaataattgaataattttgtaaagatgttaggaataatttcaatctgacacggcttaattaacatgagcttaaatagagattagaagctggataatggtgacattgacagtttttgatgtaccatttgttcttttgaacatgtttgaaggatgcaaatctctctaatttctggttatgcttccactttaattataatattggcccccagcatttatgtaaatcacctactactataatgggct

SEQ ID NO: 27694 - DNA, 1786 bp, Glycine max
  Clone ID: TF_GmC19_1
cacacacaagacagccaaattgaactgagagagaaagaaaacagagagagagaaaacagagagagagaaaaaagaaaacattgaccgccattaaaacccacttcccttttttatatcactcccaaacacattcctctcatttccttttccattttcctttctctttgtctttctctcacaattcatcactttagcattgcaacactgaaaggaaaagaatactctttaagaacttaaaaaacaaccaattctagtttgtgtttcgttttctctacagttcctacagtccggttcggtttggttcaattggatcatggagcaaaccactctcgaagccattcagttcaacgaggaaatccaaggcctcatggctgctccggcgccggataccgtcaattacttcaaggcgttgctcgagcttccgtcgacgcaggccgtcgagctcctccactcgcctgagcgcgccagaaaaccgctgcgcctcaccccccctcccaacgccgccttaatcgaacgcgccgcgaagttctccgtgttcgccggcgagaactcgccgcctccgcccgacctcgcctgcccctcccccgccgcgcccggcgcccgcgccgcctgggtctccgtcttcgccggcccgaacgcgaccgcgaactcgaactcgccggaggtgaagcgcgagctgccggagaccgacgccaacccgagctccactcacggcggcggaggcgccggctccgtctccgatctcgccgtggagaaccagaatctgaaaactgcgaagaggaaggagcgagagaagaaggttaaagcgtcgtcgaagaagagcaagagcgtcgccgccgccgacgagatttccggcgacggcgagaagcttccgtacgttcacgttcgagttcgtcgaggtcaagccactgatagccatagcttagcagaaagggctaggagagagaagataaatgctcggatgaagcttttacaagagctggtcccgggttgcaacaagatatcgggaacggcattggttctggataaaatcatcaaccatgtgcaatctctacagaatgaagtggagatattatcaatgaaactggcagcagttaacccagtaattgatttcaacctcgacagcttactggctactgaaggagtgactccaatggactgtaacttccctccgacagttgcacctgtcatgtggccagaaatcccacagaacggaaacagacaacaatatcagcaaccatggccgtttgatgcactccaccaacccctttgggggagggaagaagacaacactaatttcatgactccagaaaactcactcttgagttatgactcatcggcaaattcagtatctctgcattcaaatcagttgaagatggagctctaaagggaaactacaaaggtggtggtaccagtagcaattagcctattagtgtatataacaaatatagtattagcaattagtcatgatttgagcagcctcaacattcagcaggttttccctaactctattttgtcagagtcagttggaaacctggattttattcagccagcaaggaagaagaattggtatgctatttttatttaatatattactatcactatgtatactaactatagtaatcattcaatctttcaagtgattgattgatttagattgtaaaatcattgaacgaactattactgaactatcattgaagtttgttgctttgttcattaaatgctacttagatggttggctctttttcaggattttcctaaaaaaagatattttaatataagaatt

SEQ ID NO: 27695 - DNA, 2787 bp, Glycine max
  Clone ID: TF_GmC414_1
atccacgcggaagcccatctgatcatataacacaacacactgcaggcttgttgtgttgtgctgtgttcattctgaaactttgatctatgtgagacaagttgtggctaccctgcaaagccagaaaaaatggtgccagagaacttgaagaaacaacttgctttggctgtgagaagcatccattggagctatgcaatcttctggactgattcaactacccaacccggggtgttgagctggggggaagggtattacaatggagacattaagactaggaaaacaagtcaaggagtagaactcaattctgaccaaatagggttgcagaggagtgaacagctgagagaactattcaaatccctcaaaactgtagaagtcacccctcaaaccaaaaggccttcagcagcagcactgtccccagaagatctcacagatgctgagtggtattacttggtttgcatgtccttcatattcaacattggccaagggttaccaggaagaactctagcaaagggtcaacccatttggctgaacaatgcccattcttctgattgtaaaatttttagccgttctcttctggcaaagagtgcatccattgagacggttgtgtgctttccgtttagggaaggggttattgagttaggtactactgaacaggtcccagaagatttgagtgtcattgaactgatcaaaacttctttcttgaatagtctgcatgccaatgttcccaataagtcagtagctacattgaaatcaaggaaccaggaaggtctttcttatgcagcatttgatcataatgactataatgttaaatcaattccagaagttgggtatgaaatagccaacacaacctctcctgatggtagttcaaatgcattccaagccaatcaaccgctagatgaaacatttatgattgaaagtataaccaatggcacttctcaagtccaaaactggcaagttattgatgatgaattgagtaactgtgtccataactccatgaattccagcgactgtatatcacaaacttttgcctgccctgagaatattgcttctgcccccaagtctaacaacccttctgatccttgtgcccgaaattttcaaaagtgcaacaacccaaaaatgaccttagtggatcctcgaagtgatgatttgcactatcagagagttctttctacccttataaaaagttctgaccagttacttatgggaatgcatttgcaaaaatttcctcaggaatcaagctttgttagttggaggaaagaacagccaatggattgcaaatggccaagagcaggaacgtcacaaaagttattgaagaaagtattgtttgaagttcctcaaatgcacttggatgggctgcatgagtctcaagaagagaatgactataaagagggaatgagagtagaggctgatgaaaacggcatgaaccatgttatgtcagaaaggaggaggagagcaaaactaaatgaaaggtttttaacccttaggtcaatggtcccttcaatcagtaaggatgacaaagtttcaatactagatgatgctattgattaccttaaaaagctcgagagaagggtaaaagagttggaagctcacagggtggtaacagacatagagactgggactagaagatcaccacaagatacggtggagaggacttctgatcattattttaggaaaaataataatggcaagaaaccagggatgaaaaagaggaaggcttgtggtgtagatgagacagaaaaagagattaattcagatgctttaaaaggaagttatgctaatgatgttactgtgagtaccagtgacaatgaaattgtgatcgaattgaagtgcccctcgaaagcaggaaggctgctagaaattatggaagcaatcaacagtttcaatatagattttagttcagttcagtcaacagaagctgatggaaatctttatctgaccattaaatctgtgctcacaggaccaagtgttgcaacaaccaaaagaatcaaacaagcactccaaaaattggcttccaagtgctgaatttttatctataccttaaaaaccgtggggggtgttgaatctaattcataccactgccgtgtgacatagagagtccattagaatgatggagtcacaactcactagtgcagctcttggagattttttttctttgaagatttctcataaaaggaaaatgtagactttcactcatctttcggcaataccataactcttggtgacgcaagatatatggactttgaatcacttgtaaatgggtaggtaggcttagttgactagatttatgtaattaatgccacttgctcctatgggaacactaaggttgaccaatgactaaatattgacagagagacgtacattattaattatgatagagctgcgcgtgacgttgaaattgaaaaaaaataaaaaaaacccagctgcacaaaaaaataaagggccttcgaaaaaaaaaatggtctccccagctggcggacccaggaaaaaatccaggtttatgtcggcgtgcataacattatataattctgctaggggaaatacactggccgtgactgacccgttggcactgcaaaaccctggtgacacccagcttattcccttccaattgccttagccttaaagcagtttgccgaaaagcgattaactaacgattgcgcccccttcctaaaatttgcgcaccatgtttgcaaaatgaaactccccttgaagcggcccattaaccccgcagggggcccgggtcacgtgaaacgtgcccacggccctcgccattgccttaccccccccctatta

SEQ ID NO: 27696 - DNA, 1196 bp, Glycine max
  Clone ID: TF_GmC371374_1
ttttcttataaataatcaccatccatattttaccgctataatatctagcagtaaaaaaatgatagtacaactgcaaataatagggagcagaacatgaatctgaatccagtccaagactaaacagaaaggatcttctacgtttagactgtataaagaactgcacttgccaacacaaataatctctaaaatagtatgaactttttaaagtggggtaaaaagtgctgggcaaaagaaaggggacagaaatactgcgagggtggaaataatttacatgttagtttgtttgttactgagaactgctaaaaagttagttctcgcgtattacatccgcttttacctcgatgcccgagaccgcttaaaacccccggctgtggcagctccggggggtctgcaagctacaagttagttacccgcatcatgtgaattgtccgggctagattgtagtagcctccaatcacgctttgcctgactgatgcttttctggattctcttgacctctactagtactaggcttgctgacatttggttggttcattgtctgcttccactgttgctgtgcctcttcgtgactgtgggcctcttgataaggatcagtgaagtttgggatacatgattgatctggatctagtgtaccaagtgagttaagcatattattatctgggtgatttgctccttgcattctggatgaatcaggtgtagcaacatggggcatatggaaaggaggcataggaaaccttggtcccaaatgaacagccgcagttgctgctggcaaagtcgaactagctaacatattgggaaatggcattactggtctgttcattcccattcccatttccatgcccatccccatcccaatccccattcccattggtggcatatactgctgtattccaggaaacatcataggtaccatgccatatcccatggacatcatctgcacttgtaattgcagtgacttcaagtactcaattgcttcatccagcattgaagctttgtcagacttgttgcacctaggtataagttcttgcaaagctttcatcttttcattaattctatctcgacgccgcctctctgagagattatggacttctgcagcacgagatctcttcgtagatgtagaaccacgaacttgctttttagcttccggagattcaaaatcaacatcctttttgcagtgagaccaatggagctggtgc

SEQ ID NO: 27697 - DNA, 1218 bp, Glycine max
  Clone ID: TF_GmC159_1
gagacgcttcatccctctctctttctctctcccaaaacgagtctttggatttggattagattcagattgtggccgtggcagccagcagcaatatctctaaactcgaaaaatggatcagcgaaagctacgagactcgtccaattcgaaacccgcttcagatgcagcaccccaacacgtcactctcacctctaaccgcttccgcaactctcaagctgctgtgagggagagagagaaagagaagggtgaaggggaaaacgaggatccaagtgcggcacgaaaggttctaaaggcagaccgcgagaagctcagaagggatcgactcaacgaacacttccaagagttgggaaacgcgttagatcctgatagaccaaagaatgacaaggcaactatcctcactgagaccgtccaaatgctaaaggacttaaccgctgaagttaataggcttaaaacagagcataaaacactttctgaagagtcacgcgaactaatgcaagaaaagaatgaactcagagaagagaagacatctcttaaatctgatatagaaaatcttaatgtgcagtatcagcagagagtcagaatcatgttcccatggagtgcaattgacccttcggctgtcattagtcaaccttactcatatccagttcccatacatatcccttctgctccaatctccatccacccatctcttcaaccttttcctttctttggaaatcaaaaccctggccacattcctaatccttgttcaatgtatgtcccatatactactccaactagccaccccccagttgagccgccatcaatgatgtatgcttccacgtcccacgcatcgaaccaaaaagaatccggtagcaagtcaccaggtcatagaaggtccagtggcgctgaaagaagtagcgagactgacgatgtggtcacagagcttgaacttaagatgcctggatcatcatcaacacaacagggttgcacttctggaggaaggaagggcaagatgaaggatagaaccatcataggtgggagtgcttcaagccagtattcttcatctctaggacttcaagatagctccaacagcgtgggtgacatcccgaagactgataattgatattgtatatggatttttgtaccatttaaccacttcatgcaggtcataaatctatagcagtttcgaattgatactcattccttggtataagtataatttagcaatagattctatcattt

SEQ ID NO: 27698 - DNA, 944 bp, Glycine max
  unsure (1)..(944): unsure at all n locations
  Clone ID: TF_GmC131137_1
atagcatttgaatggtttagaaattgagtaaggaactttactatggttttggctgtgactatggaaaattactatgattctggctggcacatgggcaacagcagctgggctcaatgcagtgatcattcttcttcttcctttgcagtgcctacacaaatactccctcatcatgtcactgactctgcctctcttcaatttggtgagtttcactcatgggcacttcccattgaaggggctgcagaagaaagagcaataagtgcttccaagagtcacagccaagcagagaaaaggcgcagagacaggatcaacgcacagcttgcaactcttagaaaacttattcccaagtctgataagatggacaaggcagctttactagggagtgtgatagaccaagtgaaagatctaaagcgaaaagccatggatgttagcagagccttcacagttccaactgaaattgatgaagtatcaattgactatgaccatgttcaagacgaaagctgcactaaagtgaacaaactgaaggacaatattgtgatcaaagcttctgtttgctgcgatgatcgaccagaactgttccctgaactcatccaagtcctcaaaggcttgagactcacagcagttaaagctgacatagccagtgttggtggcagaatcaaaagcatattggtgctttgttctaaggatagagaagacagtgtttgccttgccactctcaaacagtccctcaaatctgctgtcaccaaaattgcttcatcatccatggcttctagttgtcccgctagaagtaagaggcagagattcttcttgccttctcactgcctacagtaattcactgccgctattcactttttcatttttgtttttaattcttagaggggtcgtgtcactagctcacattattggtttcattntttcacatttgtttaccggtcagatataaaact

SEQ ID NO: 27699 - DNA, 1700 bp, Glycine max
  unsure (1)..(1700): unsure at all n locations
  Clone ID: TF_GmC138935_1
gttgcatgaccaggttgagcagcggtactgtctttcgatcttctagaaaacgaagcgtctgaaaaaaccaccccaaacttctcgaaacccctttcagttctctgcattcttctaacacacacacacacacacagaatgggtgacttgttccactttgacaagaacctctcttcacaagacgaaatctcactttttctgcgtcagattctgctccgttcatcttcaccttcccactccatgcctgctggatcctgcacctccaacgctgctcaacaaaacgtaaatgcacaccacccttctttcacagcgtcacagctccaagatgggaagatcttggcccttgattccaccgcttcttttgtctccggttctgctgcttgcagttccttcaagggccatggtgcttctgctgcaaatgtgtcttcttcttctgctggagtgagtgagaacgagaatgatgactatgattgtgagagtgaggagggtgttgaggctccggccgaagaagttccaacaaaggctgcttcttctaggagttcatctaaaagatcaagagctgcagaagttcataatttgtcagagaagcggagaaggggtaggatcaacgagaaaatgaaggctttgcaaaacctaattccaaattctaacaagacagataaggcttcaatgctcgatgaagctattgaataccttaaacagcttcagctacaagtacagatgctgtcaatgagaaatgggttgagtttgcatcctatgtgctttcctgaaggcttgcagcctctgcagttgtctcagatgggtatggaattaagtgaaagaaacaggtttacctctttaaacatgtcagctactctgcctctgcaccaagacaacaatcccttgcactatgcatccaatctacctaacaaacacaatctcccaaatcagccatctgtgccctatcctccatacattgacaacccagaaacttctttcggtctggaaccccgaatccaaacggatatgaaacctcttcaacacaaaggaggatcttctgagccaatacgaggggaagacattttgcagcaccagcaatcaagtggtatccattcagatgccaatacattaggtggttctcaagttgtcaaagaattcgaatcaggcacgagactatcattcccttttgacacgcaagcatgtgaacccaaagacaacagcaactcttcgcaaccatgcattggcggaagagatcattcaggagtgatcataagaaatagtgagaccaacattgttggtaggtaggtatatgatgcttatgtgaatgatatgtagctaggttcgtgcatgcaatgcaacatgtcttgaaaagcttttcaccagagactgcagaagggagaaagtggtcagtggcaactcgaagaccgaaaagtcagatttttgaagtttactgccagtaatgccttctgaattttggtttcgtaaaagcaggaatctcaatattatcccttgagcattttgtaatgttctcaaaaagcctctggcctacgtgacatgagagcagatttttttttttttctctttctagcttctcgagttgataaaattatgtatgtataatgtatgcagagaatataactccccattgttatgcggattatataacccctgtagaaaatcctatgggggttttatttcagttcccgataaaaacaanttgcctt

SEQ ID NO: 27700 - DNA, 301 bp, Glycine max
  Clone ID: TF_6913441
ggaagcactggatcacatcatgtcagagagaaataagagacaggagctcaccagcaagttcattgcacttgctgccgctatccctggcttgaagaagatggacaaggcgcatgtactgagagaagctatcaattacgtgaaacaactacaagaacgtatagaagatctagaataagatatccgaaagaacggtgtagaatcagcgataaccatagtaagatctcgtctctgcatagatgatgactcaaacactgacgaagaatgctatgggcgcaatgaagcacttgctgaaggtgaagca

SEQ ID NO: 27701 - DNA, 492 bp, Glycine max
  Clone ID: TF_jC-gmXLIB3563P013cc12a1
caagtggtgaagaaggagaatccaaagtaacagagcaaaccagcaacaagaatggcaaatccaacgcaaataaaaacaacaacagagaaacaacctctgcggagacttccaaggataattcgaaaggctccgaggttcaaaatcagaagccagagtacattcatgtccgagcgcgtcgtggacaagccacggatagtcatagcttagctgaaagagttaggagggagaagattagtgagagaatgaagtatttgcaagatttagtaccgggttgcaacaaagttgcagggaaagctggaatgcttgatgaaattattaactatgttcagtctcttcaacgccaagttgagttcttgtcaatgaaattagcggctgtaaacccaaggcttgacttcaaccttgacgaactatttaccaaagaggtgtttccttcttgtgctcaaagttttccaaacattgggatgccattagatatgagtatgagtaacaacc

SEQ ID NO: 27702 - DNA, 636 bp, Glycine max
  Clone ID: TF_GmC821579_1
ttcagaatggcggcgatgcagccgatacacatagacccggagtcggtgaagcagccgaagcggaggaacgtgaagatttcgaaggatccacagagcgtggcggcgcggcaccgcagagagaggatcagcgagaggataaggatactgcagagactggtcccgggagggactaagatggacactgcttccatgttggacgaggccattcactacgtcaagtttctcaaaacgcaggttcagtcactccaacgcgcttcctccgctaacaacaatattaggccacttggtactagtactgttaacgcaacaggaatagggttccctgttgctatgtctaccacttccaattccaccccttattttcctctgcctaaaccttaccaagctcgccacatggagaatatgcacgatagatatgattaaggttgtttagtgtgtacaactagctagttaatcaattcattatattttaagctttagcctctgagattatatatatatatattggtaacaattatatgtatgctgtacatcatggcatggcatagctggttggctcgtctcaattcaggcttctactttgaaattaaatccagttgtgttagttaacttgcttgcaagaaattccaatttttc

SEQ ID NO: 27703 - DNA, 1398 bp, Glycine max
  Clone ID: TF_GmC141926_1
ccggaattcccgggtcgcgtccgcgtccggttccacttcccttctgcagcagagaaaggaagagagggggagctatggagctttctcaacttggtttcctagaagagttggtagctcctagaagagactcatggaatgctttgtccactggattctgtgagctattgtctaatggctgttgttggagttttgacacttttcttgagaacccaacatttggtgcattttcagctccaagatttgacagcccttacagcagtgaagtatcagcagcatacccttttgctgctgatgggttcacaatgccattgtcagagcttgaccctgggagtgatgagccgccaccaccaccaccacttccaccatcattggaggatgcagagattggctttcatgacaacaacaacaagaagaagaacaactttgaagaaaccaaggttgtgtgcaaagttgaggagaaagacagagagattccactcttcaagattggcatgtgtgatgatggagagagaaaacccaagtccaagaagcttgaagggcagccctcaaagaatctcatggcagaaaggaggagaagaaagcgtctcaatgatcgtctttccatgcttaggtcaatagtccccaagatcagcaagatggataggacctctattcttggggataccatagactacatgaaagagcttttggaaaggattggtaagttgcaagaggaagagggtacaagtcagataaatcttttgggcatttcaagggaacaactcaagcctaatgaagcaatatttgatgttgagaggagagaccaggacaccaggatcagcatctgctgtgccacaaagcctggattgctactatcaactgtgaataccttagaagcaataggccttgagattcagcaatgtgttgtaagtagcttcaatgacttttcagtggaagcatcttgttctgaggtagctgaacagagagattgcattcatcctgaagagataaaacaagcattattcagaaatgcaggctttggtgagaaatgtctctaggggaaagatggaacatagctataacaatttgcagatggtgtaaaagaagcaactttccttcattagtttgtaatccaaggaattagggaagtagaggttttaatgagattcagaataagttggctttggttgatgatttctttcttaaagcctctcactgtgttttaacatatattgggggggctatcctttagtgcatgctgcaatttcatcttttgaaaaaagtgtattcttttttaagaagtgatctataatgaaggagaattattgcaaagccctcaatatagtggaatcaaattgattttccatggattcctaagtatgctgctgcatcaaaatttcttttctgggatcttagaac

SEQ ID NO: 27704 - DNA, 3116 bp, Glycine max
  Clone ID: TF_GmC2019_1
cttttatctccaaactcggcgtgggtatctgggctttatcccagtgagtgctttttttctgtaactaaccccaatcatcaactcaatcagcgaatgaattggtggacggatgagtactcctcggtgatgcacctcctcttgtcctccctcgcccaaactcaatccctgtgagtgctttctttctgtaactaacttgttccctcgttaaccctaatcatcaactcaagcagtgaatgaatctgtggacggacgagaactcctcggtgatggaggccttcatgtcgtcctccgatctctcctcaatctggccctcgccggcgccgccgcaatccacggcggtcttcaatcaggacaccctccagcatcgcctgcaggccttgatcgaaggcgcccgagagacctggacctacgccatcttctggcagtcctcttatgactattctggctccactctcctcggctggggcgacggttactacaaaggcgacgacgacaaagccaaagccaaggccaaggccaaggtcaaggtcacttccgccgccgagcaggaccaccgcaaaaaagttctccgcgaactcaactccctgatctccggctcctcctcctcctccgccgcctccgacgacgtcgacgaggaggtcaccgacaccgagtggttcttcctggtctccatgacgcagtccttcgtcaacggcggaggacttcccggacaggccttcttcaactccgctccggtgtgggtcaccgggggcgaccgtctctctgcctcggcctgcgagagggcgaggcagggacacgtgttcgggctgcaaaccctggtttgcataccgtccgcgaacggcgtcgttgagctggggtccaccgagttaattttccagaacccggatctgatgaacaaggtgaaggttctgttcaatttcagcaacaacaacttcgacatgggttcttcttggcccgccaccagcgccgatcagggcgaaaacgacccttcctcgctctggctcagcgatcccgaagttagggattccattaacactgttgctgctaccccttcggtcacggttcctgcacagactcaggggatttcgatttccaagaccatgcagttggaaagttctattcaaacccctggttccagtactttaaccgaaacccctagttctattcacgcgattccgcagaaccagagcgtcttctccagagaattgaacttttctgagtatggtttcgacccaaagactgggaacaatcagaatcaccattctctgaagccggaatccggcgagattctcagcttcggcgagagcaagagaacctcctacggcggcgtcaatgggaattccaattccaattcccattttttctccggtcagtcgccgtttgttgctgctgcggatgagaacaccaacaaaaataacatcaacaacaatgggaagacaaagtcaccgaattcgcgcggtagcaacgacgacggaatgctttccttcacctccggcgtgattcttccggcctcgaatttgaagtccggtggcggcggcgattccgaccactcggatctggaggcttcggtggtgaaggacccggtggtggagccggagaagcggccgcggaagagagggcgtaagccggcgaacggaagagaggaaccattaaaccatgttgaagcagagagacagaggagggagaagctgaaccagaggttctacgcgcttcgtgctgtggttcccaacgtgtcaaagatggacaaagcgtcactcctgggcgacgccatatcttacatcacggagctgaagtccaagcttcagaccctcgaatcagataaagatggaatgcagaagcagctggaaggtgtgaagaaggagctcgagaaaacaaccgagaacgtttcttctaatcacgcgggtaatagtagtagttgtaacaacaacaacaagttgtcgaatcagaagttaattgacgtgttggagatggacgtgaagatacttgggtgggacgcgatgataaggatccattgcagcaagaagaaccaccccggggcgaggttgttgacggcattgatggagttggacttggacgtgcaccacgccaacgtaaatttggtcaacgatatgaccatgctacaagcaacggtgaagatgggaagtaggttttacacgcaggagcagcttcgtgcggctctggcggctaaggttggggatgcacgatgatgttggctctgcactttgcggcagcgtttgagattatgtgtgtgtttgtgtcgtgttattagctagctagctctttgtaagttgtgctgctctgggatattttaagccttcccggtagctgtttctgtaaaattataagctttttttctttattgggtagcttagtattgaattttgaggtaatcaaattgggaagctccatggagtagtagaactagctagggacacttttcatcaaatctgtgggtggagtggagatagcagcagctatatgtggaaataggggtaattttatctgttttagattgtgtatatattataataatatcataaatgtgaacagcatcatgcaagttctcaatattattattaataaaaaaaaaagacgatgcagttagagagttctattcaaacccctggttcgagtactttaaccgaaacccctagttctattcacgcgattccgcagaaccagagcgtgttctccagagaattgaacttctctgagtacgggttcgacccaaagagtgggaacaatcagaatcaccattctctgaagccggaatccggcgagattctcagcttcggcgagagcaggagaacctcctacggcggcgtcaatgggaatactaataccaataccaattccaattcccattttttctccggccagtcaccgtttgttgctgctgtggatgaaaacaagaagaataacatgagcaacaacgggaagaaaaggtcaccgaattcgcgtggcagcaacgacgatggaatgctttctttcacctccggcgtgattattccggccacgaatttgaagtccggcggaggcggcgattccgaccactcggatctggaggcttcggtggtgaaggacccggtggtggagccggagaagcgcccgctcta

SEQ ID NO: 27705 - DNA, 960 bp, Glycine max
  Clone ID: TF_GmC2019_2
gtaagagagggcggaagccggcgaacggaagagaggaaccattaaaccatgttgaagcagagagacagaggagggagaagctgaaccagagattctacgcgcttcgtgctgtggttcccaacgtgtcaaagatggacaaagcgtcgcttctgggcgacgcgatatcttacatcaccgagctgaagtccaagcttcagaccctcgaatctgataaagatgtattgcataagcagcttgaaggagtgaagaaggaactcgagaaaacaaccgataacgtttcttctaatcacgcgtgtaataataacaataacaacaagttgtcgtcgaatcagccggcgttaattgacttggttgagatggacgtgaagatcattgggtgggacgcgatgataacgatcacatgcagcaagaagaaccaccccgcggcgacgttgatgacggcattgatggagttggacttggacgtgcactacgccaccgtaacgttggtcaacgatttgatgatccaacaagcaacggtgaagatgggaagtagattttacacgcaggagcagcttcgagcggcgctgtcggctaaggttggggatgtacgatgatgttggcactttgcggcagcgttgagattataagtgtgtgtttgtgtcatgttattagctagctatctctttctaagttgtgtgctgctctggggtattttaagccttcccggtagctgtttctgtaaaattttaagattttatttttctttattgggcagcttagtattgaattttgaggtaatcaagctgggaagctccatggagtagtagtataactagctagggacagttttcatcaaatctgtgggtggagtggaaataggggtaattttatctgtttaggtagtgtatatatttataataaatcataaatgtgatcatgcaagttctcaatattattatgcttcagctaaagggcggc

SEQ ID NO: 27706 - DNA, 1470 bp, Glycine max
  Clone ID: TF_GmC294898_1
ccagatgcaagcagggcatcaagcaatggtgtctggactactactttatccgccgagcctgaagctgttagagaccatgtgccgagaacaagtcctcagaatgaaaaagggaaatcggagatgcttgaaccaactacaacttcatcatccggtggctcaggtagtagtcttggaaaaaattgttcgctatctacgagaaaccagggccaaaaaagaaaaggaatagatgtggaagaatctgaggagcaaagtgaggacacagaacttaaatcagcacttggaaacaagtcatctcaacgtgcagggttggctcgaaggaaccgcgctgctgaagtgcataatctatctgaaaggagaaggagagaccggatcaatgagaagatgaaggcattgcaacaactcatacctcacagtagcaagacagacaaagcatcaatgttggaagaggcaatcgaatacttgaaatcacttcagttacaacttcagctaatgtggatgggatctggcatggcaccaattatgtttccaggaattcagcactatatgtcacaaatgggtatgggaatggctacaccgcctttccctcctattcacaatccgatgcaattaccgagactgccgcttgatcagtctgtatctgcgtctcagacaccaaaccagacattaatgagccaaaatcctattttgggtgcctttaattaccacaatcagatgcaaaatccagctctttcagagcaatatgcgcgttacatgggctatcatcttatgcaaaatgcctctcagccaatgaatgtattcagatatggtccccagggggtacggcatagtcaaacaatgattacacccagcagcaacagcagtggaaacatgagtggagcagcaaatattgatgaggctgtgagtggcaaaatgggttaattagtttcaaagcacgcttttgagtacctatggcgtaactaacaagataattgcaagatgatagaagcccttgtaaggcttgtatgctttcacaatatgtctgcctgctcacactgtcgcggctccacggttacggctaaaagacctttttaaacaatcacttgttctttgactaggataagaaataagatatataacttactagaataagccttgctctataagcattctccactggcatatttaatgttattatgctaatgattttggctgttgcatagctctttatgaattggtctcatttttctctctatattcattttatatgccagatttataccatcattctatgtttcatattgcatagaacttctattgagtgtttaatttcagtacttcatcaacaaaaaattagtaacaccatttcatggcattctacagttttttatgttttattattcctacctttttatagaaaaaagattttgtatttaaaatccattttatcttgagaattctgatactataattttcattaacagtttttacttg

SEQ ID NO: 27707 - DNA, 1203 bp, Glycine max
  Clone ID: TF_GmC6836_1
ccggttcctgtcgaaatcctcgacgaccacaccatctcctgcgccgacatcggcatcgttgccggagtccaagaaaccaaaaagcggagaataaaccaaacacaaacacaaaaacctcccaggaaaaacgacaactatgtcaactccgaacactccgattcggattgtcccacgttgccaaccgccaccaccccgacaacctcggagccgaagaaaagagggagaaaaccgattctcggacgcgagactccggtaaaccacgtggaggcagagagacaacgtagggagaagctcaatcatcgattctatgcgcttcgtgctgttgttccgaatgtttcgaggatggacaaggcttcgctgttgtcggacgctgtcgcctacatcagcgagctgaaggcgaagattgagtacttagagtcgcagcagccgagagacagtagtaaaaaagtgaagacagaaatgacggatactctagataaccatagcaccacgacaatatcgacagtggtggatcaaagcgggcctgaacctagattgggcccaagcccgcttggtctcgaggtcgatgtgaaaatcgtggggcccgatgccatggttagggtacaatcagaaaatgtgaaccaccctggggcgaggctaatgggtgctttgagagacctagaatttcaggttcatcacgctagcatgtcttgtgttaacgatctcatgcttcaagatgtggttgttaagcttcccaatggaatgaggagtgaagagggtcttaaatctgcgattctgatgaggttggatcagtgacactggtgaggttattagctgtaatgtaactgtgagatgttgttgctgttcatagtagtcggtttttggtgtacgttatagataatttgtatttatcttttttgtttttttggggggtctttgtcttgcgtggtgcttgatgacggtggggttggctccaacctgcaattatgtgagggaatctaagaagcctgtcgtttatgttttgtatatataataatccttttggattttgaagttgatcaagaactagactagaagaaaaagtggtcgccatcttgttttaacattcctcaaaatacaaatattataatccaaaccctataatctagtatcactagatttagattttgtatgaataaataatataattaagcatgtgtttactataattttattatataaaaa

SEQ ID NO: 27708 - DNA, 1086 bp, Glycine max
  Clone ID: TF_GmC301008_1
ggctcgagctgggtatatccacgttagagcaagaaggggtcaagcaaccgatagccacagccttgctgaaagggtgagaagagagaaaataagtaaaaggatgacgacgttgcagcgacttgtgccaggctgtgataaggtaaccggaaaggcccttgtgttggacgaaataatcaattatgttcagtccttacagaatcaagtggagttcttgtcaatgaaacttgcatccgtgaatcccatgttctttgactcggccatggacttagacaccctcatggttagacccgatcagaaattgagtaatatagcatcaccatcaccactaccatgtgtagcacaattcagaccccaccaggccattgcttttgctgacacaattaccaccccgaccaccactaccaatagcttccccacagctaataatgatggctatcttttggattattcatcctcactttttcttcaaggccatagaccaaatatctttgaggataacggtggtcagttttgggacgtagaagaccaacgacaaaagtttcttcatccatatagattcggcaataattcgggttctttcaattgattaatatcatattcaaatagcctttcaagtctacaaacatagtatgctgaactattgtttttagttaggttgggaaattccaaacaagtaccagtatctcagttggaaaaaaaatcttacatgcatgagcaccaaataccaaagctacgattggtatcacagtatcatcattttgagggaaattcgtggtttggtttggttccctgtcccccaaattgaagaggcctttgaacacgatgaataaagtgcagtaaaattgatggatgaagaacacaacacaaagtgccgaccaaataagaccatatcttttgctagatccgttgttccgttcctgtccaagtcatacatatagatgatgcacaaattccaagagactgtgtcaatcctacagacttgaaaattatgtcatgtaattattaattaaattataaaattatatgttaaagaaaaatgattcttgtggtggcagttattctgttgatacagttaatttcaccgtt

SEQ ID NO: 27709 - DNA, 936 bp, Glycine max
  Clone ID: TF_GmC224511_1
tgcttccgtttcggagattctatggccggtccggctgcccgggtcgacccacgcgtccggctcagagttcgctgatcaaaaaggcggtggagttggacggcgccagatcgaaaacggagcggaaatcaacggaagcgtgcaagagtcacagggaagctgagaggagacgcaggcagagaatcaactctcacctctccaccttacgtaccctccttcctaacgccgccaagtcggacaaggcgtcgttgctgggggaagtggtggagcacgtgaagcggctgaggaagcaagccgatgacgtgacgtgcggggactcgtactcctcgcgcagcggcgaaccgggttcggtccggtcggaggcatggccgtttccgggggagtgcgacgaggtgacggtgagttactgcgacggcgaggacggggaaccgaagcgggtgaaggcgacggtgtgctgcggggaccggaccggtctgaaccgggacgtgtcccaagcgatccggtcggttcgggccaaagcggttcgcgcggagatgatgacggttgggggaaggacgaagagtgttgtggtggtggagtgggaaaaggaagaagaggaggttggggcgctggaacgggctttgaaggctgtggtggagaatcgggctttggtgggctttggaatgggcccagtcattctgggccagaaacggggtagggattgctgtgcttcgcctagtagtgaggttgactctgacttcttgctgaggaatgggagcttttgctaattcgtaattagtttctttttttggtaaaagaaataattagatgcttagttagctttcgggttggtaatcttggagatgccttttttttatttatataggcatgatgctttagtttataccatagtctaaaatctataatttatagtaatatataattgtggtaattttattt

SEQ ID NO: 27710 - DNA, 1031 bp, Glycine max
  Clone ID: TF_GmC2279_5
aaccgttgaaaaaagtggcacctgaacagcggcaccctacagctacataaatttatatatactttttttttaatctttattttcgatacacgaatggccaaataatttaaatatatctttgtaagtacagaaatagagaaaaatcaatctagattctagcttcgcaatcaaattattactaatctgtacagagactaagtgtatgggaaaagtcctaaacacacgttttcccaatagcaagaattgattggttgcttctggagcattgaactcaagcttttcaatttcaacgggatatagaaacacaagctaagtcgaccaatctccctttttttccgttattgttgcttctcgtgtgaacacgtacactttgcatgacaatctgaaagtgtctgaacttgcttttgaaggtctttgatgtaatccacagccaagtccaacatatcagctgtgttagtttgcttgtccatgtttgggacaagatcctgaagtttcctcatacgctcactaattttagttcttctaaccctctctgcaatgcttcttgggtgagtggcacagccccgtttggcacggattttgcacggaacagaatctgaaaactgcagaaacttctcaatggcagctatttcagctgaagtatttggcaaactcaactgatgggccaaaggagcatgagtctgtcctgtttcattctgagtctcaaccgcatttaagccagaaaatggttttgaatcttcttcactaaatcttttgagaccaccaacgttgtcagacatcattgcagtatcatcccaatgaccaacttggaaaccggccataaaatcgttaccatcagcaaaagcttcactgtctggactactttctctataccctttgtccccaatttcagcaatggacgacattctccccgacgaagaatagttcggttgattcttcaacctcctcgaactagaaaatttcgcatcctcgatactgttgttaacagctcccaaactccccatgcctctcacaccagcatacacattttc

SEQ ID NO: 27711 - DNA, 1937 bp, Glycine max
  Clone ID: TF_GmC2279_8
ttgactttgcacaccggcaccctacagctacataaatttatatatatttatctttattttggatacacgaagggccaaacaattaaatgtatttttctaagtacagaaatagagaaaaggcaatctagatttctagctaggcgatcatcaaattattactaatctgtacagactacagagactaagtgtatgggaaaagtcctaaacacacgttttcccaatagcaagaattggttgcttctggagcattgaactcaacaagcttttcaatttcaacggggtatagaaacacaaactaagtcgaccaatctccctttttgccgttattgttgcttctcgtgtgaacacgtacactttgcatgacaatctgaaagcgtctgaacttgcttttgaaggtctttgatgtaatccacagccaagtccaacatatcagctgtgttagtttgcttgtccatgtttgggacaagatcttgaagtttcctcatacgctcactaattttagttcttctaaccctctctgcaatgcttcttgggtgagtggcacagccccgtttggcacggattttgcacggaacagaatctgaaaactgcagaaacttctcaatggcagctatttcagctgaagtatttggcaaactcaactgatgggccaaaggagcatgagtctgtcctgtttcattctgagtctcagccgcatttaagccagaaaatggttttgaatcgttttctctaaatcttttgagaccaccaacgttgtcagacatgattgcagcatcatcccaatgaccaacttggaaaccggtgataaaatcgttaccatcagcaaaagcttcattgtctggactactttctcgattccctttgtccccaatttcagcaatggacgacattctccccgacgaagaatagttcggttgattcttcaaccttctcgaactagaaaattttgcatcttcgatactgttattaacagcccccaaagtccccatgcctctcacaccagcatacacattttcaatgttaatttgggaaaatagtcctgcgggagagctactatgcctggtaaggttagaattatttccactatgcctgagtcccattgaaaacgatccttgctccatagctgagggaaggttcgggttctggttcggcaagggaggtttggaggaggagctttggtagaaattatgagaagcagagtagttgttgttgttgttgttgttgtaattattgatgttgttattactctgctgtagcgcagccaccgccacgtgttcctcgttgataccctggtcttgttggttaaccctcttccttaaccgcagcagaagaagaagaagaatcagttgagagcttgtgatgatggagcgaatcttcttcttcactgtttaagctgttaacgaagcgtgagaacactcgctccgtttcgggactcgagggacggttgaagacgtgctcgtagaactcgcggtcaatgatgttcgagaaataagaactcggcgccgatcggtaccgagttaaacccgaggaattcacctgcggctgctgctcgagatctgactccattgttgcaactgtaggcacgtgcggggaagcacagagagaaggagaagcaggaaaattttgctcagatctatgcggaaccaaatccgggtaattcagggagaagaaaaagggtggtgaaggaaaaaggtagtgggaaaaataaatatatgttgtattcttttttctatcaataaaagcgacgatggctagcgtcaagggcttttctgttcctgaaagtgaatcattcaacgctcaagaccactagcggcaacaggagcagatagattctcgcagctcgctatgcaacacccattctttttttctttttcttttttgggtatgcttctatgttgttgttgttgtgtatggagtggtggagatggccataggcc

SEQ ID NO: 27712 - DNA, 1268 bp, Glycine max
  Clone ID: TF_GmC869_1
accactcgatggcggcgatgagggagatgatattccgaatagcggttatgcagcccgttcacatcgatcctgaatccataaagccacccaagagaaggaacgtgaagatctccaaggatccgcagagcgtggcggcgcggcacagaagagaaaggataagcgagagaataaggattcttcagagattggtccctggcggcaccaagatggacactgcttctatgttggacgaggccattcactacgtcaagttcttgaagaaacaggtgcagacgctggagcaagcaggggcaaatacgtcaccacacagtaatactaatagtcccaataatcacgttgttggtgctgctggttttccgctagggatgtcttctaactactccaataatagtagtgttaattattcttctttgttgatgaagggtggttgccaaccttgtcaaatgttcggttccacttctaaacaattgctcagctaatagttgttaggggaagtttgagagggaatttgcttgtttttgtgatgagaaagcaatgggttgtgtagtgttgatcaattggtgtatgcatgggtttggtggatcgggaagaacatgtttctccatgttaatgccattgttgcaatgatcttttgcttttacaatggtgggggtgggtgtaatcgaaatttcattaacataatggatgagtatgttctacagatgagggagatgatgagacgggaagcgcttgtgtttccgatgaatagaggcccggtatccatcaagccaccgaagagaaggaacgtgaagatttcaaaagatccgcagagtgtggcggcgaggcacagaagagaaaggataagcgagagaataaggatacttcagagattagttcctggtgggaccaaaatggacacggcttctatgttggatgaagccattcactacgtgaagttcttgaagaagcaagtgcagacgctggaacaagcaggggcaagtagacccttgaatgttgttggcttccctactactgcgtccaacgccaataataataatagttattctggttttgtgaagagttgtcagccttatccaatgctgggttctgcagcttctaaacaattgcttagttgagaagtgtttgtttgatacatgcatgaaaaatgaaaatcaatgaattatatatgtggtttttattttattttttatcttcatagtattgtgatcgatcgtgcatggattataaagacagtgtttgtcagtgtaattgtcattgtttcgagaatt

SEQ ID NO: 27713 - DNA, 2673 bp, Glycine max
  unsure (1)..(2673): unsure at all n locations
  Clone ID: TF_GmC1279_1
agggtttgtnaccccanaanccnncnccancnnnnggctcgagccaatcttctccaccactccacacaaccttaaatccaaacccaaaccaaacgaaaaacacacacacacacaccccaagagaaggaacagaaaaaatgggttgccgttagtatctatgagtttcgatgttatgtatgtgtgagtgcgatagcaagttagaaactactacaacaactcatgtttttcttttttacttcttttgatatgttttttttcccttcctagcctattaattcgatctgttcctgattccgaggcaacccaattcacagttgcaagttaaattattaatcatctagatttggggtatgcttatttcattttttagatatctggaattgttaagctgaaagcttggacaaaagaattttccctctgccacgttcatctcccatttggtggttccttccaaaaattgagggcattctagtaaaactctaacacaacacacacaccaaatctgagagctggatttatgtctctgtttacttctcattggctgcacctcttcacaaactagatggaatgttattttataatccttctccatcttttctcttgagccttccttccatcttctccaccacttcacacaaccttaaatccacaacccaaaccaaaagaaacacacacacacagaaacaccaagagaaggattccgagaagttggtgtgatctgatgcgagtgttaagaagataatctgagaagaaaaaagaaagaaaaaaaagtttcattttttttttcaatggagtcagatcttcagcagcaccctcccatgtttttggatcaccaccagcagcagatgaattcagggttgacacgttaccgatcggcgccaagttcgtatttttcgagcatcattgaccatgagttctacgagcacgttttcaatcgaccctctagccccgaaacagagcgaatgttgacacgctttgtgaatagtcttggtgggggtgatgctgatgcagaggattcacttgctactactcagaatcccccaactgttgttgcggttaaggaagaggttaatcagcaacctccggatgttacatccatgaataatgaaccacttgttctccaacaacaacagcagcagcagcaacaacaacaacaaagtaataatatgtataattatggctcttctggtactcagaatttttaccaaagcactggacgaccacctttgccaaaccagatgaagactggtcatggaagtagttctaatcttatcagacatggtagctcacctgctggattgttttcaaacattaacattgatattactggctatgctgctgttgtaaggggcatgggaactatgggagctgctgctaataacaccagcgaggaagcaaacttttcaccagcaacaaggatgaagaataatgcaccaaacttctcttcaggactaatgtcatcaagggctgaagttggaaacaagagcaatacacagaacaataatgcagaaaatgaagggtttgctgaaagccagggcaatgagtttatccctgcaggtttccccgttggtccgtggaatgattctgcaatcatgtctgacaacgtgacaggtctgaagagatttagagatgaagatgtgaaaccattttctggtggtttaaatgcacctgaaagtcagaatgaaactggaggccaacaaccttcttcttctgctttggctcatcaattgagtttgccaaatacttctgcagaaattgcaaaacacttctgcagaaatggcagccattgagaagtttcttcagctctcggattctgttccttgcaaaattcgtgccaagcggggctgtgccactcaccctagaagcattgcagagagggttagaagaactaaaattagtgagcgaatgaggaagctacaagatctggtccccaacatggataagcaaacaaacacagcagacatgttggacttggctgttgagtacattaaagaccttcaaaaccaagttgaggcactttcggacaatcgggcaaagtgtacgtgtttacacaagaagcagcaataacggaaaaggaggagggtacccgcgtcattccctgtacagcttagtaataatttggtctagaaactagcgcacctttccgataattatctagctacatcacttcttctgcgcttgtttgggagtgtggtggcaaaagttgagtttatatatgatcgatcaatatttgatgcccacatattcaaggcatggtgtacaaaattttctgatatgtaagtctatttgcctttactcttaggggcccccatttacggggatgatggaggatggggtgagttggaaaattgaaattttcatttttgcatcttcaaggttcagccataacgttaaaaaaaagagagagagagagagagaatgttatgtatgggtttggtttcacattcaaggacatgggaaacatggggggaccgaagccaacatagttttgttggttatatatatacttggatgcctattgagtagtgtgtgtttgtacttttattttttttcttttttttttatttttgttatgattttaatgcgaagtagttgtcattaaaagtatgacacatttgaatacatatgagtatttttttttataaaattttttttatattcaaagagtcattt

SEQ ID NO: 27714 - DNA, 1068 bp, Glycine max
  Clone ID: TF_GmC1279_3
aacttctcttcaggactaatgtcatcaagggctgaagttggaaacaagagcaatacacagaacaataatgcagaaggcgaagggtttgctgaaagccagggcaatgagtttatccctgcaggtttccccgttggtccgtggaatgattctgcaatcatgtctgacaacgtgacaggtctgaagagatttagagatgaagatgtgaaaccattttctggtggtttaaatgcacctgaaagtcagaatgaaactggaggccaacaaccttcttcttctgctttggctcatcaattgagtttgccaaatacttctgcagaaatggcagccattgagaagtttctgcagctctcagattctgttccttgcaaaattcgtgccaaacggggctgtgccactcacccaagaagcattgcagagagggttagaagaactaaaattagtgagcgaatgaggaagctacaagatctcgttcccaacatggataagcaaacaaacacagctgacatgttggacttggctgttgagtacattaaagaccttcaaaaccaagttcagactctttcggacaatcgggcaaagtgtacgtgttcacacaagaagcagcaataacgcaaaaggaggaggatacccgcgtcattacgtgtacagcttagtaataatttggtctagaaactagtgcacctttccgataattatgtagccacatcttcagcggttgtttgggagtggttgtgggaaaatcagcttataaaagttgactttatatatcatcaaaatcaaaatttgatgccacatattcaaagcatggtgtacaaaattttctgatatattacaagtctatttgcctttaatctttaggggcccccattttcggggatggaggatggggtgaggtggaaaatggaaattttcatttttgcttcttcaatgttccccaataacgttttaaaaaaggatgttatgtatgggttattgggtttggtttcccattcaatgacatgggaaacatggggggccgaatttgttggttatatatacccttgtatgagtagtgtgttttcctttttt

SEQ ID NO: 27715 - DNA, 1467 bp, Glycine max
  Clone ID: TF_GmC64817_1
ctcaaattcgtcccctccaatccaacaacaccgatcagtttcatggtattgttgtttcttctgccttaagcccaaagcgataagaccaaggtgcttcagtttactcccacatacccggaaacgtttatcagaaaaccagaactttgaagctgaaagccccaaaggccatagaagctacaagtccccatctcacgttcgggatcacatcatcgccgagagaaaacgaagagagaagctcagccagagcttaatcgctctagcagctcttattcctggcttaaagaagatggacaaggcatcagtgctgggagatgctataaagtacgtgaaagagctccaagagcgtatgagaatgcttgaagaagaggacaagaatagagatgtggagtctgtggtgatggtgaagaaacaacggctgagctgctgcgacgatggttcagcttcacatgaagatgaagaaaacagtgaaagactcccccgcgtggaagcgagagtgttagagaaggacgtgctccttcggatccactgccaaaagcaaaaggggcttttgctcaacatacttgtcgagattcaaaaccttcatctcttcgttgtcaatagcagtgtcctacctttcggggattccgtacttgacataaccattgttgctcagatgggaaccggctacaatttgaccataaatgatcttgtaaaaaacctacgcgtggctactttgaaatccatgtcataacaccaacgtgatcttgtctgtttctggtccagcaggatggtctggtggtgggtggtaatattaataatgatattttcatgttttgtggtgtgcagatacccaaaaatgattgaaaatgagttattgtttgaaggtaaaaaatttggtcctccagtctatttttaattttggatttgatctcccactaaattaattcacaaatattatttttttattttataaaatcatgtaatgttcgtcctccagtccacacttgaaccttaacgggttacaaggtgacgttgattattgtcacgtgtcacttttttattgaatgatgactttcacgtgtcatgttttgatgggtcaatgaaaacaacaatgtatttcatcttttatggaattaacatccacatgatacgtgacaatcatcattcaataagaaagtgacacatggtagtcaatgtcactttgtaacaatcaacgtccaattgtgggttgagggaccaacattgcatgattttaaaaagtaggagaaaaaaaaattgtgaattaatttaatgggggacaaaatttgaaattgaagacaaactggagaatcaaaaatgtaattttgccttgattcaaatgctctcttgtcaatttgaatgcacaaaatttatatgtaattgaactttcatttcaaaatttacttctcttgatatttaatgcaaatatttattatatgaattgtttaaatgaaacttcaattttaattt

SEQ ID NO: 27716 - DNA, 1441 bp, Glycine max
  Clone ID: TF_GmC521_1
tacagtacactagcctctgcgcacaaccctccactctccaaggagattacaatccattctttctttctcccttcttccattctctttctcattcagtgtgagagagactgcacacaaatttctattattccgagaacgacaatggatccggcggcgataatgaacggcgccgccaacacgacgtcgtatcacctgtcagagatctggcagttcccgcctcccaacccgccagatgagctgggactcagaaggccccacttcacccacggcttcgcggactttgccccggctccgacccgagacgccgccccggctcccgaatcgccccgcattgcccatcagaagcgccgcgacgcctcgggcgaggaggaggaatccgctaagggcgcctccaccaccaatgccgtgaatgaggggggtcgtgtgtggtgatgggaaacgggtcaagacgagtgagagtgggaaaggtgaaggagaaaccagttcaggaaagcttgcggagcaaagtggtaagccaccttcggagcctgcaaagcaagactacattcatgtccgagccagaaggggtcaagctactgatagccacagtcttgcagaaagagctagacgcgaaaagatcagtgagaggatgaaaattcttcaggatatagtcccgggttgtaataaggttattgggaaagcattggtccttgatgagataattaattatatccaatcgcttcagcggcaagtagagtttttgtcaatgaagcttgaagcagtaaattcaagactggcccccagaattgaagtgtttcctcctaaagattttgatcagcaaacatttgatacaactggcatgccgtttgcttcccaagctacaagagagtatagccgaggttcatcgccagaatggttacatatgcaggttggaggtggttatgaaagagcaacgtagtctttgaaatcccatcacctgataataaatgcatataggatcattaatctctccatcagagctcccataaatcatatactcaaggtgttgttgtttagtcctatagacacctcattccctgttttctacaagaggcatggagctgtggtttgtttccacaggatcactagttagtactcaagcaactccatttgttagtgtgttggaaaatgaattcatttacccaatatgtagtttagtatgctgatactcttcattcataacctttaaaatgatagttattattcttgtaaaagaatgctgcttgtcctgaatacataaaggcttacatattgtgtaatagtatcaacattgttgtttgtctgtgaagctgtgttgaataaattaagcccatgtgattttgttaaaaaaaaaaaaaaaaataaagcctaaaatgttgtgtaatagtgtcaacattgttgttggtatgtgaagctatgttgaataaatttcccccatgtgatt

SEQ ID NO: 27717 - DNA, 1224 bp, Glycine max
  Clone ID: TF_GmC949_1
cggattcggctcgggtaggccacagtcacacacagcctttgcctttgcctttgctgttcagtgctcccactcccagtccgggccgaggcagaaaatatcggaaactaacctttcacactcacacatccatcgtcatatctgaattggcaactcattattaaatcaattacgaaaacgaagaaacccaacaaaacaatggtagtagcttagctaattgcctaattgaatgaatctcaatggaacctcctctcatcaacgactccacattctcttccgctaacccttccttgtccgagatttggccctctcattttcccacagaccacactcccagtaacaagagacacctctccccctcgactgattgtggcagcaataaacatatcaaatcatcaggatcaggatcccaggatcaaaacggtgccttgaaggcgggtgaagtggacgcgacttcagtagccggtaacaagttacccgaacaaacggcgaaacctagttcttccgagcagccacctaagcaagactatatacacgtgcgagctagaagaggccaagccaccgatagccacagtctcgctgagagagctaggagagaaaagatcagtgagaggatgaaaattcttcaagatatagttcccggctgcaacaaggtaattggtaaagcacttgtgctggatgagataattaattatatccagtcactgcagcatcaggttgagttcctttctatgaagcttgaggcagttaattcgagattgagcatgagccctactattgaatgttttccttcaaaagaagttggcactcagccatttgaccttgccggaataatatttggatcacaaccggccaggggatatgctcaaggatcacagccgggatggctgcatatgcagatagctggtggttttgagaaagcaacataatttaagggaggttcattgggaatgacagatcaatcagtgtggttggttttacattgaaaaggaaaaaagtcacttgggctggttggttagcatggtctgctctattaacaacctagtcaattgatgcaaaatgttgtaaggtctgtatgttctttgtcatagtatgatatcgattgtaagaaatgcatctaatttcctcgcgcatcatctgactgggaatgtagtgctgcactatgttagcaattgaaataatcttattgtggtttagttttcgtattaaaaaaaaacaaaccaaaaa

SEQ ID NO: 27718 - DNA, 791 bp, Glycine max
  unsure (1)..(791): unsure at all n locations
  Clone ID: TF_GmC6831_2
aaaaaataaaaacaacacctcataaaagcaagcaaacacacaaaagaaagtaccatatattatacataaaccttattcattcgccttcaaccaaaccatatatcttattctattttctctacctctctaccactctctttctttctccttctcctcaaccataatcatggagaatattggagaagagtacaagcattactgggagaccaacatgttcctccaaacccaagaacttggcagttggggattggatgaggctttatcagggtactacgattcgagttccccggatggtgccgcttcatctgcagcatcaaagaacattgtttccgagaggaatcggaggaagaaactcaatgaaaggctctttgcgcttagatcggtggtacctaacattagcaagatggacaaggcttcgattattaaggatgctattgattacatccagcacttgcacgagcaagagaagattatccaagctgagataatggaacttgaatcagggatgccaaagaagagtccaagttatgattttgagcaggagctgcttcctgtggttctcaggtccaagaagaagagaacagagcagctatatgattgtgttacttcaagaaactccccaattgaagtccttgagctgagggttacacacatgggggagaaaattggtgtggtcagtttgacatgcagcanaaggacagacacaatggtgaaactgtgtgaagtgttcgaatcttttgagctcaagatcatcactgctaacatcacttcgttttcagataggcttttga

SEQ ID NO: 27719 - DNA, 698 bp, Glycine max
  unsure (1)..(698): unsure at all n locations
  Clone ID: TF_6847396
ctgnntagtcagatatttattagaaacacttccatcgccactagtagtacagagaaaattaaagtacaacgtagacacgtagatattttgtgaatgaaatcctgggacacggtttaatttccagccccagcatatacacaaacaactaacacaagatgctcaaattttctgctagatcttgatttagtattaacaaattagaaaaggtcaagcattctgaaatactaaaacgcccttcagaacgaccaacttccagaacaaagtttttctcgttcagcaaagttgtgtttgaattgtgaagtatgatttcttggattcatgatctttttgggattcatctttgagatgaaagaatggcatcaatggcttgtctcacttgagaaatgtcaggggcttttccaccttggactggccaaaattcatcagctgccaacaccttcacttgcaactgaagaaacttaacataactaattgctttctccaacattgtgaccaaatcaaccttggaaccgttggggaccagttcttgtagtatcttaagccgctcacttattctctctcttctattcttggcagcaacactttgnnnatcctnnnatgggtttgactttgnnnntgctgctttacttgcacttgtgcatggcttcttgnnnanngtaacttgcatgttctctcccataaaannnngcttttnnnng

SEQ ID NO: 27720 - DNA, 476 bp, Glycine max
  Clone ID: TF_uC-gmroLIB3259P211c01b1
gggcgtgcgtggagctcaagaactacctagtgaaggtgcaaaggggaactctgagaatcaacagaagggagaccaacaaccaatttcaacagccaacaaggcttgtgggaagaatgccaaattggggtctcaagcttctgatcctttatggaggaggggtacacgttagggctcgccggggtcaagcaacaaatagccatagccttgcagagagagtgaggagggaaaagataagtgagaggatgaagtttcttcaagaccttgtacctggatgcagcaaggtcactggcaaggcagtaatgctagatgaaatcatcaactatgtacagtcacttcaacgacaggttgagtttttgtctatgaaacttgctacagtaaatccacggctggattttaatattgaaggacttcttgctaaagatattcttcaacaacggcctggtccttcaaccggactagggtttcctctagaatat

SEQ ID NO: 27721 - DNA, 593 bp, Glycine max
  Clone ID: TF_GmC1356_1
tagaaaacagaaagctcgtgtcactgaacgtcaacgcaggcaacgcatcgctgataacctcaaagccttgcatgaattgcttccaaatccagcagagggaagtcaagcttacgtattggacgacataattgactatgtcaaatatttgcagcttcaaataaaggaacaaagtggaagtagattattgcaagcggactcaactgctataccactagtttttcatgagggttacggccattatatcaaccaaaagatgctgaatgaaccccttgaggagataatggggaaactagttgaagatgattcagcagcagctgttcagctactagagagtaagggtcttttcctgctgcctatggcattggttgatgagttgagtgaggctgtgcaaatgtttggtgggagtgcacttgtctgacaaaagctttcttttatttatttcaaattctccattatggatcatttctagacagtggcagtagtatgattattgtttatgtttttgatgttacaacaataacatttatgacttattacaaactatcaaaatctcagctaactcgattccactagttctagtttcgattattagg

SEQ ID NO: 27722 - DNA, 1599 bp, Glycine max
  Clone ID: TF_GmC133935_1
accggaattctcgagccgattctcctcgcgcctctgtatcccattcctctgccatatcctgaaatacgttttcacaacactcacctttgccatatacagcataatcatcaattttctgaaatgagccagcgtgtccccaactgcgatgtggacgacaataacaacattcccacaaccacaaaaatccctcttcttcccaatttcaatttcatatcccatgaagtcccaatgttgggctaccaagctgctgaactaccatgcaaaaagggacaaccttcgacgtacaaaggcagccacggaaacctaactagtacgtgggacaaacctcgtacaagtggtggtaccttggagtccatagttagccaacatgtcagcgaaaaccgctacaagttggttactatggacgccttagtgccctgttcagaacaacagggcacacagaaggcagtggtgtcagaaaggcttgatgcgtgtgggaagagtcgcttcccacgcgtggtggcgcaggaggaagtggagaaacgcgctggggtggtggcgcgtgggacgcgtggtactacaacgctagaattgggtggctgcaaggattggagtgtgagtggtagtgaaacttgtcgtagggagttgagtgtgaccttcaattctgccaccaagggttcgccggaaaacaccactagctctggcaaacagtgcaccgggaccaccaccaatgacgaccgtgattccattagccaccgtatatcgcagggtgaggtaccggatgaggattacaaggcaacaaaagtgcatcgttctcctgggtccttctcaagaatcagtgcttcttcagtagtgcacaaacaagctgaacggagaagaagagataagatcaaccaaagaatgaaggaattgcaaaagctggtcccaaattccagtaagactgataaagcttcgatgctagatgaggtgatccaatatatgaagcaattgcaagcgcaagtgcaaatgatgaattggatgaaaatgtacaccacccagatgctgccaataaccatgcagcagcagcaacaacaacaacttaaaatgtctatgatgatggctcagatgggcatgggcatgggaatgagtaaggatatggttatgaatatgaacagcatgaacattcctggattcccccctatgcttcccttcccctccttcatgcctatggccccatgtggcgatcaattacaaggaacaccagagaagtccgtgaccatggatgcatacagtacgatggcttccctgtatcagcagctatttcatcctccagcttctagctcaaagaactgagcctttcgtgttctaccttcctgacaatattatggtgagctataaattaattaagagtgtgcatgtgtgtaaaattttggtgagaaagattgaagtgtgaagagccatcagcttttttttttcttttttatcggcaaaataaaatgtaatttctttgtaccaatagtacaaaaataagatgtttggaaatgtacattattagattagatgtgttcactccccttctgttcactgtcagtcttttaccactataattaatgtgctaatgtagggtgtatatataatata

SEQ ID NO: 27723 - DNA, 468 bp, Glycine max
  Clone ID: TF_jC-gmst024100b03a1
caacctttcccatggcctgacgtttggagacgatatcggtcagaatatcggtcagaatcacaattcttctgctgccgcagtttacgcagctcgcgaggcgcagagcatgaaccaaaaaccgactgtcggttctcctgaatggcaccaagtcagaaaaaataaccataaagaaggcacgtgctcaggtctatccgcgtccagtatatactaacgtcgtcccagtggaacgtcgccgccgtgaggcaatcaacgagggtatcaaccagatcgctcgcctcgtacctaattgcgacaaaaacaaaggcgcgatcttgcaacgtgccattgagtacatcaaccaactgcatgaggaaaagaggcagatgagcgaacgatgggagcagagcaatatgacgacaagtcacgctatcaacgaaatcagtgcgcaaaactcaaagttaaaggtcgaggtcaaccgccccggtgata

SEQ ID NO: 27724 - DNA, 802 bp, Glycine max
  Clone ID: TF_GmC1226_3
gaagtgtgagaatacgaaagaaggggggtttattgccaaatgaagaaggctcacgagatacgcatgggatcagtcacatgctagcgctcctccttcttcttctctctccggtggtggtgactcgccggaagacaccaacttccaccttcaacgccgccgctgaagtgctcagtgataccctttgtttagaacaatgagagcagggaaagggagccaggaagaggatgagtacgaggaagaagagtttggttcttccaagaaacagggtacttcctctgcccctaacgccaacaaagatggaaaagccatcgacaaggctagtgcgataagatcgaaacattctgtgaccgagcagcggagaaggagcaagataaatgagagattccagatattgagggatctcatacctcatagtgatcaaaagagggacacggcatcatttttattagaggtgatggagtatgttcagtacttacaggagaaggtacaaaagtatgaaggttcatatcaaggttggggtcaagagcccctgaagttgatgccatggagaaatagtcattggcgtgtccagagctttgctggtcaacctacagctgtaaagaatggtttgggtccagtatcaccttttcctgtaaagtttgacgaaagcaatgctagtatctctccaactatgcttagtggcacccagaatacaatagatccttatcagagcagggatattgtcaacaagacggctgagaggcaacctgatttagtaaacaagggaatgcctcttccccttgctatgcatgcaaacatgtct

SEQ ID NO: 27725 - DNA, 1277 bp, Glycine max
  Clone ID: TF_GmC6831_1
cagcaaccacaaacaacacctcataaaagcaagcaaacacacaaaagaaagtaccctagagccgaatcggctcgagcggctcgagacggctgcaaaacagacaacagaagggggcaccagtcaacaaaaaataaaacaacacataataagcaagcaaaacacacacaaaaggaaataccatatattatacacaaaccaaaccatatatcttattctattttctccctctccaccactccccttctttctcctcctcctcaaccttaatcatggagaatattggagaagagtacaagcattactgggagaccaacatgttcctccaaacccaagaacttgacagttgggggttggatgaggccttatctgggtactacgattcgagttccccggacggcgctgcttcgtctgcggcatctaagaacattgtttccgagaggaatcggaggaagaagctcaatgaaaggctttttgcgcttagatcggtggtacctaacattagcaagatggacaaggcttcgattatcaaggatgctattgagtacatccagcacttgcacgagcaagagaagattatccaagctgagataatggaacttgaatcagggatgccaaagaagagtccaagttatgattttgagcaggagcagcttcctgtggttctcaggtccaagaagaagagaacagagcagctatatgattgtgttacttcaagaaactccccaattgaagtccttgagctgagggttacacacatgggggagaaaattgttgtggtcagtttgacatgcagcaaaaggacagacacaatggtgaaactgtgtgaagtgttcgaatctttgaagctcaagatcatcactgctaacatcacttcgttttcagataggcttttgaagatagtcttcattgaggcaaatgaagatgagaaagatcatttgcagataaagatccagacagccattaaagctcttaataatgaccctttaagccccatgagcatttgaggaagaaaatatataaattggggttctcattttggggtcactagtatataaatagaaagtttaggaaccgtgggttttataggagtttctcgtatttggtttcgttaccccctttttttcttcgcactcaacattccccttaatcaggactcttcttcaactttattatcagggaaagtttgctagtttcatccccttgtgtgcttagtgtatcaattaatgttattcttataataaaaagttcacttcacatcatcgtggatcttttgtttt

SEQ ID NO: 27726 - DNA, 489 bp, Glycine max
  Clone ID: TF_GmC94732_1
ctgaaagtcctgatcagtcttttgtccctgcaagaccaaccaagaggctcaagacattcaatacctccaacacttgtgccagtgacataatttcccacaaggtttctgcctcttcatcctcccaagttatttcctttgaccacttcaatgccccatcagatgcttcttccctgcaatttcatcgaaacctggacttcgatgtgaagccgaaaatcgagaaagcgtctagtgggaacatggattttgcagctttcgtttctcacggttcgtatgtggacaaaacattcctaagttctgatacgaatcaggttggaataacctctaggaacccaatccaagctcaagagcacgtaatagctgaaagaaaacggagggaaaagctcagccagaggttcattgctctttccgccatcctccctggcctcaagaagatggataaggcttctgttttgggagatgctataaagtatgtgaaacaactacaagaac

SEQ ID NO: 27727 - DNA, 1675 bp, Glycine max
  Clone ID: TF_GmC3871_1
gaactacccagcaatagtaagtgcaaaaccgaaaacaaaaaaccaaacccaaacgaaaccgaccaaaatctcgccaacttcactttccgcttcatgtagtttctgcgttcccaactccttctcccgactctaccctgactcgcccgagtccacactcaaacccgcgctcatggcaaataacccttccgacgctcccgccgatgacttccttgaacaaatcctcggcctcccgaacttcgcttccgccgactccggcctttccgctgccgatgtcggcctcgccggtgcggccactcaggctccgatgatgctgcaactcaactccgccgacgccaacgctcacctcgccggcgccgccttccacgcgcccgtgtatcagctagggctgagcttggaccagggcaaaggtgggttcatgaagcccgaggaagcctccgctagcggaaagcgctttcgcgacgacgtcgttgataatagagctaagaatgtttttcatgggcaacccatgcctactactatgcctgctgctccacatcctccagcaatacgtcctagggtgcgggccagaagaggacaggctacagatccacacagcatagctgaacgattacgcagagaaagaatagcagaaagaatcagggcattgcaagaactggtcccaagtgtcaacaagacagatagagctgccatgttagatgaaattgtggattatgtcaagttcttaaggcttcaagtgaaggttttgagcatgagtagattgggtggagctggtgcagtggcaccactggtaactgatatcccattatcgtcagtcgaggaagaaggcggtgagggaagaaaccagccagcctgggagaagtggtcaaatgatggcacagaaagacaggtagccaagcttatggaagaaaatgtgggtgctgccatgcagtttcttcaatcaaaagcactctgcatcatgcccgtctcactagcttcagcaatataccagtcacaaccctcagacacttctagtatagttaagcctgaaactaatcctccttcataatcatagtcagaactctggcacagatgcaccatccagtggtcccatcaagggctcacctaacactgctaggacccacgtgtaatttgcctgtttcaaacccccttaaccttagtcattggttcgcatcaagttgcattcaaggttggatgccatagtctttcctttttgtcgttctttcaacttttttgtctagacagggtttgatgtcaatgcccttcaaaacacaagcaaaccccatcttgataaatttcatgtaaagggaaagaaattgtcgaagttcacttgatatgctcttcctttttgtatcaattagtgggggttagtggaacgtgatggaagcgcttttatagtggggcttggttttttgtagtgggcagtgggaccttctaaaaggttagggtggtgtgtatattttattagtgatgtaactcttagggaatttgaattgcagagctgaaatggataatgattgctttaacaatgctgggctttgctagtcctccagaaaatgatattgctttttgtttgtttatttcaggtgtgctctagttagttatttaaaaggtcttgcgacccccttgttctcatgcagggagagatggaaggagagtatggtgctattttaaacca

SEQ ID NO: 27728 - DNA, 1512 bp, Glycine max
  Clone ID: TF_GmC3871_2
attttataaaaaactggagcgttatttattttcttcttaaccccttcttcctcttgcgcatcgtctcaactcaactggcatttctgaacactctaaaaaaccagagccaaaccccaaacaaaattgtcttctcttctatttctccaattacaactcgtttccctaactcggccgagtcatcatggcgaatcacccttccgaagctcccaccgacgacttcctggagcaaatcctgggcctctcgaccttcgcctccgccgaccccgccgccgacgcctctccgatgatgcttcagctcaactccggcgacgccgccacccacctcgccgccacccacctcgccgccttccacgcgccgccctaccagctcggcctcagcttggaccaaggtaagggaccattcctcacgcccgaggacgcttctggaagcggcaagcgcttccgcgacgacgtcgttgataccagacctaaaaacttttttcatggacaacccatgcctactactgttcctactgctccacatccaccagcagtgcgacctagagtgcgggctagaagaggacaggctacagatccgcatagtatagctgaaaggttgcgcagagagagaatagcagaaagaatcagggctttgcaagaactggtccctagtgtcaacaagacagatagagctgccatgctggacgaaattgtggattatgtcaagttcttgaggcttcaagtgaaggttttgagcatgagtagattgggtggagctggtgcagtggcaccactggtaactgatatcccattatcgtcagtcgaggaagaaggcggtgagggaagaaaccagccagcctgggagaagtggtcaaatgatggcacagaaagacaggtagccaagcttatggaagaaaatgtgggtgctgccatgcagtttcttcaatcaaaagcactctgcatcatgcccgtctcactagcttcagcaatataccagtcacaaccctcaggcacttctagtatagttaagcctgaaactaatcctccttcataatcatagtcagaactctggcacagatgcaccatccagtggtcccatcaagggctcacctaacactgctaggacccacgtgtaatttgcctgtttcaaacccccttaaccttagtcattggttcgcatcaagttgcattcaaggttggatgccatagtctttcctttttgtcgttctttcaacttttttgtctagacagggtttgatgtcaatgcccttcaaaacacaagcaaaccccatcttgataaatttcatgtaaagggaaagaaattgtcgaagttcacttgatatgctcttcctttttgtatcaattagtgggggttagtggaacgtgatggaagcgcttttatagtggggcttggttttttgtagtgggcagtgggaccttctaaaaggttagggtggtgtgtatattttattagtgatgtaactcttagggaatttgaattgcagagctgaaatggataatgattgctttaac

SEQ ID NO: 27729 - DNA, 784 bp, Glycine max
  Clone ID: TF_GmC3871_3
ggctcgagccactaagtccgtgcaaaccgaagaaataaaaaaccaaacccaaaccgcttcatgtagattctgcgttcccaactcgttctcccgactcaaccctgactcgcccgattccaaactcaaactcgcgctcatggcgaataacccttccgacgctcccgccgacgacttcctcgaacaaattctcggcctcccgaccttcgcttccgccgactccggcctctccgccgccgatgtcggcctcgccggtgcggccactcagtctccgatgatgctgcagctcagctccgccgacgccaacgctcacctcgccggcgcatccttccacgcgccggtgtaccagctagggctgagcttggagcagggcaaaggaagattcatgaagcccgacgaagcctccgctagcggaaagcgctttcgcgacgacgtcgttgataatagagctaagcatgtttttcatgggcaacccatgcctactactatgcctgctgctcctcatcctccagcaatacgtcctagggtgcgggccagaagaggacaggctacagatccacacagcatagctgaacgattgcgcagagaaagaatagcagaaagaatcagggcattgcaagaactggttccaagtgtcaacaagacagatagagcagccatgttagatgaaattgtggattatgtcaagttcttaaggcttcaagtgaaggttttgagcatgagtagactggggtgggagccggtgcagtggcaccactgggtactgacattccattatcatcagtcg

SEQ ID NO: 27730 - DNA, 1633 bp, Glycine max
  Clone ID: TF_GmC3897_1
ctcgagccgctcgagccggattactgcgtgcgttcttccttggctagctctgcgggaattcagactattgttttggtccctactgatatgggagtggtggagttgggttctgtcagaatgttacccgagagttttgaactcttgcaggctgttaaatctgtgttctccacgcagtctccttcataccaaggggtgagtgtgagcaccggtgggaatgctgttttccctggtttggcaattggggatgctaataaggtagatggaggagtttcgattcccaaggtttttgtcaacacaattggaaatcggacgcatttcagagagaaacttgcagttagaaaaatggaggataataggccttggccaggccatggccaccccgaccccaatgggaacaatctccacaacaacgttagttttccgaatgtgcggggtaatagtcttcatgtttcgagttgggcagtgaattcggatctgaggcagcctggtccccttgagatttttgctcctagggcccccacgagtagtgtcctcgcagagctggctaatgttgggaaacaggatttcagacctcaaaggcaggtgcaaatgcaaattgactttaccggagccacttccaggccttcttcagcgagaccggtcgtcggtgaattggagctttctgatgttgaggcctcttgcagggaggagcaacaacccagttttgccgatgaaaggaagcccaggaagcggggaaggaagcctgccaatggaagggaagcgcccctcaatcatgtggaggcggagaggcaaagacgcgagaagctcaaccaacgcttctatgcgttgagatctgtggtgcctaacatctccaagatggataaggcttcattgctgggagatgccattgcttatatcaacgagcttcaggctaaagtcaggatcatggaagctgaaaaagagagatttggaagcacttcaaatgatggatcagtcttggaagctaagttgagattggaaaatcaggagaaaaaagctcctgatgtggatattcaagcttttcaagatgaggtcattgtaaaggtgagctgccctcttgacagtcaccctgtttcaaaagtaatccaaacatttaacgaagcacagatcagtgttgtagagtctaaacttgctgctgcaaatgataccatttttcacacatttgtaattaagtcccaaggacctgaacagctcacaaaggacaagttgattgctgttttttctccaacagaatccaactcattgcagccattgtcacagttggatagcaagggaattgcagtcagcatagtccatacgtagagaaataccaatttctaaaagcttcctcagaatttttttgttacaccacggaggatcttaaaagaaaagcattgggaactagaatagtagaataataggttcccattaacgatgtaggcagccaatttatgtttgtctatagtgtaaacacagcagaaaattgttcctgcaatgtcaatcattttaattagtttaaccgatctagttgtcatggttcagtttatgtcttgatgcccatgtctttcaagttcttgttttttcatgtcttgttctgtgcataagaggaaagaattcttaatttttgctgcaaaaa

SEQ ID NO: 27731 - DNA, 1826 bp, Glycine max
  Clone ID: TF_GmC8207_1
ccttcttgtccgcggacgcgtgggagcaaatagggctattttctagatgaaatgggcgtaccagaccaatatgattgaaagatgtcacatctattaatcagatatattaattaggttgatagcttcagctgtttttcatttcatgaggacttctcatatggagatttcatcaatcagagggttgcctgaaatggggataatagaggatcctaacttcctccatcactggcagttaaactctattgatacaactagcctaacaggtgctccttttggagagattttacaaaagcactcattctctgataactcaaatttcaaccccaaaacatccatggaaacatcaccaactggaattgaaagacctgcaaaacagctcagaaataacagctggaatcacaacaaaagtcaacaacagacaccagaaacacaatttgcttcatgctcaaatcttctttcatttgttaattcgaattacacgagcgaattgggactagtgaaacctaaggtggagatggcgtgtcctaaaattgacaacaacgctcttgcagacatgttgatctctcaaggaaccttaggaaatcaaaactatattttcaaggctagccaagagaccaaaaagattaaaacacgtcctaaactttctcaacctcaagaccacataatagctgaaaggaagcgaagagagaagctcagccaacggttcattgctctatctgctcttgttccgggcctaaagaagatggacaaagcttcggttcttggagaagctataaagtatttgaagcaaatgcaagagaaagtgagtgctcttgaggaggaacagaacaggaagagaactgtggaatctgtggtaattgtgaagaaatctcagctatctagtgatgccgaagactcttcttcagagactggtggtacatttgtcgaggcactacctgaaattgaagcaagattttgggaaagaaatgtcctcataagaatacattgtgagaagaataaaggagtcatagagaaaacaatcagcgaaattgagaaactccatctaaaagtcatcaatagcagtgccttgacatttgggagtttcatcctggatataaccattattgctcagatggatatggaattttgcatgacagtgaaggatcttgtgagaagtttacgctcagctttttcatatttcgtgtgaagagttatgcatttttcggtcgtccccgaaaggtacatgaagaataggagtgcaatcaatttatatatagcagttccatatatcaactatattatcaagtttaagttcttcaataataattctgtttccaaggccggtctgcaatgtctgccatccacaccatgtttgctctgaggttcatttttgcagaagggttttttgtagcgatattttcttcttgcatggtccacttgttgacagtgttatattgtcacactcacaccctactgtttcaagagtgaacgtagagcttgttaggcattttttggcaggaagttgaaaagttcaactacctgttttccatctatttcttacctaaatcctgacagacaggcctttgttgagtgacttattatcttcttttttttttttcaagtgttctcgagttacttttttatttgaaacaaaatatgcttgtaaaagtttggttgaaattggtagtgatggaataatcgtacttttttatatcttgtgtatatgctcgacatgttgcatggcctcaacatgatattctgcaaaagcattaatgctaccaatttaagcatatgtaaattgtaggtggtggattaagcttaaaaaaaaaaaaaaaaaaaaaaaaaaa

SEQ ID NO: 27732 - DNA, 1362 bp, Glycine max
  unsure (1)..(1362): unsure at all n locations
  Clone ID: TF_GmC126664_1
cccgctccgcgccaagttgtttttggtctgatctttcaagttcaatggctggtgacgtaggaagagccttgcctcctcctgattcagaagaattctcaaccttgttcagccaactcctccacaattctcccccccgagcactccaccccgatcatccgcctcctcattctctctctctccactttgtttttggtttgatctttcaagttcaatggctggtgacgtaggaagagccttgcctcctcctgattaagaggagtgcggagcgctgnnnnaggcggctnctncggagagggtcccccactaggaatggaccccaatcattcacctcctgatttcaccccacatctaacaacactcatcaacatcaacagcaacaacaacaacaacgctgttccttcctctccctcaaatttcaatttctctgacccccatcattacatccctgcctctgatgccaccaccttcaagcaacacaacatcaaccacaacaacaatcacacccctgatttcacttcttctcatgttgagaagagtgtggaggcatcgaaacctgtcccaccaccacgttcttcgtcaaagaggagtagagctgcagagttccataatttgtctgaaaagagaaggaggagtaggattaacgagaaaatgaaagccttacagaatttaattccaaattccaacaagacagacaaagcttcaatgctagatgaggccatagaatatttaaagcagctccagcttcaagtgcaaatgttaatgatgagaaatggtttgagcttgcatccaatgtctttgccaggaggactaagacctatgataatgcctcagactggattgaatcttgatgggagtaatggatttcagaattctacctgtgcaattgcctcatcttcaaatgatgaaagcttggtgcggcatgcctttagttttccaaagcaatgcagcatctcaaataagtctattggtgtaccctccgtgaaaaacatagcaacttcggatacctcatccacttttcatccctctattaaggatgcactctacggcaacatgccacaaccgtttatggatacaacaaagattggaaaaccctctccagacgtgtcttaaacagctcgatttcattgagggagaaaagaattttttagatggcaagtcgcctcgtaaaagggtagctttgttcaggcattataatctacatttaaatctgctgactatatgacactccattgggttgttcctggtgcagtttaatttgtagcagtttgacagagtctttgtgccattgttgacacttgcataaaaatgtacaagtattttataacttcatcaattgcaaaatgcagataatgaacattctgc

SEQ ID NO: 27733 - DNA, 1390 bp, Glycine max
  Clone ID: TF_GmC75820_1
gggagaagagggtggtggagaagtgagaagggttagggttgtttttgatgatgatgatgagaaggtgcagaggatgaggaagggggtgttgcagaagctgcacatgacttttgggggttctgatgaggacaattatgcttttgggttggaccgcgtgaccgacacagagatgttctttcttgcttccatgtacttctcttttccccgggggcttgggggtccaggtaagtgttttgcttctgggaagcatttgtgggtttcggatgtgttgaaatctagttttgattactgtgtgaggtctttcttggccaaatctgctgggattcagactgttgttttagtgcctactgattttggggtggtggagatggggtctgtgaggatggttggtgagagttttgagttgttgcaggctgtgaaatctgtgttttctgcacaggcatcatcattattagtcccccacatggttaagccaattgcaccgttggatttggtgagggaaaagagagatgggagtgagagtgcaaatgctcttttatctggtttggcaattggggataagaataagaatattaacaaccacagtaataacagggtagagggagttggtgttccaaagatttttgggcaggatttgaattgttccactcaatttagggaaaaactggctgtgaggaaaatggaggagaggccaaggccgtggggaggtcatccccccaaggttaatagtattggctttccgaacggtgttcagggttctagttggggggctggtcaagttgtgaggcatcttggtcctcctgaaatgcttgctcctaggttggccagctccggcacattgccaaagctggccaatggtgcgaggcatgactttgtgcataacaactttgagcagcaacggcctgtacagatgcaaattgatttctcaggagccacttcgagggcagcttctgggagatcaataattgcggagtctgagatttctgatattgaggcgacgtgcaaggaggagagagttagtgttgccgatgacaggaggccgaggaagcgtaagaggaatgccggctaatggaagggaggaacccctcaatcatgtggaggctgataggcaaaggcgggagaagctgaaccagcgattctatgcattgcgagctgttgtaccaatttctctaagatggatacatcgctgttgagagatgctattgcaccatagagaatctaaaagtaaagtagtgggcatttagagacgtagaataatagcttctattaaccctctagggcagccagtttatgtttgtctataatatacacagtttatcataagaagtattattcctgctatgtcaattattttgtttagtttaaccattctatcattttaccttgaaaa

SEQ ID NO: 27734 - DNA, 1072 bp, Glycine max
  unsure (1)..(1072): unsure at all n locations
  Clone ID: TF_GmC126039_1
gcataagcatcacttcacgttcatgaccacaaaaactgaaactgtaccacactctttcagtcccccttaggtttccttcttattagcctccccccctcacacctaccctatcatcatgcaccactttgccatggacaactctcacctcctccaattccttcccaacaccaccaccaccaccaccaccaccaacacccccttcttccatgctgcacctcacactcacaccatgcaccaccccctctctactaattcctccaataatactaattactaccccttccacctctcccaaattaccgaaacaccctcccaccatgatagagcccttgctgccatgaagaaccacaaggaggctgagaagagaaggagggagagaatcaactcccacctcgaccaccttcgcactcttctcccttgtaattccaagacagacaaggcttcgcttctggcgaaggttgtccagcgggtgaaggagttgaagcagcaaacctcggagattaccgagcttgaaaccgttccgtcggagaccgacgagatcacggtgctctccaccaccggaggcgactacgcctccggtggcggcgacggaaggctcatcttcaaggcctcgctgtgctgcgaggaccgctccgacctcatccccgacctcatagaaatcctcaattcgcttcacctcaaaaccctcaaagcagaaatggccactctcggaggaagaacacgcaacgttctcgtggtcgctgctgacaaagaacacagcattgaatccatccatttccttcagaactcgctcaggtccattctggaccgatccagttccggcgacaggtcgaaacgacgccgtggcttagaccgaagactgatgtcttgaaccggatactgtttccatagctacacatgcaaatgcatgccttactagtatcactcctaatattgttggttaattcgaaatggtttatgtgtttgcaggttttttgtaatgtaaaaagaaattaagacagatcatgagtttaaggactatgcattatcagttcaaatataaacattttngcactctcaactaatcataaaa

SEQ ID NO: 27735 - DNA, 2075 bp, Glycine max
  unsure (1)..(2075): unsure at all n locations
  Clone ID: TF_GmC42302_1
ccacgcgtccgctcttctcttcctctttgattgtttgtctggattttgagttctgatccaaactgttgaagctgaagaacctgagcccaattgaactctaacgtgccaaaattttttgagttgcatgtgattgtgaagataagatgagtattgtgtatagtcatgctgtgaagtactctcaaggggaaacaaggatgaacccagaaatggattcaaacattggtcaacattgtcaccaacaaaattctggactaatgagataccgttctgccccaagctcattgctcacaagccttgcgaacaacaacaacattaataataacaccaccaccaatggttgtgttaatggcaaagctttcagaagtgtgcataatcatcatcagcagcaacgttatcctccctccacaagttctgaaatggagaccatgttggccaagttgatttcttcaaacaattctgagcctttgcaagtgaaggaagaagcagtggcctctgtttcacagccaccacaacagcacaatggttactcctatgggtcttcacctcagatgatgtaccaaactcagcaaattcaaggcttgtctatgccaaatggttctttagggaatgcttttgatggctcattcagtgcagtgaattcccttgcttcacagaattccacacaacctagactgggtgcttccaccaattgcaacaatctcattaggcaaaagagttcccctgctgggtttttctccaattactcagttgataatgcaatgagagatgtggcaagttttaggggctgtgatgtctcaaatggacaagctattacatcctcaagtgggttgcatggtggtactttgaacttatcatctaggccatcctcttgctccacccgaatgccacagattgctgaaaatggaaatgaagatgtggaagcaaattatgttgaaagtagaaacctgagaaatgacaatatcaacaccactaaatgttacatgcctagtttcaccactgacttctgggatggttctgcattcagtgcctccagaacagctagtaacagaggtgaaatctcattttccacttcaaaggctatggatattcaggatgaagattttggataccaaaaagttggtttgacccaccatttgagtctgcctggctcttccagtaggatggctacaatggagaagctttatcaaattcaaggatctgttccatgtaaaattcgtgccaagagaggttttgccactcacccgagaagtattgctgaaagggaaaggagaacacgaattagcgcaagaatcaagaaattgcaagaccttttcccaaaatcagacaagcaaacaagcactgcagatatgttggatttggcagttgagtacattaaagacttgcagaaacaagttaagattctcagagatactagggcattcggcaccagtacaagcaatcagaagcactgatttatatatccttgtagataacaaaaagaaggagcatttttttttcttttcatgtatttatcctttggtgtaccaaaatttttggtcagtgtgattatgtagagtagcgctgatatttgctagtatctaagaatttaggtccaggtccgtgtgagtctcttcagttttgtttttcattttccctcatttgttttttctttctttcctttgcttgatttaagtatcacaatgtaataaaaagtttagaaagagccaattgtaactgttcattttactcataagaggtttgatggcatcacaaaataaaattgagtctcaactgtcacacgctaaagattgagttctatatggaagaaattaccggtgcaataagtagttaagatctttgtattcgtgttgcaaatatagggggtgtcctgattaggagttcagaaaagaggggtggaattgccttgatgttgaaccaatgccaagctatgcacactccagtgcttatcatcatttcagaagggtgatgaagacattagatgtgagaggagaggtctagcttatattagatgtagcaaagaagagtgctgggaatttattttccaatacaccgaatttgttagaacaacnngatca

SEQ ID NO: 27736 - DNA, 591 bp, Glycine max
  unsure (1)..(591): unsure at all n locations
  Clone ID: TF_jC-gmro02910073h08a1
ggctcgaggttcaccaagacacactgacgtacatgtttgattttgagctgtacgacttcgttgctgatccaaattttgatcagttcatcaatttgttccgaggagagaatgaagatgctaactgtgatcacttcggttctgaccttatcaatgattgttttgctaacaatcagcagcagctactttcatgtccagcaaacccttttgatcagaacaataataataatgctgtgaatgtctatgatccaagctccacatttagctccttctcttactatgatagggagctcaagggggaaggaggagaagaacttgatgaagaacattcttctgggacgatgacaacgacaactaacaatgctgttggcaaaccaaaagtaaaaactgatatgtccaagactctcatttctgagaggagaaggagaggccgaatgaaggagaagctttatgcattgcgttctttggttcccaacataactaagatggataaggcttctataattggagacgcagcatcatatgtgcatgaccttcaagctcgagctangaagcttgaggctgaggttgcaggacttgaagcatctttatagt

SEQ ID NO: 27737 - DNA, 1833 bp, Glycine max
  Clone ID: TF_GmC154228_1
cggctcgagcggctcgagtacggctgcgagaagcaaaagcttggggattgctgcgcgacgatcttccttgtttgtgaattctattctattctattctatcagcactttcaagtttcaagacagcaagcatatcatacaaaccttgtcccttgtcattatactttcactgaaatccaagtcagagtcaattctcagtgtctcacttcccaaaattcttcacccttttggccttttttcccattcagaaaatatgattcagttcaatacaaccaagatgaaaaagtggatgttttcacactgatcttctccttaaaccccgccaagttagtttttctttttcttttcccttgcctaatggaagttatgtcaaacaccatcatcaagcaaagcaacaacatagcaatttcacaaggcaccatccattttcaaaaactttctttctggttcgcccctcgaactcgtccaccgggttaattttccttctgatctttctcttggagctccactccactaaaagggttttcaaaggttttaaaaaacctctaccatagcaatttcaactacaaaagtcaaggattttagactaatcgcaattcgtgattgtaactgtggttgcatcggctgtatttgttggtaatttttttacaacatcaagtatcaaaataaaactgcaaccacgactgcaatttaaaacctttaggactatggtttactccttctatgacaaaacctcttcttcttctggctccgatatttcggggttgttcaatcctactttgcataaccttggagcttgcaatgacttgtcatcatcaccacattctttggtatttgagagtgataagggagagctggtgaagtgccttgcagctgcaaaggtagggaagagtgagatttgtgaggccaaagctttggctgctttgaagaaccacagtgaagcagagaggaggaggagggagagaataaacggtcatcttgcaacactacgtggccttgtgccatccactgaaaagatggataaagccactttactggctgaagtgattagccaagtgaaggagttgaagaaaaatgcagcggaagtaagcaagggttttctgattccaaaggatgctgatgaagtgaaagttgaaccatataatgatcatgaaggaggagaaggatccatgtcttactgtgcaactatctgctgtgatttcagacctgaaatactatctgacctaagacagacccttgattcccttccactgcatctagtcaaggcagaaatttcaactttggcaggtagaatgaagaatgtgtttgtcttcacgtgttgcaaagaaaacattaataatattgattttgaaaaatgccaagctcttgcaagtactgttcaccaggcactatgttctgtgatggaaaaggcttctgcctcactggatttctcaccaagaacatcacatgcaagcaagaggagaagactatgctttattgaaacatccaattccacatgcaaccatgggtcttgtttgtgctgatgtcaagaatttgatgtgttatgttatctgtttctgctgcaagtgttagagtgtggtattaacatttcttattttttgaggaatgctaacaacacacctgatagtatattgtttaatatgttttctattattgggtgaatctcactgaacaataaatgagattcgttaaatagcatatgtgacatcatataatgagagtcacgtttatccaataatagaaattgtgctaaaaaaagtttgtgagagaatgcactattcgtcttactatgcagcaaaattatagctgtttgtattgaaaaaaaaaaaaaaaaaa

SEQ ID NO: 27738 - DNA, 715 bp, Glycine max
  unsure (1)..(715): unsure at all n locations
  Clone ID: TF_LIB4281-033-R1-K1-C5
ccacgcgtccgcggacgcgtgggcggacgcgtgggcggacgcgtgggcggacgcgtgggtctgaacactctaaaaaaccagagccaaaccccaaacaaaattgtcttctcttctatttctccaattacaactcgtttccctaactcggccgagtcatcatggcgaatcacccttccgaagctcccaccgacgacttcctggagcaaatcctgggcctctcgaccttcgcctccgccgaccccgccgccgacgcctctccgatgatgcttcagctcaactccggcgacgccgccacccacctcgccgccacccacctcgccgccttccacgcgccgccctaccagctcggcctcagcttggaccaaggtaagggaccattcctcacgcccgaggacgcttctggaagcggcaagcgcttccgcgacgacgtcgttgataccagacctaaaaacttttttcatggacaacccatgcctactactgttcctactgctccacatccaccagcagtgcgacctagagtgcgggctagaagaggacaggctacagatccgcatagtatagctgaaaggttgcgcagagagagaatagcagaaagaatcagggctntgcaagaactggtccctagtgtcaacaagacagatagagctgccatgctggacgaaattgtggattatgtcaagttctttgagcttcagtgaaggttttgagcatg

SEQ ID NO: 27739 - DNA, 1915 bp, Glycine max
  Clone ID: TF_GmC8965_2
cttcagccaggcaacaagcctggtgccacctataagttcacaaacgctaggggacatggtggattccttcactgggacaaccttgtttaatgtcagaagagaagaactgagacgaagcaaaagctgaaaagcttaaactggcgaaatataaagacccatccaaaagcactatacgaaatccaatcccaccactctcttttttcttcttccttttcgtgctctctctcaaattcaacacgagagacacaaaacaaaacattctcgggaagcgtaaccgcccagaattccgaccattttcacagaccttgttttctgctcttgatgtttttcaccccccaaatgtggcaataaaaaacgggtggcttaatttgacacaatcggtggttattgcaaagttgagatggcaggtaatagtggttcagaggggttgggcgatgatttcttcgaacagatcttagcagtgcctgaagccggcacagtgggaatgttgcaattggggtccacaactggtggtttcagaggagcttctgggttaatgcctctgggcttgaatttggaacaagctgccttcctaagacaccaagttaacgttgacgacgacgttgttcatgttaatgttgatgatgccaccatccaccaacatcacctcactctccataacaacaacacctcctcatcaccctcttccactgcaccaatcaccgatagggattctatgcatatgaggggcttattttccgcgtttggacaactgcatactcctatccgccccacgctgccattgcctccaccacctcgtcagccacaactccacctccaccatcataaccaacagtttcagggccaggcagctgcagctccagcgtcaatggctgctatgccacaaccacctgggatccgccctcgtgtgagagcaagaagagggcaagctacagatcctcacagtattgctgagcggttgcgtcgtgaaagaatcgctgaaagaatgaaggcattgcaggaattagttcccagcatcaataagacggacagagcggcgatgcttgatgaaattgtggactatgtgaagttccttaggctccaggttaaggtcctgagcatgagtagactgggaggagctggtgcagttgctcagcttgttgctgatgttcccctttctgcagtggagggggatcaggacatagaaggtgtatccaatgagcaagcctgggacaagtggtccaatgatggcacagaacaacaggtggctaagcttatggaagaagatgttggagcagctatgcaatttcttcagtccaaggcactttgtatcatgcccatatctctagcctcatccatttttcgcatgcctcaatcggaagcatcaacaggcatcaaacctgaatctaacagtcactgatattagcgatagaaccgaaacaaaaagtatcatgacagacactagataattaaatttcttcatccttaatttatgacaagggtaatattctactttcttgtataatttaattttcctgattggatggagaaggatctagtcggtgcagcagctggttcactcttctcaagttttgtcaaagaaggagtaattgttattcctattaagtaaaatcggaggagccaagcaaatgtccttttcatggtgaagattaatattttcaatggccttattcaagtttttcttgcaaatatctgtggtggggttggtggtggatgaccaaaatatttgtagtggaacctcttttcttggtttagtatttttagtcagtggggagtgggaccatttaaaaggaaaggatggttacgaatgatgtatcgggagaaaactttaatacaagttgaattataatatggttagttaccttgtaaagatgttttggaagcatctgacaattggaaaagctaaagatatttt

SEQ ID NO: 27740 - DNA, 1044 bp, Glycine max
  Clone ID: TF_GmC227_1
gtaattttgacgtgattctgttcgcctacaattaacttgacagttgatcatacacactcttcttcttcttcttcttctctcttcttgcttgcaatatggacatgaattcctcaggtggtgcctgcggttggctttatgattatggctttgatatccctgttgctggttctgacttcatggcttcagactctggtggtttcagttgggggccccagagttacaacttcaagggtccttcaaatatgagcttggaaatggaatactcactggattcaactgtcatggaaaatggtccttcaaagcggttaaggactgaatcatgtgcatctggctccaaggcatgtcgtgagaaattgcgaagggataaacttaatgagaggtttctggaattgagttcgatcttggagcctggtagacagcccaaaacagacaaagttgcattattaagcgatgcggctcgagtggtaatccaattgagaaatgaagccgagaggctgaaggaaatgaatgatgaattacaggcaaaagttaaagaattgaagggtgagaagaatgagcttcgtgatgagaagaataggctgaaggaagagaaagaaaagttggagaagcaagtgaaactgacaaatatacaacccagcttcctacctcaagccccagatgctaaagggcaagttggtagccacaagctgatacctttcattggataccctggaattgccatgtggcagtttatgtcccctgctgcagttgatacttcaaaggatcatctgcttcgacctccagttgcataaagtggttagcaatagcatccacttctttgttgtatgtgttctttacatgtgttatatttttgtgtttaagttatccatcctgtctaatgtgtgttttctaaagtcactggtagaaagtgtgctcggaaactggttaatagtataagtttgtgctgttgctgtctgaactatgataagaaagtgctacatgtcatggctacaaagtgtgttgcatgattaaaaataaaagtcagtttaagtggttctttgctgt

SEQ ID NO: 27741 - DNA, 431 bp, Glycine max
  Clone ID: TF_GmC227_3
atctcgagccgattcggctcgagtgaaatttgtgattaattagcctttgtgtgtcttttttttttatttgtcacctttctctctcttcaggttaaggactgaatcatgtgcatctggctccaaggcatgtcgtgagaaattgcgaagggataaacttaatgagaggtttctggaattgagttcgatcttggagcctggtagacagcccaaaacagacaaagttgcattattaagcgatgcggctcgagtggtaatccaattgagaaatgaagccgagaggctgaaggaaatgaatgatgaattacaggcaaaagttaaagaattgaagggtgagaagaatgagcttcgtgatgagaagaataggctgaaggaagagaaagaaaagttggagaagcaagtgaaactgacaaatatacaacccagcttcctac

SEQ ID NO: 27742 - DNA, 1695 bp, Glycine max
  Clone ID: TF_GmC135879_1
atgtacatgtccatcttaaagaagaatgtaaagaggcagttgcaaaactggatgctcaggaggcacagggaactgctgtaccaaaaagactatcagcattttatatggaaaattatggacaagagaccaatgagtacaggagacaggccaaaaatgcatgatcaaaccggttgctttgatcccaacacaacgggagaaagtgtaccctctctgaaggataactttcctcaaactctacctccatcatcacctatggttgttgtaggaaacaccaccacaaacagcatcaataatagccttgaagagaatctcaggctttctgtggaggagctctcctgtaaccatcacaatccacaacaccaacaagatcatgtctccacctatgcaagtggagtaactgccacatctattgaaatcccacttccacagcatcttggtttgaacatgggaaactcctacatcaacaacaacaacaacatggataatcatttggtgcaagaggtcattgatgcatttccctatcagcagtccacttgggaccctactattgttcaggaattacaagacatggcctatgctaatcacacagaacaaacacaacagcaacaacaaaatgaacaacaatttcagcaatttgagactcaaaactgcagccaaagctacaacaacccctcttccatactagaccctccttacccttcaccagatctcctaaaccttctccacatgccaagatgctcagcctcatctttgctcaccaatccctccatttgcctcacaaacccaactcagaacacaccaaactttcagaatccaatggcctttcttggagatcttccaataggatcagaaaacacaagtgcatcctcagttttgtatgatcctctattccatctgaaccttcctcctcagcctccagcactcagagagctgtttcagtctctcccccgcggctatagcttgccaacaaactcgaggaatggctcactctttggtggaggggatgagatggagggtgatggaagccagcttgacatgggagtgctggaattcaacagggtcacactcacaccttctgttggcaaaggaaggagaggcaaagctaccaaacattttgcaactgagaaacaaagaagagagcaactcaatggaaaatacaaaatcttgaggaatctcatcccaagccccaccaagactgatagagcatctgtggtgggggatgccattgactatataagggagctgattagaacagtcaatgagctcaaactactggtggagaagaaaagatatgcgaaggacaggtgcaagaggcccaaaacagaggaagatgctgctgagagctgcaacattaagccttttggtgatccagatgggggcataaggacctcatggctccagaggaaatccaaagacagcgaggttgatgtccgtatcatcgacgacgatgtcacaatcaaactcttccagaggaagaagatcaactgcctgctgtttgtctccaaggttctggatgaacttcagctggagcttcaccatgttgcaggtggacatgttggtgaatattgcagtttcttgttcaatagcaagataatggaaggttcttcagtctatgcaagtgccatagccaacagggtgattgatgttctggacagtcagtacgcagcagcagttccacatacaaacagctattag

SEQ ID NO: 27743 - DNA, 584 bp, Glycine max
  Clone ID: TF_jC-gmXLIB3563P001be05a1
ctcgagccgaatcggctcgagcggctcgagaaccctctctaggagtgacagagtctgcagcgaagctagggcagtggacatcaacggagcgaacgtcacagtcgttttctaacaatcgtcacggcggtttcagctctcgctcttcatctcagacaactgggcagaagaaccagagttttattgaaatgatgaagtctgcaagggatagtaatgcccaggatgaagtgctagaaagcgaggaaacattttttctcaagaaagaaccctcctcgaatacccaaagagaactcagggtgaaagtggatgcgaagagtactgatcaaaagccaaacacaccaagatcaaaacactctgcaacagaacagcggagaaggagcaaaattaatgacagattccaaatgctaagagagcttattccacacagtgaccaaaagagggacaaagcatcttttttattggaggtcgttgagtatattcattttttacaagagaaggtgcacaagtatgaaggttcatttcaagggtggagtaacgagcccgaaaaattgatgccatggagaaataatgacaagccagcagaaact

SEQ ID NO: 27744 - DNA, 1341 bp, Glycine max
  Clone ID: TF_GmC330_3
tacggctgcgagaagacgacagaaggggaaaagtgaagaaaacagaccaaaaatagaaagaaagagaaataccaaaaccttggcgcatcatattctttattccctcacttggatcgttaattccgcgaacgagcttctgcccttcaaattaaccatggagaatattggtgaggagtacggctactggccggagaacgacatgcttttccaaaacgaagaccttggcagctgggcgataatggatgaggcagcgttatcagggtcagggtactatgattcaagctccccggacggtactggtgcttcttcatcggtggcatctaagaacattgtctccgagaggaatagaaggaagaagctcaacgataggctttttgctctaagagcagtggtccccaacattaccaagatggataaggcttctatcattaaggatgctattgagtacatccagcacttgcatgaccaagagaagagaatccaagctgagattttggatcttgaatctgggaataaactcaaaaacccaacctatgaatttgaccaggacctccctattctgctcaggtccaagaagaagagaacagaacagctattcgattctgtcagttcaagaaattctccaattgaaataattgacctgagggtaacatacatgggagagaagacgtttgtggtgagcttgacatgtagcaaaaggacagacacaatggtaaaactgtgtgcggtgttcgaatctttaaagctgaaagtcattacggccaatatcacttctttttcaggcacgcttctgaagacagtcttcatccaggttagtcttccattttgcccttcttaaattaataagtaaataaataaattgttaattgtttaatatttgtgtttaaagattaaattagtttttttaaaaataatactcatcggctagaattttgggggccacatactaggaaacctatggaccactttaataaaagtgggaaacccatttatgggataatgggcattttagggtcaatgatgagaattaaggaccttatggcagtgtcctattcaaatcagctgatgaggcaattaacaaggaaggaccacgtgaatcttgtgctttaaacaaagattgatgggaggaccacatgaatattgtgctttaaacaaagattgatgggaggaccacatgaatattgtgctttaaaaatagagaaaaaattatgtgagtattatatgattattttggtgatttttatgcttagaaagaaattaatttctacttatcggtagaagatattcttttgaaaataaataaataataaaagactcaatttcatgacgtaggggataaaa

SEQ ID NO: 27745 - DNA, 464 bp, Glycine max
  unsure (1)..(464): unsure at all n locations
  Clone ID: TF_jC-gmst024125b09a1
ggctcgagggtcaagcaacgtgtagtcacagccttgctgaaagggtgagaagagagaaaataagtgaaaggatgaagacgttgcagcgacttgtgccaggctgtgataaggtaaccggaaaggcccttgtgttggacgaaataatcaattatgttcagtccttacagaatcaagtggagttcttgtcaatgaaacttgcattagtgaatcccatgttctatgacttggccatagacttagacactctcatggttagacccgatcagaaattaaattataatatagcatcaccatcaccatgtttagcacaattcagacccaaccaggccattgcttttgctgacacaaccactaccaacagtttccccacagctaataatggtgactatcttttggattattcatcctcactttttcttcaaggcccgagatcaaatcttctttttgagtataacngtggtcag

SEQ ID NO: 27746 - DNA, 1164 bp, Glycine max
  Clone ID: TF_GmC1312_1
aggttcacgaagacacactcaagtacatgaatgattttgagctgtacgactttgttgctgattcaaattttgatcagttcatcaatttgatccgaggggagaatgaagatgccaactgtgatcatttcggttctgaccttatcaatgattgctttgttaacaatcagcagcagcccctttcatctcctgcaaacccttttgatcagaacaacaacaataataataatgatgctgtgaatgtctatgatccaagctccacattcagttccttctcttgttttgatggggagctcaagggagaaggagaagaagaaaatgatggagagcattcttctgggacaacgacaacgacaacgaagaatgctgatggcaaactgaaactaaaaactgataggtcaaaaactctcatttctgaaaggagaaggagaggccgaatgaaggagaagctttatgcattgcgttctttggtccccaacataacaaagatggataaggcttctataattggagacgcagtgtcatacgtgcatgaccttcaagctcaagctaggaagctgaaggcagaggttgcaggacttgaagcatccttattagtgtctgaaaattatcaaggatcaattaacaatcccaaaaatgtgcaagtgatggcccgtaatattagtcatccaaactgcaagaaaatcatgcaggtggaacatgtttcaagtggaggaaagagggtacttagcaaaaatagtgtgcaataaaggagaaggggtggctgcttcactgtacagggctctcgagtctcttgcaggttttaatgttcagaactcaaacttggctacagttggtgagagttttctacttacatttacgttgaatgtaaaaggaactgaacaagaaattaacctgccaaatttgaagctatgggtgactggcgctcttctgaaccaaggctttgaattcgtggcatcttttcctgcttgactcactgcaccaagtatgacgtagaagcaattgcattttagagaatatgatgagccatgaaatattacgtataatatccacgtcaacatcttgagctagtatgatatcacttagtattaccgcaacaccgttgctaccttcgttctgtgtaattctccagttttcagaacaaataataacactacaaagactagc

SEQ ID NO: 27747 - DNA, 894 bp, Glycine max
  Clone ID: TF_GmC544_1
atcaattaaaaaagataaacagaggagaggagaggagaaggcgatgcaacccacatccggcggcggcgggctggcaaggttccgttcagctccggcgagctggttagaatcagttctgttgaaggaagaggaagaagaagaagaccccttaagcttcactcaactgctttccactatcgatgatgctccctctcattctcaacaccaactctatggtgccgctctctcaaacaaggataaaacacctgaaatcttcatgttagaagattccgttccttgcagagtgagggctaagcgtggctgtgctactcatcccaggagtattgctgaaagggttcgcaggactcgtatcagtgaccgcatcagaaagctgcaagaacttgtgccaaacatggataagcaaacaaatactgcagatatgttagatgaggctgtagcgtatgtcaagtttctacaaaagcaaattgaggaactgtcagagcaccaacggaggtgtaaatgcgtggttcaagagtaaattgctgattgttccatgcagtgcttggctttttacgatttacttatgaattattatcagaatttttttatgttctgatgaagatcaaccataccacactctggatgctaattaaatttaatatctcctgataacttaaaagatgcatatattatacatgttaggggtgacattgccaagttcgagacgaataaattacaaatagaattttaccctagagtgttataattgtgttgtagtgttgtacaactcttaagatacacaaatctgccaagttaatagctacttggacttaagatatatacataaccatatgtgttattttattaaataaaaaaaaaaaaaaaaaaaaaaaaaaaaaaaacccaaataaaaaa

SEQ ID NO: 27748 - DNA, 2512 bp, Glycine max
  Clone ID: TF_GmC7716_1
cggccgctcgaggcggcaggccgggctttgcttgagttgagtttcttctctctttctccttcctcgtccacctctctacactcacgagatcttgctcttttttgtcaaaaagcagcaaaataatcaaatttggcaaactgcccaaactcatctctttctgcttgtccttttccctgtttggggtgtttatctgttacgcttctgcacaacacctttccctttataatccctccttgaattttgtgcaaccaaggtttccttttccttcccgtttgggttccttctcagttctcacgtgatccttttcatttttttcatctcccataatgattctctagcatctcatatcaccttgttgactttgttctctttcaagtaacaaattaattgattatggattcgaattcgcgctaccaagttcagcagcaacaccaacacaattctgggttacctcgatttcgttctgcccctcccgcaaatctcaaacaacaaggcgaagctgccaataataatgggagcgcgtgggagggttctgaaccgcttttgagattcttgaattccggggacacccatgatacgacgtcgtcgcctaccttacgagaattcgtggataataaggtttctaataatagtaaacctgcgaaggagtcatcatcacctctgagtcgcatgaattcccaacacagttatagtacttctatgttaccctctcggagtactgtggcttcagctatgatgatgttttcttccggaaagaatcagagtgcagcaagctttgatgcgtctcttctcaggcaaagtagcttccctgctggccatttctctaacaacatctcctttcagaacgggtatgatactatgaaaggtgttggaaactatagtggggtcaatggcaatgatggtgaacttagtctatctatgaacagaatgaagaatcaaataagcttctcatcaataagtccttcttcttccttgggagtgctatcaccaacttccaaaataggcacggagggtattagggtaactagcactgaggatgggaggcagggagggagcaatggtgatgctcgatattttggccctggattctcctatgcttcttggaatgagccttcacaccacaaaagacagcgaagtagtaatgatgagttactttctgattctcaggatggagaactaggaaatcaagttcaaacactttcgcatcatttgagtttgccaagaacgtcgtcggatatgtttgctatggatagtttgcttcagttttcagattctgttccttgtaaaatcagagctaagagaggctttgctacacatcctcgaagcattgccgaaagggtgagaagaagtcggatcagtgaacgaataagaaaattgcaagagcttgttccaaacatggacaagcaaactagcacagcagagatgttggacttggctgtagactacataaaagatcttcagaaagaattcaagactctgaacgataaacgggctaaatgcaaatgtataaacatgcagaagtcagaagcagatcaagttgcttgagtttcttttgtacaggtaataaaaaggaactacgccaaacatgaataggacccgggttttatattttgacgtgctgaaaaatcaatagaacaaagttaatatgcagaatgccagcttttaactcttcatgccacattgtgtattttgagttaacgggagttccagccacacagacaataaatcataattttgtatacaaaaattctaatgaattaattttagcttatttttccccgtgctcctaaacttatcaaagacttcccagagtttggattaggaggaaaatttgtggtttctttctttttattattacaaaacaatttagatgagttggatttcaggaactcaccaagctaaacagcttttaagactcaaagaatgagatatgaatttgtttttttaaaaaatgaacattgactattcttttttatggagagcaattcaatattgcagagatactttgattttctcattttattgttagggctgccaggttgtttgaagaaattaaaaagtgatgcaggtatgaccgaataagccatgaggtactccacgcttggatggatacttaaacagagattccgggaatggttaaagaatttgacgtaaaagattgattgttacactcaaaatagcaaataggttgaaatcaagtaatcaacacgggcttcaattcaacttgaaagataaagacgaaaaacagaagtcgttttaaagggtttcattttatgaacaaaaaatatcatttgaattttgacatttagggtctattacatgaatgatgtggggagcaaatgttagtctcatctggccaacttgcttgtattgcaacaaagtcatgtcgattggagggcccttatataataatcccaaacaaaaccgttcaataccaagtgtaattcgcttcaatccggtcgtgttcatagtagattatccagttaaatgttaatttgttgacaaatgtaaa

SEQ ID NO: 27749 - DNA, 600 bp, Glycine max
  Clone ID: TF_GmC142014_1
atttgttaactgctcctaagtcctaactaacaagtcttcaccatcattatggttgctttgttttcccctccagtgttctcaaccaagggatggctcttagaagaggatccattaagctatgatgtgtcctctgagtactcatttccctatcaattttattcaccacagacacagattgagcttgaaattgaaaggtccacttctccatcccctgaagaccctgccatggtcaaaaagcttagccacaacgctagtgaacgtgatcgccgcaagaaggtcaatcacttggtttcttcacttcgttcacttcttccagtggctgatcaaacgaaaaaaatgagcattccgactacagtttcgcgagttataaaatacatacccgagttacaacagcaagtggaagcactatctaagaaaaaagaggatcttttgtgcagaatttctcggcaattgcaaggagatgcggtgaacaaagaatctcaaaggagaatttcccatcacaattctgattttgctgtttcaactagtaggctcaacgattgtgaagctgttgttcacatttcctcttatgaggctcacaaggctccactatccgacatc

SEQ ID NO: 27750 - DNA, 1285 bp, Glycine max
  Clone ID: TF_GmC85409_1
gctaaaatgggtttctattttggtaataggagattcgatcaatataaatatatatatatagatatatatatatatatatatatatatgattatatacgttatgtacataactttcctagaaattattcaaatgggtttctattttggacactaatgactatcatttattcagtgaatatgacatgaactctgtcgaggaacaattggagggagagaattcagtggatcctggtgaactctcatgggaaaatcactcttattcatatctcactaaagaaagcaccacccttttgagcaattcttcatctttggaagagatcaacactggctttgatatgacaagtctcaaacaagatgcttctccacagaaaccgaagtcttgcattctgtcttttgaggattccactttagtgccaattaatcccaagaaaacatgccaaatatatgatcatggtgaacattcaaaggagacacaagaaaagccacacaatagaaaacccctcaagaggggtagacgcttttctcagacacttgatcacatattggctgaaagaaaaaggagagagaatatcagcagaatgttcatagctctttcagcacttattccagacttgaaaaagatggacaaggcttctgtccttagcaacgctatagagtatgtgaaatatcttcagcagcatgtgaaagatttggaacaagagaacaagaagagaaagacggaatccttaggatgtttcaaaataaacaaaacctgtgatgataaacctataaagaaatgtcctaaagttgaagcaagagtctcaggaaaagatgttctcatcagagtaacgtgtgagaagcaaaaggacattgtacttaagctactggccaagcttgaagctcataatctctgcatagtgtgtagcaatgtcttaccttttgggaattccgctctcagcattaccagcattgctatgatggaccatgaattcagcatgacagtggacacgtacgacctagtgaaaatgttgactgaggaattgttggagtgctgtaaattgcaacgataatgagccacgctaacgaattggctaccagtaaatttaaaagtgcattttaagcagttcaagcattttatttggtgtccctattagataattaatattggcagtatcttcatatattatgcatttggtgtgcataatagttgtctttttggccatcttcacaaataatcatcatttttatggcaaaataaaatgattttgtgatttcacattttgtgcattttcaatatttttatatt

SEQ ID NO: 27751 - DNA, 1397 bp, Glycine max
  Clone ID: TF_GmC298_2
ctcgagccgaaaagattggtttgagtcggtatcgattcagttaaaacacgtcgtgtcctaagactactggtactaggtaggttgtacttctcttcatctggagaaacaaatggctaggtctgcgaaagggcatcaggatgaattcgacgaagatgatgaagaagaactcttaactggaaacatctcttccaaagtgaaggtggatgaacccagcacggggaagagggtgaaccctcatcgttcaaagcattcagaaactgagcaacgtagaaggagcaagattaacgaaaggtttcaggttctgagagatctcatacctcaaaatgatcaaaaaagagataaggcatccttcttgttggaggtcattgagtatattcagttcctacaggaaaaattacaaatttatgaacagacttatgaaggatggaatcaggagcccacgaaattaactccatggagaaataatcacggacctgcagaaaatactacagatccttctcaagctactcaaaatgggtctgttgatgagaaaaataacaatgtctctccattgttgcccaaaaatgtacagaacccgatagagtctgacttctcaatgacaactattcagaagggcaacatccctggttcaactacagaagcagttcccctgcccatgcaaatgcgattggacatgtttgatccagttgttagcagtagtatggcaacccaacatctgctggaacctgtatctaatgttaacatgctttcccatacccagcctcaattgtggcttgataaacgaaacaagggcaactatattcttccacataatgatacaatgaaggaacaggaggagctggtgaatgaaagtgggtcagatagcatctcaagtgcctattctcagggaattttagattctctcacacaagcactgcactcttcaggcgtagatatgtcccaaactaatgtctcagtgcaaattgatgttggtagacaagaaaatgctgggctgatcccctctgcatctacttcaaagggtcatgaaaaccaatctgtgagcaatccagcaatagcacgttccggagttgattactgcaatattgattctgaacaaagttcaaagaggctcagacaagaagcaagctagagattcctctcatgttcattttgtcaggagtttctttttttgctgtttgtcttcagatgagagtaagaggaattgggtggatcggttcatttttgccatgctggttagggccagatcaaatgtaaattttcacgattctggttttgggactaagacattctgaaataaaatgttatatatgcttgcttctacttcaattttccattttaatgccttcgagtatgcttgatattttaatgtcatatattcatggttttgacatttattt

SEQ ID NO: 27752 - DNA, 571 bp, Glycine max
  Clone ID: TF_15663066
gaaacctggagaacctaccaaaaagactaaagagctcaatagaggtcccaaaaacatcgaggaatgctaaatcaaggaaaaattcaaaatctgcttcaactagcaacgatgaagatgatagaagcttgagcctccaagtccaaaggaataatagctgtttttcacagagtgactctaatgcttatcttgagccaaatggaggggcatcaaaagatcctgcacctcctaatttggatagaaaatcaagagcaactaccagtgccgccgctgatccacagagcctctatgcaagaaagagaagagaaagaataaatgaaaggctgagaatactgcaaaatcttgtccccaacggaactaaggtggatatcagcaccatgcttgaagaagctgtccaatacgttaagtttttacagctccaaattaagcttctgagctctgaagatttgtggatgtatgctccaattgtttacaatggaataaacattggactagacctcggtatttctccaaccaaaggaagatcaatgtgatagcatagcaattaaagaggatataatatttcattaactta

SEQ ID NO: 27753 - DNA, 2106 bp, Glycine max
  Clone ID: TF_GmC3662_176
tggaaaatgcatggggtttcaacatggaaatgagagcattctgacttgtccaacttccggtctcagtggtgcaaatgttaatgtttcagaaatggctattagttctgtgtctatagccaagccttcagatgtagttaacccttttattgcttcttccgcttgggatccacttgtttcattgagtcaggttcaatcttttggaggctcttcaatggtttctcatagtgagtttgccaattccaactcatcttaccctcttgttttggataaccaagggataagcaacacgtctcacctggttcaatacatgtctgactcaaatcttgggggcatggtccccaaggttcactcctatgcaagtgggggattctcagaaatggttggtgctggctctttttgccaacataggtctgctgatatggctaacacagggtatccaatacattataatccgatcaaggaggctccaattaatggtgaacaatctcaggttgaggactcaattcctgaagaggaagcaccaggatctgcacctagtgggaatagaagaaagagagggcttgatcataattccaccttcagtccaaataagaatgctgagggtgatgctgtgaatgattctcctgggaaggcctctgatggttcaaaagaacatgaaaagagaccaaaagtggagcagaataatggcgcagatgtgcgtggcaagcaatcagtgaagcaagctaaagacaacaattctcaaagtggagaagctcccaaagaaaatttcattcacgtgagagctagaagaggtcaggccacaaatagccacagccttgcagaaagagtgagaagagaaaagattagtgagcgaatgaggttgcttcaagaacttgttccaggatgcaacaagataactggcaaagctgtaatgcttgatgagataataaactacgtgcaatcacttcagcaacaggttgaggtatgattgtagtgccaccttttatgctttcaatttaccatttaaaactgaatagtgcatgttaagagatattttatgataactcaataacacaattttttttgtctgttccattattattgttttgtgactagtcaacttatcaaagagatattttgcagtttctgtccatgaaacttgccacagtgaacccagaactgaactttgatgtagacaggatcctatccaaggatattctccaatcacgcataggacatggaattggtgcatatggtcctggtatcaattcctctcacaccttccccaatggaagtttccatggaacattggctggcatgtctagtacatcctcacaattccctcctttgccacagaatgttttggaccatgagttccaaagcttctatggaattggatacgattctaatacagcacttgacaacttgggacccaatgggcggttgaaaacagagttatagtgtgtgcattattacatagccatgttactacagcaacaaagactttggaattttcttgttgactgcacaatttaaccgaagatgaaaatgggaggacaatagagagggaaagaaaaagaaaaaaaataaaggttttagttgtatagggtctttaatacctaactgttggcacttcgaatttttagcagaagatgacttgttagatttatcaattggaaaatgagttacacatattatgtatagaatctagatcatgtagaacaagttgcagtggtcttgtttaatgacacggagagcagtattttgaggagcatgcgagtaaagtgtgtgcaactatcattacttttattgaattattatgtatagagttgccgggttcggatttttgaagcacaatgttttcaaatttcaagtgttgcagattggataatgtgtgtacttgactactacttatgctagggtttatggtttttctttgtatttttcttttcaaaagaaaatgtaaccaatgaggagattcttagtgcatacaacttcaaggatgaatatgttgcaacttgtatgagggtgaaagattgtttaagtagaccagtgcttcaaacattggccttcttttgtttttcattttcccatttgttggtgtttcttatttgaaaagtgtaattt

SEQ ID NO: 27754 - DNA, 1442 bp, Glycine max
  Clone ID: TF_GmC1728_1
ggctgtgttatgcggggggtgtgggtagcgaggctcgggcgtctcgtggggggcttctcaaagcagtccttagaagacagcggctattgggattttctcgattactctttcattgatcaagcgccccctgatttcctttggtccaataatactattagtgtgaacaccgaagttgacattccaggtgatgctgctgcgtgtcaagagaacaccaagaagaggggacatgctgattcaagctgccaggtgggatctaaagcttgccgtgagaagttgcggagggagagactcaatgaaaggttctgtgacttgagctctgttttggagccagggagacctgtgggatcgcgcgcccccgctctcctcgttgccgctgtctgccgctgcagccccctggtggctgatccccaggagcgcaccccattgaagctcaaagatccaacctcccacgcggtccctacgcaatatttgaaggttgtgttattctgaaagagaagatagggagggcggtttggtttggtgcaaatggattccttagaagacagcggctgttgggattttctcgattactctttcatcgatcaagcgccccctgatttcctttggtccaataacaataatagtgtgagcaccgaaattgacattccaggtgatgctgttgcttgtcaagagaacaccaagaagaggggacgcaccgattcatgcttcaaggcgggatcaaaagcttgccgtgaaaaattgcgaagggagagactcaatgaaaggttctgtgacttgagctctgttttggagccagggagacctgtgagaacagataaaccagctatacttgatgatgctatcagagtcttgagccaacttaaaaccgaagcccaggagctcaaaaaaacaaatgaaaaattactagaggaaataaaatgtttaaaggcagagaaaaacgaactacgcgaagagaaacttgttctgaaagcagataaggaaaggattgagaagcagttgaaggccttgcccgttgcaccagcagggtttatggctccacctgtagctgctgctgctgcagcatatcaagcaggggtgaacaagatggccgtatatccaaactatggctacatcccaatgtggcaatatcttcctcaatctgtcagagacacatcacatgatcatgagctcaggcctccagctgcatagttgtttctattattgttgcactttggataattatttaacatttgcgaagtattgacatgtaaatattgtcatcgtttcgattatttatttttattttttacttagtataatgtgctaaaaataggttttcaagtaatctatgatggcaatgacatgaaaactctgtcgatgtacattgcaaattgcccagttcttcacttcttagtagctcgctaaattcaatactaaatttattgaaagttttattttatgag

SEQ ID NO: 27755 - DNA, 2331 bp, Glycine max
  unsure (1)..(2331): unsure at all n locations
  Clone ID: TF_GmC1767_1
attaatgttttctcatataagtgaaaaatgaaacatgtttgctctatctaatcagtctcaaaatcaacaccatatatcgttgaaatgttcagaattaactacacctagcaagatacttattgttaaatcaaatcacatccctgttttcttctgttgtaatgatattagagtacagtaattgagagttagttttttacattattcttgcagagaatgggaagcatatttaagtgagaggtaaaaaagagtatgagagatgttaatcttaactatagaatcaaattaaatagtaagattaggtttaagtaaatcattgtgagggttgtatgctcaaaattgacttctcttatctctcattaaatatgttcccaaaattgataatatatatatatatatatgcaattgcgcataataataaacaagaccagtttgatgtcatgaggctcgagctccggacgcgtgggtttctactctcacagctgtttattttcttcctcttctcaactgtgttcgtgtgtatgcatttgagttgaaagccagactcaaggagctgaaagacaaaagaagaaacttggatttgaatcagccaaaatttgagttacacgtaattgcaaagataagatgagtgttatgtatagtcctgttctcaattactcagatgtggagcatcagctaaggaaaaaccaagacatggattcaagtattggacatccacaacaacactgtcaccaacccaattctggactattgaggtattgttctgctccaagctcattgctggcaagcctcattgacaacaccattcatggctgtgtcaacgaggaatcgttcacaagtgagaatcatcatcatcagcagcagcagcagcagcagcattatcttccatctacaagttcagaaatggagaccatgttatccaaattgctaccatccaacaatggatggagcaattcagaagctttgcaagaatttggaggcaagcctgtgaagcaggaaataggggaatctattccacaagagccaccacaacagaatggttattcttatggtggctctcagttgatttaccaatctcagcaaattcaaggcttgccaaatggtggatcttccagtgcttctggcagtgcttttgatggctcttttggtgtggtgcactccatggcttcagaggactccattcaatctaaaatgggtatcaggaattgctccaatctctttaggcaaaagagttcccctgctgcatttttctccattgaaaatgatcttgcagcattgagagaagtaggaagctttaaagccgatgatgtttcaaatggactagttactgcatcaactggtgggttgcatagttctcatactttctcatctaggccatcttcatgcttgaaacggttgccacaaatagccgaaaatggaaatgaaagcctagaagaaaattgtgaccaaagtagaaacctagtaaatgacaatggtagctcaaaatgttacatacctagcttcaccaatgaattatgggaaagttctgcattcaatgccccaaaaacagagaatgaagatgaaatcatgttttccacttcaaatattttggaatctcaggaagcagatttcagctttcaaaatctgggtttgactcaccatttgagtctacctagctcttctactaagatgtcatccatagaaaagtttcttcagattcaaggttctgttccttgtaaaattcgagccaaaagaggctttgccactcacccaagaagtattgcagagagggtaagaagaacaagaattagtgaaagaatcaagaaactgcaagacctttttccaaaatcagaaaagcaaacaagcacagcagatatgttagatttggcagttgagtatattaaggacctgcagcaaaaagttaagatactctcagattgtaaggcaaagtgcaaatgtacaagtaatgagaagcattacactagaacttgtgcttgatttatttgcatgtagatagcaaaaggatggaagattttttagtgtgccaaagttagcaattgtaattagataaaataatgctgacatttgcctggagtgagtttaggaccaggtgaatttttttttttacttttttttttcattttttcccttaatttctttttcttcatagtttgatttaaggatcataaagacctagcatgtttagcatgagttttgtagctcttcattattacatataagaatttatgttgaaatttatatggaaaaaacttttgaaacttcaaaaaaaaagggcaatgcccggacatggaacgaatnccaagnncttacggtacgcgggtgcagtgcgacgtc

SEQ ID NO: 27756 - DNA, 2769 bp, Glycine max
  Clone ID: TF_GmC5053_1
gattacaaccctcttaaaaattaatgttaactatctcatttcttctagttataatacatctactgtatcttgtaaacataagagcaccttccaacattcacatagtcaaactattaaaagatgaaatatataatgagcaacctgcatgcagctatttctcagttctcacgccagtgaagacagttttccagagaatccaatcagaaactgccacgtgtcccaatgtgccaccacttctctgtttccttggctcaggttaagaatagaaggcatctttttacagcctctcccattcagcgatttaatcggcgtgtacctttcctggaaacctcgcacttttcacagttttcactcaaatgaaacccaaatacactccacataaataccaaacccaaatccacccccactcactcagtcactaaccttatctctctcctcagatagatacacacactctctcttttccactccctctttcgccgccagaacaaaccaaacccacacttcactctcatccaattccaaattctcgttgttgctggtgcacggaatgaccgagtaccggatgaacctgtggaccgacgacaactcctccgtcatggaggccttcatgagctcctccgacctctcctccctctggctccccacgccgcaatccgccgcctctactaccactcctggactggaaaccacccgagcaccgccgcctcagtcccactccctcctcaaccaggagaccctccagcagcgcctccagacacttatcgaaggcgcccgagagagctggacctacgcaatcttctggcagtcttgctacgactattcctccggcacctcccttctcggctggggagacggttactacaagggcgaggaggacaaagacaaagtcaaaaccaaagcccccaaaacgaggtcgtccgcagagcaggaccaccgcaagaaggtcctccgcgaactcaattccttaatttccggcccctccgcttccgctgacgacattgacgaagaagtcaccgacaccgagtggttcttcctggtgtcgatgactcagtccttcgtcaacggtagcgggctgccgggccaggctttttttaactcgagcccggtctgggttgccgggccggaacgactttccgagtcggtctgcgaacgggcccaccaggggcagatgttcgggctccagactctggtctgtataccgtccgcaaatggcgtcgtcgagctcgcctccgcggaggtcatttttcagaaccccgatctgatgaacaaggtgcgtgatttgttcaacttcaacaacaacaacaacaacaacaaccctgaaacgtgttcctgggcgttgaattgcgttgccaccaccgatcaaggcgagaacgacccttcctcgctctggctcaaccctgaaatcaaagactcctccaccgtctcgccgccgaattccacggttaataagacgatgcatttcgaaacccctggttccagtaccctaaccgaaacccctagcgctgctgctgctgttcacgtccccaattctaaaagccagggattcttcccgagggaattgaacttttcgaattcattgaaacctgaatccggtgaaattctgagctttggggagagcaagaagagctcttacaatggggctttctttcccggtgttgttgcggttgaggagaacaacaacaataacaagaacaagaagaagaggtccccggtggtttctcggagcagcattgacgatggaatgctttccttcacttccctgccggctgcaaatataaaatcagttaacggtgcttgtgtcggtgccggtgattcggatcactcggatctggaagcttccgtggcgaaacaggtggtggagcccgagaaacggcctcggaagagggggcgaaagccggctaacggaagagaggaaccactaaatcatgtggaagccgagagacagaggagagaaaagctgaaccaaagattctatgctctacgagctgtagttccaaatgtatccaagatggacaaggcatcgctgttgggggacgccatattgtacattaacgagttgaaatcgaagctcaacgtgctggattcagagaaaacggaattggagaagcaattggattcaaccaagaaggaactcgagctcgcaactaaaaaccctcctccaccgccaccgccgccaccaccaccaggaccgcctccatctaatagcgtagaaccaaagaagacaacaagcaagctcgctgatttggagttagaggtgaagatcattggttgggatgcaatggtaagaatccaatgcagcaagaagaaccaccctgcagccaggttgatggcagcattgaaagatcttgacttggaagtgcatcacgccagcgtgtctgtggtgaatgatttgatgatccaacaagccacggtgaacatgggaaacaagttttacacgcaggaacagcttctgtcggcactatcatccaaagttggcgatgaactacgatagttccttctgtactattattggtagcagtagctgtagctttctatgtaaattagtgttcttatttttggttagtcctttttggtagcttggactaaattaattttattgaggtaatttgatttgggaagctgaatgatcaaccaggggatagtaatatctctgatgaagtccaagtggattttttttgtgttaatattattatctgtttatattgtatatatatatatatatatgtttatgaattatcataaatgtgaactgatgttggtgaattt

SEQ ID NO: 27757 - DNA, 712 bp, Glycine max
  Clone ID: TF_GmC385855_1
caaatcatcctcaatccatcataaagtactatacgataatgttcgtatcatgaatatatttttttaatacaatctgataacttacatgatgcactagcacggatcactaattcactattgcatgtcatacacctccaatagataatctctcagttttttcactaggtcatgcatggtcatgctgttttcgccattcatctgagcaataatgttgattataagagtagaagtcccaaatggcagtacggtgctactggttgtagagagatggagctttccaagcaaggcatgtattttgaacactatgtccttttgtttctcacaatggattccaatgagtacttcctcatctaagactcttgcttcaacctcaaatagtgatatttctttgttcgtttcacaattgccggtgtttttatctgaggaggcttcagatttccttatgaatgttgctgaatctactttgttttgattttccaactctttaactcgctcttgaagttgttttgtgtaattgacagcttcacgaagcacataagccttgtccatcttcttgagcccaggaatagttgctgaaagtgctataatgctccctgtcagttcctgcctccttttcctctcagcaattatgtgatgccgtgtctcacatgaccttctaaccttcttctttggttgggtttggggcatcaatgcatcaaactcgagctggtgc

SEQ ID NO: 27758 - DNA, 701 bp, Glycine max
  Clone ID: TF_GmC220815_1
ggctagaaaatgaagatcagatatgttaatcgttgagattggtaatgaaatgataggggtcatggggggttgttttgtttgaccccatgggaatgatggatgtgacagaggggtggtgtttgcatgggaaaagaagggttgaaagagaaggcaatgctagtaggaggacaattcattgcatcaactttgtttcctagactttccagtgccttcacctgtgacctgagaaacttgaggtagtttgcagcctcatcaagcattgatgctgtgtccatcttgcttcccccaggcacaagcttctgcaaaaccctaatcttctcatttattctctcccttctgtgccttgcagccacagtttgtggatcagttgatatcttcacattcttcctcttcggcttttcagccacctccaacccaaagttcactggcctaaaagctgcagccctatatatcatttccttcatttgtgcaattgcctctggatcaggctcttcaatggaagaagaaatggatgaatttggttgctggaaattgatattatttgaggaggaactcatatcccatcttgatttcttgcattctggttgataagtatctgagataagcctgaaaccaccttcttcaataggagaagaattctgaacaatactgaagcaggaatcaccaactttgatcattttagattgatcatgggcatgact

SEQ ID NO: 27759 - DNA, 1750 bp, Glycine max
  Clone ID: TF_GmC1226_1
tttttctttttttttaaaccaggacaaggtctcccatcgcagtttgacattaacatggaccaaaatgattaacattcaggtaaagactcgaaaatgattaagaaagaagtgagaatacgaaagaaggggttttattgccaaatgaagaaggctcacgagacacgcatggggtcagccacatgctatccctcctcctcctccttctctctccggtggtggtgactcgccggaaaacacccactgccacctctaacgccgccgccggcgaacacccttctcaaaatctcacccgacccaattcacctttctcctctctcttctcaattccccatctgggtatccctgtttccctcaaagttctcttctttttcgtgattcagaagtgctcagtgatacccttttcttagaacaatgagagcggggaaagggagtcaggaagaggatgagtacgaggaagaagagtttggttcttccaagaaacagggcacttcctctgcccctaacaccaataaagatggaaaagccatcgataaggctagtgcgataagatcgaaacattctgtgactgagcagcggagaaggagcaagataaatgagagattccagatattgagggatctcatacctcatagtgatcaaaagagggacacggcatcatttttattagaggtgatagagtatgttcagtacttacaggagaaggtacaaaagtatgaaggttcatatcaaggttggggtcaagaaccctcgaagttgatgccatggagaaatagtcattggcgtgtccagagctttgccggtcaacccacggctgtaaagaatggtttgggtccagtatcaccttttcctggaaagtttgatgaaagcaatgttagtatctctccaactatgcttaatggctcccagaatacaatagatcctgatcagagcagggatattgtcaacaaaacggctgagaggcaacctgatttagtaagcaagggaatacctcttccccttgctatgcatgcaaacatgtctgttcctgtcagaagtgatggcgtacttgcacatcctcttcagggaactgtttctaatgcacaatcaactgaatgcccaacaactagtgaaccacagaatcaacaggatgaactctcggttgaaggagggacaattagcatctcaagtgcatactcccaagggttgttgaataatctaactcaagcgctacaaagtgctggtttagatctgtctcaggctagcatatcagttcagattaatcttgggaaacgggcaaacaaaggactgaattgtgggacctcttctctcaagcatcatgacaacccttcttcaaacaatcaaacaattgcacattttagagatgcaggcagtggagaagactcggatcaagcacaaaaaagaatgaaaacatataagtgatatatatgtggcattttcatgagaatccacttgcatccagatttctcacttattcttggtgcagcatataacttgtggttactgtacatccttccccatttgtttgacttttaatggttattttaaaactatttaaaccttgaacacgatcatttgtggagatattgaggcttctactgtagggagcatgtcatctatttcgcttgtatgatacatattataattataattattcagtattattgagcttttggatggcaattttatgatatatgtatacttagggaaaaaaaaaaaaaaaaaaaaaaaaaaaagcggccgctttagagga

SEQ ID NO: 27760 - DNA, 704 bp, Glycine max
  unsure (1)..(704): unsure at all n locations
  Clone ID: TF_jC-gmXLIB3563P042ag07d1
cccgcgtccgcccacgcgtccgtacggctgcgaagacgacagaagggggagaatacgaaagaaggggttttattgccaaatgaagaaggctcacgagacacgcatggggtcagccacatgctatccctcctcctcctccttctctctccggtggtggtgactcgccggaaaacacccactgccacctctaacgccgccgccggcgaacacccttctcaaaatctcacccgacccaattcacctttctcctctctcttctcaattccccatctgggtatccctgtttccctcaaagttctcttctttttcgtgattcagaagtgctcagtgatacccttttcttagaacaatgagagcggggaaagggagtcaggaagaggatgagtacgaggaagaagagtttggttcttccaagaaacagggcacttcctctgcccctaacaccaataaagatggaaaagccatcgataaggctagtgcgataagatcgaaacattctgtgactgagcagcggagaaggagcaagataaatgagagattccagatattgagggatctcatacctcatagtgatcaaaagagggacacggcatcatttttattagaggtgatagagtatgttcagtacttacaggagaaggtacanaagtatgaaggttcatatcaagggtggggtcaagaaccctcgaagttgatgccatgga

SEQ ID NO: 27761 - DNA, 1742 bp, Glycine max
  Clone ID: TF_GmC1598_2
gaatagcctagaatagcgaaagaaagtgttgctgctaattccatttcagtgacccctaattatgatggaggaattgaacaaaccaatggacggatcagcaaccagctggttatccgatttggtaagaaaaaaaaaaaaaaatcattttcattcttccattcttcaaatgcccaaatagatgatcataatccataaatcctttaacccttttgtgttcctcttttgttttgttttatttataggaaatggatgattacaatttatttccagatgaatgtcccttgaacttgaacttgtttgatgaccaagagtttctctcacaagacattgctagtgcccttcaagaacagacacagaccttgcaacaatctttgtcttcagagtgcccttcaaaaactgtgagcaactcatccaccgatgaaaccacttttgactttgagagaccagccaagttgctgaaaacgacaacaagcagtagttgttgtaactctgactcatccaccatcaccaaaagcctttcacccaaactttccccatcgtcatctttttcctcatttcagtctcagattctctcctttgacaatcctaacccaacctcatcttccaacaccaccacccagttttatgggtttgactgtaccttaaacccaacacagaacgagatggtgtcagtgtcagtccccaacatgagagaaccacggttcccaactcaaaccgcagaaggttcaccgaaatatcaaaactttgaaacaaaaacctctcatgctaagaggtctcctgctcatgctcaagatcacatcatggctgagagaaagcgaagagagaaactcagccagagcttcattgctcttgcagcccttgttcctggcctaaagaagatggacaaggcttctgtgttaggggacgctatcgaatatgtgaaagagcttaaagagcggttgacagttcttgaagagcagagcaagaaaacaagggcagaatcgatagtggttctgaacaagccagacctctctggtgataatgattcttcttcatgtgacgagagcattgatgctgatagtgtcagtgactcactgtttgaagtggaatcaagagtatcagggaaggagatgctgctcaagatccactgccagaagcaaaggggacttttggtcaagttactggctgagattcaaagtaatcacttatttgttgctaatagcagtgtcctaccctttggtaattctatccttgacattaccattgttgctcagatgggagaaagttacaatttgaccactaaggaacttgccaagaatctacgcgtggctgcattgaagatattgtcataacatgaacgtggcttgagtatggagaataccctcatggcatatggcatggatattgaaactctgaatcacatttaatgccccagccaccgagtaaatcacacccaaaatggaagccttgttattaatgtgtgatttctgctacaacctgcagtgttccccaatatgtagattcagcttgaccccaaatgatcttgtcttcttcgtgttatgttttggtttctgaggccttcagtgtgtgcctgctagagagggaaaaataattgaataattttgtagagatattaggaataatttcaatctgacatgtcttaattaagattttaattgagttgattaaacagaatggatgagttgtttaatttctatgaataaaaaaaatctgacacggcttaattaacattagcttaaaca

SEQ ID NO: 27762 - DNA, 1720 bp, Glycine max
  Clone ID: TF_GmC284_1
ggctcgagaaaaatactaattgttatgttgtgaatcttgtgattttgatttattgaaattcaaggggcagagttttggagcttcccatcatacacacttgcacaaaaacaaacctcgcttcccaattccgatcctcaaggccgaacccgaaaacttctcataccacaatgctctttccgttgtttccacttcctctcccactctgagtcagttcccatttaaaaacaaagactccctctaacccttgtcctcttcctcatcatcgcattttccactcgttcgtggttttacattgctatataattatgcagccctgtagcagagaaatgccaaggccttaactccctcctaaactcttccgcccaaagttccctgcacagccattcagagtcatgcatctaatcacgctcaacgtgttcctaataagcaccaagagcaaagtgttggcgctatccaagccagtggtgacagcgacgcgggtgaggctccggctaacggtgctcacgcgggtccaaacccgggtcagccgaagcagagggttcgagctaggagaggccaagccacggacccacacagcatcgctgaaaggttacggagggagagaatcgcagagagaatgaaggccctacaagaactagttcctaatgccaacaagacggacaaggcatccatgctagatgagatcatcgattacgtgaagttcctgcagctccaagtcaaggttctgagcatgagcagattgggcggtgctgctgctgtcgctccccttgttgctgatatgtcctctgagggaggcggagactgcattcaagccaacggcaagagtaacggcggtggggcccaggcttcaaccaccaacaccaacaccaaccaaacgacagcgacaacaacctcaaacgatagcctaacgatgacggagcaccaggtcgcgaaactaatggaagaagacatgggttcggctatgcagtatcttcaaggaaaaggtctttgcctcatgccaatttcacttgccactgcaatctccactgccacgtgtcccaccaggaacgttaacgttaaccccttgatcaacgccgccgccggagccacccattttccgaccgcagccaaccccgccggcgaagggccgtcgtctccgagcatgtccgtactgacggtgcagtccgccatcgcaggcaacgacggcgccgcctccgtttcgaagccgtgatgacggtgtttgagtgactttataggaaaaagaagaaaaaaacaaagtgaacaaaggacagaaaatgacgtgtgtttttttttcttaaaaaaaaaggagccgttaaagtctacgaaaataaggcgtcagggatacggaggactcgacgacgccgtatttacctagactttgtttggctgatgctaactttcaaccaaccaattacaaactccaccatgccaattacctacttcttcgtcttctttttctttattattattgttaattgttaactgtcgctttgggtttcttctgttcattgtttttaaaaatctgtagtggaatttctctttttggtgtttcatttccgtctaaacaagttaatcttgtactggctagcgtttacgttttatgttactttttctttagcttatcccgttcgacagtccaacatttgccttatcttttggttaagagaaagaaaacaatctaatgttttatcttatttaattggaaaaatatttaaaaaat

SEQ ID NO: 27763 - DNA, 1222 bp, Glycine max
  Clone ID: TF_GmC284_2
accggccgggagataccggggtggacccacgcgtcggacccacgcgtccgctctaacctacctctttttcgttgctatcagcaactacaacatctttctcagtggtccatgcgacgaccccagggtcattcccactcggaacctgagcctccccatagagcgagaagccctccaactcctggcgttagcgccagcacgggctcgagtggatctcttcaacccaataatcaaactcaccattttcaacaacaccctcagcctcaggggcagagttttggagcttcggctccggctaacggtggcggttcgggtcagccgaagcagagggttagagccaggagaggacaagccacggacccacacagcatcgccgaaaggttacggagggagagaatcgcagagcgaatgaaggccctacaagaactagttcctaatgccaacaagactgacaaggcctccatgctggatgagatcatcgattatgtgaagttcctacagctccaagtcaaggttttaagcatgagcagattgggcggtgcagcagctgtggcaccccttgttgctgagggtggcggtgactgcatccaagccaaacgcagcaactcaaacgacagcctcgccatgacggagcaacaggtggcgaagctgatggaggaagacatgggttccgccatgcagtacttgcagggcaagggtctatgcctgatgcctatttcgctcgccagcgcaatctccaaagccacgtgtcaccccttcatcaacggtgatgggccctcctctccccgaatgtccgcgctcactctggctaacgccgtcgtcaaagacgcggcctccgtttccaagtcctgattatcacgccgttaccgtcaatgaagaacctgaacatagcaagtcacgtggagtctaggaagcgggtggcttcactgcacgacgtcgtatttaccttgacttttgcagacgctaactttcatgcttcaaccaatccaatcacaaatttcggagtttcccattcctctatctcatttctgttttttttttttgtcttttcctttcttttcttttcgcaacgagttttgttatttctttttctttttttacatttatgttactttttctttagcttatcccgttcgacagtccaacatttgccttatcttttggttaagagaaagaaaacaatctaatgttttatcttatttaattggaaaaatatttaaaaaat

SEQ ID NO: 27764 - DNA, 2160 bp, Glycine max
  Clone ID: TF_GmC284_3
aattagctcgagggacggttcatcttctcctatttaaaaatatccactccaaccaaacttaaaaatagagtttccatacactcttgcacagaaacaaaactcgcttccgagttccgatcctcaagacagaaacccgagaacttctcataacacaatgctctttccgttagttccacttcctctcccactctgactcagttcccatttaaaagcaaaccctctcaaatcaaagactctctctaacccttgtcctttatcattatcatcacattcataactctttcacaatttggatatataattatgcaaccctgtagcagagaaatgcaaggcctcaactccctcttaaattcttcatcccaaatctcccttcaagaccttcacaatcacaccactaaccagatccaaaattcacacatgaaccaccaacaccaccaccaacaacaacaacaacaccaacaacaacaacaccaacttgctcactttgattcaacttctcacgacgactttctcgaacaaatgctctcttcctgctcttggacagatctcaaccataacaagccattattatgggaccctaacaccacccaacgacatcaggccccccgacgaaacgacgccgtccaacaacaacaacgacgctactactaatgtcgcatctttttcctccttcgatgagcactccaccttagcctccaagttccgcaaccaccagatcagctccaataacaacgcgcccaaaaacgccgcggcggcggctctcatgctccaacaccaactcctcagagactctggtcttctcaacatgcctctttccttgcccggaaacgacgtcgtggttgacgcttctaccttcgaatcccccaatccgagtggtaaagcttcagtccaaactctctacaacgggttcgccggatctctgcatggcgtaggccaatcctcgaaccagactcaacattttcaacaccctcagggaagttcgaatccgatgcaagggcaaaattttggggcggtgccagctggtggtggtagcgcgacgaatcaggctccagcgagtggcgctgccgcgggtggcgcgccggctcagccgaggcagagggttcgagcgaggagaggtcaagccacggacccacacagcatcgctgaaaggttacgtagggagagaatcgccgagagaatgaaggccctacaagaactggttcccaatgccaacaagacagacaaggcatccatgctagatgagatcatcgattacgtgaagttcctgcagctccaagtcaaggttctgagcatgagcagattgggcggtgctgctgctgtcgctccccttgttgctgatatgtcctctgagggaggcggagaatgcatccaagccaacggcaagagtaacggcggtggggcccacgctccaaacaccaactccagccaaacgacagcgacaacaacctcaaacgatagcctaacgatgtcggagcaccaggtagcgaaactaatggaagaagacatgggttccgccatgcagtaccttcaagggaagggttgcctcatgccaatcccttgccacgcaatctcgccacgtgtcacaccaggaacgttaccgttaacgtccccttgatcaatgccgccgccgccgcccagattccgacagccgccaaccccgctggtgacgggccgtcgtctccgagcatgtccgtgctgacggtgcagtccgccgtcgcggtcaacgacggctccgccgccgtgaaggacgctgcctccgtttcgaagccgtgatgacagcgtttgtgtgactttataggaaaaaaaaaagaaaaaaacataaagtggacaaaggacagaaaatgacgtgtgtttttttaaaaaaggagccgttaaagtctacgaaaataaggcgtcagggatacggaggactcgacgacgccgtatttacctagactttgttggctgatgatgctacctctgaacaaaccaatcacaaactccaccatgccaaatgataaaaaaactccaccatgacaattacctactttgtttattattattattattattattattattattaactgtcgcttttggtttcttttgttcattgttttttcttgaaaaaaaattagtggatttcttccctttaaaaaaaaaaaaaaaaaaaacccaaaa

SEQ ID NO: 27765 - DNA, 965 bp, Glycine max
  Clone ID: TF_GmC1808_1
cgtagatgggtcatggtgagtggttcttggcacaccattccccccaccaccttccccccaccccctttctcccgctcatcctcttctcctcttcgtccccacctccagcatacccttttggccggagatgagtaatagtaattgggtgttggattatgattatctagacaacattcctctcaccacccttgaaccacccaatttctcttggtcttcctcctctcctcctcctacactcagtgtggagctagatgactcatttggaatttcggatggtctcaaggaaaacaggtcaagaaaacgtttgaggtcatctgattctaaagcatgtagagagaaaatgcgaagggatcgacttaatgacaggtttatggaactggggtctatcttggaccctagaaagcctctcaaaatggacaaggctgttatattaagtgatgcagttcgagttgtttctcagttacgagaggaagctcaaaagctgagggagtccactgagaatctacaagagaaaatcaatgcattgaaggatgagaaaaatgagcttcgcgatgagaagcagcgactaaaagtagagaaagaaaaccttgagcagaaggttaaagctttgagttcacaacctagctttctggctgcagcaggacaagttgttggcagcaagctggtgccattcatgggctacccaggagttgccatgtggcagtttttatcacctgctgctgttgatacctcacaggaccatgttctcaggcccccagtagcataacttgccaaaggctctgtgttttggtccaatggagaaagagaatttatctttttattttttgcttttgtgaaatgtgaaaaaagaaatcttattgttgaggcagctttttgataactatttaacttccggttataggctaagtttgaataaacttctttataggttctaatataaaagttctatcatctaaattgtctat

SEQ ID NO: 27766 - DNA, 1126 bp, Glycine max
  Clone ID: TF_GmC330_2
gaaaagtgaaccacgcgtccgtgaaaacagaccaataataataataataataaaagaccaactccttggcttggcgcatctttattccctctcttctataaatcgttcgatcgttaattcctcgcacgagcttgtgtccgtcgtcaaaccatggagaatattggtgaggatcagtacggctacttgccggagaccgacctgtttttcccaaacgaagaccttggcagctgggcaataatggatggggaagcggtctcttggtactatgattcaagctccccggacggcaccggtgcttcttcatcggtggcatctaagaacattgtctccgagaggaatagaaggaagaagctcaacgataggcttttggcacttagagcagtggtccccaacattaccaagatggataaggcttctatcattaaggatgctatagagtacatccagcacttgcatgaacaagagaagagaatccaagctgagattttggatctagaatctaggaataagttcaaaaatccaacctatgaatttgaccaggacctccctattctgctcaggtctaagaagaagaaaacagaacacctatttgattctctcagttcaagaaattccccatcaattgaaataattgagctgagggtaacatacatgagagagaagacgtttgtggtgaacttgacatgtagtaaaaggacagacacaatggtaaaactgtgtgcggtgttcgaatctttaaagctgaaagtcattacggccaatatcacatctttttcaggcacgcttttgaagaagacagtcttcatccaggcagatgaagaagagaaagactttttgcatataaaaattcagacagcgatttcagctctcaatgatcctctaagcccaatgagtatctgatgaagaaacgagttcagatcgaagctgagattgttctgtttgttgagtttctttttctcactcaatgttaattatctttagtgaatgagtcttaaactcgaaagttggcaagttttctttttctttttcattttctgtatgttgatgttgatagcctctaacgttgtaagctttacgttattaatgaaatcgcattttcatgttcttcatggtaaaaaaataaaca

SEQ ID NO: 27767 - DNA, 1952 bp, Glycine max
  Clone ID: TF_GmC11360_1
aattcggctcgaggatttttctttcgtacaagaaacaaccaccagactgcgatctccattatttgagtactactactttgcataaagggttcaacaattcgtgcgtgcacagtgccaaatcgtgatcacatgaacttaatcttaatctgttagctagcttcaaatgcgttattgggtctcacaaaaaggagctagctaggaagtgaatactactattatttacctgccacacacacagaaacaacatagatctagaagcaaaggcaaagaaggatttcaagctcaattgtttagcttaattaatttccttcaagcaaatgatgattcagaagatgtttgaccccacccgttctggtatgacaagaagctcctcccatgtagcctccatttatgacaatgatttccttgagttggtgtgggaaaacggtgagattgttgtacgaggaggttcatcaaacagatcacgaaagacaaacgacgaaagaatacatgaagatgccagcattaacaaaagaacaaggttaaacccattattatactcacttgaagatcactttccacctcaaagggactctgacatgagcacttcacaccaaagcaataatggccaagattcgtgtcaatcctcccaaagcaagaattcctgcaagcttcatgaagaatttgcaaacttacttaagcccgttagcacaggcaatagtcacttacaacagtgcttaccttcatctccgctcaagaaacaaagaaccgattcaactcaaacaccaagaccagcaaaagtgaacttctccaacttttcaatacctgcagtgtttctcaaatctactactactactactactaataattatcagggaaacagtgcaactcaacagacaaaaaatcattcatctccagcaagagtggaggagattgaagcgctcaaggttgacaaatcagcgaaagaaacacagtgttttcagaagcaaacatcattaactgttgaaagaagcacaaaattaccaaccccagcggttgatgaacactccggctgcgagaagacgacagaaggggttcttggaattcacagatcccaaggtcaaacctcaacctcagaagcacttagagccaaagcaaaagcttataataataataatattaacatgtgtcatgaaccgttgctagcatcttcttctgtgtgctctcttggagcctccaacgacccaaaccttggtttcaggaaacatgaggacactgatgactcaacgtatttaagtgataatgatggagagcctgaagatatggtaaagcaagatagggagggtaacagagtcaagagaagcaggaaccctgaggttcataacttatctgagaagaagcgaagagaaaaaatcaacaagaagatgcgtacattgaaagacctcattcccaactgtaataaggtggacaaagcatcaatgctagacgatgccatcgactatctgaagaccctaaagcttcagttacaggcaaattttcagataatgtcaatgggaagtgggttatggccactcatgatgggattcaggccaccacagctacctattccaccactttctgctatcacagacaacagacttattcagatgtttggttccccaaaccaaataccacccatgccaatgcctcatgcacctttcttccctatcattggaaattctgccacacaatcacacttggctaataacaccaccaccacagctgcagctaccaccaacttggcagaacatttagctaattctctacatggaaatgcaacaaagctagcgccaccaagtcagatttcctttcaacaccaccacacctctactagtactcctacactagctacccctttcatttttccacaaaaatagataaaaatgtatatgaagggaaaactattcctgtaacaaaattagattagagatgttaattaaagacgagtgtaaagt

SEQ ID NO: 27768 - DNA, 1542 bp, Glycine max
  Clone ID: TF_GmC1654_1
ctgaaaagcacaagaccttttctgccccttctcacgtgctgcgtatcctctaatctttggtttttttttttttttcatatccgaattaaccactttatcaagtacggctgcgagaagacgacagaaggggaaccaactgagttagattttggtgttatcctttgatataaactaagctctttcatttttccaatattaaaacttccagcttcttccttcctctgtgactcaaactgcatcaaccaagttagtgggattttctataaattgttgtcaatttgtcatgtcatgtatatgagaaactcatgaaaactctggtggtgacttattagttctctcggcaagtaaggatttcaaacaaactaaagttgaagagagtataaatgactttggaaactcttcaatccaatgagttctccaacttcattatctatgacactatctctgcaactccatttagcagccatggctccccagaggctagtttcttggaaagttttgtgaactatcaggagcagcatgaccaccctacatttgataattgcgcaatgaggacccgaaagcgtgaagccagcgaaccagaaagcattggccggaggcagaattcggtggcagtgcaagggaggaagaagaggagaaggaagccaagggtttgcaaaaacacggaagaggctgagacacaaaggatcacacacattacagtggaaagaaaccgccggaagcagatgaatgagcatcttgctgtccttcgttcactcatgccggagtcctacgtccaaaggggtgaccaggcctctatagtgggtggtgccatagagtttgtaaaagagctggagcacctcttgcaatcacttgaagctagaaagctgcaacttttgcaccaagaagtggcacaaaccaatgaaaatacggccatttccaaactcatgcaacctccttttgcacattgtttttcgtatccacagtacacatggtcccagactcctaacaaatacacatccaagaccaaagctgccatagctgatatcgaggttactttaatcgagacccatgcaaatcttcgaattctcaccaggagaagcagccacgggcagctaacaaagttagtagctggttttcaaacgctgtgcctcaccgtcctacatcttaatgtcaccaccatagaccctttggtgttctattccttcagtgctaaggttgaagaaggattccaacttggttcagtagatggtattgcaacggcagtccatcatttgcttgcaagaattgaagaagaggcttccctttgctgttgatcaggttcatctggggacacgagattttagtgaaatgaccaaatcaaccatctacaccaacctcaacagagagagaggggggaaagaatatttgctaatggctttagttttttatttttgtttgtttgatgtccaactgatgtgttaatgctaaactttagttgcagtagatgatggtgttttttaaaagttgcttcaagcaagtacaactaaaaatcaaatgaaaaagaatgttgatacagtttgg

SEQ ID NO: 27769 - DNA, 2257 bp, Glycine max
  Clone ID: TF_GmC277_1
ggcggaacctcttctgtcaggttttataaaatctcatgtctgttcaaagctttcttattcttattcatcatacaccacgccaaatcacaatacccttcaggtaattttgctctttttgtttttacgctgaatctgtttgttccccttccttgaacgtttttcattggggtttcgacccactatgttggagctcaatactaagttagattccttttgattttcatccattatctgtgattaggaacaccgatgtcaccaatttcacaacttgtgggttttagttggatgttttcaagggtttgattctagggttacttatgcagtttttgggaattttggctcagttgagatctctgtgaaacgggtttggaaaattttttgatcttgaggtttatgagattttaactgtggaagaaagatggtgggtgagaagttttgtgtgagcgaagatgacaagggtgtgttggagtctgtgttgggtgcagaggctgttgcgttctttatttcagcactttccaataatgtgttttcccgtgtcgttgcgccgtcggctggtgctgacccggctctccggcagcggttgtgccagcttgttgagggttccaagtggaattatgctgtgttttggcaggttgctggcttgaaatctgaaggaagcggggttccttgtcttgatgggcattgcagtgatcccaaaggggagaggaatggagttgggaaggaggatgaacaggagtgagaaagaaggtactgcagaagcttgatgcttgctttggtgggtctgtgttgaaagatgctaatcatgtgagattggacagggtttcggatttgctcatgttttacttatcctcaatgtgctatatatttggttttgattcgctgtgtggccctggcagttcgttcaagtccggtaaattgatttgggcttctgatgctgctggttgtttaaaccaattagaatctagatcgtttatggggaaattggctggtcttcatactgttgttttcgttcctctgaagtctggagtggtggagcttggttcgtttgaaatggtgcctgaagagcagggtgttgtggaaatggtcaggacagcatttggggaatccagtcctggacaggcaaaggtgtttccaaagatttttgggcatgagttaagcctgggggatacaaaatctcagtctataactattagtttctccccaaaggtggaagatgatccgggtttcacttcagactcctatgaagttcaagcactaggggtgaaccatgcttatggaaattcttccaatgggactttaggtgacggtaatgaaggaacattgtttcctcaattgaatcaaatgatggctgggaattttaatgctcaagcaagggttccttgtctagatctcggtaatgaagactcatcatcaattcatgcagatgagcggaagcccaaaaaaagaggtaggaaacctgccaatgggagagaggagccgctgaaccatgttgaagctgagagacaaagacgtgagaagcttaatcagaggttttatgccttgagagctgttgtccctaatatatctaaaatggacaaggcatctttgcttggtgatgccattacctttatcactgatctgcagatgaagatcaaggtgttggaagctgagaagaacatgggtaacaataaggaccaaaaattgtcattgccagatatggattttcaggaaagagaggatgacacagttgtgacagtgagatgccccttagatattcaccctgtttctaatgttgttaaaacgttcagggagcatcaaattgtggctcaagactctaatgtttcaactgcagatgataaaataattcatacattctccataagaactgagggaggggaggctgctgctatacagttgaaagaaaagcttgaagcatccctatccaaaagttgattgtcagatcatatttatgtgtagcatctcaatgatattgtaaaccatgttagaaatactctgtcttgtaggttaagtggctaacataatattgttcttagtgcactttgtttttacagtagtgtactttgttagttgtaatctgttttaaaatatgttcaggtcatcgtaaatgaccttaattatgtacttaagttgattaataattgaatttgatgttgatggatgatataagttgaactatatttaatctatcatcaatctaagtatgaaaaatgtcaacattggaacttttttttttctggcttactcagctggccggggg

SEQ ID NO: 27770 - DNA, 1592 bp, Glycine max
  Clone ID: TF_GmC1376_1
acggctgcgagatgacgacagaagggggacccaacactagcctactagtgtggttttttcccttcatcgtcttcctcttgaaggtattgaagttgttttgttatgtgtttgccagagggagagagagagccatggcactagaggcagtggtatttccacaatcacaagacccttttggtggtagtggttacggatcagtgaataataaggacttctacaactgcaccttgttggctgctacttcacccaactcatggggggactatgagcaacacatcaacatcaacaaagaagaagaacaaggtggtgcttctatctccacttttcaaccagagagtaattacccttatggaaattggaccagctcctcctcatctatgttaccccacttcaacaatgaacttcaagaaaccactactactgaccccagtaacaccttagatagcttaaacactcgtcccaagaggcgcagagccaaaagcagaaagaacaaagaagaaattgagaaccaaagaatgactcacattgctgtggaacgcaatagaagaaagcagatgaatgagtatctttctgttcttcgctctcttatgccagactcttatatccaaaggggtgatcaagcttctataattggaggtgctattaactttgtcaaagagcttgagcagaggatgcattttcttggtgctcagaaagaaggagaggggaaatctgaggctggtggtgcaacaaacatgcccttttctgagttcttcacctttcctcagtattcaactagtggtggtggtggttgctctgataattctgcagccgtaggtgaagacgtgggtgaggttaagtgtggcattgctgacatagaagtgaccatggtggaaagccatgcaaatctcaaaataagatccaagaagcgccccaagcagctcttgaagttggtttctggtttgcataccatgcgcctcacaatcttgcacctaaatgttactaccaccggtgaagttgttctctactctcttagtgttaaggtagaagatgattgcaagttgggatcagttgatgatatagctgcagctgtgtaccagatgctagataaaattcagcaagaggcaatgttgaattaagatcaaaccttgaccaaatttgccttgccccacttggtttttaacctcatgtcaacaccttacttcatggtggatcattgtctctcgctatttttctctttcaagatgtacctaattattgcaacttctgttcacttcaccctttgttaatctactgatggtgccttgatgtgggctccttggaggaagttttttggtttattccttcttgtgtatgtctgtgtagctcacgagctccttttaatctctctctatctctctcttctctttttctctggggtagggggtggagaaggctgtgtattatattgctcgagacatattctagtgcttggtcaattttgcctacctagctttgaaattggtaggtcttgtctacctcaaccataagccaaagccattaatttgtcaagctgaaattgagaacatctcaaaaataaaattgaatgaaaatgagagccgaagatttttggc

SEQ ID NO: 27771 - DNA, 762 bp, Glycine max
  unsure (1)..(762): unsure at all n locations
  Clone ID: TF_GmC3897_2
ctgatcactaggtgcgttcttccttggctaactctgcgggaattcagactattgttttggtacctactgatttgggagtcgtggagttgggttctgtcagaatgttacccgagagttttgaactcttgcaggctgttaaatctgtgttctccacgccgattcccaaggttttggtgaacacaattcgcatcagacacattttagagagaaacttgctgttagaaaaatggaggataataggccttggaacaacaacaacgttagttttccgaatgtgcggagcaatggccttcatgtttcaagttgttggccagtgaattcgggtttgaggcagcctgctcctagggtggtggcggagctggctaatggtgtgagacaggatttgaggctgagcaatagctatgaacctcaaagacaggtgcaaatgcaaattgactttagcggaggcactagcaggccttctgatgtggaggcctcttgcaaggaggagcaaccaagtgttgccgatgaaaggaagcccaggaagcggngaaggaagcccgccaatggaagggaagagcccctcaatcatgtggaggccgagaggcaaaggcgcgagaagctcaaccagcgcttctatgcgttgagatctgtggtgcccaacatctncaagatggacaaggcctcattgttgggagacaccattgcttatatcaatgagctccaggctaaagtcaagatcatggaagccgaaagagagagatttgaaagcatttcaaatca

SEQ ID NO: 27772 - DNA, 417 bp, Glycine max
  Clone ID: TF_12488088
ggttaggatatcttctgatccacagactgtggctgccaggcaaagaagggagagaataagtgagaggattagggttttgcagaagattgtgcctggaggaagcaagatggacactgcatcaatgcttgatgaagctgcaaactacctcaagtttctcagatcacaagtcaaagcactagaaaatcttggtaacaagcttgacacaatgaattgtcctcctactaacatagccttctctttcaacccttcttttcccatacaaacacatttccccatgcaaaaccctagcagccacatccaatactccaagggttgaaaacttgacatgaatattatcatggaagataagatgtaaaaaggggtctgagaacccataacctctaattttattccatccagtgagtatgattaacgtat

SEQ ID NO: 27773 - DNA, 1491 bp, Glycine max
  Clone ID: TF_GmC693_1
aggaacttggcatttttcggggcacccacataaaaatattttgcatgtgtttgcctgagggagagagaggcatggcactagaagcagtagtgtatccccaaccacaggacccgtttggccatggaatcaaagacccttcttacaactacaacaacttgttagaaggtggtggaggcaattggggctatgcagatttcaaccttgaaaaagaagaccgaacttgtgtcccttttcttgcgaaccaaacagagaattatccttatggagaatggaactgttctccttctccaccatccatgttgcctcaattgaatattgcatcaaatcctcaatcttcagaaaccagcaacacacagaacaacttagatagttcagtttccacccctgctcgtcccaaaaggcgcaggaccaaaagcagaaagaataaggaagagattgagaaccagagaatgactcacattgctgtagagcgcaacagaaggaagcaaatgaacgagtatctctctgttcttcgctctctaatgcctgaatcttacgtccaaaggggtgatcaagcatctataattggtggtgctatcaactttgttaaggagcttgagcagaggctgcaatttcttggtgctcagaaagagaaagaagcgaaatctgatgtcctcttttctgagttcttctcctttccacagtactcaacaagtgccagtggtggctgtgacaattctacagccatgagtgagcaaaagagtgaggctcagtcgggcattgctgacatagaagtgacaatggttgagagccatgcaaatctcaaaataagatccaagaaacggccaaagcagctcttgaaaattgtctccagtttgcatggcatgcgtctcacaatcttgcacctaaatgttaccacaacaggggaaattgtcctctattctcttagcgttaaggtggaagaagattgcaagctaggatcagtggatgaaatagctgcagcggtgtaccaaattctggataggattcaacaagagacaatctcgaattaagatctgaagttgagctaatttggcccaatttttttaacctgatcaagaagaccttattatatttctttctctttttttcaagttgtacctaattattgaaacggctgtggatcctgttgttatattctactgaagcgccttgatcgatgtgggggtccttggaggcagtttttggttgattccttcttattgtctatctagctacctctattttttatccttctctctctttctctctttctgtactttgggtggagaaggttgtagtgtattgtattgtgcttgagacacattcaagtgctctcagtcaattctgcttaccttgctttaatagcggtaggccatctcaatctcaaacaaaagccaatttgtcaagcccaaaaacagaatatctcaaagtcactttgaatgaaaaaagatagccaaagattttaggagattcacacataaaacccaaccc

SEQ ID NO: 27774 - DNA, 663 bp, Glycine max
  unsure (1)..(663): unsure at all n locations
  Clone ID: TF_GmC693_2
ccacgcgtccgcatttttcatcttcaccttctttttttcagggtagccacataaaagtattgtgcatgtgtttgccagagggagaaagaggcatggcactagaagcagtagtatatccccaacctcaagacccgtttggctacggaatcaaagacccttcttacaactacaacaacttgttagaaggtggtggaggcaactggggctttgaaaaagaagagcaaggttttgtcacttttctggagaaccaaacagagaattatccttatggagaatggaactgttctccttctccaccatccatgttgcctcacttgaatgcatcaaatcctcagtcttcagaaaccagcaacatacataacaacttagatagttcaatttccacccctgctcgtcccaaaaggcgcagaaccaaaagcaggaagaataaggaagagattgagaaccagagaatgactcacattgctgtagagcgcaacagaaggaagcaaatgaacgagtatctctctgttcttcgctctctaatgcctgaatcttacgtccaaaggggtgatcaagcatctataattgggggtgctatcaactttgttaaggagctggagcagaggctgcaattncttgggtggtcagaaagagaaagaggagaaatctgatgtgcccttt

SEQ ID NO: 27775 - DNA, 731 bp, Glycine max
  Clone ID: TF_GmC25403_2
cccacgcgtccgcaccatcagtgacaatgagccttctgtcactaaaaaccttagccctcagtcctccatggtagtcgacaagcttgaaactggggagcaggtcactcagaaggtgaacattcctgtggacaagaaaaggagaactagaaatggttcttccttcaccagtaacccccaatccaaggatactgcaacagaagggaaaaacaagaaacaaaggaagaacaatggtgggttgaaagaagaggacaaggcaaaagaagagaagaaggatcagagaaagtgtcctgaagagcccccaacaggctatatccacgtcagagcaagaaggggtcaggcaacggatagccacagccttgctgaaagggtgagaagagagaagataagtgaaaggatgaaggtgttgcaacggcttgtgccaggctgtgataaggtgactggaaaggcccttatgttggatgaaataatcaattatgttcagtctttacagaatcaagttgagttcttgtcaatgaagcttgcttcggtgaatcccatgttttatgacttggcaacggatctagacaccctcttggttaggccagagaaactaaatagcatggcatcaccatcaccactaccatcaatgtcacattgcaacagccccaacacccaagccacaactttttgctgatacaaccaccatgacccccaccaacatcttccacactactagtgactatcttttggat

SEQ ID NO: 27776 - DNA, 1368 bp, Glycine max
  unsure (1)..(1368): unsure at all n locations
  Clone ID: TF_GmC6805_1
ctacgactaactccaatctccctatccatgtatccctcttcctcttcctcctcctcctcttcctctcagtccatgacccaagctggcctcactcgctacggttccgcccccggttctcttctcaccagcacggttgattctcttattggtggatcccgtcccagtccctacttttccggagagtcttctgagtctccctgcaaagagcaaagatctttccacaaccacccccccttcttcgcttcctccttgctccgccagaaaagctctcccgccggcttcctttcccatctctccaatcaccatggtgtgggtttcaccatcacccccgggtggtttatcaaattcaaattcaaattcaaattgttctctcttgaagtctcaactcagcttcacccacgaatctctttccaacactgttaatgttgatccctccagcaccaccttcggaatggatccctgggacaacaattccatcgccttttctgcaacttcaaccaagcgctccaaaaccaacaccaatgatcctgacattttacattccctgaattcggccttggaatcacagttcaatcttccacatacaagtctggaaatgtcaaccgtggacaagctattgcacattcctgaagattctgtcccttgtaaaatccgtgctaagcgaggttgtgctactcatccccgtagcattgccgagcgggagagaagaacaaggatcagtggcaagctcaagaaattacaggaccttgtacccaatatggataagcaaacaagctatgcagacatgctcgatttggccgttcaacacattaaaggtcttcaaactcaggttcagaagcttcacaaagaaatggagaattgcacttgcggatgcaaacaaagcaaataacttcttttttttacgagattctatagcaacgtgcatagaagtcaaggttttgatggcaaagattgaaaactgattttgtaccgatctacttaaatgaataatgaaggaactgaaactttgtaggttgtcaatgctacaattgtacagtgtatgttgtaatatggtagtctagaaaaatttcttcgttttcttcaagaattggctttcaaagtccaggttgattttctattcagattgtttattttcttgtttgggtaagtatggtacaatgaaagactaatttttggaatcagaaccagaatagaagtgagaatggggtgaattgaaatctattttgttttatttcaatctatttttatgttcggtgaattactgtggaagcttataaccaatgaaaatgtgtacatttttgcctgaaaaaaaaaaaaaaaaaaaaaaannnnnnnnnnnnnnnnnnnnnnnnnnnnnnnnnnnnnnnn

SEQ ID NO: 27777 - DNA, 961 bp, Glycine max
  Clone ID: TF_GmC191104_1
taaaaaagaaacgaaaagaaataaaacgatttattacatctcttaataataaagacaacagcataagttcgctttcgtcagaagcagaattgaacaaaatatcaaagctaactcctaaaactacagatttaactaacctatttgatctgggcctaaacagttcaaaggagaagaagaagcaatgcatttacaaactgcaagctacagcaactacggttggctcctctatcagggggaagcatttatcaagcattccaatcacatcataccatggaagccagcagaatccgagagcaccgctttaatttgctcagggaggacatcctggccttctctgcattgctcagctttgaacacatctaaagcaaagccattaaaacagctaataacagcctgctgtacatccaatccgaggttatccaaagccttcatggtagaaagcaaaagacctggtcggcgggtgcagaacatatgaatgttgacagttctcccttcccttactctaacctcaacctttgcagcttggtttttagggcttggcaaggtgccaggatacagttcctccttgacccgacagggaagggttggcagggtgggtgttaatggctgaaagcttgtagaagaagaaggtgtcagcgacgagccaggtggagttgactccagctcgtgatgaagatcattaatccgctgcagcaactccttcaagtagtcaattgcatccccaagtattgaagccctatccatcttgctaatcttggggacaacagacctgagcatgtacaacctatcattgagcttcttccggcggcgcctctccgccatgagattcttggcgggcagccccttcttcttccccttgttatctccaccattctcactcagcttcaacccattgctctcattctgctcatcagactcatagttcaacccggacccacgcgtccgcggacgcgtgggtcga

SEQ ID NO: 27778 - DNA, 1289 bp, Glycine max
  Clone ID: TF_GmC584477_1
ccctgaacaaacccacctcaattgcttttgcaattatttttccttttacctctctaatggcactgtccaaagaccaaagaattccacatgattcaagcttgagcagcaaggttcaaaactgtgttttcagtgagactagtgtggagattacctccatgactgttcatagggtcaatgagtaccacaaatctgtgttagaagaggaagatggctcacaaactactaatggtctcagcaatgattcagctgtaacacgttctcctcctttatgtggcagtcgcaaagattatgcttataagggcacaaactatcagcttgaagaagcagtatctctgattgatttcaaagggtatagcaatatcctgcaagctagtggatctttgcttagctttcagcagaacaagatggtccctctcaactgttacttgaaagataatggtcagaaagagtattgtgtttgggagaataatttgcatcaaggccacaaccattggaatcaaactagtccaagaagcactagagacatgcgcctggtagagaatctcaattgctttcaaacttctagtggctatagccccatagttaataatgcaaaagagaagcaacatggtcaaagttcatctgggtggctctactcagcaccaactatccctaatgatattagtagcctccacaagttaggagcacaagaatcagttttgcaaaagcgcccttcgatgggagagaacatgaaagctgccaagaagcagtgctcaactgagagcaaaacgccaaaacataagtcaagcccatccaaggatcctcaaagtgtggctgccaagaaccgaagagagaggataagcgagcggttaaagatactacaagaactggtgcctaatggctccaaggttgatttggttactatgctggagaaagcaattagttatgtaaagtttcttcaactgcaagtgaaggtgttggcaactgatgaattttggcctgtccaaggtggaaaacctcctgaaatttctcaagtaaaggaagtcatcgatgtcattctttcttcacaaagagagagaagttcatgctcaaagattcaagaagacatcaatcacgcgaatttgtctcaataccaaagaaattatgctgctgctattgctggcaagaacaaaagcgataaaatcataaactgtaatttgacttttctccaaattgacaatagcagaatgagttgttacccaagaagtagccatgatggtccatgcaacagcttgaaggttagagtaggatacttcttagctcgcttttga

SEQ ID NO: 27779 - DNA, 1424 bp, Glycine max
  Clone ID: TF_GmC21758_1
cccacgttttcacaattcccttccttgatacaaagccttccctgtttgcttttttcacaattcacttcttttccagagagttagggaagaggaatagagaaagagaaagagaaagagcgtgagagagagaaacagcacaaggatggagctttctcaacttggttttctggatgagctacttgctccaagaaaagacactacttggagtaatgctttgtcaactgggttgaatgagttactactccctagtggttggagctttgactcttttgatgagaaccaaggtttagctactttgaatccctcatttgctgcattttccactccactagaccacagatttgaatgcccttatggaagtgaagcagcatacccttttgttgatggcttcacattgcctgagcttgattcttcatacaccaggaatgatgagtcagcaccacttttgccacaagaggataacccatcattggaggatgaagagtttggctttctgggaagtgataaccagagcttggaacaagcaaaaattggctgcaaaattgaggaacaagtgacagagattccagtctttaacatgggcttgtgtggggagaaaaaacccaaatcaaagaaactagaagggcatccctcaaagaatctcatggcagaaagaaggagaagaaagcgtttgaatgaccgtctttccatgctaaggtcaatagtcccaaagattagcaagatggacaggacctccattcttggagacacaattgattacatgaaagagcttctagaaaggataggtaagttgcaagaagaagaaatagaggagggaacaaatcagataaacctcttaggcatttctaaggagctaaagcccaatgaagtaatggttagaaattcccccaagtttgatgttgagagaagagaccaggacacaaggattagcatctgctgtgccacaaagccaggattactactgtccacagtgaacaccttagaagcattaggccttgagattcaccagtgtgttataagcagcttcaatgatttttcaatgcaagcatcttgctcaggggcagcagagcagagaaattgtatgaaccaggaagagataaagcaagcactattcagaaatgcaggttatggtggtagatgtctctaggagaaagatggaaagctgaaataacaatttgctgatgttgaaaaacaagcaaagttttcctcttgtgtaattcaaggaattaggggtgttacgtttaatgagatttcccaataagatggctttgaatgatgctttgattcttatgtaagttacaactttaccctgtattttaacatactatggggtatgttcagttcaagcctcactttcccattgtgataaacatccatttttttagtaatgaagaagggttgttaccaaacccataagcggaatc

SEQ ID NO: 27780 - DNA, 1193 bp, Glycine max
  Clone ID: TF_GmC18720_1
aacacaacttccacattccgatggaggagtcatgggaaaattggcatcttcatatggaaaccggttgcgagaacgatttcttaggcaagtgtcacggcactgacgatgacgagttcttcagagacatccttcagcaaccaccacctgcggctttctcttccgaaagcgaaagcgatcactccttcctcgctgtccaaaacacttctagcatccccaacgacggtgccgttttgtctcctaggaattacctcgtcaaaagcagcagctccaactccttggtctctcaaaacgcttccaaacgacctcgtcgtttgtcctctcccaggacttacattctgtccttcgacaactcaaccatggttccggccacacccgaaacccgcccccgctcctccaataattcccctctgcctgccaaacgggccctggaaagcccaggcccagtagcccgaaggcccaaccaaggagctaagaagataagaacctcttctcagaccatcgatcacataatggccgagagacgacggaggcaggaactcacggagaggttcatagcactctcagccacgattcccggcttgaacaagacggacaaggcttctgtacttcgagcagcaattgattacgtgaaacaacttcaagaaagggtacaggaactggagaaacaagacaaaaaaaggagtacagagtcagtaatattcatcaagaaacccgacccaaatggaaacgatgaagacaccacctccactgaaacgaactgtagcatccttcctgagatggaagcaagggtgatggggaaggaggtgctcattgagatccactgtgagaaagaaaatggtgttgagctaaaaatattggaccaccttgaaaatcttcatctcagtgttaccggaagcagtgtcttgccatttggaaattctgctctctgcattaccatcacaactcagatgggtgacgggtaccaaatgactgtgaatgatctagtgaaaaaccttagacaattgttctcaaaatcacatgtgctaagcgacagcgatccgtactagtgtatcaaacaatgagttgtagtgtatggaaatcgaaagttttggatttattactctctttgattttggcttgttttcatgttgatcgtaacgttaataaacaaatactaaatgtctgacatgaatttatgcccggcatctaccctg

SEQ ID NO: 27781 - DNA, 1453 bp, Glycine max
  unsure (1)..(1453): unsure at all n locations
  Clone ID: TF_GmC5806_1
gtacgcccatgcaggttatccggatnccggnaaattcccggggtcgacccacgcgtccaacaacagcaacagcaataaaataggaagcaacaacagcaacagcagcagctatagaccctagggaaatgatacaggaagatcaaggacagtgttcttctcaagcgatcaataactaccaccaagcctatcaagagcagcttctccttcagcaacagatgcaacaacaacaacaaaacaatgatatctttggtggaggaggaggattgaacatgtaccctggtgctgaagtttctccaatcatgaatcatcatcatcaaccatggtctatgactatgccacatcatcatcaccatcatcaggttcatgacccttttcttgtccctccccaaccttcaccctatgcaagcttgttcaacagaaggggtccttctcttcatcagtttgcatatgatcatcatggttcatcttctgaccatcttaggatcatatctgaatcccttgttggaccggtggttcaacccggttcagcagtaccctttggcctccaaaccgagttggctaagatgactgctcaagaaatcatggaggctaaagcccttgcagcttccaagagtcacagtgaagctgaaaggagacgcagggagagaatcaataaccatcttgctaagctgcgcagcttgttgcctagcacaaccaaaacagataaagcatcattgctagcagaagtgatccagcatgtgaaggagctgaagcgtcaaacctctctgatagcagaaacgagtccggttccaacagaagctgatgagttaacagtagtggacgaagctgatgaagatggaaactcagtgatcaaagcctctttgtgctgcgaagataggtcagatctgttccctgaactcatcaagaccttgaaagcgttgaggctaagaacgcttaaggctgagataacaacgcttggtgggcgcgtcaagaacgtattgttcatcactggagaagaaacagactcatcaagcagtgaggaccatagccagcaacaacaacagtgctgcattagctcaatacaagaagcgcttaaggctgtgatggagaagagcgttggggatcatcatgagtctgcttctgcgaatattaagaggcaaaggaccaatataatatcaatgtcctaggaacggatcgaggtctttatgaattttatttaattaaaggcctatatatgcatgatcattattattattattactatctactaattaattagttgttatataagcatatatatatattttgattttgatttgcatattttttggggggtgtggtttggcttttacttttttttcttttcttgttaatggtgtgtgctggaaaatgttgttactttatatgtattctccatcaacatcatcatcgttataagaaatgaggaaatgagagtttggtggggttttttgtt

SEQ ID NO: 27782 - DNA, 786 bp, Glycine max
  Clone ID: TF_GmC5806_2
cgtcagctcggaattcggctcgaggcaaaatattcttatataaatagccttggagtttgtattatccttcaatagagttagtttcatatataaaacaggaagcaacaactgcaacagcagctatagaccctagggaaatgatacaggaagatcaaggacagtgttcttctcaagcgatcaataactaccaccaagcctatcaagagcagcttctccttcagcaacagatgcagcagcagcagcaacaacaacaacaaaacaatgatatctttggtggaggattgaacatgtaccctggtggtgaagtttctcaaatcatgcatcatcatcatcatcaaccatggtctatgactatgcctcatcaccatcatcatcatcatcaggttcatgacccttttcttgtccctccccaaacttcaccctatgcaagcttgttcaacagaaggggtccttctcttcagtttgcatatgatcatggttcatcttctgaccatcttaggatcatatctgaatcctttgttggaccggtggttcaacccggttcagcaccctttggcctccaaaccgagttggctaagatgactgctcaagaaatcatggaggctaaggcccttgcagcttccaagagtcacagtgaagctgaaaggagacgcagggagagaatcaataaccatcttgctaagctgcgcagcttgttgcctagcacaaccaaaacagataaagcatcattgcttgcagaagtgatccagcatgtgaaagagctgaagcgtcaaacctcactgatag

SEQ ID NO: 27783 - DNA, 2390 bp, Glycine max
  Clone ID: TF_GmC886_1
aaatatttttgcacggacgttgtccagtcaaagattacttgtgcttgataaggtgaaagtgcttgctctaggcaaaacctcatctcaatgctggatgaagcaatttcttacttgaagtcattgcagctacaagtgcagatgatgtccatgggctgtggaatgaatacatgacattgagcaaaacaagataaccatcattaacaatggatcgtgtgcttcaataatcacaatcactgtattccagatttcgatattcaaatggtccacgaacacgaataacctattctcgcgccttcagccttacttcgccatatgaaaggatgcatcccgcgagaattaataaaaagaataacgctatgcacgaaccgatatctacattccgaaaagtcggacaaagcgtaaacgttcgatgaagccatatcatacttgcgccgattgcagttacccgtgaagaagatgccaatggggtgtggatgtggagatgtgatgttaccttgatttcatgcagtaaaccgcaacaattggaatgggggttggaatgggtatgggtatggaaatgggaatgaacagacctgtaatgccgtttcccaatatgttacctggttcggctttgccagcggcaactgccgctgctactcatttgggaccaagtttttccatgcagcctttccacatgccccatgttcctgctcctgattcatctagaatgcaagcagcaaatcagtcagataataatatggtcacgtcagctggtccacctgatccaaatcagtcacgtatcccaaacttcactgatccttatcaacaatatcttggtccccaccagatggagttccaattaattcagaatcaggcaatgaaccaaccaaatgttagcaagccaagtaacaatgggggccctgcgaatccagaaaaccattagtcgggaggataaattattctttgatagttacaatgaagggatggctattgaagcggtgcgccaaccctcttccacacgtctcagctgacgcagctccgacggttagcggttccggctcggatactacagctgcacagttttagggtgttaagagaacgaactttttagctgttctcagtagcaagctaatcgatacacggctatcatgttaattattgcaacgaagttttctccctcttttatcatccttttttcccgttgaaaagttgctctcttcgagattctttaaagtgggatgcgatacgtcagacaaggctccaatgctggacgaagcaatttcgtacttgaagtcgttgcagtacgatgagcagatgttgtccatgggatgtggaatggtacctgtgatgtttcctggaatccagcagtacatgccagcaatgggaatgggggttggaatgggtatgggtatgggaatgggaatgaacagacctgtaatgccgtttcccaatatgttacctggttcggctttgccagcggcaactgcagctgctgctcatttgggaccaaggttttccatgcctcctttccacatgccccatgttcctgctcctgattcatctagaatgcaagcagcaaatcagtcagataataatatggtcacgtcagctggtccacctgatccaaatcagtcacgtatcccaaacttcactgatccttatcaacaatatcttggtccccaccagatgcagttccaattaattcagaatcaggcaatgaaccaaccaaatgttagcaagccaagtaacaatgggggccctgcgaatccagaaaaccattagtcgggttagattttccggctcctatactacagctgcaaagttttgtagtgttaagagaacgaactttttagctgttctcagtagcaagctaatcgatacacggctatcatgttaattattgcaacgaagttttctccctcttttatcatccttttttcccgttttaaaatttctcttttcgagattctttgatgtgggaagaggaactcgatagatggcacaatagatgaacgtgcattctacaccaaacgtggaggccacttacgtttagtccaattcctgcttcagattcttgttatgttcttcatttaccatcaattttctcctattaggcgttacagcagcctgtgaacctcatcgctgttatttatggagtgaaattgaagcagttcttgatctacatgcccagatggctctgttacaatgcacgatgtgcttagtcaattaaagaaaggaaattgaattattaaaaatttaaaatttatagtactacacatagcagaatttgtacaatagactgtgggattaagagattaccataaaagttatagctatttgtatggcgggtgcgcctcagggaccttgcaatctcttaatttaaagttaaaataatgatgtattggtataag

SEQ ID NO: 27784 - DNA, 1300 bp, Glycine max
  unsure (1)..(1300): unsure at all n locations
  Clone ID: TF_GmC256128_1
ntgccatggggctcctgtcccgggtcccgggtcgaccatgctcggcggccgccctttttttttttttttgaatgaggccaaacccgttattcaatagaatagcaaaacacgttatacaagttgcaaattcctatgaacatagatatgaaggtaattaggtaaagtaaaccaagaaagccacctaaatcataacaagttactaattaaccccaataagaaaggagtataaatattctgctattaattgtttctcgtcacttgctttggagctaatatacacatttctcacaaagaattagtatggacattcttgtaattgtagctcaacactctcataacagaactagctagctcagttcttggaaccagaagtaggaggttggtgcagctgctgatacattgcagcaagtctactgtaggcatccatggtcatgggctgcgattggcatccaaaaattgtggacaaagggtcaggcatcacggaagccggagtcccttgaaggcggtcgcctccaccagcagcggcagcaacagcggcatcccacgaggctgccatgggcatgaaggcagaagggtggaggactggagggatgccagggatgtgagcacggttcatggagttcatatccatccccattcccatacccatccccatacccatccctaatcccatgcccattggagacatcatcgacatttgaagctgttgctgcatggtcaatggcagcatcatcgatgacatgttgattctatttatcatctgcaactgtgcttgcaactgcttcaaatattctatcacctcatccaacattgaagctttatcactcttgctggaatttgggaccaacttttgcaatgtcttcattctttggtttatcttatccctccttttcctttcagattggttgtgtatagccgcagctctgctccttttagtggacaccgatgattttccgtttgctctctttttcttcccttcatcctggtcttctcccactggtttactgtgggaaacagaatcgtggtcgtctacggtggtggtcttggtgcagtgcttagcggagctggtgttttcgagcgagttgatggaggtggaagtggaacccacgccaaactccctgtcgcacgtgtctagggtcacgtgcttgctatccctcccaaacgtggcactcccactcacgctctgatccctcccagtcgcctcatgccccttcgcccccttcccccgcagcatgaccccacacgcgtggagcaccccacatgcacgtgccgncggggaccgactncatgccctgcttgc

SEQ ID NO: 27785 - DNA, 2428 bp, Glycine max
  Clone ID: TF_GmC993_1
ctcttttcctttcccatttgcttagctttttcatttaccagataataataaatttcccttttcacaccctccccttctcaaattgatcactccattccaccctataatataatccattcttaaccaactttttttttcggcctgcgtaacaaaagaatcatcattcttttttaacccactttagccctcaccaatatgcttgtccaggctttatcatttcgatctgatttaagccaatctccaattagggtatgtgggagaaaatcagtaaaaccatgaagcttctctaagatcatcaccctcgtgtgcattatgatcaccggtaaagaactaaggcctgatgattgtataaactatgtcaactgagctgaacgccaattccaccttcaagaccatcaagtcatgtgatattaacaccgagcaggattttagtatggagaatcgaatcttaagtgatatactccaatctcatgaagccttcaattacaacatgtcccggaaggattttgtcctaccggaactcgatggattcggctcgagcattggtgctggctctgatgagattgagatctcacctcattctcagcctttggttggtgcatcttcctacatcaattgcaataacaacagcaccaacacatcatgttatagtacccctttgagttcttctccaaaggtgaacatgaacaagatccccacaatggtgaagcacttggtgaaagagggcatgcccctaagtttggggacatcaacgtcctcgaattcaaccgtgacggaattctcagctgatcctggctttgctgagagggctgcaaagctttcttgctttggaagtcggagtttcaagttgcaggaacacgcaattgagtctcaacaatgctgaattggggctgatctcttctccattggtggaaaatgggaagaagcagctccctagagtctcaagtagtccatcactcaaagtgcttggatctcaaatgggtactcaggagaacaagaattctccattgcaagacctaatggaagtggccaattctcaagaggagtccgcaatctctgaacaaacaccaaatggagacactggggagaaaccttccccttatgtgaattctaggaaaagaaaaggtccatccaaaggaaaagccaaagaaacttcaacctctaccaacccccctatggctgctgaagctagcgatgactctaatgcaaagcgcagcaagcctaacgaaggtgaggggaatgaaaatggccacaaaaaggcagaggaagccttaaaaggaggtaatataaaaaatgcaaatgatttctgtattctctggtgcaaattcttattattattctggcaccaactgtacgatatattgctaattaaaagaggtcaagccactgatagtcatagtcttgcagaaagagttcggagggagaaaatcagtgaaagaatgaagcttctccaagatcttgtcccaggttgcaacaaggtcacgggtaaagcactaatgcttgatgaaattataaactatgttcagtcattgcagcgccaagttgagtttctgtctatgaagttggcttctgttaacaccaggctggattttagtattgagagtctaatctcaaaagatatatttcaatcaaataattctttggcacacccaatattcctgatagattcctcagcgccacccttttatgggcaacaccctcagccaaacccagcagtccacaataacattcctaatggaactatgacccacaactcagtggacccattagatactggtatgtggattcctgggtttggcatgcatttaccacacctaaatgattttaatgaaggtggctttcagtatccaaaaccattctctgaagatgacctccacaccattattcagatgggatttggccaaaatgcaaataggataacaccaatacaatctcagagtttcaacggctcaaatcaagtacccctatgaaaatcaagctctgatcaccattcattacgcctgaattgaagcttggaggaataggaagactactgctgtacacaacaagaagggatttaatttgaacgaccccttgaattattaagccattgttatcactaggtctaatagaaccttcttttgtccttatgtatgttagccattttcttttcttaccctttccatgagtttaatttttaatcatcaggggcagttcttttcaaatttttttacaacttcttcactgtaaaatctttaggaccgattctgatttctcttggtgcaaattcttatttttacggcaccaattgtaagatatagtgcaaattaaaggagtttttctactacccagccattatgattatccctcctcactttgtctattattgtacgctttatataattcatacatcacatcaacccacaaagatttttcgtgggactttatt

SEQ ID NO: 27786 - DNA, 766 bp, Glycine max
  Clone ID: TF_GmC1795_3
tccggttttgaaaaagttcaagcggctgaaaaaaggcaggagggatattgaggaggagccctctgggctgtctgatgaggaggagcttgttggaagtggtaaagctgggcgaactgctgaggagaagcttaaacgcagtttatttggtgatgatgaaggagctccacttgaagacattgctgaagaggaggagcaaggagaagaggaagaggatgctgacattgaagaagagcttgaaaaccgtggccgggagcaagagaagcttcagtccgagctcaaaaaattgcagaagttgaaggagtttaaacctaccatgaatttgcctgtgttgaaagataatgaagaaaagaaggataagaagaagaaggggtgctctgagaagaaaaggccttctccaccttacattttgtggatgaaagaccaatggaatgagataaaatcatttgggataattaaatttttcttattttctctcttttatttgttggttttagttaaattcaatggtttttatgtattgatggcttggtgcagatcaagaaagcgaactcagaggcagaatttaaggaaatttctaccatgctgggttctaaatggaagactgttactgcagaagagaagaagccttatgaggagatataccatgccgagaaagaagcttatttgcaaatgattgcaaaggaaaaacgtgagactgaggcaatgaggttgttggaagacgagcagaagcagaagactgccatggagttgctcgaacagtacatgc

SEQ ID NO: 27787 - DNA, 304 bp, Glycine max
  Clone ID: TF_22522754
caaacctataagaccacccaatgctttctttgtgttccctgaagaggtaaagaagagctttaatgctgagaatactaatgcgaaggccgcatcaaatgatgctaaacctggatgatagaaatgtaaatcctagtccagtgctgaaaaagctccatatgaaatcattgctgcgaaaaggaaatctgactctgaaaaacttatccaagcttatgataacaagtatgctagctcctcaaatgatgaagaatcatacgagtccaaatctgaagtgaatgatgaccatgatgccagtggagacgatgag

SEQ ID NO: 27788 - DNA, 517 bp, Glycine max
  Clone ID: TF_LIB3028-039-Q1-B1-C3
cgctatcctattccgcgttctctcatccatcatgaaatgaggaaagtccaagaccgaatctaagagagccgatgccaaacttgctgtgaataagaacggcgccgccaccaagactaggaaacccgccggaaaggggaaggcagcgaaagatcctaacaagccaaagaggcctccaagtgctttcttcgttttcatggaggaattcaggaaggtgttcaacaaggaacgtcccgacaacaaagcagtgtctgctgtgggcaaaggtggctgggcaagatgggagacgatgtctggaggctggaaaagcgccttatgtgggaaagtctgagaggagggaagtggagtgcgagaagaacatgagagcttataacaagaaacaggcggaaggtcctactggtggggatgaagaaaaatcggagaagtctgtatctgaggtgaatggataggatggttacgaggaagggcattgggaggaggaggatgacgaataaagaatgggctgatgataatagcattt

SEQ ID NO: 27789 - DNA, 380 bp, Glycine max
  Clone ID: TF_jC-gmXLIB3563P058bb03a1
ctcatcttttttttttctctctcacggctcaataccctatctccctaccctatttaggtctctctaatacataatgaaaggaggaaagaacaataccgaatctaagagagcctatgccgaacttgctgaggataagaagggcgccgccaccaatactacgaaatcggccggataagcgaacgcagctaaagatcctaacaagccctataggcctccaagtgctttcttcgttttcatggaggaattcaggaaggcgttcaactaggaacatcccggctacaaagcaaagtctgctgagggcaaatctgctggagcaaaatgaaagacgatgtccgatgcttgaaaagcaccttatgtgcgcgaagcctatgagaaggaaa

SEQ ID NO: 27790 - DNA, 1474 bp, Glycine max
  Clone ID: TF_GmC11_3
atctctcccactctcgcgttccttcttcgtcgcctcgacttcttcgttgcgacactgagagagctgagggagctggcggcgctttgacttcttcacagtgtcactctgtctctctttttcttctcacactcacgcctcacacagttcctaaatccctagccagtacaacctcactcactttctctctttgtctctctttctctcagattcctacattgtctgcgcactggcaccaaacaaccataagatctgcaccgtcgctgaaatcggcctcaacgacgcatgccgtcgggaatcagcaactttgtgtcgtttaggttgaagcgcaagggcgctggtgctggaaggaagcaatcgaagaaagctgctaaggatcctaacaagccaaagagacctccaagcgctttcttcgttttcatgtacggattttcgtttgcttttgataccgaatctgttttcgtttcgtttcgttttgatttttttttttgtgttctggcgattgaagtttttgtgattgtttttttaggtccgagttcagagagcagtttaagaaggagcatcctaacaacaaatccgtcgctgttgtgagtgatttcgccttactttcactgttcgcgtgaaaatttgacgctatttttttgttcttaatagaatttcactgtgaacatattttaggtcggtaaagctggtggtgacaaatggaaatcgctgtctgatgctgtgagtattaagattttgagaattcttttttcattattagtttttgcgtatggttctatatgatttaatttattgaccatatctacttatttgtaacctagtttgcgttcatttaatgtttcaggaaaaggcccccttcgttgccacggccgaaaagaagaaacaagagtatgagaaaactattttggcttacaataagaaattggtgaatactttttaccctatactacttactcttattttatagtataatgtaatgtaatgcaataattgattgagcttgttattttgatgtgttaggaggggaagaattcagaggaagacgagtctgacaagtcaaagtctgaagtcaatgacgatgaggaagatgaggtagatggagattaacctgttattatgatttgtgtcttgtttaactagtttgttcctttgtataactaattgtataattaatgtgttgtttgctgtttattctgtaggaggaggaggatgatgatgacgacgagtgaagatggtgatacaagatgaagcgtaggaggatgtgggaaaagaaaattgttttgcatagtagttgttgggtttagaatttcataggatggttcccaacccacatccctttatgataattagtttctgaatttttattttgtcctcccttactagggttagattagcgcacaatcgtaattagggttcagtatcatgatcatgtacttaaaagtcaatgctatgatacgtttcaattctattctcg

SEQ ID NO: 27791 - DNA, 1081 bp, Glycine max
  Clone ID: TF_GmC40409_2
ggtgagtctagtcaatttctttttaaactctgcgatgctaaatttagcggtgtcactcacctgaatttctcttttttgtgatctttggggcctttatcaatgccacatctctttctttctctcttgatctcattttgtgatctttggggcctttatcaatgccacacctaaatttagcaatgtcactcacctgaaattaagtgtgtattctttcttttgcgaattttttttcagagttgatttgacgtaacccaaaatcgtgtttaatgttttgaggcaatttctttgtttgctacatcaatggggtttctttaaacaatagttttggaattttcgttttaaattgtttgcctattggctacattgtttggttttacattgtctggttcttctttattcaagaacgcatcatcttgtacaagatttgcacgaactcagagcgagagcaacaggaggaattgtctactttccgcaaccagatatgttctgaagggtaatccctatgacctggaatgcaactcacttagcaagtcttgcttcagttaaaaacggatagtatatctttttcctaatctggtattcttgctagagttaaaaacagatagcatatcttttgattatgtttccgttaatgtaagaaatcgatcaagcacaaatggaacaattacacaagaaaattgaggatgacttagaggtctcaagattggcaatgcatctggaaagaagtggatatcaatgactaatgaggagaaggttaaatactatgatatagcctcagaaaaacgtatagaatttgatagagcaatggcaaaatttaacaataaaatggaaagtgggggagtttgacgaaattggtgggtaaagcctccttatttttctgtattcattttttcttatgattctgccgtcattttctctgggttgcatattgcaagtgtttgtattgcttcaaatgctgggaagcttagggtggctctttgagaatactctatttcttttgatggagttttgcatccattgagaaattggaatttaacatttaattgttcaaaagtggagggaaaatgggtaaatagatgat

SEQ ID NO: 27792 - DNA, 414 bp, Glycine max
  Clone ID: TF_LIB3242-472-P1-J1-E9
aattcggctcgagggtcggcaaagctggtggtgaaaaatggaaatcgctatctgatgctgtgagaattatgattttgagaaatattttaatgataattttttgtgtgtggttgtatatgatttaatttaacgaatcatgtctactttttctgtaacctagtttgcgttaatttaatgtttcaggaaaaggcccctttcgttgctactgctgagaagaagaaacaggagtatgagaaaactatttcggcttacaataagcaattggtgaatactttttaccctatgtacttttttacttcttactcatattgtatataactgtttataatgtattgaacttgttattttgatgtgttaggagggaaagaattcagaggaagactagtttgacaagttaaagtctgaagttaatga

SEQ ID NO: 27793 - DNA, 1016 bp, Glycine max
  unsure (1)..(1016): unsure at all n locations
  Clone ID: TF_GmC11_4
cgcaaggccatctctcccactctcgcgttccttcttcgtcgcctcgacttcttcgttgcgacactgagagagctgagggagctggcggcgctttgacttcttcacagtgtcactctgtctctctttttcttctcacactcacgcctcacacagttcctaaatccctagccagtacaacctcactcactttctctctttgtctctctttctctcagattcctacattgtctgcgcactggcaccaaacaaccataagatctgcaccgtcgctgaaatcggcctcaacgacgcatgccgtcgggaatcagcaactttgtggttgaagcgcaagggcactggtgctgctggaaggaaacaatcgaagaaagctgctaaggttcctaacaagcgaaagagacctccaagcgcttttttcattttcatgtccgagttcagagagcagttcaagaaggagcatcctaatttattgatgatatccacatttttgtaacctagtttgcattaatttaatgtttcatgaaaaagtcccttcgttgctatggccaaaaagaagaaaccagagtnntagaaaactattttggcttacnnatagaaatggnaggggaagaatccagaggaatacgagtctgacaagtcaaagtttgaagtccatgatgatgaggcgattgaagattgctaagcatgagcagcaggaggatggtgatgacgacgagtgaagatggtgatacaagatcaagcgtagtaggatgtgggaaaagaaaattgttttgcatagtagttgttgggtttagaatttcataggatggttcccaacccacatccctttatgataattagtttctgaatttttattttgtcctcccttactagggttagattagcgcacaatcgtaattagggttcagtatcatgatcatgtccttaaaagtcaatgctatgatacgtttcaattctattctaaaaaaaaaaaaaaaaaaaaagaccgctatcgggcgctctagcggacgcacgcgtgc

SEQ ID NO: 27794 - DNA, 287 bp, Glycine max
  Clone ID: TF_uC-gmroLIB3259P245c07b1
gagtattttgtaagaaggagcatcctaacaacaaagccggggctggggtcggtaaagctggtggagacaaatggcaatcgctggctgatgctgaaaaggcccccttcgctgccacggccgaaaagaagaaacaagagtatgagaaaactatcttggcttacaataagaaatgggaggggacgaatccagaggaagacgagtctgacaaggcaaagtctgaagtcaacgacgatgaggaagatgaggacgaggaggatgatgatgacgacgagcgaagacggtgatac

SEQ ID NO: 27795 - DNA, 404 bp, Glycine max
  Clone ID: TF_jC-gmXLIB3564P090af01b1
tacggctgagagaagacgacggaagggggccatagaatgatcacccatgctcatgtttctctctaatctgtccactccatactactaactaccgaccctgttcctctctcgttccgtcatgaatggatgacagtccatgaccgaatctaaaagagccgatcccaaacttcgctgagaataaaatgggagccggcaccatggctaagaaacccgccggccatgcgaaggcggcgaaggaccctaacaagccatagaggcctcccagtgctttcttcgtttccatggaggactgcaggagggtattcaccatagaacatcctgaaaacatagcactgcctgctgagagcatagctgctggagcaaaatggaagaccatgtctgacgctgaaagagcaccttatgtg

SEQ ID NO: 27796 - DNA, 681 bp, Glycine max
  Clone ID: TF_GmC2181_16
tacggctgcgagaagacgacagaagggggctagtggtactgtcttagctttgattctctggtctctgttttgttctgtttcgcgtattgtcttcatacaggaacttgaacaatgaagaatgcaaagggcaagggagcagcaagggcctcaaaagaatcactgaagcccgttgatgaccgaaaggttggaaagcggaaggcttccggtaagcctgggagaagtagtgcaccaaagaaggagaagaaggccaagaaagaccccaacaagcctaaaagaccacccagtgctttctttgtgttcctgtttgtatcttctttactctttccttcatatctctccctcagaaaaatgatatgacttattttccttctctgtgatagtgaggagttcaggaagacctttaaggctgagaatcctaatgtgaaggctgtatcagttgttgggaaagctggaggagagaaatggaaatccttgtccagtgctgtaagctttgcaattgtgataaataatggctcattttgttatcttttaaattatttgactcttcactgtttttttagttgttttcaatataaatttattttgaagtagatatagtttctcatttgtatgcaaatgttgcttcaatttgaattccagtaatatcaatatatatgtaccaaatgaactcattctattgaa

SEQ ID NO: 27797 - DNA, 483 bp, Glycine max
  Clone ID: TF_uC-gmropic112g01b1
ttgtgctcaatatctccccgcatttgtgcctagccttattattatcattgtcgatattcattccccttatctttctctcttctctctccccgcccaaaccctaactccctaccctattccgctttctctcatccatcatgaaaggaggaaagtccaagaccgaatctaagagagccgatgccaaacttgctgtgaataagaagggcgccgccaccaagactaggaaacccgccggaaaggggaaggcagcgaaagatcctaacaagccaaagaggcctccaagtgctttcttcgttttcatggaggaattcaggaaggtgttcaacaaggaacatcccgacaacaaagcagtgtctgctgtaagtgtatctgttgttaaaatgagtggtgatcacatcatataaatggatctcggcagttacatgaatttaactgaacatttcagtgggcaaagctgctggagcaaatggaagacgatgtctg

SEQ ID NO: 27798 - DNA, 462 bp, Glycine max
  unsure (1)..(462): unsure at all n locations
  Clone ID: TF_LIB4281-020-R1-K1-D4
ccacgcgtccgaaacttgctgagaataaaaaggtcgctctgacactcaatactggtaaacccgccgcaaaggggaaagtagcgaaagatacctaacatagtctcataagagtcctccaagatgctttcttagttttcatggaggaatttaagaaggcgttcaacaaggaacatcccgacaacaaagcattgtctgctgttttcaagagctgatggatcaaagatggaagacgatgtctgatgctgaaaaagcaccttatgtggcaaagtctgagaaaaggaaagtggagtacgagaagaacatgaaagcttataacaagaaacatgcggaaggtcctactgatggggatgaaacaagagttngaaaagtctgtatctgagagagaatgatgaggatgatgacagaagaatgcatagtcgaggaggaggatgacgattacagaatgcactgatgataataaca

SEQ ID NO: 27799 - DNA, 1227 bp, Glycine max
  Clone ID: TF_GmC2181_49
cttcgcttgcctaaccttggatcctcggtccttggtttggtccggttccgcgtttggccttcttccgggaccttgaccaatgaagaatgcaaagggcaagggagcagcaagggcctcaaaagaatcactgaagcccgttgatgaccgctgttacaggaaataatgtagtgatggaacatatatctctgttgttttcagaaaggttggaaagcggaaggcttccggtaagcctgggagaagtagtgcaccaaagaaggagaagaaggccaagaaagaccccaacaagcctaaaagaccacccagtgctttctttgtgttccttgaggagttcaggaagacctttaaggctgagaatcctaatgtgaaggctgtatcagttgttgggaatgcagcattagggtttttcatctgcttcaatggggaagggaacagggagttttggtaagagaaggaacaagactcacactctctgtgtgaggtgtggccgccgcagcttccatctccagaagagtcgttgcgccgcttgtgctttccccgccgcacgcactaggaaatataactggagcgtcaaggcaatccgcagaaagaccaccggaactggcaggatgaggtacttgcgtaacgtgcctcgccgattcaagagtggcttcagagaaggtaccgaagctgcacctaggaagaagggagcagctaccactgcataaacctgtcaaagatcgttgtttgctgggtacggacttacaagaatagattgcttttttgtgcttatggcaagtattttggaacaattatttttagagtctgattgctactttgtccttcatttaatttgtagttgctttatatttcaacaagatcataagacttattgattattcagtcggctatgttacatttatagtttgtggtttaagcagttttcaattagtgaatactggatagaatgaaagacatccctacctggctatcccacaatactattctaggcatttgttatgaaatttgccatagtcataacgagagagctttaatttgttatgggaagttagtttaggtaaacctggtttgcttccgttgtgactgcataaacggttttcttcacttgtttcacaatgtgtatcctaaaaccaattcttctgatatattcctcaagtcaaaggcagtttctacgtttcttttatcatgtatgtaactttcatagtaaactgatttgtttggatgtctatg

SEQ ID NO: 27800 - DNA, 350 bp, Glycine max
  Clone ID: TF_LIB3040-049-Q1-E1-C1
gattatcatagtagatattcattccccttatctttctctcttctctctccccgcccaaaccctaactccctatcctattccgctttctctcatccatcatgaaacgaggaaagtccaagatctgaatctaacagagccgatgccaaacctgccgtgaataagaagggcgccgccatcacgactaggaaacccgccggaaaggggaatgcatcgaaagattctaacaagccaaagacgcctccaagtgctttcttcgttttcatggaggaaatcatgaacgtgttcaacaaggaacatcccgacagcaaaacagtgtctgctgttggcaaaactgctggagcaaaatggaa

SEQ ID NO: 27801 - DNA, 467 bp, Glycine max
  Clone ID: TF_LIB3242-438-P1-J1-G8
ggctgcgagaagacgacagaagggggattttagttttagtattttagtttgggtgaaattgcaggaccctgtgtagtgtgtagtctgcagacaaacatggcgaaaaaggtaaaagggtctcactctgcttcttctgcctctgcatcttcccgcaaactagtgctgaggattaaatcaaacgagggaatcaagagatcagtgcggcagactaattcaagaaagaaacccaaagcaaagcaaaagaagaacaaacaaatgtttgatgctatgaaacccaagaaacctccgacagctttcttctacttcttgtaatgtcatctcaaaagcagatgggattcattctatttagtgcatttttacttttcaagggaggattttcgtaaagaatttcaagagcagaatccagatgtaaagtcaatgcgtgatattggcaaggcatgtggagagaagtggaaaacagtgactta

SEQ ID NO: 27802 - DNA, 305 bp, Glycine max
  Clone ID: TF_LIB3242-696-P1-K1-F7
acgcccacgcgtccggaggcctccaagtgctttctttcttttcatgggggaattcaggggggtgttcaacaaaaaacatcctgaaaaccaaacagtgtcttctttgggcaaaacttcttgaaccaaatggaaaaccattttcttattcttaaaaagcaccttatgtggcaaagtctgagaaaaggaaagtggagtacgaaaagaacaatgagagcctataacaagaaacaagccgaaggtcctacttgtggggatgaaaaagaatctgagaagtctttatcttaagtgaatgattaaaattatta

SEQ ID NO: 27803 - DNA, 333 bp, Glycine max
  Clone ID: TF_LIB3040-034-Q1-E1-A2
gacaacacaacgcaacacaacgcgcactctcgcttttctctctgatcacagctaccctatcgttcttcgcggtttcgccgattctcgccatggcgaaagccatatccgacgccgaaggcgccgatagacggttgaaacgcaaaggcgctggtgctggaaggaagcaatcgacgaaagctgctaaggattctaacaagccagagagacctccaagcactttcttcggtttcatgtccgaattcatagagcagtttaagatggagcatccgaacaacacagccgtcgctgttgtcggtaaagctggttggtagatatggaaatcgctgtctgatg

SEQ ID NO: 27804 - DNA, 630 bp, Glycine max
  Clone ID: TF_LIB4164-047-Q1-K1-D2
cacgcgtccgcgcgcactctctctttttctctctgttttttgttctctcttcgcttaaaccctatcgttcttctcgttttcgccgattctcgccatgccgaaagctaaatccgacgccaaagccgccgatagcaggttgaagcggaagggcgctggtgctgggaggaagcaatcgaggaaagctgctaaggaccctaacaagccgaagagacctccaagcgctttcttcgttttcatgtccgagttcagagagcagttcaagaaggagcatcctaacaacaaatccgtcgctgttgtcggcaaagctggtggtgaaaaatggaaatcgctatctgatgctgtgagaattatgattttgagaaatattttaatgataattttttgtgtgtggttgtatatgatttaatttaacgaatcatgtctactttttctgtaacctagtttgcgttaatttaatgtttcaggaaaaggcccctttcgttgctactgctgagaagaagaaacaggagtatgagaaaactatttcggcttacaataagcaattggagggaaagaattcagaggaagacgagtctgacaagtcaaagtctgaagtcaatgatgacgaggaagatgaggtagaattgatct

SEQ ID NO: 27805 - DNA, 652 bp, Glycine max
  Clone ID: TF_LIB4203-002-R1-N1-C5
caaagtcatttccctttattaaattgttttcacagaccagaaatacaaaataaaagtagaaataggcccctattaggagctacaggcctgacttggcatgacccctgctgcagcaacttgaacaggacaggaagcagcttttactacagtcagaaagtaggaaagtaggctgaggacttgggtccttcaatgcactgcgagtagaagacaacacactcctaccgagtctctctccagattgcaaggagccttccttgcaaagcagcagaggttaggtgcttccctcaaagcctcagggcagtggaagccaccaagagcagttactcagatggcacagaatccaaggactatgtgagagactggagctgtgacgaggtgggaattccctcctagcatcctcagccttgcggtcccactcctccttcttctctttggacattcccttccagatctcccctgccttcttggaaagatctgtgatactgatgccaggatgatccgacttgatcttctcgcggcttgcattaagccacagcatgtacgcagacataggcctctttggggcgtttggatctttacccttctttgcctctgaagacttcctgcggctctttcgatccttggccatcttagcccttttgagctgttcccg

SEQ ID NO: 27806 - DNA, 1391 bp, Glycine max
  Clone ID: TF_GmC302_1
gcagtatataaaggattttttattttatataacctagtgagttgtgtgaatctatagatacataaattgagctaagggaaggtgtttgaatgcttacatacatagattaaggattttaggaccaaagagggagtcatgaatgtgacaaacaaaccaaacccatatggttccaccaatgggtttcagtctctgcttcaacaaaatgggtgggaacagggatcatctagactcagacccactaagctttaccctgcaccaacggctcgctaccaggacattgttcgtgatgcaaacctcttctggggaacgcttcaagcttttcacaaaacacttggcaccaaatataagatttctactgtgggaggaacgccacttgatctacatcgtcttttaggtgatgttacatcgtgagtgggaggaagtgagtctgaccttcaatgtcaaagataccatatgattctgatcatctatggtgcgcaaatcctatctattgatgcttttacactatgagcaagtgtattattttgggattatcactttgagcaagtgtattattttgggaggcaaggcattcctcccacaacacctgatcttatgattagaggccaatcatgccaaccctatagctccacaaccattccagaagttgctgctgtgaatgattcacctgttcagagttctccagtacgggcacatgatgatatggtttctggaacaattgatgcgaaatttgatgttggatatgtagttacagtgactctaggttctgagcagctgcaaggtgtcctgtttcatgttcctgataacgtgtcccagagttctcatgccgaaggcacatctagttcacagaatcttggtgatgacacgtctaatttacagagtcgaaagagagcaaaatatgcaccacgtgatccatttcggccaaagtcaaacaggagcggttacaactttttctttgctgaaaattatgccaggctgaagccctcgtatcatgggcaagagagagcaattagtaagaggattgggtttctgtggaacaatctgtcagaagcagaaagacaggtttatcaagagaaagggataagagataaggaaagatacaggactgaactgatggagtacaaatccaataattcaactccaaatgctcaataggctgttttatgtaatccttagactgtcatttcatatgcttcatctgttgttcttttcatgcctttgctatagttaattttcttatccattctacagagaaacttagaagagtagctttgtgacaattctggtgtaaattatgctgaatggttttaataaacatcttgtagcggttaattcattgtagttactcttgaaattaagggtccttcattcaatttaaacatcttatttgt

SEQ ID NO: 27807 - DNA, 423 bp, Glycine max
  Clone ID: TF_LIB3087-001-Q1-K1-E10
cggacgcgtgggcggacgcgtgggcggacgcgtgggcggacgcgtgggcggacgcgtgggcgattctcgccatgccgaaagccaaatccgacgccaaagccgccgatagccggttgaagcgcaagggcgctggtgctggaaggaagcaatcgaagaaagctgctaaggatcctaacaagccaaagagacctccaagcgctttcttcgttttcatgtccgagttcagagagcagtttaagaaggagcatcctaacaacaaatccgtcgctgttgtcggtaaagctggtggtgacaaatggaaatcgctgtctgatgcttttgcgttcatttaatgtttcaggaaaaggcccccttcgttgccacggccgaaaagaagaaacaagagtatgagaaaactattttggcttacaataagaaattgga

SEQ ID NO: 27808 - DNA, 582 bp, Glycine max
  Clone ID: TF_jC-gmst02400047f11a1
ggctcgagcttcccactatctggctctcttctctctccccgcccaaaccctaactccgtaccctattccgctttctctcatccatcatgaaaggaggaaagtccaagaccgaatctaagagagccgatgccaaacttgctgtgaataagaagggcgccgtcaccaagactaggaaacccgccggaaaggggaaggcagcgaaagatcctaacaagccaaagaggcctccaagtgctttcttcgttttcatggaggaattcaggaaggtgttcaacaaggaacatcccgacaacaaagcagtgtctgctgtgggcaaagctgctggagcaaaatggaagacgatgtctgatgctgaaaaagcaccttatgtggcaaagtctgagaacaggaaagtggagtacgagaagaacatgagagcttataacaagaaacaggcggaaagtcctactggtggtgatgaagaagaatctgagaagtctgtatctgatgtgaatgatgaggatgatgacgacgaatgcagtggccaggaggaggataccattgaagaatggactgtgatattgcatttagtaggtctgatga

SEQ ID NO: 27809 - DNA, 567 bp, Glycine max
  Clone ID: TF_LIB4128-120-Q1-K1-F9
cccacgcgtccgatgggaacagagacatacgctcaggaaaagcgcacggatcaatgacatggcaataaatttaaattcccgcctaaacccctgaccttcccttgatttcatttcgtttgcaattgaatttcaatttccctaggggcttaatatctccccgcatttgtgcctagcctcattattatcatagtagatattcattccccttatctttctctcttctctctccccgcccaaaccctaactccctaccctattccgctttctctcatccatcatgaaaggaggaaagtccaagaccgaatctaagagagccgatgccaaacttgctgtgaataagaagggcgccgccaccaagactaggaaacccgccggaaaggggaaggcagcgaaagatcctaacaagccaaagaggcctccaagtgctttcttcgttttcatggaggaattcaggaaggtgttcaacaaggaacatcccgacaacaaagcagtgtctgctgtgggcaaagctgctggagcaaaatggaagacgatgtctgatgctgaaaaagcaccttatgtggcaaa

SEQ ID NO: 27810 - DNA, 1151 bp, Glycine max
  Clone ID: TF_GmC43_4
gtttatcgtgaggagaatacggagtcgtacgctctttataagcgcacggatcaatgacatggcaagtgaatttaaattcccgcctaaaccccacgcgttccctggatttcatttcgtttgcaattgaatttcaatttccctaggggcttaatatctccccgcatttgtgcctagcctcattattatcatagtagatattcattccccttatctttctctcttctctctccccgcccaaaccctaactccctaccctattccgctttctctcatccatcatgaaaggaggaaagtccaagaccgaatctaagagagccgatgccaaacttgctgtgaataagaagggcgccgccaccaagactaggaaacccgccggaaaggggaaggcagcgaaagatcctaacaagccaaagaggcctccaagtgctttcttcgttttcatgtaattataatatattgttatctctacgattcatttgacttccgatgcgctctcttatctttcctccgaataattttatcgtcaaaacttttatccttgtccaattggaggaattcaggaaggtgttcaacaaggaacatcccgacaacaaagcagtgtctgctgtgggcaaagctgctggagcaaaatggaagacgatgtctgatgctgaaaaagcaccttatgtggcaaagtctgagaaaaggaaagtggagtacgagaagaacatgagagcttataacaagaaacaggcggaaggtcctactggtggggatgaagaagaatctgagaagtctgtatctgaggtgaatgatgaggatgatgacgaggaaggcagtggcgaggaggaggatgacgattagagaatggactgatgataatagcatttatgtaggttctgatgattttgatcatccgtgtaggtggtctggtcatttccttataaacatatttctctttccaaaaaatatttccctgctcctccttccgtaaattgctcgtctttccaaaacgtgaatagtttaaagaagggagttctctttatttgtatttctaaatccaactgtttagttaagggatggttatctcttgtagagcttttagtttgatttagagttttcttgttgaaatctggttaagtttgtatcaatataattgacttatcatcccc

SEQ ID NO: 27811 - DNA, 296 bp, Glycine max
  Clone ID: TF_700559324H1
gttcaaggaccccaatgcccccaagaggcctccttcggccttcttcttgttctgttctgagtaccgcccaaaaatcaaaggcgagcatcctggcttatccattggtgatgttgcgaagaaactaggagagatgtggaacaacactgctgcggatgacaagcagccctatgaaaagaaggccgccaagctgaaggagaagtatgagaaggatattgctgcctacagagctaaaggaaaacctgatgcagcgaaaaagggggtggtcaaggctgagaagagcaaaaaaaaaaaaaagg

SEQ ID NO: 27812 - DNA, 681 bp, Glycine max
  Clone ID: TF_LIB5068-041-A1-XP1-A7
tttcagaagtgagagtattatcattcattctcatctttctctcttctctctccacccaaaccctaactcccgaccctgttcccctctcgtatccgtcatgaaaggaggaaagtccaagaccgaatctaagagagccgatcccaaacttgctgtgaataagaagggagccgccaccaaggctaggaaacccgccggcaaggggaaggcagcgaaagaccctaacaagccaaagaggcctccaagtgctttcttcgttttcatggaggagttcaggaaggtattcaacaaagaacatcctgaaaacaaagcagtgtctgctgtgggcaaagctgttgtttttaaatggaacaccatgtctgatgctgaaaaagcaccttatgtggcaaagtctgagaaaaggaaagtggagtacgagaagaacatgagagcctataacaagaaacaggcggaaggtcctactgccggggatgaagaagaatctgagaagcctgcatctgacgtgcatgatgaacatgatgatgaggaaggcagcggcgaggaaacagatgaccactaaagaatggactgatacttgcatttatgtaggcccctgatgattttgaacatctgttgcaagcgcgatggcactttcctcgctaacacatttcctggctcacaaaaaaatatttcacctgctccccc

SEQ ID NO: 27813 - DNA, 514 bp, Glycine max
  Clone ID: TF_uC-gmflLIB3275P091a02b1
cggatgcgtgtgcttatctgtctgtcttctctctcacccgcccaaaccctaactccctaccctattgcggtctctctcatccatcatgaaaggaggaaagtccaagaccgaatctaagagagccgatgccaaacttgctgtgaataagaagggcgccgccaccaagactaggaaacccgccggaaaggggaaggcagcgaaagatcctaacaagccaaagaggcctccaagtgctatcttcgttttcatggaggaattcaggaaggtgtgcaacaaggaacatcccgacaacaaagcagtgtctgctgtgggcaaagctgctggggcaaaatggaagacgatgtctgatgctgaaaaagcaccttatgtggcaaagtccgagaaaaggagagtggagtacgagaagaacatgagagcttataacaagaaacaggcggaaggtcctactggtggggatgaaagaagatctgagaagtctgtctctgaggggaatgatgaggatgatgccgaggaa

SEQ ID NO: 27814 - DNA, 1382 bp, Glycine max
  Clone ID: TF_GmC1739_1
ggtccggattccccgtcgacccagcgtccgcaaattttgcagaagttgaaggagtggaaacctaccatgaatttgcctgtgttgaaagataatgaagaaaagaaggataagaagaagaaggggtgctctgagaagaaaaggccttctccaccttacattttgtggatgaaagaccaatggaatgagatcaagaaagcgaactcagaggcagaatttaaggaaatttctaccatgctgggttctaaatggaagactgttactgcagaagagaagaagccttatgaggagatataccatgccgagaaagaagcttatttgcaaatgattgcaaaggaaaaacgtgagactgaggcaatgaggttgttggaagacgagcagaagcagaagactgccatggagttgcttgaacagtacatgcaattcaaacaagaggcagaaaaagatggcaagaagaacaagaaagagaaggatccattgaaaccaaagcaccccatgtcagcttatttcttgttcactaatgataggcgagcagctcttgctgccgagaacaagaatttcttggaggttccaaaaatcacatccgaagagtggaaaaacatgacagaagaacaaaaaagaccctatgaagagatggcaaagaaaaataaggagcaatatgccctagaaatggaggcttataaacagaagaaagatgaggaggctgcccatttcatgaaggaagaggaggagcagatgaaacttcaaaaacaagaagcattgcaactgcttaagaagaaggagaaaactgaaaatataatcaagaaaacaaaacagaaccgccagaagaagaaacagaacaaggatgacaagaattctgatccaaacaggcctaagaagcctgcatcctcattcatcttattcagcaaagaagcaaggaaaactttacaggaggagcgaccaggaatcagcacctcaacccttaatgcacttgtttcattgaagtggaaggaactgagcgaggaagatagacaattctggaatggccaagcatcaaaagcaatggatgcatacaagaaggaattggaggaatacaacaaatcccttgctgcaactgcatgccaggagcagaaaaccgaataataattaattgaaaaggaagaaaaaaaccccttgtgcgcatgttcaaaattatattgaatatgctatcttcaaaatttagtcctcattaatggctttcatgtagttgtaattttttacgcaaattctcttcatgcagtttttattaatcttgaatttggccattttttttaaaaaaaaaaaaaaaaaaaaaactaaaaaaaaaaaaaaaaaaaaaaaaaaaaaaaaaaaaaaaaaaaaaaaaaaaaaaaaaaaaaaaaaaaaaa

SEQ ID NO: 27815 - DNA, 477 bp, Glycine max
  Clone ID: TF_uC-gmflminsoy075f12b1
atccccgcatttgcgcctagcctgattattatcatagttgatattcgttcgccttatctttctctcttctgtctccccgcccagaccctaactgcctaccctattgcgctgtctctcatccatcatgaaaggaggaaagtccaagaccgaatctaagagagccgatgccaaacttgctgtgaataagaagggcgccgccaccaagactaggaaacccgccggaaaggggaaggcagcgaaagatcctaacaagccaaagaggcctccaagtgctttcttcgttttcatggaggaattcaggaaggtggtcaacaaggaacatccggacaacaaagcagtgtgtgctgtgggcaaagctgctggagcaaaatggaagacgatgtctgatgctgaaaaagcagcttatgtggcaaagactgagaaaaggaaagtggagtccgagaagaacatgagagcttataacaagaaacaggcgga

SEQ ID NO: 27816 - DNA, 1534 bp, Glycine max
  Clone ID: TF_GmC43_1
cggaggcatacgcttaggaataacgcagccatcgcaaaataagcgcacggatcaatgacatggcaataaatttaaattcccgcctaaacccctgacctcccctggatttcatttcgtttgcaattgaatttcaatttccctaggggcttaatatctcccctcacttgtgcctagccttatgtcatagtattatcattcattctcatctttctctcttctctctccacccaaaccctaactcccgaccctgttcccctctcgtatccgtcatgaaaggaggaaagtccaagaccgaatctaagagagccgatcccaaacttgctgtgaataagaagggagccgccaccaaggctaggaaacccgccggcaaggggaaggcagcgaaagaccctaacaagccaaagaggcctccaagtgctttcttcgttttcatggaggagttcaggaaggtattcaacaaagaacatcctgaaaacaaagcagtgtctgctgtgggcaaagctgctggagcaaaatggaagaccatgtctgatgctgaaaaagcaccttatgtggcaaagtctgagaaaaggaaagtggagtacgagaagaacatgagagcctataacaagaaacaggcggaaggtcctactggtggggatgaagaagaatctgagaagtctgtatctgaggtgaatgatgaagatgatgatgaggaaggcagtggcgaggaagaggatgacgattagagaatggactgataattgcatttatgtaggttctgatgattttgatcatctgttgtaggtggtctggtcatttcctgataaacatatttcttgcttccaaaaaatatttccctgctccctccgtaaattggttgtctttccaaaacgtgaatagtttaaagaagggagttctttatttgtacttctaaatccaactgtttagttaaggggtgtttatctcttgtagagcttttagtttgatttagagttttcttgttgaaatctggttaagtttgtatcaatataattggcttatcattcgctttctgctgtaaatatgatatttatgttttgttagagaggaagaggtgtgtggagggtggatgaaggagggtgcggtctgggaagaaggcgagcgaggagggggatgacgattagagaatggactgatgataatagcatttatgtaggttctgatgattttgatcatccgtgtaggtggtctggtcatttccttataaacatatttctctttccaaaaaatatttccctgctcctccttccgtaaattgctcgtctttccaaaacgtgaatagtttaaagaagggagttctctttatttgtatttctaaatccaactgtttagttaagggatggttatctcttgtagagcttttagtttgatttagagttttcttgttgaaatctggttaagtttgtatcaatataattgacttatcatcccctttctgctgtatatatgcgatttatgttttttagttcctgaaaaaaaaaaaaaaaaaaaaaaaaaaaaaaaaaaaaaaaaa

SEQ ID NO: 27817 - DNA, 705 bp, Glycine max
  Clone ID: TF_GmC43_10
cccacgcgtccgcccacgcgttcgcccacgcgtccgcccacgcgtccgctcttctctctccacccaaaccctaactcccgaccctgttcccctctcgtatccgtcatgaaaggaggaaagtccaagaccgaatctaagagagccgatcccaaacttgctgtgaataagaagggagccgccaccaaggctaggaaacccgccggcaaggggaaggcagcgaaagaccctaacaagccaaagaggcctccaagtgctttcttcgttttcatggaggagttcaggaaggtattcaacaaagaacatcctgaaaacaaagcagtgtctgctgtgggcaaagctgctggagcaaaatggaagaccatgtctgatgctgaaaaagcaccttatgtggcaaagtctgagaaaaggaaagtggagtacgagaagaacatgagagcctataacaagaaacaggcggaaggccctactggtggggatgaagaagaatctgagaagtctgtatctgaggtgaatgatgaagatgatgatgaggaaggcagtggcgaggaagaggatgacgattacagaatggactgataattgcatttatgtaggctctgatgattttgatcatctgttgaaggtgggctggtcatttcctgataaacatattttcttgcttccaaaaaatatttccctgctcccttccgcaaattggttggcttt

SEQ ID NO: 27818 - DNA, 717 bp, Glycine max
  unsure (1)..(717): unsure at all n locations
  Clone ID: TF_GmC43_8
cgtttttctgcaattctcttcgttttcaagcgattttcttcgtttttctacgaattcacgccgtaaaactatcctgattgtgtgattgcagtatccgtcatgaaaggaggaaagtccaagaccgaatctaagagagccgatcccaaacttgctgtgaataagaagggagccgccaccaaggctaggaaacccgccggcaaggggaaggcagcgaaagaccctaacaagccaaagaggcctccaagtgctttcttcgttttcatggaggagttcaggaaggtattcaacaaagaacatcctgaaaacaaagcagtgtctgctgtgggcaaagctgctggagcaaaatggaagaccatgtctgatgctgaaaaagcaccttatgtggcaaagtctgagaaaaggaaagtggagtacgagaagaacatgagagcctataacaagaaacaggcggaaggtcctactggtggggatgaagaagaatctgagaagtctgtatctgaggtgaatgatgaagatgatgatgaggaaggcagtggcgaggaagaggatgacgattagagaatggactgataattgcatttatgtaggttctgatgattntgatcatctgttgtaggtggtctggtcatttcctgataaacatatttcttgcttccaaaaaatatttccctgctccctccgtaaattggttgtctttccaaaacgtgaatagtttaa

SEQ ID NO: 27819 - DNA, 551 bp, Glycine max
  Clone ID: TF_LIB3242-426-P1-J1-E4
cctgacttgtgcctagccttatgtcatagtattatcattcattctcatctttctctcttctctctccacccaaaccctggctcccgaccctgttcccctcgcgtatccgtcatgaaaggaggaaagtctcaagaccgaatctaagagagccgatcccaaacttgctgtgaataagaagggagccgccaccaaggctaggaaacccgccggcaaggggaaggcagcgaaagaccctaacaagccaaagaggcctccaagtgctttcttcgttttcatggaggagttcaggaaggtattcaacaaagaacatcctgaaaacaaagcagtgtctgctgtgggcaaagctgctggagcaaaatggaagaccatgtctgatgctgaaaaagcaccttatgtggcaaagtctgagaaaaggaaagtggagtacgagaagaacatgagagcctataacaggaaacaggcggaaggtcctactggtggggatgaagaagaatctgagaagtctgtatctgaggtgaatgatgaagatgatgatgaggaaggcagtggct

SEQ ID NO: 27820 - DNA, 654 bp, Glycine max
  Clone ID: TF_GmC2181_11
cacgaggagaaagaccccaacaagcctaaaagaccaccgagtgctttcttcgtgttcctgtttgtatcttctttgctctttcctttatatctctcccttggaaaaatggtatgacttatttcgttctctgtgatagtgaggagttcaggaagacctttaaggctgagaatcctctcgtgaaggctgtatcagttgttggaaaagctggaggagagaaatggaaatccctgtccagtgctgagaaagctccatatgaagccaaggctgcaaaaaggaaagctgagtatgaaaaacttatcaaagcttatgagaaaaagcaggcaagctctgcagatgatgatgaatcagacaagtccaaatctgaagtgaatgatgaagatgatgccagtggagaggaggaccaccaagaggacgaggatgatgaggaggaagaggacgatgaagatgatgactgagattgatgtccaaaaccttggttatgatattttgtttatgagggaggctattatatattctgactgtgcatactaggctactttttatgtttgtgctggtagaaaagaatgtcttctttgttggtacgatatattgccaactacttgagcttccctcacttagctatcgtacctgaatcactttttgtgcattgtagcc

SEQ ID NO: 27821 - DNA, 1176 bp, Glycine max
  Clone ID: TF_GmC43_6
attgaatttcaatttccctaggggcttaatatctccccgcatttgtgcctagcctcattattatcatagtagatattcattccccttatctttctctcttctctctccccgcccaaaccctaactccctaccctattccgctttctctcatccatcatgaaaggaggaaagtccaagaccgaatctaagagagccgatgccaaacttgctgtgaataagaagggcgccgccaccaagactaggaaacccgccggaaaggggaaggcagcgaaagatcctaacaagccaaagaggcctccaagtgctttcttcgttttcatgtaattataatatattgttatctctacgattcatttgacttccgatgcgctctcttatctttcctccgaataattttatcgtcaaaacttttatccttgtccaattgtaagtccacgcgttctttacctgttgttgtttgtttacctcgattgctttattgttaaaattatgttttttgagtatgctagatctagcttatgcttcgtgaaacttgatattactacacgccccgttgtttttatgattgtattgtggttgttttctgaaatttgtgttgtaattaaagggaggaattcaggaaggtgttcaacaaggaacatcccgacaacaaagcagtgtctgctgtgggcaaagctgctggagcaaaatggaagacgatgtctgatgctgaaaaagcaccttatgtggcaaagtctgagaaaaggaaagtggagtacgagaagaacatgagagcttataacaagaaacaggcggaaggtcctactggtggggatgaagaagaatctgagaagtctgtatctgaggtgaatgatgaggatgatgacgaggaaggcagtggcgaggaggaggatgacgattagagaatggactgatgataatagcatttatgtaggttctgatgattttgatcatccgtgtaggtggtctggtcatttccttataaacatatttctctttccaaaaaatatttccctgctcctccttccgtaaattgctcgtctttccaaaacgtgaatagtttaaagaagggagttctctttatttgtatttctaaatccaactgtttagttaagggatggttatctcttgtagagcttttagtttgatttagagttttcttgttgaaatctggtc

SEQ ID NO: 27822 - DNA, 574 bp, Glycine max
  Clone ID: TF_10843327
cacgaggcctcacttgtgcctagccttatgtcatagtattatcattcattctcatctttctctcttctctctccacccaaaccctaactcccgaccctgttcccctctcgtatccgtcatgaaaggaggaaagtccaagaccgaatctaagagagccgatcccaaacttgctgtgaataagaaaggagccgccaccaaggctaggaaacccgccggcaaggggaaggcagcgaaagaccctaacaagccaaagaggcctccaagtgctttcttcgttttcatggaggagttcaggaaggtattcaacaaagaacatcctgaaaacaaagcagtgtctgctgtgggcacagctgctggagcacaatggaagaccatgtctgatgctgaaaaagcaccttatgtggcagagtcttgagaaaggagagttgagtacgacgagaacatgagagcctatgacaagaaacaggcggaatgtgctacttggtgggatgatgaagaatctgaaaattctgtatctgatgtgaatgataaacatgatgataaagcatgcacctgctatgtagaggatgacgag

SEQ ID NO: 27823 - DNA, 961 bp, Glycine max
  Clone ID: TF_GmC1795_1
tacggctgcgaaagacgacagaaggggacacactgactcactgttctaattcatttctgaaatagaattccgttattctctctctctctctcttgtttcatcgatgggtggcacagttgttgctgaagtacccacaaagaggggaaggggcagaagggccctgaaggagaaaaccccatcaacgaacgatgctaacatcatcatagccacaccaatttcgccatcatccgaaaaggcggcacaagttgttccctcaaagaaaaaacaagattcaaagaagcagcaatctttcgaaaaagaattgctggagatgcaggaaatgctgcagcagatgcgcctcgagaaggagaagaccgaagagctcttgaaggtcaaggacgaggctctcaagctgaaggaagaagagcttgaaaaccgtggccgggagcaagagaagcttcagaccgagctcaaaaaattgcagaagttgaaggagtttaaacctaccatgaatttgcctgtgttgaaagataatgaagaaaagaaggataagaagaagaaggggtgctctgagaagaaacggccttctccaccttacattttgtggatgaaagaccaatggaatgagatcaagaaagcgaacccagaggctgaatttaaggaaatttcaaccatgctaggtgctaaatggaagactgttagtgcagaagagaagaagccttatgaggggatataccatgcggagaaagaagcttatttgcaggtgattgcaaaggaaaaacgtgaaactgaggcaatgaggttgttggaagacgagcagaagcagaggactgcgatggaattgcttgaacagtacatgcaattcaaacaagaggcaggaaaagatggccagaagaaccagaaagagaagaaacaacaggccgccaacgaccccttgtcgcctttgttcgcgttcgaaaaacgtgagactgaggcaatgagg

SEQ ID NO: 27824 - DNA, 2551 bp, Glycine max
  Clone ID: TF_GmC2151_1
gtttgtttgtttgtttgtttttttttcttctttctgttcttgttgggctgttattcccttttcggctcattgcagcattctacactgaacggcgtgtttggatggaagcctaaaaattgcgtcaattgagaaagctattactaatcacttggacgtgggacattcacgttcgcgcttcttttttctcttggcattgcgttaacgttgcgtttgtgtgtgcaattaatatcacacaacaaaaccttgttcgttcttctctgaactctctcattagtgtgagccgagagtcatgacggacggtcatctcttcaacaacatcaccctcggaggccgtggaggcaccaatccagggcagataaaaatatatcctggaggaattatatggaagagacagggtggtggtaaattaattgaagttgataaatctgacataatgggggtgacatggatgaaggtgcccaggagtaaccaacttggtgttcaaatcaaagatgggttgtactataagttcacgggatttcgtgaccaggatgttgtaagtttgaccaattttttccaaaacacctgtggaatatcagtagaagagaagcagctttctgttagcggacgtaattggggagaagttgatctaaatggaaatatgctggctttcacggttggttcaaagcaagcttttgaagtgtctttagcagatgtctctcaaacgcagcttcaagggaagaatgatgtgatcttggagtttcatgtggatgacacaactggagcaaatgagaaagattcactaatggagataagtttccatataccaaattccaacacccagtttgttggtgatgaaaatcgtccccctgctcaggttttccgtgacaaaattatgtctatggctgatgttggcgctggaggtgaagatgctattgttacatttgagggtattgcgatccttacaccaagaggacgatacagtgttgagttacacatgtcattcttgcggcttcaaggacaggctaatgatttcaaaatccaatatagcagtgtggttcgcctatttttacttcctaagtctaatcaaccacatacctttgtcattattagtcttgatccccctattcgaaagggacaaactttgtaccctcatattgtgatgcagtttgaaactgattatgttgttgaaagtgaattggcaataaatgaagatctttataacacaaagtacaaggacaagttggatctgtcttataaggggcttattcatgaagtgttcaccacaatattacgtggtttgtctggtgccaaagtgaccaagccaggaaaatttaggagttgtcaagatggctatgcagtgaaatcatctttgaaagctgaagatggaattctgtatccccttgagaagagcttcttctttctacctaaacctcccactcttattcttcatgaagagattgactatgtggaatttgagcgacatgctgctggtgggtccaatatgcattattttgaccttcttatcagactaaaatctgaacaagagcatctcttccgtaatattcagagaaatgagtaccacaatttgtatgaatttatcagttcaaagggcttgaaaattttgaacttaggagatgcacaacctactgttggtataaagaaggttcttgagaatgatgatgatgatgctgttgatccacatcttgaacgcataaaaaatgaagctggtggagatgaaagtgatgaggaggattctgattttgttgctgacaaggatgatgaaggttctcctactgatgattctggggcagacgattctgatgccactgatagtggtgatgagaaagagaagcctgccaaaaaggaatcaaagaaggatctgccttctaaggcatctacttctaaaaagaaatcaaaagatgatgaagatggaaagaagagaaaacagaagaagagaaaggacccaaatgcacccaagagggcaatgtctggtttcatgttcttttctaaattggaaagagagaatctaaagaaaactaatcctggaatttcatttacggatgtgtcaagagtacttggagagaaatggaaaaagttgtcagtggaagagaaggaaccatacgaggcaaaggcacgtgaagataaaaaacgttacaaggatgagattagtggctacaagaatccgcaacccatgaatattgattcaggaaatgaatccgacagtgcctaagctccgtatatttcttactggagtggtgatgacatctactctcatgctccgtaagttggcacatttatgctcttggaaatggcttgataacttgtgaacatgctcaagagttttgtgctctgttggtttgcatggctatagggaaggcagggacggtagagcttgatgtgttgagtaggttcctatgcttaattgaattagtggtctttgtgaattgtgacccaattttcgctaaatgacagtgcctctttttagagtttatgaccggcagatgtaggatttgtaacaatttttttgcttcaactctttgcacgaataggatttaaaatattagatcaa

SEQ ID NO: 27825 - DNA, 354 bp, Glycine max
  Clone ID: TF_LIB3108-006-Q1-K1-F10
cgttcacgcactctacaccgcacgcatctggacgcttcccctctccaccgagaccctaagcctaagttctcgcgatgaagggagtcaagccgaggaatcgcaccgtcaagcctgatgacaagctgggggctaagcggaagggcgccgacaaggtgagcaggcaggtgaagcgtgccaaggctggcaaggaccccaacgcgccgaagcgtcctccgaccgcgttcttcatcttcatggatgatttccgcaaggagttcaaggagaagaacccgaacaacaaatctgtggacactgtgagcaaagctgggcgtgacaagtggaaatcgatgtctgatgctgagaaagcaccctacc

SEQ ID NO: 27826 - DNA, 462 bp, Glycine max
  Clone ID: TF_LIB3242-726-P1-J1-G4
tggatcctctagagcggccgcttttttttttttttttttttttttttttttctgaagcaaaaaattgttacaaatcctacatcagttgggcataaacttgtgtcaatttacgaagcatatgagtagatgccatcaccagtaagaaatatacggctcatggcttacattagcttgctgcataagtatttataaaactgcaagattttttttcacagccttaggcactgtcagattcatttcctgaatcaatattcatgggttgtggattcttgtagccactaatctcatccatgtaacgttttttatcttcacgcgccttggcctcgtatgggtccttctcttccgcagacaactttttccatttctctccaagtactcttcccacatccgtaaatgaaattccaggattagttttctttagattctctctttccaatttagaaaagaacatgaaaccggaca

SEQ ID NO: 27827 - DNA, 414 bp, Glycine max
  Clone ID: TF_LIB3065-016-Q1-N1-B7
ctccccgcccaaaccctaactacctaccctattcggctttctcgcatccatcatgaaaggaggaaagttcaagaccgaatctaagagagcccatgccaaacttgctgtgaataagaagggcgccgtcaccaagactaggaaaccccccggaaaggggaaggcatcgaaagatcctaacaagccaaagaggcctccaagtgctttcttcgttttcatggaggaattcaggaaggtgttcaacacggaacattcctacaacaaagcagcgtctgctgtgggcaaagctgctggagcataatggaagacgatgtctgatgctgaaaaagcaccttatgtggcaaagtctgagaaaaggaaagtggagtacgagaagaacatgatagcttataacacgaaacatgcggaaggtcctac

SEQ ID NO: 27828 - DNA, 1031 bp, Glycine max
  Clone ID: TF_GmC1637_1
tacggttgggagaagctcgagccgaatgaggacacaagacgataacaaatggcatcatctcagtcgaggaagagagttgacgccgtcgattctcgcgctgcttccgttctcgttcgcgccaaagatggcagtgcttttgctcgttgcgacgattgcaagaagaatgtgccggttgcactcatcgacatgcacagttgcagccttgaagctaaaattaaaatgaacctagacgctcaagttgtggaacaggctgctgaagctaagaagccggagaggaagaagcccaaatctaaagagcctatggcaaaaaaaagctaaagttgggaaggggaagaaagtcaaggatcctaacatgcctaagcgtcctcccacagctttctttgtcttcttggatgattttagaaaatctttcaaagaagctaatcctgattctaaggatgttaaaagggttggtaaagaggctggtgaaaagtggaggtctatgactgatgaagagaagaagccatatcttgacaaagttgctgagcttaaggaagagtacgagaaggctatggaaagctatgaagctggtcaagatgaagaagatcaaactgtgtctgataaggaaacttctgataaggaagctgctgcaaaagaagttgcaatagaagttgaagaggagctaactgacgaggactaatggttgcattatggcactccttgaacttgatagctattattctaagggccacataattacttaacgactagggttgtaaattttggaacatgttttagttggagttaaaaactgttgaaatccatgcgcaatatcttttcattttttgtaatgctctcttgtgatgttcgtgaatggtagtcacattgttttctacaagaggcttgttggtctcttttaggattgattattgcttgcatatgtttgagcctttgaggcaattggtaaatagtctgatggctacagcgatattcattggattgacatgtgcgttgcattgaataggagttgcttagctttgttggcttgattc

SEQ ID NO: 27829 - DNA, 604 bp, Glycine max
  Clone ID: TF_uC-gmroLIB3258016f05a1
cgaagagcaacactcgtgtagatttacagagcatgagtagatgccatcaccagtaagaaatatactggaggggcatggcttacattagcttgatgcatgtcatacaacaattatctataaaacagcaggattcttttcaacatacaaacagccttaggaactatctgattcatttcctgaatcaatattcatgtgttgcggattcttctagccgctaatctcatccttgtaacgctttttatcttcacgtgcttttgcctcatatggttccttctcttccgctgacaactttttccatttctctccaagtactcttcccgcatccgtaaatgaaattccaggattagtcttctttagattctctctttccaatttagaaaagaacatgaaaccagacattgccctcttgggtgcatttgggtcttttttcttcttctgttttttcttctttccatcttcatcatcttttgatttctttttagaagtagatgccttaaaaggcagaaccttctttgattcctttttggcaggcttttttttctcatcaccactatcactgccatcagaaacatttgccccaaagtcattcggtgggagaaccttc

SEQ ID NO: 27830 - DNA, 778 bp, Glycine max
  Clone ID: TF_GmC9778_5
gccacataaggtgctttttcagcatcagacatggtcttccattttgctccagcagctttgcccacagcagacactgctttgttttcaggatgttctttgttgaataccttcctgaactcctccatgaaaacgaagaaagcacttggaggcctctttggctttgcgatttgatgtatctagaggaattcagccccagtatttcaagagtgcatttgtaggatacactgttggcttggtccttacaattgttgtgatgaactggtttcaggctgcacagcctgctcttttgtatattgtaccttctgtaattgggtttttggctgctcattgcttatggaatggtgatgtcaaacagttgttggagttcgatgagtcaaagactgccaattcacctcaagagagtgatgacgacaagtctagcaaaaaggttgaataagttgaagcgtgcccaataccaatactttcgagtcacagaaaaccgttacttttaaagctaacttattcagcagcacacctatgtaactgattttgattttaaaaaaatgtattacttatttttcaaattggcattttgcttttactgcctgactgcccgcccaatctgggtttccatagcaaacttttcaagaattttcttctcttttctctcgagcgcactcgtcaatgcaattattcgctgcctattttgaagtttgtttttcattttcagcggtgttccctttttaaaaaaagaaaaatttccccccccgtgtaccatgggtatgtggggctttttttt

SEQ ID NO: 27831 - DNA, 365 bp, Glycine max
  Clone ID: TF_LIB3108-030-Q1-K1-H7
acggccgatgccaaacttgctgtgaataagaagggcgccgtcaccaagactaggaaacccgccggaaaggggaaggcagcgaaagatcctaacacgccaaagaggcctccaagtgctatcttcgatctcatggaggaattcaggaaggtgttcaacattgaacatccagacaacaaagcagtgtctgctgtgggcaaagctgctggagcaaaatggtagacgatgtttgatgctgaaacagcaccttatgtggcaaagtctgagaaaaggaaagtggagtacgagaagaacatgagagcttataacaggaaccatgcgtaaggtacaactggtgaagatgaagaagaatctgacacgtttgcatc

SEQ ID NO: 27832 - DNA, 388 bp, Glycine max
  Clone ID: TF_8285483
gaaaggaggaaagaccaagaccgaatctaatagagccaatcccaagcttgctgtgaataaaagaggaaccgccaccaaggctaggaaacccgccggcaaggggaaggcagcgaaagaccctagcaagccaaagaggcctgcgagtgctgtcttcgatttcatagaggagttcaggaaggtgttcagcaaagaacatcctgaaaacaaagcagtgtgtgctgtgggcaaatctgctagaacaaaatggaagaccatgtctgatgctgaaaaagcaccttatgtggcagagtctgagaaaaggaaagtagagttcgagaagagcataagagcctatatcaagaaacaggcggaaggtcctactggtggagatgaagaagattctgagaag

SEQ ID NO: 27833 - DNA, 1551 bp, Glycine max
  Clone ID: TF_GmC2151_2
tatgtctatggctgatgttggtgctggaggtgaagatgccattgttacatttgagggtattgctatccttacgccaagaggacgatacagtgttgagttacacatgtcattcttgcggcttcaaggacaggctaatgatttcaaaatccaatatagcagtgtggttcgcctatttttacttcctaagtctaatcaaccacatacctttgtcattattagtcttgatccccctattcgaaagggacaaactttgtaccctcatattgtgatgcagtttgaaactgattatgttgttgaaagtgaattggcaataaatgaagatctttataacacaaagttcaaggacaagttggagctgtcttataagggtcttattcatgaagtgttcaccacaatattacgtggtttgtctggtgccaaagtgaccaagcccggaaaatttaggagttgtcaagatggttatgcagtgaaatcatctttgaaagctgaagatggaattctgtatccccttgagaagagcttcttctttctacctaaacctcccactcttattcttcatgaagagattgactatgtggaatttgagcggcatgctgctggtggctccaatatgcattattttgaccttcttatcagactaaaatctgaacaagagcatctcttcctaatattcagagaaatgagtaccacaatttgtatgaatttatcagttcaaagggcttgaaaattatgaacttaggagatgcccaacctactgttggtataaagaaggttcttgagaatgatgatgatgatgctgttgatccacatcttgagcgcataaaaaaatgaagctggtgaagatgaaagtgatgaggaggattctgattttgttgctgacaaggatgatgaaggttctcctactgatgattctggggcagacgattctgatgccactgatagtggtgatgagaaagagaagcctgccaaaaaggaatcaaagaaggatctgccttctaaggcatctacttctaaaaagaaatcaaaagatgatgaagatggaaagaagaaaaaacagaagaagaaaaaggacccaaatgcacccaaaagggcaatgtccggtttcatgttcttttctaaattggaaagagagaatctaaagaaaactaatcctggaatttcatttacggatgtgggaagagtacttggagagaaatggaaaaagttgtctgcggaagagaaggaaccatacgaggccaaggcgcgtgaagataaaaaacgttacatggatgagattagtggctacaagaatccacaacccatgaatattgattcaggaaatgaatctgacagtgcctaaggctgtgaaaaaaaatcttgcagttttataaatacttatgcagcaagctaatgtaagccatgagccgtatatttcttactggtgatggcatctactcatatgcttcgtaaattgacacaagtttatggccaactgatgtaggatttgtaacaattttttgcttcaactgttgcacgaatatgatttaaaatattggacggccgtttagagga

SEQ ID NO: 27834 - DNA, 429 bp, Glycine max
  Clone ID: TF_13477705
ctcgtatccgtcatgaaaggaggaaagtccaagaccgaatctaagagagccgatcccaagtaagtttcactcgcttttgatccaaccatgaattgtttgtttctcttacgattcgacgcttcttactgtgaaataatcaaaaaagctaaggttcacgaatttccagatctgagatctgagatctctgtttggtacggcgattatttcagatgtgtgcgttttactatattgtggttttttattctatttattttgctatgaatttcagacttgctgtgaataagaagggagccgccaccaaggctaggaaacccgccggcaaggggaaggcagcgaaagaccctaacaagccaaagaggcctccaagtgctttcttcgttttcatggaggagttcaggaaggtattcaacaaagaacatcctgaaaaca

SEQ ID NO: 27835 - DNA, 377 bp, Glycine max
  Clone ID: TF_LIB3039-016-Q1-E1-A3
aggggataagtaagtattcatctcaatcctcaacctttccctcttctctctcaaccaataccctacctcccgaccctgttcccctctcgtatcggtcattgaaagaggaaagtctaagaccgaatctaagagagccgatcccaaacttgctgtgaataagaagggagccgccatcaaagctaggatacccgccggcaaggggaaggcagcgaaagaccctaacaagccaaagaggcctccaagtgctttcttcgttttcatggaggagttcaggaaggtattcatcaaagaacatcctgaaaacaatgcagtgtctgctgtgggcaaagctgctggagcaaaatggaagaccatgtctgatgctgaaaaagcacctt

SEQ ID NO: 27836 - DNA, 478 bp, Glycine max
  unsure (1)..(478): unsure at all n locations
  Clone ID: TF_LIB3242-344-Q1-J1-E3
attccccttatctttttctcttctctctccccgcccaaaccctaactccctaccctattccgctttcttttatttattatgaaaggaggaaagtccaagaccgaatctaagagagttgatgccaaatttgttgtgaataagaagggtgccgttactaagactaggaaatttgccggaaaggggaaggcagcgaaagatcctaacaagccaaagaggcctccaagtgttttttttgttttcatggaggaattcaggaaggtgttcaacaaggaacatcccgacaacaaagcagtgtttgttgtgggcaaagctgctggagcaaaatggaagacgatgtctgatgctgaaaaagcaccttatgtggcaaagtctgagaaaaggaaagtggagtatgagaagaacatgagagtttataacaagaaacaggcggaaggtcttactggtggngatgaagaagaatttgagaagtctgtatctg

SEQ ID NO: 27837 - DNA, 370 bp, Glycine max
  unsure (1)..(370): unsure at all n locations
  Clone ID: TF_LIB3106-038-Q1-K1-C6
atctttctctcttctctctccacccaaaccctaactaccgaccctgttcccctctcgtgtccgtcatgaaaggaggaacgtccaagaccgaatctaagagagccgatcccaaacttgctgtgaataagaagggagccgccaccaaggctaggaaacccgccggcaaggggaaggcagcgaaagaccctaacaagccaaagaggcctccaagtgctttcttcgttttcatggaggagttcangaatgtattcaacaaagaacatcctgaaaacanagcagtgtctgctgtgggcaaagctgctggagcacaatggaagaccatgtctgatgctgaaaaaacaccttatgtggcacagtctgagaaaaggaa

SEQ ID NO: 27838 - DNA, 457 bp, Glycine max
  Clone ID: TF_LIB3242-707-P1-K1-B4
cttcccctggctgaagacaccagacgggggtgatagtattataattcattaccatctttcggtgtggtctgtccacccaaacgcctaactctcaacaccttgtcccctttggtatacgtcatgaatggcggaaagcccaacgcctaatctaaaacagccgaacccgaacttgctgtgaataacaaaggagcctacacctacgctaagcaactcgacgaaaaggggaaggcaccctaagacgctaacaagcccaacaggccttcaagtgctttctacggtttcatggacgagttcaggaaggtattcaacaaacaacatcctgaacacaaatcactgtctgcttggtcaaagctgctaagagcaaaactggacaccatgtctgatgctgaaaaagcaccttatgtggcgaagtgtgtgaacaggaaagtggtgtaccagatgaacatgacagcctata

SEQ ID NO: 27839 - DNA, 421 bp, Glycine max
  Clone ID: TF_LIB3242-762-P1-J1-A1
atccattctcatctttctctcttgtctctccacccaaaccctatctcccgaccctgttcccctatagtatccgtcatgaaaggaggaaagtccaagaccgaatctaagagagccgatcccaaacttgctgtgaataacaagggagccgccaccaaggctaggaaacccgccggcaaggggaaggctgtgaaagaccctaacaagccaaagaggcctccaagtgctttcttcgttttcatggaggagttcaggaaggtattcaacaaagaacattctgcaaacaaagcagtgtctgttgtgggcaaagctgctggagcaaaatggaagaccatgtctgatgctgaaaaagcaccttatgtggcaaactctgagaaaaggaaagtggtgtaccagaagaacatgagagcctataacaagaaac

SEQ ID NO: 27840 - DNA, 616 bp, Glycine max
  Clone ID: TF_GmC2181_34
ctattgggtcgtaccctcttctttagtttccaacagcctctctctctgcttttgctagtggtactgtctcttagctttgattctctgttctctgttttgttctgtttcgcgtacaggaacttaaacaatgaagactgcaaagggcaagggagcagcgaggccctcaaaagaatcactgaagcctgttgatgaccgaaaggttggaaagcggaaggcttctggtaagcctgagaaaagcagagcaccaaagaaggagaagaaggccaagaaagaccccaacaagcctaaaagaccaccgagtgctttcttcgtgttccttgaggagttcaggaagacctttaaggctgagaatcctctcgtgaaggctgtatcagttgttggaaaagctggaggagagaaatggaaatccctgtccagtgctgagaaagctccatatgaagccaaggctgcaaaaaggaaagctgagtatgaaaaacttatcaaagcttatgagaaaaagcaggcaagctctgcagatgatgatgaatcagacaagtccaaatctgaagtgaatgatgaagatgatgccagtggagaggaggaccaccaagaggacgaggatgatgaggagggagag

SEQ ID NO: 27841 - DNA, 975 bp, Glycine max
  Clone ID: TF_GmC2181_40
cggtgaaagccaattatcgggttgagtcgtgtggaggcaaggtaccaaagtctccaaaagtcaacaggtagatccggttgctttgatccgtttcgctctctattgggtcgtaccctcttctttagtttccaacagcctctctctctgcttttgctagtgattgtcttctgacaggaacttaaacaatgaagactgcaaagggcaagggagcagcgaggccctcaaaagaatcactgaagcctgttgatgaccgaaaggttggaaagcggaaggcttctggtaagcctgagaaaagcagagcaccaaagaaggagaagaaggccaagaaagaccccaacaagcctaaaagaccaccgagtgctttcttcgtgttccttgaggagttcaggaagacctttaaggctgagaatcctctcgtgaaggctgtatcagttgttggaaaagctggaggagagaaatggaaatccctgtccagtgctgagaaagctccatatgaagccaaggctgcaaaaaggaaagctgagtatgaaaaacttatcaaagcttatgagaaaaagcaggcaagctctgcagatgatgatgaatcagacaagtccaaatctgaagtgaatgatgaagatgatgccagtggagaggaggaccaccaagaggacgaggatgatgaggaggaagaggacgatgaagatgatgactgagattgatgtccaaaaccttggttatgatattttgtttatgagggaggctattatatattctgactgtgcatactaggctactttttatgtttgtgctggtagaaaagaatgtcttctttgttggtacgatatattgccaactacttgagcttccctcacttagctatcgtacctgaatcactttttgtgcattgtagccttaaatgggttgctttaagtaatataatttctttctgatcaatgcattggcaaaattataatttttagtaaaaaaaaaaaa

SEQ ID NO: 27842 - DNA, 358 bp, Glycine max
  Clone ID: TF_16347117
gaaaggaggaaagtccaagaccgaatctaagagagccgatgccaaacttgctgtgaataagaagggcgccgccaccaagactaggaaacccgccggaaaggggaaggcagtgaaagatcctaacaagccaaagaggcctccaagggctttcttcgttttcatggaggaattcaggaaggtgttcaacaaggaacatcccgacaacaaagcagtgtctgctgtggccaaagctgctggagcaaaatggaagaccatgtctgatgctgaaaaagcgccttatgtgggacactctcgaaaaaggaaagtggagcaccagaagaacctgagagcttactacatgaaacaggccggaaggccc

SEQ ID NO: 27843 - DNA, 454 bp, Glycine max
  Clone ID: TF_10232396
gaaaggaggaaagtccaaaacctaatctaagagagccgatgccccacttgctgttaattagatgggctccgacaccaagactaggaaacccgccagaaaggggaaagcagcgaaagatcctaacaagccaaagatgcctccaagtgctttcttcgttttcatggaggaattcaagaaggtgtccaacaaggaacatcccgacaacaaacctgtgtctgctgtgggcaaatctgctggggcaaaatggaagactatgtctgatgctgaaaaagcaccttatgtggcagagtctgagaaaaggaaagtggattacgagaagaacatgagagcttataacaagaaacaagcggaaggtcctactggcggggatgaagaagaatctgagaagtctgtatctgaagtgaatgatgatgatgatgacgatgaatgcattggcgaggatgacgatgacgat

SEQ ID NO: 27844 - DNA, 408 bp, Glycine max
  Clone ID: TF_LIB3242-711-P1-K1-H1
aacggttgcaagaagacaacagaaggggacaacacaacgcgtgagaacgcgcactatgtcttggctcatctaaacacaaaaaccctatcggtattcgtggtttcggcgattctcgacatgccgaaagccaaatacgacgccaaagccgtcgataagccggatgaagcgcaagggcgctggtgctggaaggaagcaatcgaagaaagctgctaaagatcctaacaagccaaagagacctccaagcgctttctttgatttcatgtccgagttcagagagcagtataagaaggagcatactaacaacaaattcagcggtgttgtcagtaaagctggtggagacaaatggaaatggctgtctgaagctgaaaaggccctatttgttgccacggtcgaaagaagaaacaagag

SEQ ID NO: 27845 - DNA, 1303 bp, Glycine max
  Clone ID: TF_GmC11_1
gttttctctacactgcccttcctcgcaacccttcttatccccgcgctcgcgcgacaaaacctcacaacacaacacaacgcgcactctctctttttctctctgtttttcggctcctaggctgccccgccccacgcgtccgcccacgcgtccgcacggctgcgagaagacgacagaaggggacaacacaacgcaacacaacgcgcactctctcttttctctcttaacacaaaaaccctatcgttcttcgcggtttcgccgattctcgccatgccgaaagccaaatccgacgccaaagccgccgatagccggttgaagcgcaagggcgctggtgctggaaggaagcaatcgaagaaagctgctaaggatcctaacaagccaaagagacctccaagcgctttcttcgttttcatgtccgagttcagagagcagtttaagaaggagcatcctaacaacaaatccgtcgctgttgtcggtaaagctggtggtgacaaatggaaatcgctgtctgatgctgaaaaggcccccttcgttgccacggccgaaaagaagaaacaagagtatgagaaaactattttggcttacaataagaaattggaggggaagaattcagaggaagacgagtctgacaagtcaaagtctgaagtcaatgacgatgaggaagatgaggaggaggaggatgatgatgacgacgagtgaagatggtgatacaagatgaagcgtaggaggatgtgggaaaagaaaattgttttgcatagtagttgttgggtttagaatttcataggatggttcccaacccacatccctttatgataattagtttctgaatttttattttgtcctcccttactagggttagattagcgcacaatcgtaattagggttcagtatcatgatcatgtacttaaaagtcaatgctatgatacgtttcaattctattctcgaagaaattccacagccactagcgattaatatcatgatcctgtacttaaagtcaatgttatgatacgtttctattctattctcgaaaaaaaaaaataaaaaaaagagtagttgttgggtttagaatttcataggatggttcccaacccacatccctttatgataattagtttctgaatttttattttgtcctcccttactagggttagattagcgcacaatccgtaattagggttcagtatcatcatgatcatgtacttaaaagtcaatgctatgatacgtttccattctattctcgaagagaagaaaaaaaaaaaaaaaaaaaaaaaaacggccgctgtataggatccaagcttatgtacgc

SEQ ID NO: 27846 - DNA, 884 bp, Glycine max
  Clone ID: TF_GmC11_2
tggatcccctggctcgcgcgctcagacaagacaacacaacacaacgcgcactctctctttttctctctgttttttgttctctcttcgcttaaaccctatcgttcttctcgttttcgccgattctcgccatgccgaaagctaaatccgacgccaaagccgccgatagcaggttgaagcggaagggcgctggtgctgggaggaagcaatcgaggaaagctgctaaggaccctaacaagccgaagagacctccaagcgctttcttcgttttcatgtccgagttcagagagcagttcaagaaggagcatcctaacaacaaatccgtcgctgttgtcggcaaagctggtggtgaaaaatggaaatcgctatctgatgctgaaaaggcccctttcgttgctactgctgagaagaagaaacaggagtatgagaaaactatttcggcttacaataagcaattggagggaaagaattcagaggaagacgagtctgacaagtcaaagtctgaagtcaatgatgacgaggaagatgaggaggaggatgatgatgacgacgagtgaagatggtgatacaagatgaagcgtaggaggatgtgggaaaagaaaattgttttgcatagtagttgttgggtttagaatttcataggatggttcccaacccacatccctttatgataattagtttctgaatttttattttgtcctcccttactagggttagattagcgcacaatcgtaattagggttcagtatcatgatcatgtacttaaaagtcaatgctatgatacgtttcaattctattctcgaagaaattccacagcctctttcaactttcccttttaaaaaaaaaaaaaaaaaaaaaaaaagcgaccgccctacaggatgcagcta

SEQ ID NO: 27847 - DNA, 448 bp, Glycine max
  Clone ID: TF_10844802
gaaaagaggaaagttcaataccgactctaatagagcctatcccaaacttgctgtgaataataagggagccggcaccaaggctaggatacccgccggcaacgggaaggcagttaaagaccctaacaagccaaataggcctgccagtgctatctttgttctcatggaggagttcaggaatgtattcaacaaataacatcctgaaaacaaagcactgtctgctgtgggcaaagctgctggagcaaaatggaagaccatgtctgatgctgaaaaagcaccttatgtggcatagtctgagaaaaggaaagtggagtacgagaagaacatgagagcctataacaagaaacaggcggaatgtcctactggtggggatgaagaataatctgagaagtctgtatctgatgtgaatgatgaacatgatgatgagcaaagcgatggcgaggaagaagat

SEQ ID NO: 27848 - DNA, 725 bp, Glycine max
  Clone ID: TF_GmC34041_1
cccacgcgtccgacgacggaaaggggacgacagaagtgggtagtgtgtagtcaccaaacaaacatggcgaaaaaggcaaaagggtctcactctgcctcttctgcctctgcatcttcttcgtccgacaaactagtgctgaggattaaatcaaatgaggggaccaagagatcagtgcggcaaactaattcaagaaagaaacttaaagcaaagcaaaagaagaacaaacaaaagtttgatgctatgaaacccaggaaacctcctacagctttcttctacttcttggaggattttcgtaaagaatttcaagagcagaatccagatgtaaagtcaatgcgtgatattggcaaggcatgtggagagaagtggaaaacaatgacttatgaggagaaggtacaatactatgatatagcaacaaaaaaacgtgaagaatttgatagcgcaatggcagaatttaacaagaaaatggaaaatggcgagtttgacgaaactgatgatgaatcagagtttgatgagtaaagccacccttatttttcttactaggttggatctgtattaactgaaactacttggactaacagttgtacattcagttatcatcagcttttttctgtccttgctgatacttataatttctgtgtgtcatatgttaaatatatttgttgtatttagatgtttaatatggcaatttgggttctgtcaaaaaaaaaagaggcaatttgggccat

SEQ ID NO: 27849 - DNA, 931 bp, Glycine max
  unsure (1)..(931): unsure at all n locations
  Clone ID: TF_GmC1637_2
ttcttcccacgcgtccgcccacgcgtccgggcacgcttacttccacgcgtgcgttctgctgccagaagacgacagaagggggagtgagtgagggcattgttgtttaggtacagaaaaatggcatcatctcagtcgaagaagagagttgacgctgtcgattctcgcgctgcttccgttctccttcgcgccaaagatggaagtgcttttgctcgatgcgacgactgcaagaagaatgtgccggttgcactcatcgacatgcacagttgcagccttgaagctaaaattaaaatgaacctagatgctcaagttgtggaacaggctgctgaagctaagaagccagagaggaagaagcccaaatccaaagagcctatggcaaaaaaggctaaagttgagaaggtgaagaaagtcaaagatcctaacatgcctaagcgtcctcccacagccttctttgccttcttggatgattttagaaaatctttcaaggaagctaatcctgattctaaggatgttaaaagggttggtaaagaggctggtgagaagtggaggtctatgactgatgaaaagaagaagccttatttggataaagttgctgaacttaaggcagagtatgagaaggctatggaaagctatgaagctggtcaagatgaagaagatcaagctgggtctgacaaggaagctgctgcaaaagaagttgaagaagagctaactgacgaggagtaatggtggcattttggcactccttaaacccgatgactactattttaagggccacatattgcttagacagactagggttgtaaattttggaacatgttctagttggagttaaatgccgttaaaatccgtgcgcaatatttttttttttttgtaatgtacatgaatggtagtcactttgttttccaaaaaaaaaaaaaaaaaaattnntttttaa

SEQ ID NO: 27850 - DNA, 913 bp, Glycine max
  Clone ID: TF_GmC2181_47
gtggtactgtcttagctttgattctctgttctctgttttgttctgtttcgcgtgtaagttcccctgttcctcttttcctctttctaagattgtcttcatacaggaacttgaacaatgaagaatgcaaagggcaagggagcagcaagggcctcaaaagaatcactgaagcccgttgatgaccgaaaggttggaaagcggaaggcttccggtaagcctgggagaagtagtgcaccaaagaaggagaagaaggccaagaaagaccccaacaagcctaaaagaccacccagtgctttctttgtgttccttgaggagttcaggaagacctttaaggctgagaatcctaatgtgaaggctgtatcagttgttgggaaagctggaggagagaaatggaaatccttgtccagtgctgagaaagctccatatgaagccaaggctgcgaaaaggaaagctgagtatgaaaaacttatcaaagcttatgataaaaagcaggcaagctccgcagatgatgaagaatcagacaagtccaaatctgaagtgaatgatgaagatgatgccagtggagaggaggaggaagaggatgatgaggaggaagaggacgatgaagatgatgactgagattgatgtccaaaaccttggttatgatgttttgtttgtgaaggaggctattatatattctgattgtgcatactaggctacttttttatatttgtgctggtagaaaagaatttcttcttttgttggcatgatatactctaccaactacttgagcttccctcacttagctatcgtacctgaatcactctttgtgcattgtagccttacatgggttgctttaagtaatataatttctttctgatcaatgcattgttataattatagttattagtataaatggaattatcattttctgatc

SEQ ID NO: 27851 - DNA, 334 bp, Glycine max
  Clone ID: TF_LIB3040-017-Q1-E1-G12
gatgtgatagtattatcattcattcgcatcggtctcacttctctctccacctataccctaactcacgacactgtacccctctcgaatccgtcatgacacgaggaaagtccaagaccgaatctaagacagcagattgcaaacttgctgtgaataataagggagccgcgaacaatgctaagaaactcgccggcaacgggaatgcagcgaaagatgctaacaagcgaaagaggcctccaagtgcattcttcgttttcatggaggaattcacgaatgtattcaacaaagaacatcctgaaaacaaatcagtgtctgctgttggcaaaactgctggagc

SEQ ID NO: 27852 - DNA, 378 bp, Glycine max
  Clone ID: TF_11689089
accctaactatcgaccctgttcccctctcgaatccgcattgaatggaggaaagccctagaccgattttaagagaaccgatcctaaactagctgcgaatatgagcggagcctccaccaatgctaggaaacccgccggcaaggggaaggcagcgaaagaccctaacaagccaaagaagccttcaaatgctttcttcgttttcatggaggagttcaggaaggtattcaacaaagaacatcctgaaaacaaagcagtgtctgctgtgggcaaagctgctggagcaaaatggaagaccatgtctgatgctgaaaaagcaccttatgtggcaaagtctgagaaaggaaagtggagtacgagaagaacatgacagcctataacaa

SEQ ID NO: 27853 - DNA, 408 bp, Glycine max
  Clone ID: TF_uC-gmflLIB3275P072h03b1
ttgcccttaggttttggaaacccgccggcaaggggaaggcagcgaaagaccctaacaagccaaagaggcctccaagtgctttctacgatttcatggaggagttcaggaaggtattcaacaaagaacattctgaaaacaaagcagggtcagctgggggcaaagctgctggagcaaaatggaagaccatgtctgatgctgaaaaagcaccttatgtggcaaagtctgagaaaaggaaagtggagtacgagaagaacatgagagcctataacaagaaacaggcggaaggtcctactggaggggatgaagaaaaacctgagaagcctgtatctgaggtgaatgatgaagacgatgatgaagaaggcagtggcgaggaagaggatgaccaatagagaatggactgacaattgc

SEQ ID NO: 27854 - DNA, 587 bp, Glycine max
  Clone ID: TF_LIB4391-014-R1-K1-E6
ttctcatctttctctcttctctctccacccaaaccctaactcccgaccctgttcccctctcgtatccgtcatgaaaggaggaaagtccaagaccgaatctaagagagccgatcccaaacttgctgtgaataagaagggagccgccaccaaggctaggaaacccgccggcaaggggaaggcagcgaaagaccctaacaagccaaagaggcctccaagtgctttcttcgttttcatggaggagttcaggaaggtattcaacaaagaacatcctgaaaacaaagcagtgtctgctgtgggcaaagctgctggagcaaaatggaagaccatgtctgatgctgaaaaagcaccttatgtggcaaaagtctgagaaaagggaagtggagtacgagaagaacatgagagcctataacaagaaacaggcgggaaggtcctactggtggggatgaaagaagaatctgagaagtctgtatctgaggtgaatgatgaagatgatgatgaaggaagccagtggcgaagaaaaagatgacgattaaaagaaggactggtaattgcatttatgtagggtctgatgattttgatcactctgt

SEQ ID NO: 27855 - DNA, 409 bp, Glycine max
  Clone ID: TF_4260356
gaaagggggaaagttcaagaccgaatctaagagagccgatgccaaacttgctgtgaataagaagggcgccgccaccaagactaggaaacccgccggaaaggggaaggcagcgaaagatcctaacaagccaaagaggccttcaagtgctttctttgtttttatggaggaattcaggaaggtgttcaacaaggaacatcccgacaacaaagcagtgtctgctgtgggcaaagctgctggagcaaaatggaagaccatgtctgatgctgaaaaagcaccttatgtggcaaagtctgagaaaaggaaagtggagtacgagaagaacattagagcttataacaagaaacaggcggaaggtcctactggtggggatgaataagaatcttagaagtctgtattttacgtgaatgat

SEQ ID NO: 27856 - DNA, 388 bp, Glycine max
  Clone ID: TF_7146626
gaaaggaggaaagtccaagaccgaatctaagagagccgatgccaaacttgctgtgaataagaagggcgccgccaccaagactaggaaacccgccggaaaggggaaggcagctaaagatcctatcgagccaaagaggcctccaagagcattcttcgttatcatggaggaattcaggaaggtgtgcaacaaggaacatcccgacaacaaagcagagtctgctgtgggcaaagctgctggagcaaaatggaagacgatgtctgatgctgaaaaagcaccttatgtggcaaagtctgagacgacgagagtggagtacgagaagatcatgatagctcataacaagaaacaggcggaacgtcctactagtggggatgaagaagaatctgagaag

SEQ ID NO: 27857 - DNA, 423 bp, Glycine max
  Clone ID: TF_20075468
cataaaaaaaagtatccaactgaaaatgtccaagtaacagaaattacaaaaaaatgttctgaaaaatggaaaacaatgtctgatgatgagaaaagacgtttttacgagctagcacaaaaagatgcagaaagatatcaagctgaagtagctgcatatggcggtgatgatgtaactaaaaagcgtaaaataactaaaaaagatccaaatgcaccaaaacgtgctttatctgcatttttctttttttcaaatgaagaacgaccggaagtacaacgtcagcatccagaatggaaagttggacaggtagcacaagagctaggaaagttttggaaaaatctgcctgatgaagagaaggcgatttatgaaaacaaggcaactgaggaccaagaacgatatgcacaggaaatgaaaacctaccgaggcgaa

SEQ ID NO: 27858 - DNA, 652 bp, Glycine max
  Clone ID: TF_7147175
gcaccaggccaaacttgctgtgaataagaagggcgccgccaccaagactaggaaacccgccggaaaggggaaggcagcgaaagatcctaacaagccaaagaggcctccaagtgctttcttcgttttcatggaggaattcaggaaggtgttcaacaaggaacatcccgacaacaaagcagtgtctgctgtgggcaaagctgctggagcaaaatggaagacgatgtctgatgctgaaaaagcaccttatgtggcaaagtctgagaaaaggaaagtggagtacgagaagaacatgagagcttataacaagaaacaggcggaaggtcctactggtggggatgaagaagaatctgagaagtctgtatctgaggtgaatgatgaggatgatgacgaggaaggcagtggcgaagaggaagatgacgattagagaatggactgatgatgatagcatttatgtaggttctgatgattgtgatcatccgtggtagtgggctgggtatgtccttataacatatttctcttggccgaaaaaattgccctgctcttcttgcataagtgggcgcggtttcaaaccggaaatgttaaaaaaaggaagtcgtctttatttgtttgctagaacgactgttaggttaaggatgggattgtctgttgaact

SEQ ID NO: 27859 - DNA, 1136 bp, Glycine max
  Clone ID: TF_GmC43_2
cccacatcgtgcgaagagaacagagacatacgctcaggaaaagcgcacggatcaatgacatggcaataaatttaaattcccgcctaaacccctgaccttcccgggatttcatttcgtttgcaattgaatttcaatttcccttccgcccacgcgtccgtacggctgcgagaagacgacagagattatcatagtagatattcattccccttatctttctctcttctctctccccgcccaaaccctaactccctaccctattccgctttctctcatccatcatgaaaggaggaaagtccaagaccgaatctaagagagccgatgccaaacttgctgtgaataagaagggcgccgccaccaagactaggaaacccgccggaaaggggaaggcagcgaaagatcctaacaagccaaagaggcctccaagtgctttcttcgttttcatggaggaattcaggaaggtgttcaacaaggaacatcccgacaacaaagcagtgtctgctgtgggcaaagctgctggagcaaaatggaagacgatgtctgatgctgaaaaagcaccttatgtggcaaagtctgagaaaaggaaagtggagtacgagaagaacatgagagcttataacaagaaacaggcggaaggtcctactggtggggatgaagaagaatctgagaagtctgtatctgaggtgaatgatgaggatgatgacgaggaaggcagtggcgaggaggaggatgacgattagagaatggactgatgataatagcatttatgtaggttctgatgattttgatcatccgtgtaggtggtctggtcatttccttataaacatatttctctttccaaaaaatatttccctgctcctccttccgtaaattgctcgtctttccaaaacgtgaatagtttaaagaagggagttctctttatttgtatttctaaatccaactgtttagttaagggatggttatctcttgtagagcttttagtttgatttagagttttcttgttgaaatctggttaagtttgtatcaatataattgacttatcatcccctttctgctgtatatatgcgatttatgttttttagttcctgaaaaaaaaaaaaaaaaaaaaaaaaaaaaaagcggccgctctagaggatcca

SEQ ID NO: 27860 - DNA, 896 bp, Glycine max
  unsure (1)..(896): unsure at all n locations
  Clone ID: TF_GmC43_7
ggctcgagttgcaattgaatttcaatttccctaggggcttaatatctccccgcatttgtgcctagcctcattattatcatagtagatattcattccccttatctttctctcttctctctccccgcccaaaccctaactccctaccctattccgctttctctgtacgtatttcccctcaattttcttcgtctttccggaattctcttcgttttccggctattttcttcagttttctacgaattcctgacctaaaaactaacctgattgtgtgattgcagcatccatcatgaaaggaggaaagtccaagaccgaatctaagagagccgatgccaaacttgctgtgaataagaagggcgccgccaccaagactaggaaacccgccggaaaggggaaggcagcgaaagatcctaacaagccaaagaggcctccaagtgctttcttcgttttcatggaggaattcaggaaggtgttcaacaaggaacatcccgacaacaaagcagtgtctgctgtgggcaaagctgctggagcaaaatggaagacgatgtctgatgctgaaaaagcaccttatgtggcaaagtctgagaaaaggaaagtggagtacgagaagaacatgagagcttataacaagaaacaggcggaaggtcctactggtggggatgaagaagaatctgagaagtctgtatctgaggtgaatgatgaggatgatgacgaggaaggcagtggcgaggaggaggatgacgattagagaatggactgatgataatagcatttatgtaggttctgatgattttgatcatcccgtgtanngtggtctggtcatttccttataaacatatttctctttccaaaaaatatttccctgctcctcccttcgtaaattgctcgtctttccaaac

SEQ ID NO: 27861 - DNA, 2000 bp, Glycine max
  Clone ID: TF_GmC1089_1
ggctcgagcaacaacccccaacacggagccattaccggtttcgactgcgccctctttctctttttttccccctttctttctatctcttcttctcttcactcaccctccgtacaacacatcatgtgagcgtttcgctggtttctaccctctcgtagctgtccatgctcccaaattctgcaaattgcaaccctcttttattatcacagtccctagtccaagtactcatatgccttatttcttgtacttgtcccccaacacaaaacatcacacaagtgctgatggtggtgtggcccttcttattatttcatcttacaacaaccactcattaccaatccctcaactattttagggttcagaaacccttagggttttcttgttcctcatagtggattgagtagtacctcttggtttgtttgttggagcctctcgttcagctgggttaattagctgagtgagagagttttttgcttcccaatttcaaaaatttaatggaggaatacactaataacaatcacttgagtgaaaacacaggtcctagtccaagtactccaaggccaaatttcttgtactcttcagctagtggtggaaaccataatcatcagcatcagcatcatagccatcaccaccaccatcaccaccagtttccaatcaacacctttcatcttcaatcgggtggatcagatcattgctttcagtctgatcaagtttcaccacacccttctgtcaaatccgaagccagcacttctcagcttcacgctccgattttccactaccctttaatgagaggaaatcttcacaacactatgcatcatcatcatcctcagcaacaacaaggagggagcccaactagctccactggtgaagttgaagccataaaagctaaaatcattgctcaccctcagtactctaatcttttagaagcctacatgtttaatttgtagataggagctccacccgaagtggtggcgcgtatggctgcggctaagcaagagtttgaggcacggcaaagatcttcagttggttcaagggaaacttcaaaagaccctgaacttgaccaattcatggaagcatactatgacatgcttgtgaagtatagagaggaattaacaaggcctattcaagaggctatggatttcatgcgaaggatagaaactcagctaaatatgctttgcaatggacccgtgcggatcttctctgatgataaatgtgaaggtgccggttcatcagaagaggatcaagacaacagtggaggagaaacagaacttcccgagattgatccccgagcagaagaccgtgaactcaaaaaccacttgctgaagaagtacagtggttacttaagtagccttaagcaagaactctccaagaagaaaaagaaagggaaacttcccaaagatgctaggcaaaagctacttaactggtgggaattacattacaaatggccatatccttcggaatcagagaaggtggcattggctgaatcaactggtttggaccaaaagcaaataaataactggttcataaaccagaggaagaggcattggaaaccatctgaagacatgcaatttatggtgatggatggcctgcatccgcagagtgcaactctctatatggatggtcactacatggcagatggtcactaccgtctaggaccatgacaaaagacaaggccaccttataaattattattatatatatttttaattgtaatttaaatgcaaggtatgtgtttcttattaacaaagagattgtgcccaaactggataacagtcaacgctctagctactagtttcaatattatcaagcatataccgtgaacattaattggttgtgcttgtgcagtgtgagtacttgagtagtttgccacagtgatgttgtacgttttattaaacaatgacggttgcttattatattttcataattagtagtattggtagagataatatttattcataagatgtgttacgtacatttggattttaatttctaagatgtgctaacct

SEQ ID NO: 27862 - DNA, 417 bp, Glycine max
  Clone ID: TF_LIB3242-137-Q1-J1-H8
catcatttgaaaaccttggtttttttgcttcaggcttccaactgctgtatccactgcctgagccaccatcttctatgctgttttctttgccatccttgtcttcccttccaccatcttgagatgtcaccaccaaatcacttagcttctgcaactgtttcaaaaaaaaaaaaaataacacagttaagggtcacaagctttaatttgttgagcatcattagcaacacaaataagtagtattgttaaaagaaccaaaaactaattacctctaattgcaaagagtccttctctttctttagggactcaaaccttgatgctaaattgtcatattcatctttgagttttctgtactcttgctctatgcgctttgatttccaccttgcccttctgttttggaaccatatggcaacttggcgaggc

SEQ ID NO: 27863 - DNA, 2081 bp, Glycine max
  Clone ID: TF_GmC1144_1
cgcgggccttagcgagaagacgacagaaggggatggtcagtagtaggtaacttgttttctcttcctcgatttgatcgatcgttccttctctctcttgtgtttatgccaggaatgacagcgtatcagtggcagtgcaggaaacgagagggagagttttcattgggaaggtaaaagcctttgtttgtagcagtgccttacatgaaccctcgccccccttctcttgttcgctaccactaactcatcgttttctcagtgtgccccgcgtgcgttctgctgtgtcctctcactcacaggtgtaaccgtgtaaccactagaatcatacttagtggcatggaaagaaagaaagaaagattaacctaaaaaccctgtgcaggctttcccagaaaagccaagtgagaaaaccaaaccctctattaccacttactacttacttcatgtaactgactatagccaccactatcactatttaggattttctgtaaaaagcctgatactcttttaccataaaacccgggagagccctcataataaaattgagagagagaataagagaattgtgtgtcgtgtttgtttttgtttggtttgttgtaaggttagctagtgagtattctacacaagggtggtggtagggcaaaaaggataagacagtgaatgtgtgtgtgtgtgtgtgtgtgtgtgtgttgttgacaagcaaaagctatggagggtggtagtagtagctctaatggcacttcttatctgttggcttttggagaaaacaacagtggtgggctatgcccaatgacgatgatgcctttggtgacttcccatcacgctggtcatcatccaataaatcctagtaataataataatgtaaacacaaactgtctcttcattcccaactgcagtaacagtactggaactccttctatcatgctccacattaatcacaacaacaacaaaactgaagatgatgataacaacaacaacagtggtgtagggtactatttcttggaacttgtccaccaccaacatcacgagggaaacaacaccaacagaggacgctcatcctctgcttcctcttctgctgccaaggccaagatcatgtctcaacctcactatcaccgtctcttggcagcttacgtcaattgtcagaaggttggggccccgcctgaagtggtggcaaggttagaagaagcatgtgcttctgcagcgacaatggctggtggtgatgcagcagctggatcaagctgcataggtgaagatccagctttggatcagttcatggaggcttactgtgagatgctcacaaagtatgagcaagaactctccaaacccttaaaggaagccatgctcttccttcaaaggatcgagtgccagttcaaaaatcttacaatttcttcctccgactttgctagcaatgagggtggtgataggaatggatcgtctgaagaggatgttgatctacacaacatgatagatccccaggcagaggacagggatttaaagggtcagcttttgcgcaagtatagcggatacttgggcagtctgaagcaagaattcatgaagaagaggaagaaaggaaagctacctaaagaagcaaggcaacaattacttgaatggtggaacagacattacaaatggccttacccatccgaatcccagaagctggctcttgcagagtcgacaggtctggatcagaagcaaatcaacaactggtttattaatcaaaggaaacggcactggaagccttcagaggacatgcagtttgtggtgatggatccaagccatccacactattacatggataatgttctaggcaatccatttcccatggatctttcccatcccatgctctagaaaattatccctcgtttgtgggctgctgataatagattcataaactcgtgctgtcacttattaaaaccttacaattattaatattaattaatatgcattctaagaaatcctagattgctatactataatatagtacgcaggtgtatcccttgctagctttttagacggtcctttgtgtggatcatctagttgaaggagttatgaataaataaaattccataaatttaaagtttttaaaaacc

SEQ ID NO: 27864 - DNA, 730 bp, Glycine max
  unsure (1)..(730): unsure at all n locations
  Clone ID: TF_LIB4390-053-R1-K1-H4
gtttaagtagaataattatttgtcaatcatatcacaacatgtttatccttttacttactatataatccttttagtatccaattaatgttatcataaattgaatcgattcatatgatgatcagctagcaatgagggtggtgataggaatggatcgtctgaagaggatgttgatctacacaacatgatagatccccaggcagaggacagggatttaaagggtcagcttttgcgcaagtatagcggatacttgggcagtctgaagcaagaattcataaagaagaggaagaaaggaaagctacctaaagaagcaaggcaacaattacttgaatggtggaacagacattacaaatggccttacccatccgaatcccagaagctggctcttgcagagtcgacaggtctggatcagaagcaaatcaacaactggtttattaatcaaaggaaacggcactggaagccttcagaggacatgcagtttgtggtgatggatccaagccatccacactattacatggataatgttctaggcaatccatttcccatggatctttcccatcccatgctctagaaaattatccctcgtttgtgggctgctgataatagattcatanactcgtgctgtcacttattanaaccttaccantatttatattaattaatatgcattctaagaaatcctagattgctatactantatatagtacgcaaggtgtatcccttgctagctttt

SEQ ID NO: 27865 - DNA, 1351 bp, Glycine max
  Clone ID: TF_GmC1144_2
ctcgagccgaatcggctcgagtggagaaaacagtggtgggctatgcccaatgacgatgatgcctttggtaacttcccatcatgcaacaaatcctagtaatcctagtaataatactaataataatgaaaacacaaactgtctcttcattcccaactgcagtaacagttctggaactccttctatcatgctccacaacaacaacactgatgatgataacaacaaaaccagcactaacactgggttagggtactatttcatggagagtgaccaccatcaccgcaacaacaacaacaatggaagctcctcctcctcttcctcttctgctgtcaaggccaagatcatggctcatcctcactatcaccgtctcttggcagcttacgtcaattgtcagaaggttggagccccaccggaagtggtggcaaggttagaagaagcatgtgcttctgcagtgacaatggctggtgatgcagcagcagcagctggatcaagctgcataggtgaagatccagctttggatcagttcatggaggcttactgtgagatgctcaccaagtatgagcaagaactctccaaacccttaaaggaagccatgctcttccttcaaaggattgagtgccagttcaaaaatcttacaatttcttccaccgactttgcttgcaacgagggtgctgagaggaatggatcatctgaagaggatgttgatctacacaacatgatagatccccaggcagaggacagggaattaaagggtcagcttttgcgcaagtacagcggatacctgggcagtctgaagcaagaattcatgaagaagaggaagaaaggaaagctacctaaagaagcaaggcaacaattacttgaatggtggagcagacattacaaatggccttacccatccgagtcacagaagctggcccttgcagagtcgacaggtctggatcagaagcaaatcaacaactggtttattaatcaaaggaaacggcactggaagccttcagaggacatgcagtttgtggtgatggatccaagccatccacactattacatggataatgttctgggcaatccatttcccatggatctctcccatccaatgctctagaaaagtatccatcctttgtgggctgataatagattcataagctcgtgctgtcacttattaaaaccttaagcaattattaattaatatgctttctagtgctcatataagcattctaagaaatcctagattgctatatactatatttatagtacgcaggtgtatcctgctagcttaaagagacggtcctttgtgtggatcatctagttcaaggagttatgaataaataaaattccataaatttaaagctaaaaa

SEQ ID NO: 27866 - DNA, 898 bp, Glycine max
  Clone ID: TF_GmC1144_3
aattcggctcgagctcttggcagcctacgtcaattgtcaaaaggttggggctccgcctgaagtggtgggaaggttagaagaagcatgtgcatctgctgcagtgataatggcaggtggaacagccagcataggcgaggatccagcgctggatcagttcatggaggcttactgtgagatgctgatcaagtacgagcaagagctctccaaacccttcaaggaagccatgctctttcttcagaggatcgagtgccagttcaaatctctcactatttcttcttctttggacactactgcgtgtaatgaagctattgataggaatgggccatctgaagatgttgatgttcagaccaacataatagatccgcaggcagaggaccaagaactgaaaggtcaactcttacgcaagtaccgtggatacctaggcagtttgaaacaggaattcaccaagaagagaaaaaagggcaagctgcccaaagaagcaaggcaacaattacttgaatggtggagcagacactacaaatggccttacccatctgaatctcagaagctggctcttgcagagtcaacaggcctggatcagaagcaaattaacaactggtttatcaatcaaaggaagaggcactggaagccttcagaggacatgcaatttgtggtggtggatccaagccatccacactactacatggaaaatgttctgggcaatccctttcccatggatctctcccacccaatgctctaaaaaataacgttttggtgcttgtgtgctcttaaagtatatgtattgtgtctaaatgcaaggcattcatataataataagtatgttactctgattagtaacgatatttacacagtaaaagatgtctcaaatgctaattattgatatttacacattaaaaga

SEQ ID NO: 27867 - DNA, 761 bp, Glycine max
  Clone ID: TF_GmC1293_2
gttgataaacatatcctagcccgccaaaccggtctctccagaagtcaggtttcgaattggttcattaacgcgagggtgaggctatggaagccaatggtggaggaaatgtatttggaagaagagaaggagcatcaaaacgacgtagcatcgtcggagggaggaggcatcaatattctcggggatcagaagccaacacaggctcgactcgttcgaattgactcagagtgcatgtcgtctatcgtcaacaacccagatgacaaaaacgacacaaagagcggcaaaaccatccaaaacgacaaccaaatggacgcattcgggtcggtggagcttgacttttggtcctacacgcaccagtactcctccggacacagtggcggcgtgtcgttgacgctggggttacagcagcacggtgaaagcggggtgagtttagcattcccgccagcggcaacacagagctccatgttttacccacgggatcagattgaagattgccaaacagttcagtactctcttgtggatggcaaaggacaaaacatgccttataggaatctcatggggacacacttgcttcatgatcatttggtatgataatatatatagaatcaaataaaaatagtctcaattcaatatcatggaggacgtggatttaggtgtcacgtaagtaagtacatacattatggtagtcaacttaattaaagtagaaagttttgttttgtttttaattaatcagcacatatatatagtacatagttatataaaaa

SEQ ID NO: 27868 - DNA, 791 bp, Glycine max
  Clone ID: TF_GmC262110_1
ctccccctaaaatgaatttacaatgactttacagtcttgttggcttaataattatgagaccacttaatcacaaacttagtagcaccatcgaaggccaatatttcaatcactttcctttttcctaatttccgatgattgattacagcaacaacagaaatatggttagtataatataatatcaccgaatcaaatgatgtccaagcaaggggagtagattgaaaacattttcagcatgcaaaatcatgcaacaattgccctcctccaataacatcttttccaaaatgtcgattttgggattcaaaactactaagaacatagccctcaggctgaagggcaacgccaaaacgttgagctgcactcattccaaagggctcaaacaacccaataccgtgatgattttggtgaagaccaagtgtgagagacaccccattattgctcactccaacacccatgacttgctgattgcctgtgttggtctgattcagctgctcctgactcctcacttgcttgttagcaagttcatttctagggtgtttataaggggcatcatgaaacttctccatggaggtggatggattctcaaaaacaacagagttgtgatctgaaggtaaatgatcacttaggtttttcttacttctttcttcccaatgtgacctcttttgaccttgttgtgattctagcatatgtatttcctccaccattggtttccaaagccttactcttgcattaataaaccaattagacacctggttgcgagatagaccggtttgtttagccaacattaactcgtc

SEQ ID NO: 27869 - DNA, 1085 bp, Glycine max
  Clone ID: TF_GmC1478_1
cgctttctctttctctcctcatcctcttattctaccatggccttcccacctcctcacggtttcacgtttaacactactcatgaagaagatcaccaccacctccctccaacctctctcaaccccttcccctctttgccaccccaacactttcaagggggtgcatctttcatgttgaagcggtccatgtcgttttccggcattgagaacaagtgcgatgaagtactacatggagacgatgagttatccgatgatgggatcttcccttgtgggggtttcacgtttaacacgactcatgaagaagagcacggccactaccctccaaccgatctgggcgccttgcttgctttgccaccccaactccttcaagggggtgctttggggttgcagccaagacaagttgccatatggtttcagaatagaaggggccagatggaaaaccaagcatttggagaaggaatatgaagtcctcaagaaacagtttgaagcagtcaaggccgataatgatgttcttaaggttgagaaccagaaactacaggcagagttacaagctgtaaaaagtagggattggtgtgaagctggaatgatgagccataagaaagaaactgagggttcatggagcaatggaagtgataacagtttagagattaatctagatcactcaagaacactaggtttgaatagtcccatatcttctcagaaaggctgaaacctatgactacccaattcgttaaaccccaccagcataacacaactccttcaagatgatggcttgtgcaacatgtttcacaacattgatgcacaacagaacttttggccctggcctgatcagcagcaccagcgtttccattgaccctatataaatgattttgggtattaatgatatgatatgagcagaaattatacaatacaatcttttttcttcagttttttttttctttcaatttatttaggtgcagtagattgctgtataaagtttgaacaaattaaatctatttgagtcatgaggagtcggtggactttgagcagtgcaatttctttccttgtattgcagaatatataaaataatatttacgttaggctgaagt

SEQ ID NO: 27870 - DNA, 1645 bp, Glycine max
  Clone ID: TF_GmC309_2
ggctcgagcaacaatgtcttgaactcacaatacctcaaggcagcacaggagttgcttgatgaaatagtaaatgtccgaaaggctttgaagcaaactggtttggaaaagcaacagagtttccgtgatattggtttagatggctccaaagattcagatggaaaatctaccagccaatccgtgcagatatcttcaggccccaatggttctgctgcaaactcttcatgtgagctatcacctgcagaacggcagaatttgttggacaagaagacaaagcttttgtcaatgctggatgaggtggataaaagatacagacagtactgccaccaaatgcagattgtggtgtcatcttttgatatggttgctggatgtggagcagctgaaccatacactgcacttgccttgcgcacaatatcgcgccactttcggtgtttgcgcgatgccattagcggccaaattcaagtgactcaaaggaacctcggagaacaagagggaatacctcgtctccgctatgttgatcagcagcttcggcaacaaaaggcccttcagcaacttggtgtaatgagacaagcttggaggcctcagaggggacttcctgaaacctctgtttcagtactccgtgcatggctctttgagcatttccttcatccttatcctaaggattcagagaaaattatgctagcaaggcaaactggcttaacaagaaaccaggtggcaaactggttcattaatgcaagggtgcgtctatggaagccaatggttgaggaaatgtacaaagaagaatttggtgattctgagatgagcagcaatctattatcatcagagaaaacactcaaagctccaagagatgatgttcaagcttctgacaataaaagggaagagtcccaggacaacttaataaacgttgatgatagtgttcagcatcatgggttgaagttagatcatgcctcggaattggacagagggatccaaagcagtgatcatggagaaaatgccatggatcctagaattggaaaattgcaaggtgaccaaaggttcaacatgaacaacagcaataacaatagtccttattatggtgatggctgcataatggcttctactcctgccacatatgatttaccagagttaggtaacattgccgtcgatggccacgtgtcgcttgcattggaattgaggaactgtgaaagtcaaggatttggtgtgtcaaatgatgacatgcataaacgacataagaaaacattggcttcttccccagagactgatttgctagattaccatttcacagacccaggaaagcaacaaaacaagtttggcaatcctcacctattgcacgagtttgttgtgtgaagaagggttggagaaaattctaaagttttcaagggaactaaggaaatgtgtaccaccaaagtagtagatagatagacaaaagcctatgttgttgttgttaacttggttgctcattcttgttgtccacagatcataaaaagcgatgtaaatcatgaaccgtacaaaaaatatacacgtaggtatgtgtagatatattctcttgtaatatcgtggatggatgattggttgtatcatgtgcaggcaatttttgtaaggacaaggaacttatcttgtgcatcatgatgtataagggaatcttgtc

SEQ ID NO: 27871 - DNA, 752 bp, Glycine max
  unsure (1)..(752): unsure at all n locations
  Clone ID: TF_GmC320602_1
tttttaaaaaaaaaagactgaaaaagcctttcatttcacaatttcaccaccaagaagtttggtgcattctaaccgatcgacaaaaaggatcattcatgataattctttcaacccaaagtaagaaaacaaaacagattgaatgaaagataaaagaaaagcctaaattatatacaaacgatatataaataggggaaactgaatcctttgtctttatcctctatgatatatcataatatcatgttatatatatgatatgtaattaaaaaacccgccaaaaaaaatgtcttctgatgccaaatcatgaagaggctatttgatgggcttgggcttggacctggccattagggaagggcaatattctgggcttgcttagagacaattccactgggatttgagaagaagcattgttgttaactatagaagtttggttggttgtggtggaatttgtggctaccctttcacaagaggggcacatggtgagagtggtggctggaagctgcatgtaaaaaggttgagaagattttagggctctgagttcttgaagttccttttgcaacctcctattctcttctgttagggtctcacagcatctcttcaaatactcacaatccacttctgtttgcttcaactttgtcctggcccttctgttctgaaaccaaacctccacttgacgannncngagattcaactgtttagcnnnagcaagtttttgcnnnnnattgagagtggtgtgttctttgaaactttcttcg

SEQ ID NO: 27872 - DNA, 1003 bp, Glycine max
  Clone ID: TF_LIB3094-027-Q1-K1-C10-F3A
attaatttgtttattgttttgtgcgtgaatatgttgttgtgttgtttgcagaagcaaaagttggtactggcgaaacagttgggtcttttagcgagacaagtggaggtgtggtttcataacataagggcaaggtgggtttattttttcaacatttttgttgtgtgatctttaatagttttactgtaattaatttttatgactaatttttttttttcttttgtttttctgttttttttttttattgtttttttttaatttttctttttgaaatctttttgtttttttttgtatttttttatttctgatcgtttgtttttttttttttcgtttttttttcgcatttttctttttttttttttttgtttttcgtttttttacatttttttgtttatttgtttaatttgtttatttttttggggggttgtgttttttattttttttcctttggtttttttttttttgttttagtttgtttctgttgtgtttcatgttttgttttgttagacttttttgtttttttttattgtttttttttttttattttattttttagtttatagtatgtttagtttagttgattaatgaggagtttttttttgtattttttatgtataggtgtttttattttttttctgggacagttttgttacgttttgatgttttttttggtttttaggattttttttttcgtgctttatttaaagttttgtttttgttttttttttttttttatttgtttttgtgtatattttttgtgtgtttttgttttttttagctgtatttttttttgttctttcttttttcgtttttttacttttgtcttttttttttggttgttttgtatgtgtttattttttcttttcgttttttttttagcgggttttttttttttcggtttctttttcttgtcttgtgtattttttttgttttttttctatattctctttttcttgttattttgcgtctttgtctttttctcccttttttcttttttttttttttt

SEQ ID NO: 27873 - DNA, 1774 bp, Glycine max
  Clone ID: TF_GmC1350_1
gagctaagagggtggtgagtttcacattcacatagatacatacatcttattttttcattgggaaggaaaactctgagttaagttgcagagacacacgttaaccctgtgtgaagcctctgtgtctccacctgcattattcaacacacagtaacagcactggtagtagtagtagtagtgtttgtttgagagagagagagagagagacaacaagcaacactgttgatgcacagaaggaagaagatagactacacaatcccaagggaggactgatctgaatctgaatctgattcccaccatttactttttacaggctatagagccaagagcccaaaaatccctattgttctgactgactatccatttaagttctttggagttttctacaaataaagaactgagccttatttccgggagtactctctggacaattatatgcagtgtgctctttttgagaaaacagtaaggtggggactagcaactaggaacaactgatccaagccaaagagggtttggagggaacagttgcagtgagctttctgagatggacatgatgaacatggaaactaataataggaagtttctttctctgcctctcagtaacaacaacaacaactctggtaatgcccaaatgcgcagtagtagcgataatagaagggtacctgtcactagcaatagcaatatcgctcaggaacatcactacagccaccacaaccccaccgacacttgcagtgtgagggataaaatcatggcacaccctttttttcctcgtctcttgtcctcttaccttaattgcctcaaggttggagcacctcctgaagtggtggctagcttagaggagtcatgtgccaaatgtgagtccttcaatgcatcatcaggaaggacaggtggttcaataggtgaagatccagctctggaccagttcatggaggcctactgtgagatgctcattaagtatgagcaagagctcactaaacccttcaaagaagccatgcttttcttctcaagaattgagtgtcaactcaaagccctagcagtttcatcagattttggtcaaagtgaaacatcttcgcagaatgaggttgatgttcatgaaaacaacctagattctcaagctgaagatcgtgaactcaaagtccagcttttgcgcaagtatagtggatatctagggagcctcaagaaggaatttttgaagaagaaaaagaatggaaagttgccaaaggaagctcggcaacagctacttgattggtggaacaggcattataaatggccatacccttcggaatctcaaaagcaggcacttgcagaatccacaggcctagatctgaaacaaatcaacaactggttcatcaatcagagaaaacgtcattggaagccttctgaggatatgcaatttgccgtgatggatgcaactaactactacatggaaaatgttatgtgcaagccatttccaatggatggcatgcctatgcttctttaactcaatcctctactagaatattcaaaagcttagccgagaaaaccctatctattttaagttgcctaggtcgccaggttgctatatataatgtgtcattgatgaatgttttactttaaattgtagaaagcaggatgaaaattctctgttatccctgaactgcaatctatgtaagtgagcgtgaatctaactatatgctctattatctacactgtttgtggagatcactagagatgttgtgtatgtgttgtttcctaatttaatgaaaataatttgttttccatatggaaaaaaacacac

SEQ ID NO: 27874 - DNA, 743 bp, Glycine max
  Clone ID: TF_GmC419_152
aattcggctcgagggattatcttataggataataccaaattagaatgaaaattatcctgtgagaagtgaaattgtgattgtgaattgaatgaaggatgctcgaatttgagttattgatatggcttttgagtcgcactatgttttgttgctctgttccttcaaagaacaattgcagcagcatgtccgggtccatgcaatggaagcagtaatggcttgttgggatatagagcaatcattgcagagtctaacaggagtttcacctggagaaggtacaggggcaacaatgtctgatgatgaagatgaccaagtagatagtgatgccaatctctttgatagtagtttcgatggggcagatggcatggggtttggccctcttgttcctacagagagcgagaggtccctcatggagcgagtaagacaagaattaaagcatgaactgaaacagggttataaggagaaaattgtagatataagagaggaaatcttgcgcaagagaagagctgggaaacttcctggtgacacaacttctgttcttaaagcttggtggcaatcacattccaagtcgccttaccctaccgaggaggataaggcaaggttggtgcaggaaactggattgcaattaaagcagattaataattggtttatcaatcaaaggaagaggaattggcacagcaatccttcaacttcaactgtcttgaagagcaaacgcaaaaggtattcccatcaaaactagtaatttgtaa

SEQ ID NO: 27875 - DNA, 1467 bp, Glycine max
  unsure (1)..(1467): unsure at all n locations
  Clone ID: TF_GmC1549_1
nttccttttcctccttctcttaactatgcttgatgaggtttacaggaggtacaggcaatactatcagcagatgcaagcggtagtaacttcatttgagtatgtttctggcctgagcaatgcagctccctatgcaagtttggctataaaagctatgtccaaacattttagatgcttgaagaatgcaattactgatcagattcagtttgccaataaagctcattttcatatcagcaacaggaaagatgaatctccaaggtttggcaacagtgatagaggcccatatggccaaaggcctgggtttcttgagcaccaacctgtttggcggcctcaaagaggactccccgagcgcgctgtgactgtcctcagagcatggttgtttgagcactttctgcacccttatcccactgatactgacaagctaatgttggctaaacaaactggtctatctcgtagccaggtgtctaattggttcattaatgccagagtaaggctctggaagccaatggtggaagaaatacatatgctagaaacacggcaagctccaaagaatctgcagaaggaagaacattgcacgaacaagccaagtgatcatttgccttctgataactccattgtttctgagaatccatctacttccacagataaatttcaggaagctccttacaagcgtgccataaacgagcttcctaacataccagtcaggactcaggaacagctgaatcttccctgcacaagcaatcagccagggggtgttggagtgagcatgggtggcagtgcaagcaatagtgtgtcactcacactaggcctctatcaaaaccatggtattggtttggctgaacctttccccttgaatgcagcgcagcgatttggtgttgctcttgaaaccaacaatgaaggctacgttatgagtgattatgagtcacaaaataggcattttggaagagatgtcattggaggacaactgttgcatgactttgtaggctgaaggtcttcaatgtcaaataacaacaactttgcctggagttttaatttgattggggtgatataatactaaccatgtttctgttgtgcttccatgaattatctaaaagttagaagagggattggaatgttgcactttgtggtggtgatgctggcaatgatgaatgaaccttccagttatgggggattaactggtgtttttttattgagctcacttgtatggaggttgtaaaggggtgggattaatactgtgtcataatagatgtgtgatccaattcacccttgtgttgttgttgacctcaattgcttggagtaaatccaaatgttctggctatttaagctgtttgtaagttttttacattttataaaatattattgtcatccaaaccaggtaaatggatttcaatttgtaatacttgaaatcttgttcgacatgattgtactagtcatcatcatattagtaatatcttcgtgtctttatgctgc

SEQ ID NO: 27876 - DNA, 950 bp, Glycine max
  Clone ID: TF_GmC1814_1
aagaaaactctttcaggatttacctaagatcagtagtgggttgtctcaactaagcttgtttgatagagacagtagacagagtagaatgtctctccaacaacttggggtgatccgaagccaacgccaagtttggagacccatcagagggttgcctgaaacctctgtggctattcttcgttcttggctcttcgagcactttctccacccttatcctaatgattctgaaaagttaatgctggcatctcagacaggtttaactaaaaaccaagtctcaaattggttcataaatgcacgagtacggctatggaaaccaatgatagaagaaatgtacaaagaggagtttggagagttttctgaagactccaacccggctggtaacaactacttgacgagggaagataccacggattgtgtagaggattgaatcaaaagctccagtgaacaaaaaacttattgtttgacaaacatgggcctttaaatgcttgcctttttcctccaaaatcgagagataaacattatgtaacatgacaagatgatgagccaatatgttcgggtgaaattcaagatttgtttttttgaatgctgaaaattcaagatttggaaaatcatgacttatgatgttccttagattaagtgaccagcttgtaacacatcgtgaggcttgttatgtcaggtttgctattaataccaatttacaggattaaaagcaaacctgacataacaagccttagattaagtgaccagcttgtaacacatcgtgaggcttgttatgtcaggtttgctattaataccaatttacaggattaaaaaaaaactgtgggctgtgaatgagatcatgagaagatcgcattatcagaaattcacaatttgttttacaaccctatcctgtaacacttgcgtatgagcatgacatttgttatcttgtaataaatgagatagccaatttcatg

SEQ ID NO: 27877 - DNA, 2468 bp, Glycine max
  Clone ID: TF_GmC444_1
ctctctctctctttcctcccttccttccgtctcaacttcattttcctttcaaatagtaacggtagaggaatctcaccctctccttcctctcctctttctctcttcttccttctctttctctcatattaacctttaaattatcaaatcttaatataaaactaaaaaagtaaacccataaaataataaagcacacttaaaccacccttttgtacatgatctacatttttacttagctattagaagatgatgctgtgaaatctgttagcatagtctttaacctagccttcaacaaaataactttgtggcaacgatactcaatactttcttcatcctttaattattttcaaataaaaataaatgaattgaattgaatcaccactgtcaaaagtatactacaatctaaaagctaaaactagcgaataaggcccaagtactatatatgtacaagaacaaattaatcccaaataacttaaaaaaatatataaaaaaacactagaataatttttttggatctatggatcaagtattgagggatttcaatcttgggtatggtcaaattgaaacggggacttcttggatggatgagagactggtaacctcgtcatcgacgaagaaccttgctgagaaatccggaaaagccagggagattgagatcgaaatcgcgggtggcttcctgtgtgagtggaccccactccctcagaggcggttacgaacgctgttaccgccttcgtagtgacaacgtttgtgtcctcccaaggccttgtcctgtcgaaaacgtccatgtggcagatggagcactcgtgggtccctaccaccaccgttcgacgccgaactcgtcggtcacggcggaggaggtcgggtggttttcgtaaggcgagtcttccggtggactggccttgtgtcctccgagtgcttggtaagacgaagaaggctttgttgcaaaccgaacatttgtagctcagtttgggcggcgggatagcggcgcagaattgttgtcggcagacagcgggtttggcggtggagacactgccggcgccgccgcgagcgagcatgatgagacaaagagcgaggtactcttcctcggtgcatgaagggtgttgcagttgttgctccgtgcggctacgcttagaacgctttcctttcgtccacggtgtctctaagtaactgagactggtttcttcaaagggactaaacgatggagtggctgtggtgggtgattgaagagcttccaaagccatttgaagtgtaagcacttgtgaaatctgtaatagagtgtgaaagggaattagagaagtgcttgtgcttgtgcttgtgcttatgcttgttgcgctttgtgaatctgtaatagggtgtgataggaaataagagaagtgcttgttgtggttgcttttggtgaacttgagtttggcaacaggaggatatgggagtgagttagaaagttttatattgcaatgtactttttccatttacaaatgaaaatgcagcttgcaagagcacttggcttgcaaccaagacaaattgctatatggttccagaatagaagggccaggtggaagaccaagcagttggagaaagactatgatgttctcaaaagacaatatgaagctatcaaggcagataatgatgcacttcaatttcagaaccaaaaacttcagactgagatattggcactgaaaagcagagaaccaactgaatccatcaacctcaacaaagaaactgagggatccagcagcaatagaagtgagaacagctcagagattaagttggatatctcaagaacaccagctattgatagtcctctatccactcagcagaacaacaacaacagaacactctttccatcttctgctagaccaacaggagtggctcagcttttccaaaccactccaaggccagagattcagtgccaaaagattgatcacatggtcaaagaagagagcctaagcaacatgttttgtggcattgatgatcaatctggcctttggccttggttggagcagcaacatttcaattgatcatcatgcaaaaggagagagtgtgagagtgaggagagagtttcatattgcaatgtagtttttccttttccggatgaaaatgaaatcatcaagagggtatctgtgtcaattgattaccatacataatgagttataattaaattaaaaacccatgttttgataaacttgatgtataaaataggatatgtaagtaaatttttctggtggaacttgaaaatttttatataaaaagaataatagattagtcctttttctttttcaaaaagtgaagtaaaaaaaagtttcttaatgtagttttcccttttccggatgaaaatgaaatcatcagggtatctgtgtcaattgatccataatgttataattaaattaaaaacccatgttttgatattaaatatggtaatcaattgacacagacacctctagatgatttccatatttaatgagttataattt

SEQ ID NO: 27878 - DNA, 1145 bp, Glycine max
  Clone ID: TF_GmC969_1
aattcggcaccagacaaaggtggcttccagaaagctctgttgtaattcttcgcgcttggctttttgagcattttcttcatccctatccaaaggattctgataagatcatgctagcaaaacagacaggtttgaccagaagtcaggtgtcaaattggtttataaatgctcgagtgcgtctatggaaacctatgattgaagagatgtacaagcaagataattgtattgctggcatggactcaaattcttcatctgaaaatgtgtccaaggtaacaaaaagttatgtcaagacctccaatgatgtgggtgatgattcgcagcactgtcaaagtccaattgtggccgatacaaatcacagtggtggacaagctaaggacctcagacatgatcaggctcttgatacagaaatgatggcatccattggattagctagtcccataacctccatttatggggctgaaactgaacataggcgaaatttggatgattgtggtctcttctctaatgacacagttgttcagtctgatggagctactaataagaggtttgtgtcagttggtccaacatgccaaatgccagagtctgagaggttcaagtcaggaagtggagtgtctctaacattgggtttgcagcattgtgaaggaggtaattttttgcctggtaagacccatctcagtttggtttccatgagggaggacgacatctccaaagcgaccgcagcttcaacagttggagtagagacaacagaacttgagtgcattggtgctggaaaccaacaacaaaggttaaattcacctcatatgctacatgattttgaagtatgatgataatctcttgcaatcattccgtgggaaggaaaagagtggtgagtgctgatgttgggaccattttacagacagtgaatcatagaaggaactcagtggtccctcaaaggatgataggactgacaaaacagttgtatgatatcatgaaatttattgggaagatctatcttatggttaatgtgtagaaggaaacatgtatatttaggtctattttgctgtgaagaaatcaagaaacgtgagaatggtaaataataaatggattggctgattattgtattaatgcttggaattgaatatattaaacatgaaacttgcacactggac

SEQ ID NO: 27879 - DNA, 1822 bp, Glycine max
  Clone ID: TF_GmC2043_2
ctcgagccggttcgagctgtggaggaggggagaataataataataatgatggaggcaaacaaggagttgaactcagcacagcacagagacaagagcttcagatgaagaagtcaaaacttgtgaccatgctagatgaggtggagcaaagggaccgacagtatcaccaccaaatgcaagttgtgataacatcatttgagcaagcagcgggtgttggagctgcaaagtcttacacagcccttgcgttaaagacaatctcaaagcaatttcggtgtctcaaagatgcaatctcttcacaaatcaagacaactagcaagaccttaggtgaagataattgcctgggagttaaggtagagggttcgaggctaaggtatgttgatcatcaacagagacaacaacgtgcattacagcttggaatgatccaacacaacgcttggaggccccaaagaggcttgcctgaacgtgctgtctctgtccttcgtgcttggctttttgaacatttcttgcacccctatcctaaggactccgataaggttatgcttgcaaaacaaactgggcttactcggagccaggtatctaactggtttataaatgcccgagttcggctatggaagccaatggtagaagaaatgtacttggaagaggtaaaacaagagccaaacaatagctcccaggataacaacaacacaaaaggatcaaatgaatcaagcaaggagttatggtcagaagctaatgctgctgcacaagaatcaggtgcaatgagatttgatcagattaacattctccaatcaaaggcagaaagcttcaagaacaaccaaaccacttccccaacagagatctccaattccaactcactccaatctggtttccatcttgctgacatgcaaagtccaaacaagccaaaaagcacttctgagatgcatcagaattctccaggtagcattctttcagtggacatggaaatgaagcctcatcatcatggagaaacaaataatatcactagagaaggccagaacaacaacacaacaacaaagtttggcattgaaagccatggtgggggttttggagcatttcccaatatggaagacattggaaggtttcatcatcatgtcacagagcaacttgctcctaggttccatggaaatggtgtttctctcactcttggacttccacacagtactgagaataacctttccctctcaggaacaacccaacatggattcctctcacagaacatgcacttgggaatgagaaacagtgaaaatgatgagttttgtggtgcaatcaacactaccccaccttcttctcactcaggtatcagttatgagagcattgacattcaaaacagaaagaggtttgctgcgcagttgttgcgggatttcgtggcttaaaagaattgataattaactagctagctaggataattaatcaatgaagaacaccccacgaaagaattgaattattttcttctttttctgatgttgcaatatattatatatccacaaaacacaatgcagttcagagtgttacgacacactaacttagcagaagaatagcaacaggaggggaaaaaaaaagaaataaaagaaatggagaagtttatggtaacttgctccatgtataaagatggaaactggttcaagattatgaacttgcagggaattcagatttacatgttctgaattagtttaatttaaggattcaagttgagttggggaaggtatattgtatatggtattgaaaagtagctaggtacaatacaaggaattgaatggtttgtttggataggtaatgtattatatattggatttggagttatatgcct

SEQ ID NO: 27880 - DNA, 2474 bp, Glycine max
  Clone ID: TF_GmC309_1
atttgtcgtgggcacatacctcaaaaaactcaacctcaatttatggattcttgtctatcacttctgctctgaaacccactcttattgaattttagtcccttgttactgcttctatctcttactttcagaatagcaggggatttgttataaaagcgatgtgcagctgattccattgtgaagaagagagcagaaagaaataagcttataataatgtatcccaaccaagccttttctttagggtcctatgcggagatgatgtctgggacttctctttttcctcatgactacagtgaaactgtaggaggaggacaaaacgaggttaagtttatcacagcaatgggtgagacagtgactatgcactctattaatggccattccaatgctgcaagtggtgatccatcatgcaactctttctgggggaagattcccaggtcaaggacacaaaaatggcagatagtgagcaaacacatcggctgaattgtatctctcagtctcgggacactcaagccgtgtaatgcatgaatatgtcagggttagtagcaatatcacgacactggtctcttaccactaatgaatgaatatccaaatctaaagggaaccatgtctctgaaaaatgatgacgtcaacaacctacataaagaatttaaaagtgctgaatgcatggcatctgttgtcctccttgagggctttcatgacatggtaaaaaagggaatgtttttaacaacccccatggaccccctcaatgtgtcttaaagaagacccctctgatctaccacgttactcatacagtattttgaactcattatacctgaacacggcacaaaaaatgctagatgaaatatgtactgtccgaaaagcattgaagaattcggctaaaggaaaaacaagagaacactggattagatggctctaaagattctgatggaaaatctaccagtcaatctatgcaaatgtcttcaggccctaatggttccactgctaatgcttctagtgaactatcatccgcagagcggcagaacttgttggacaagaaaacaaagcttttgtccatgttggatgaggtagataaaagatacagacagtactgccatcagatgcagattgtggtgtcatcttttgacatggttgctggctgtggagcagcagaaccatataccacacttgccttaagaacaatttctcgccactttcggtgtttgcgtgatgccatcagtggccaaattcaggtgacccaaagaagccttggggagcaagaaggaataccccgtctccgctatgtggatcagcaacttagacaacaaaaggcacttcagcaacttggtgtaatgagacaagcttggaggcctcagaggggtcttcctgaaagctctgtttcaatactccgtgcttggctctttgaacattttcttcatccttaccccaaggattctgagaaaattatgctggctaggcaaacaggcttgaccagaaaccaggtggccaattggttcatcaatgcaagggtgcgtctctggaagccaatggttgaggaaatgtacaaagaggagtttggagactccgagatgaactgcaacctttcatctgagaacaacacggtcaaatgtaaaaaagatgatcttgttcaagagtctgataacattaacaacaataataaatgggaagagacacaggacaatttagtaactgttgacagtgtccaagtccaacctcaagcagaactggatagaggggtcaatgtagaaaatgtggtgatggattctggaactgggaaattgcagggtgatcaaaaccaacaaaggcttggcatgaacaacaacaacaacttttattctatctcaaccaaccagaatgatggaggcctaatgggttgttctactcatgccacatatgatttatcagagttgggtaactttactgtgggtagccacgtttcccttgcattggagttgaggaactgtgaaagtgatgggtttgccatgtctgatgatgccatacgcaaacgacgtaatcaagcattggcctcttccccggagactgatttgctagattatcatttcacggattcaggaaagcaacaacacaggtttggcaatccccatttgctgcatgagtttgtcgtatgaaatctagcaaaaaaatatttgatgattttaatggatctctggagaggtgtacctcaacaaagctgaaagagaaaaaagcctatgctgtgctgctgctgctgctgctgatttgctactttttttcttcctcattcttgttgcccattgttcgtaaaaaagtgatgtaaatcacgaaaccgtacaaaatatacaggtagatatgtgtagatatattcgcttgtaatattttacagatgattggttgtatgtatgtgcaggcaatttttgtaaggataaataaagaaaatttctcgtgcattatgttgaataataaggaatcttgtcaaaaacgtaaaaggagtactaccatct

SEQ ID NO: 27881 - DNA, 1892 bp, Glycine max
  Clone ID: TF_GmC2043_1
aattcggctcgagctcgagccggttcgagctgtggaggaggggagaataataataataatgatggaggcaaacaaggagttgaactcagcacagcacagagacaagagcttcagatgaagaagtcaaaacttgtgaccatgctagatgaggtggagcaaaggtaccgacagtatcaccaccaaatgcaagttgtgataacatcatttgagcaagcagcgggtgttggagctgcaaagtcttacacagcccttgcgttaaagacaatctcaaagcaatttcggtgtctcaaagatgcaatctcttcacaaataaagaccacgagcaaaaccttaggtgaagatgattgcttgggagttaaggtagaaggttcgaggcttaggtatgttgatcatcaactgagacaacaacgtgcattacaacagcttggaatgcggacgcgtgggcggacgcgtgggcaaagaggcttgcctgaacgtgctgtttctgttcttcgagcttggctttttgaacatttcttgcacccttatcctaaggactccgataaggttatgcttgcaaaacaaactggacttactcggagccaggtgtctaactggtttataaatgcccgagttcggctatggaagccaatggtagaagaaatgtacttggaagaggtaaaacaagaaccaaacaatagctctcaggataacaccacaaaaagatcaaaagaatcaagcaaggagttatggtcagaagctaatgctactgcacaggaatctggtgcaatgagacttgatcacatcaacattctccaatcaaaagcagaaagcttcaacaacaacaacaacaaccaaaccacttccccaacagagatctctaataattcccataattcactccaatcagctggtttccatcttgctgacatgcaaagcccaaacaagccaattagaagcacttctgaaatgcagaactctccaggtagcattctttcagtggacatggaaatgaagcctcgtcatcatggagagacaaataataatactattattactagagaaggcaacaacaacacaacaaagtttggcattgaaagccatggtggtggtggtggtggttttggagcatttcccaatatggaagacattggaaggttccatcatcatcatcatcatgtcactgatcagcaatcactggctcctaggtttcatggaaatggtgtttctctcactcttggacttccacacagcactgagaataataataacctttccctctcaggaactactcatcaacatggattcctctcacagaacatgcacttgggaatgagatcaacaaccaataatgcgaataatgagttttgtggtgccatcaacactactccaccttctaattctcactcaggcaccagttatgagagcattgacattattcaaaacagaaagagatttgctgcgcagttgttgcgggatttcgtggcctaaaagaattgataattaactagctagcaagggtaattaatcaatgaagataccccatgaaggaattgttttttattttattttttatgttgcaatatatccacaaaacacaatgcagttcagagtgttaacttagcagaaaaatagcaacaggagagaacaaaaaggaaaaagaaaagaaatggacaagaatgtgtgataacttgctccatgtataaagatggaaactggtttaagattatgaacttgcagaaattcagatttacatgttctgaagtagtttaattcgaggattcaagttgagttggggaaggtgtatttttatatatggtattggaaagtacagctagctaggtacatacaaagatttgaatgatttgtttggataggtaatatatatattggatttcaagttatgccttaaa

SEQ ID NO: 27882 - DNA, 2442 bp, Glycine max
  unsure (1)..(2442): unsure at all n locations
  Clone ID: TF_GmC3921_3
ggctcgagcagcagcagatccggcgggacaaggtaaggttcgaggcggcgccattggtagggatagaggaggaggaaccagtgtacgagaccgccggaatgttgtcggagatgttcaattttccgcccgcgacggaattgctggagcagcagcacgccacggcgacgttccgggcggcgaggcaagccggagagtggtacggaaacagacagcaacagcaacagatttcaggcattaatgctgactcagcagcagccatgcaactttttctgatgaaccctcaaacgaggtctccttctcctcctcaaacccacgctactccttcttcaacgcttcacatgctgcttccaaatccttcttcaaattcttccctccaaggatttactggttcggccgcgggagggtcttttggtcaattcacatgggttcctgagagtgctcatcaacaaggaggcgtggtggaagggcaaggtctttcgttatcgttgtcttcttcgctggaagcagcaaaagccgaggaactgaggatgggggatagtggttttctatattacaatcatcaacaaggtggaggtggaggaggtggttcttcttcttcttccgcggatcagtttcagtacaagaataataacaataaccatcaccaagcattgcatttgcaaggggcgatgggacacgacaacaaccaccagggacatgttgggtttgggtcatcctcggtaggtgtagttaatgttctaagaaattcaaagtatgcgatggctgcacaagagttgctggaagagttttgcagtgtagggaggggtcagtttaagaagagcaagttcaataggcagaattcaaaccctaattcaaatgccggtggtggtgcttcgccttcatcaaaagatgctcctcctcctcctcctttgtcagccgctgataggattgagcatcagagaaggaaggtcaaactactatctatgcttgacgaggtggacaggagatacaaccactactgcgagcaaatgcaaatggtagtgaactcatttgacctgatgatgggatttggggcggcagggccatacacagcactggcgcagaaagcaatgtctcggcatttccggtgtctgaaggaggcgataacagcgcagctgaagcaaagttgtgaagtacttggagacaaagatggggcgggaagctcaggaggtttgaccaagggtgagaccccaatgctgaagatgctggaacaaagcttgaggcagcaaagagcgtttcatcaaatggggatgatggaacaggaggcttggaggccccagagagggttgccagaacgatctgtcaacattttgagagcctggcttttcgagcatttccttcatccgtacccaagcgatgcagataagcatctgttggcacgacagactgggctatcgagaaatcaggtatcaaactggttcattaatgcgagggttcgtttgtggaaacccatggtggaagacatgtaccaacaagaactcaaagaggccgaaggggcagaagaagagagggaggggaaccaaagcagtagcaacaacagtggccaccaattggcacaaactccaacaccctcaaccacagcatcgacggcaacagcgccaccaccaccaacaacgacaccaccaaccggaaaaagatccgattctgaaagcgacccttcacttgcaccaataaataacaccaccagcactgctgccatgaccgtcaccgcctctgaggtgacgcaactgtcggagctgccccgaacaatggtggccgatgaatcttgtaggcatggtagccttgttgcaacggagtttgggaccgcttctgctgcttctgaaattggttccactctgatcaggtttgggaccaccgccggtgacgtgtcactcacgctagggcttcgccacgccgggaacatgccggagaaaactccgttctccgttagggactttggaggcatttaaaacttaatcaattccccctatattacttcacatgatcataaaagataagaatgatacgtataggaggttgctttattattactattattataattataataatatgattattatgatatgatatatcaaaagaaaccatttttccacccttgtaacttctctttgatgttagttcctcctctcagattaagttgcattttatggaaggaaaggaagaagggaatacgaaatgagaaaggtaggcttatatgtgattatcagctggcgataggtaggctctgtggtgatctgtgcaactgtatagtaggttgttttctacgtttttttatttatttatcacgtgtatgtacttaaggtttcatatcttaatttgataggactttatctaaataatagaataacatgtgctcactctcatcccgtatatgcacttgatgttttgtaacttataatttgacaagacttgttccntttt

SEQ ID NO: 27883 - DNA, 1559 bp, Glycine max
  Clone ID: TF_GmC3921_5
gattgagcatcagagaaggaaggtcaaactactatctatgcttgacgaggtggacaggagatacaaccactactgcgagcaaatgcaaatggtagtgaactcatttgacctgatgatgggatttggggcggcagtgccatacacagcactggcgcagaaagcaatgtctcggcatttccggtgtctgaaggaggcgataacagcgcagctgaagcaaagttgtgaagtacttggagacaaagatggggcgggaagctcaggaggtttgaccaagggtgagaccccaaggcttaagatgttagaacaaagcctaagacagcagagagccttccaccagatgggcatgatggaacaagaagcttggagaccccagagaggcttgcctgaacgttctgtcaacattttgagagcctggcttttcgagcattttctccacccgtatccaagcgatgcagataagcatctgttggcacgacagactggcctatcgcgaaatcaggtatcaaactggttcattaatgccagggttcggttgtggaaacccatggtggaagagatgtaccaacaagaacttaaagaagcagagagtgcagaagagagagaaaaggaccaaagcaacaacattagtggcaaccaagcacaaattccaacaacaccatcagcggccacaacatcaacagcaacagcaacagcgccaccaccaccaccatcaacaacgacaaaaacaacaaaaccgacaggcaaaagatccgataccatcaatgcccccgaaagcgacccttcacagcaccttgcaatgaataacagacaaggcttctcggaaaaccaagcaaagaagtccaccgcatccaccaccaccaccaccatcgcctctgaggtggcgccacccgtgtctcagtgcttcgacgactcagacctgcccgcacacagattaatggcctctgatgacacgtgtcatttggtcacagcagattttgggaccgcatctgcaagtgctgacattggatccacactcattaggtttgggaccacacccggtgacgtgtcactcaccctagggcttcgccacgccgggaacatgcccgagaaatctcctttctctgttagagactttggagccatttaaacttcaatatatattatatagtactacttcacataataataatcaaaataataataaatattatataggaagatgctttatcatattattatgtatatcatatcatcaaaagaaaacatttttcccccctttattgtttctcagttattcctcgatctgtcttatttgcattgtggaaggacaggagaataaaaaaggcaatacgatatgagaaaggtagtctgaaggtagctattaattaggcgcaacattaatatggtatctattgtataactgtatagcagattgtttttcatgattatttttcccgatatatgtactttattatttttaaggtttgtagtttagtttgataggacttgatctagtcaatgactgaaataataactgttccttttttttttaacttttaagataatgaaatgttatacct

SEQ ID NO: 27884 - DNA, 2610 bp, Glycine max
  Clone ID: TF_GM240G09rgnA1.C1.o3.ma
atgtttttgataattaacaggtgggaagtgggtgacaatgcaagatgcaaaaaccaccggcttttcatttgtggcaatagtgcatatggagctgaaagatgggttatgacacttgaaagaatgtgtgagagatcacctgacggaagaagaaacataatgcacctaactcactctatggttaaaatgttttgtgggaatttggacatgaaagatgacaaaaacttcccacatttaaccaggatgaataatggtgggactagaatattcaaggaatgcacacatccaaatgaagtgcgacgccgtcaaataggcgaggagctcgggcttgatcctgaacaagtaaaattttggtttcaaaacaagaagacgcatataaggactataaatgagcgattagatacagatgctcttcggcttgagaatgaaaggatacaatcggaaaacaacaaaatgagagagactttggagaatctttcatgcggatcttgtgggggtcgagccatggaaccagtaaagcatcaactttccttgcaagtcttaaggggggaaaatattctattaactaaagagtgcgagaggataacctcacttatggcaaacaatgggataaatattaatccagcactacttcctgtccttccttcttcttcatcacatgatgccttaggaggaagtttactaaatcaaccagttggaattcctgctcataatcaattcatttctaaccatgataaccattatattcctgccgcaattccaactccttttcaggataatcctattgttagccctcctagccataatcaagacattaaccctgctcctaccattgatcaacacattcctactcttgatgatcccactctcattggagataattctcctttgatttcaagttttgattataatattccagctttggttactgctcttgatcgaaatcttcccgcaatgattcatcctcacgatcaaaataatagcattccttccgctgagaaagaaattcatcaagtgtctaacaattcaaacaataacctttctgctctagagttggatgcagttcaaattctaaacaatgatatgttaccccaaccaatgaagagcctaagtaaagatatggatagtgtacaaatgttgaagattgcagaagatgcaatggaagaattgatgaaacttctcagtttgaacgagcccttctggtttagatctttactagatgggaaattcaatcttcggcatgattgctacaaaaggatatttggtaggagcaattgcttaagtggacctcatgtacgaatggaatcgtcgaaagattcacgagttgtgaaaatgagtggggcacaactcgttgaaatgttcttaaattcggacaaatgggttgatctattcccaacaattgttaaaaaagctcaaacaattcaagtacttgaaagtggttcatcaggaaaccgaaatggagctctacagttggtgaatgcagaaatgcacattctttcacatttggttccgagtcgggaatttctcttccttcgttattgtaaacaaattgaagtaggtatatgggccataggggatgtgtcaattgattcttcaacatacaaaactactgtttctcacgctcgaaggcttccatctggatgcctgattcaagaaaagtcgtctgagggattgtgcatggtttcatggatggagcacgtggaagtgaatgaaaagatgcaaacccacaatcttttcagagatactatttgtgggaataacgcatatggagcagacagatgggttatgacccttgaaagaatgtgcgaaaggtttgcaagctactcagctaaaactatacctagttgtgagactggaggaggttggttactctttattttctttgctcgatccaaagttattctaattttaatttatttaatttttgttagatcgcccgacgtaaaaagaaacataatgcacctaacgcatcgtatggtgaaaatgttttgtgggaatttggacatgcaagacaatccaaatttcccaaatttaacccggatgaacaacaatggggttaagttatccattcgcgtgaatcacacagggccaaatgagcctaaaggcacgatcattggtgctgctatctgctttcgggttccactctctccacaaattgttttcgataacttgatagacaacaacaaacgagccaaggttcaaagcctaaaattcatatacatggcacgagattcaacgaatctcaactggaagcaatcctggaaattgtatttcaatcatgcggatgctttgggatccatgttggtattcgctcctttttatatggaaggattggatttgatcatgaagggagaagactcatcactgtttccgattcttccctctggccttaccatatcttgggattaccaatcaaataaagttcctgaaggacaatctggacaagttggtcaatcaaggggttcgttggtgactctaatgtttcaacttttggcatccagtacatctaaaatagataatgtagacatgaaattaataggttctattaatacactcgtgacctcaactgtggagaaaattaaagatgctttgaattgctcaaattcgaagtaa

SEQ ID NO: 27885 - DNA, 1433 bp, Glycine max
  Clone ID: TF_GmC419_206
cggcgccggggagtccatggtggagcacgccgatttgaaggacggcggcggagacgccgtgagctggcagattgggcggtgtaagacggagattctgcagcacccgctgtacgagcagctgctgtcggcgcacgtggcgtgcctccggatcgccacgccggtggaccagctgccgaggatcgacgcgcagctggcgcagtcgcagaatgtggtcgcgaaatacgcagtgttcggacacaacaacatcgtcgccgatgacaaagaactcgaccagttcatgtcgcactatgttttgttgctctgttccttcaaagaacaattgcaacagcatgtccgggtccatgcaatggaagcagtaatggcttgttgggagttagagcaatcattgcagagtctaacaggagtttcacctggagaaggtacaggggcaacaatgtctgatgatgagaatgaccaagtagatagtgatgccaatctcttcgattgtagttttgatggggcagatagcatggggtttggtcctcttgttcctacagagagcgagaggtccctcatggagcgagtaagacaagaattaaagcatgaactgaaacagggttataaggagaaaattgttgacataagagaggaaattttgcgcaagagaagagcagggaaacttcctggtgacacaacttctgttcttaaagcttggtggcaatcacattccaagtggccttaccctaccgaagaggataaggcaaggttggtgcaagaaactgggttgcaattaaagcagattaataactggtttatcaatcaaaggaagaggaattggcacagcaatccttcaacttctactgccttgaagagcaagcgcaaaagaagcaatgcaggtgataactgatgatcgttgcatgaaattcaactctttgtcctttggtcaatcatggaaagacaatgagaaagaaccacattttgtttctgatgggccagggttaaagcagatcaaggagctaatattggtgaaccagtttacttatgcttaaaggccagcaaatagttcatatagtacttgtgatgctacataattaggaagttcaattaagaatcatataccaacagagaattatgatttttgttcatgttttattgctttgtgaaatatagtatatggtagcgaagggggttatgggtgtacagtaataagctgtgcattttttttcccttacaatcatactcttgtttttgttcttggtctttcaattggtatttggtaatgtagagagtaatttgttgtagaaatatggtataagtttttacttgttatataatttaaatgctcgttgtcatggtgctacaaatcgtaaacacttttaactgttgtctgttggaaggtataataatagtgtggtgggttcttgtgatttgacatgtagatggatgtgcagtgt

SEQ ID NO: 27886 - DNA, 2008 bp, Glycine max
  Clone ID: TF_GmC1293_1
gttggtaaacacatcccataccccaaaacctctctctcatgtgatgaaccttcgcattggctgtttaacgcagagggaccgcgatagattcaacctggcgagaaaattggttttgatagggttttccaacatccttgagcaaaaccatggaagcatcggggtcgtgtggacatgcttcttctgcaaaccccgtcaccatctggtccctttccctctcactctgatgaacgacccgggcacctctttctccaccacaggtatagatatcaagagtcattactaagatcctacatcatcgctgccatggaaggacagttgtgtgtatttttaattaattagtatatttggggcgaccccggggtccttgcacgtcccaaagggtgatcggtcctcgtagcaatgcttgtaaccagcatgctgttgcgtataatactaataagcaagacatttcatcaaggtaatgtgaatattaagagaactaaataaatggttgttattacatgcactcaagagtagattgtacgtacgtgttgaatttggaagcaggtttcgaattggtttattaacgcgagggtgaggctatggaagccgatggtggaggaaatgtatctggaagaagagaaggagcaagaaaacgacgtagcatcatcggatattaatgttcccgaagaggatgagaagccaacgcaggaggctccactccttcgaattgactcagagtgcatgtcgtctatcgtcaacgacgtcacaaagagcggcaaaaccatccaaaacgacaaccaaatggacgcattcgggtcggtggagcttgacttttcgtcctacacgcatgcgcaccattcttccggcgtgtcgttgacgctggggttacagcagcacggtgaaagcggggtaagtttagcgttcctgccagcggcaacacagagctcgatgttttacccacgggatcagattcaagagtgtcaaacagttcagtactctcttttggatgccgaaggacaaaacatgccgtttaggaatgtcatggggacacacttgcttcatgatttggtatgatatatcgcaaagtttattgagttcaatcatggaggacgtggatttaattaggtgtcacgtaagtagaaagtttagtttttaattttaatatatatagtgcatagttatatatatatattaatgcttccatatagaaatttaagctacacttgtagttaattacataatatatacacttcctagtttcaacatgctacccggcacaacaaggggcgaaacaccaaggcttagaatcgttgaccaatcgctgagacaacaaagggcctttcagcaaattagcatcatggaaacccatccttggagaccccaacgtggccttcccgaacgttccgtttctgttcttcgagcttggctttttgagcactttctccatccgtacccaagcgatgttgataaacatatcctagcccgccaagccggtctctccagacgtcaggtttcgaattggtttattaacgcgagggtgaggctatggaagccgatggtggaggaaatgtatctggaagaagagaaggagcaagaaaacgacgtagcatcatcggatattaatgttcccgaagaggatgagaagccaacgcaggaggctccactccttcgaattgactcagagtgcatgtcgtctatcgtcaacgacgtcacaaagagcggcaaaaccatccaaaacgacaaccaaatggacgcattcgggtcggtggagcttgacttttcgtcctacacgcatgcgcaccattcttccggcgtgtcgttgacgctggggttacagcagcacggtgaaagcggggtaagtttagcgttcctgccagcggcaacacagagctcgatgttttacccacgggatcagattcaagagtgtcaaacagttcagtactctcttttggatgccgaaggacaaaacatgccgtttaggaatgtcatggggacacacttgcttcatgatttggtatgatatatc

SEQ ID NO: 27887 - DNA, 1370 bp, Glycine max
  Clone ID: TF_GmC585_1
tccacgcgtccgcttcaccctctcacaataaaatcattgcaatagagaagtcccttaaataaatctgaatttccctgctttgcttcaccaccccccttgcttgcgtgggtagaaatgcaagaagcagggctgggaatgggaatgggaatgatgagcggagaagtatccgccgccggggaccaccaccgtcaagtgaaggcggagatagccaaccacccactctatgaacagcttctatctgcacacgtgtcatgcctccgcgtcgccacacctatcgatcagttgccgctcatcgacggacagttatcgcagtcccaccatctcctccgctcttatgcctcacaccattcccattccctctcgccccatgaccgacaagaacttgacaacttcatggcacaatatttgattgtgttatgtacgttcaaagagcagcttcagcaacatgtgagggtgcatgccgtggaggctgtgatggcctgccgtgatattgaaagtaccttgcaagctctgacaggagtcagtttgggagaaggaacaggtgcaacaatgtcagatgatgaagatgatttgcagatggatggctctttagatcagtctagcgctgacgggcatgacatgatgggatttggtccattgcttcctacagaatctgaaaggtccctgatggaaagagttcgtcaggagcttaagattgagctcaagcagggttttaagtcaagaattgaagatgttagggaggaaatattaaggaagcggagagctgggaaattaccaggtgacacaacatcggttttaaaggcctggtggcagcaacatgctaagtggccctacccaactgaagatgacaaggcaaaacttgtggaggagacagggttgcagctgaagcaaatcaataattggttcatcaatcaaaggaaacgcaactggcacagcaactctcaatcggttaactctctgaagtccaagcgcaagagagagtatgcccactaaggattccagtctggtgcagaagataacaggtgatgcactacaacataagatggcttacaatagtgatggttgtaaattcttggaatacataacggatacaaactattcttgttgtgcacggtcgcctccatttctttcaagtgtttttttatttgtaaatttgtttgctatgatttgactggctgaagaagtatttttagcagctgaaagcctgaaagtgtttcctatacttgatatgtttgcatgtactattatgtatattttgtgttgtactttatatcagttaaatttacaagtactaacatctccatcctttggaggagataactgtaatttgtaaggatgcaaaaaggaatttaaggacgaattggctaatg

SEQ ID NO: 27888 - DNA, 3033 bp, Glycine max
  Clone ID: TF_GmC1515_1
cggaattcccgggtcgccctccgcgtccggcagagagtactactcatgaaactctcccaagtgaagtcccaacccaatataaatccatctgaaagcaaaagggagagaagctttaatttacttgcatcccctgccccgcgatgatggacactttgtctatctagacagcacctttctaccttccttctcagcttcctcaagtttatagctccctctatccatttattaattcagcaaaatgtgtcactgagagagatacaatcatagaattgaagaagaacgcaacatggcgacgtactttaatggaagcacttcggaaattcaaccttctgcagatggcggcttgcaaacgctttaccttatgaacccaacttacgtaccctacgctgacgcgccgcaccacccaacaacgctcctcgtcaatcccaacgcacccaacctcgcgaatatcccacacgcgccgccagtgtcaccaaaccaacaacatcaccacgtgattcacggcgtcacaagcatcatcggatccggcaattccgatgaccactcccgaccgtcgttgatcggcgaaaacatcgccgccttccacggcttctccggcggggcaggcactgcctccaccaccgcccctcgccttcactataacctctggggtccggtggttgatcagccgggaacgccgtctagcagctccggtggaggcggtttccggcggccgagtcagcagggtttgtctctcagtctttcatcacagcaaacaaattttagatcagtttccggcgagcttgacgtggccggacagggccacgttgccggaattgggaactcgccgatgtcggcgtcgatcggagtttcaggtgttattatggggtcaaagtacttgaaagctgcacaggagcttctggatgaagttgtgaacgtgggaaaaggaatctacaaagaggagaaattctcagagagcgtgaaagcgaatagggaatcaactaattctggtgctgctggtgatggtggagatggttcaagtggtggaggagaaaacagtgcagggaaacaagtggttgaactcagcaccgctcagaggcaagagcttcagatgaagaagtccaagcttgtgaccatgctcgatgaggtagaacaaaggtacagacaatatcaccaccaaatgcaaattgtggtatcgtcatttgagcaagcagcaggttatggggcggcaaaatcttacactgcccttgccctaaaaactatctcaaagcaattcaggtgcctgaaagatgcaatctctgcacaaatcaaagccacgagcaagacattgggtgaagatgattgcttaggagttaaagtagaagggtcaaggcttaggtatgttgaccaccatctcaggcaacaaagggcacttcagcagctaggaatgattcaacccaatgcatggaggccccaaagaggcttgcctgaacgagctgtttccattcttcgggcttggctttttgagcatttccttcacccttatccaaaggactccgataaagttatgcttgctaaacaaactggacttgctaggagccaggtgtcaaactggtttatcaatgcccgagttcggctttggaagccaatggttgaagaaatgtacttggaagaaatcaaggagcatgaacaaggtaatggctcagaaaacaccaaatcaaaagaatcgagcaaggagttggcttcaacagcaaatgttgcactcgatcatctccaatcaaaacatgaaagcttcaacaaccaaaatacttccccaaccgagatctcaacaagctcttcaatgtctccaatgggagggtcccttcaatcccactctggtttccatcttgcaggatcatctgacatgcaaattaggagtccaaacaaaccaagaagttctgaaatgcaaaactccccaagtagtatcctttcagtggacatggaaatgaagcatagtggtgaccatggaaataatagagatgccaacacaaagtttggtattgaaaggcatcaccaacaaaaagatgggtaccctttgatgactagcaatccaaaccatggtggggggtttggagcattcaccatggaagacattggaagcagatttaatgtcactactgagcaactagcttcaaggttccatggaaacggtgtttctctcacacttggacttccccacaatgagaacctttctatgtcaggaactcaacaacatgggttcctctcacagaatatacacctgggaaggagacttgaaatgggaacaaatggaaatgagttttgtactatcaacactgctccaccttcttctcactcaggaaccacttatgagagcattgatattcaaaacagaaagaggtttgttgctcatcagttattaccagatttcgtggcctaggaagtaagaactgatggctagctagctagctaaaacaatattggataatttatgagagaaatcttagagttctgatgagtgtttctctagacttggctaattaacttcgctagcagcaccaagaaaagaaaaggagagggtttatgttattttcatttacatatatatacacatgcatgcagtcactaattatgaaatattgtaccgtgattctggtatactggaattcctggcatgggaggggatgctagctccctgtaaacattgaatagtagcatatagaactatacttgcagagatttaagttagcttaatattaattataggattcataaagttggggatggggtatatatattgtatatggtattggatgtagccaggtacgtagatggatttgaaagatttcttttgatttgatgttatatatatttgtgcaccagagttattatttgggtatagaagaagaagcattgctttgtaaaattaggtattcctgcgctgtgtttttggttccatatccgtttgtcttctgtgcatagctggttcaaggtggaattaattgtgggagacatgcataagagggaatatacgcataggcgtccaatttggacgccttctataaaatagagtttgag

SEQ ID NO: 27889 - DNA, 1197 bp, Glycine max
  Clone ID: TF_GmC1117_2
ggtgttgtgtgagacataagagcgtagaagatggtgagactgagataattgagcatcaatgagtggaagctgatcgatgggagtcgccacacggaggcatgccacgtgtgctgccagaagctgctcgtacagcggatgagtcgctatctccgctccttcagcttccactcatcgatgctcaattatctcagtctcaccatcttctacgctcttatgtctcacacaacactctttctctctcccctcatcaccgccaagaacttgacaacttcctggcacaatatttgatagttttgtgtacatttaaagaacagcttcagcaacatgtcagagtccacgccgtcgaggctgtcatggcctgccgtgatatcgaaaataccttacaagctctcactggagtgagtttgggagaaggaactggtgcaacaatgtcagatgacgaagatgatttacagatggatttttctttagatcaatctagcgctgaagggcatgacatgatgggatttggtcttcctacagaatctgaaaggtcattgatggaaagagttcgccaggaactaaagattgagctgaaacagggtttcaagtcaagaattgaagatgtcagggaagaaatattaaggaaacgtagagctgggaaattgccaggtgacacaacttctgtgttgaagaactggtggcagcaacatgcaaagtggccttacccaactgaagatgacaaggcaaaacttgtggaggagacagggttgcagctgaagcaaattaataattggttcatcaaccaaaggaaacgtaactggcacagcaactctcaatcggttacttctttaaagtccaaacgcaagaggtagacattatattattttgtccctaactatgtggaacagctagcaagcaacacaactatatataaggacatgcttattgctgataaagtgtagtcccactaaggattcagaagatagtagatgggttactgtaatattgtaagatagctgaaacaaattcgaggctggctgtaaatttgtggaacttaacgtatgcaaacttttcttttaggtgtggttaagttgcctctctttttaactgtctttgtaaattgttttgctacttttctgaccggcggaagaattattattactactacacagatgattgaaagattcgctgttctattaaatatgctctttggtc

SEQ ID NO: 27890 - DNA, 450 bp, Glycine max
  Clone ID: TF_LIB3242-236-Q1-J1-C12
tgcggagacagaaggccgcctaccggggaggccggaggccggctagtcgcggactcgggcgaacccaccctcgcgatctgtcaagtctgtccccaggggaggtccccctttcgggaggaagtttttaaggggatttctcaaaatcacccccgcgcttccttcactccttccttagagccggagcgcgcagggaccatgtcggcggagaccgcgagcggccccacagaggaccaggtggaaatcctggagtacaacttcaacaaggtcgacaagcacccggattccaccacgctgtgcctcatcgcggccgaggcaggcctttccgaggaggagacccagaaatggtttaagcagcgcctggcaaagtggcggcgctcagaaggcctgccctcagagtgcagatccgtcacagactaaggagatggcaggcattgacagcttcactccatg

SEQ ID NO: 27891 - DNA, 3311 bp, Glycine max
  Clone ID: TF_GmC2101_1
ggtgcttgaaagatgcaattgcagggcaggttcgcactgcgaataagagcttacgagaagaagattgctttggaggtaaaatggaaggttcgaggctcaaatatgttgaccatcatcttcggcaacagcgagctctccaacaattgggaatgatccagcacaatgcttggagaccccagagaggattgcctgaaagatccgtttctgttcttcgtgcttggctcttcgaacacttcctccacccttatcctaaggattcggacaagcacatgcttgcaaaacaaacagggttaacaagccactccgaaacaagtgaatagaaaagactggaccgtgaactaagagattattgcatggaatggtaacagttcagcggattcgtcgtgacaggacgctgctccacccgcacccgaaacatcagaatgaaacgaaacacggatggcattctcctgcaccctccttaaaatgagatacaacaactcatttccccactctttcctgtatacatctacttggtaattatttctcggtatttcttctttctccaaatatctttgtcgagcccctgagaacgtgtctgattctcctttctcgttccggcaacagggatcaaagtggttgtagagcgtcaacggatgtaacggagatagattcttctttcttacgttgcaaacattgacgcaatggtatcaacgaattaacttggtgtagggagattggaagctgaaatcgcttagtgatgaagccatggagcaaataatactcgcaagactagaagatgaaactcatactaaactgaaagagaacattggagcctcttataacttctgtcaacagtcaaaaggtgaggcaaccacgacatgttagacaccaaacacacgaaatgatggatacaagataagtacaaatgtccgaatttgaaaagcacatgaaaaaagctaacgacttaattcccgagtccccggccgcaaatccctcactacttatccatcttcaactgcggtcattccctgaacagaacttggatctttcaccagtaaaagctcgcaaggttgcacaggaggatcgtccaacctccaattggggatattcaaaggtttgagccagagccgtatacaccaagacctttggttcacgttgcagctcatccttcctggtctgttagcaacgccaggaacacatcaaacggttttcctaagtcaaaacagtcaactggtaagcacattagacacttggaccccagacgagtttaaagtcctaagcacttcgtcggatctgtcgatggctgcttacaacaatttgagtatgaaaaagcctgagatttttgctgatgaagtgttgcttgactgtgtaacagagattaaagattgaaaggagggcaacgtcgtaaaaacttactatgtcgggcaattaacaagtcccgcaagtggcctccgtagctttgaggtattgggaagtgggaaaagcaacaatgatttgtcaactacggaaagacaagaaattcagataaagaaagcaaagctaatcaacatgcttgatgaggtggagcaaaggtacaggcagtattcacaaccagatgaagatagtgatatcctcatttgagcaagctgctggaataggctcagcaagaacgtacactgcgcttgcattgcaaacaatttcgaagcaatttcggtgtttgaaggatgcaataacggggcaaatcagagctgcaaacaagagtttgggagaagaggattgttttggtgctaaaattgaaggatctaggctcaaatatgtggaccatcatctaaggtaacagagggcttttcagcacctgagaatgatccatcacaatgcttggagacccctgcgagtactggccaggatagcactttctgttctgcctgattggaagtttgaacactttcataatccttacaccaaggactcggacaagcacatgcttgctaaacaaacagggcttaccaggagccaggtttcaaattggttcattaatgctagagttcggctttggaagccaatggtggaggaaatgtacttggaggagatgaaagagcatgaactaaatggttctgaggagaaatcaagcaagagtggtgaagatcctgctacaaaaaccacaagtccacaagagaaacgtacttcctctgaaattgaatccaaaagtttcaattccaaacaagatgtttccaaacaaagccagaacactccaattcttccaacttctccaccatcaatatcacctatagggggaagtgttaagaaccaatcaggattcagtttcatggggtcatcagaacttgatggaatcacacaaggaagtcctaaaaaaccaaggaaccatgaaattcttcactctccaaaccgtgtcccttcaatcaacatggatgtgaaagccaatgaagcaaacaatgagcaacaactctcaatggatcacgagaggcagaataatagggatagctactccttcatggggaaccaaacaaacttcattagtggctttggacaataccctattgaggaaattggtaggtttgatgctgagcaattcacaccaaggttttcaggtaagaatggagtttccctcactcttggtcttcctcattgtgacacattgtcaggaacacaccaaagttttctcccaaaccaaaacattcaacttggaagagggttggacattggtgaaccaaaccagtttggtgccttgaacaattccaattctcacaattcagcagcatttgagagtatcaacatgcagaacccgaagaggtttgctgcacaattgctaccagactttgtggcctaaataagacattgaagaggggatagatcatagttggtgacattggttatatgggtctctcatattttcttctaatccatgtgcttgtttcttgggagtagtgataaaatcttagtgtaaagaaagaaggaattttactctagtataggtttataccttgcatagaaccattttagtttcttagatagcttagagatttgaaagtctatggttatttgaggttgtatattatttttgtaatttttgaaaatgggatagatgggttggtgtcataaaatttcaattggtaaagattacaatatatcttcgattgagagtatatgcaatgtaatattttgcaaggtagcttaggatttgaaagtatatgattgagattgtatattatttttgtaagttctgaaggtgggatagatggattgttgtcataaattttattttggtaaaagataccaatatatcttcgattgaaatctccatagaagaaagtggaaccaattacctttcc

SEQ ID NO: 27892 - DNA, 1891 bp, Glycine max
  Clone ID: TF_GmC637_1
cttcttccttcctccttctctctctcagcttctccccttcccaccctttctcccccactcatctcctgcaacaacaaacaaacaaacaccaccaacaacaaccactcctcttctttttcaccctcgaatccacgcttcctttacaccgcgtttggatctccgttaaacaaaaccattaaaatgtagcgagagaaaaacaaaacagaaaaagaaaatcagttaatttattaattttatttttttatggctttccacgaccatctccagcacgaaatagcgttccagcgtttcacggaggagcaagagttgaccgagaacagagacatgcagcagaggctcccacctccgacatggctcaacaacgttaacgcgcgtcaacagaatttcctcgacaccgagaagagcgtggatcggaacaaccgaagcgagagcaattgcgaatccgaggatttgagggaatacaaagcggacattctaggtcaccctctctacgatcaactgttgtcggcgcacgtctcgtgcctcagaatcgccacgccggtggaccagcttcctaggatcgatgcgcagcttcagcagtcgcagcgcgtggttgaaaagtactctgcacttgcacacaacggggtcgtcgatgagaaggagcttgatcagttcatgacccattatgttctgttgctctgtgcctttaaagaacaactgcagcagcatgtccgtgttcatgccatggaggcagtgatggcttgttgggatctggagcaatctctgcaaagcttgacaggtgtatctcctggtgaaggaacgggtgcaacaatgtcagacgatgaagatgaccaggcagagagcaatgccaacttatacgaaggaagccttgatggcggtgaaactcttggatttggtcctcttgtccccactgaaagtgaaagatctttgatggaaagagtcaggcatgagttgaagcatgaactaaaacagggttacaaggagaagattgtggacataagagaagaaattctacgaaagagacgagcggggaagcttccaggggacaccacatcccttttgaaagcttggtggcaatcacattctaaatggccttaccccactgaggaagacaaggctagattggtgcaggaaacagggttgcaattaaagcagataaataattggttcataaatcaaaggaaaaggaactggcatacaaataacccctcatcctctagcaactccaaaagcaagcgcaagagtagtgcaggagaagccagtaaccagagcttcatgtgaacggtcgcatattttgaacaaaaattattggtattgttctcccttttaatgcatgctcgtgggattcatagatcttacggtccagcgtgaacgtgatggattctggatgaaaaagggaaattcatgatatataaaaccactgtattggttgaattacagaaaattatccctggtattgttgtatatgaggctgctgcatgccgcttgatatctgatattgatgcagtcgcattctattcgatttaatgggtagcatgctgatattattctgcttatttaaaaatattatggatccaattagtataactcagtggataatgcatctaacttgttggatgctgatacgtacatataaatttttctacttatttttttaaaaaatccaattagtgtagttcaattttttttattaacaaatttaattgttagtttgttaatttttgttagtaggtaattgaatccaatcctttttttaaaccaccatatggtattactattacagttcacaggttttcgataaaaaagaaaaaaacaacatagaatccttgaatgcggtgcaaattaacgatcagttttatttgttacacacataagtgtcctacatctgata

SEQ ID NO: 27893 - DNA, 1594 bp, Glycine max
  Clone ID: TF_GmC637_4
cggaattttcgggatcccttacgcgtcgggtgaaatctaacaccgagcgtgtagatagtctatgaaatccaattaaatgttcttctgagaacaaagaacataagataacaaacagaaagcgcttataaatggctttccacgaccatctaccgcacgaaatcacgttccagccgtttaccgaggagcagcagttaggtcagagcagggacatgcagcggctgctcccgctctccggcggggcgccgacgtggctgaacaacagcaccgcggcgacgctccgccagcagaatttcctccacctgcagccggaatccgccgcaacgacgcagcaaaacgacgacgttcgcggcggcggcggcagcggcatggatcggaaccggaccgagagcaactctgaaccggatgatttggcagaatacaaagcggacattttaggtcaccctctctacgaccagctcctatcggcgcatgtctcatgcctgagaatcgccacccccgttgaccagcttccaaggatcgacgcgcagcttcagcagtcgcagcgcgtcgtcgacaagtactccggcatcggaaacggaaacggcgtcgtcgacgacaaagagcttgatcaattcatgacgcattatgttatactgctctgtgctttcaaagaacaattgcaacaacatgtacgtgttcatgctatggaagctgttatggcttgttgggagctggaacaatctctacaaagcttgactggtgtatctcccggtgaaggaacgggtgcaacaatgtccgacgatgaatattatcaggcagagagtaatgccaacttgttcgaaggaagcatggatggagctgatagtctcagctttggtcctcttgttcccacagaaactgaaagatctttgatggagcgtgtgaggcaggagctgaagcatgagttaaaacagggttacaaggacaagattgtggacataagagaagaaattttacgaaagagaagagcgggaaagctaccaggcgacaccacttcccttttaaaagcttggtggcagtcacattctaaatggccatatccaacagaagaggacaaggcaaggttggtgcaggaaacagggctgcaattaaagcagataaataactggttcataaatcaaagaaaaaggaattggcatactaatccgtcgtcttctagtggctccaaaagcaaacgcaagagtagtggtgcaggtgaaacaagtaaccagagcttcatgtgaatgaacacctgatttgaactgaaaaaaaaaatagatatatctctattcttcattttatgcaacaatggtgagattcatatatgaccggagcttagagggaaaaacatgaactgaaatggtggaatatggatgattaagagtaatttgtgataccaacatttacttggggggattaattaattacttggttcaattacagaaaaacctagtattgttgtatatgaggctgctgagttgatacctgatactgttgcaggcactatctatttggttcaatgggtatcgaatgcaatatgtattactattacagttcaaaggtttttgataaaaaaaaaaacaacatagaatccttg

SEQ ID NO: 27894 - DNA, 3238 bp, Glycine max
  Clone ID: TF_GmC2011_1
ctttgtcgacccacgcgtccgacctcttttgccctccattcaatgcaattgcaccctcttaatacgctctgcaattactcttcgctgccacattttcctccatttgttccccacttccctctcctccttcaatgcccttgtccctatctcttcttcttctcctcactttctctctgtaacacctcttcatgccatagcttctttttcttttctttttttccttataagtaaacattttttttttcaaaactgtcccaaacccttccttcaaaacggtcatctcttttcaacccaaaacagatctacaccttcatcttctactcccactctcactgaaaatccaagggctcaacttcttaagctttttctctatccaagaacctcttaggagagagaaagtgatatatatagagagagaaagagtcaattctacatatacttgttggtggtggtttttgaggcatgtgaagtatgcaagccgttattacgatgattggggcgagtagcgggccttcgatgatagcaaggaacaacaacaacgttggagggttttttggatcatcttcatcacctttcactcttgcccagattgagaaactataatcctctctccggaaccttaaaagatccgtagcaataatcataatgttccagccgaacctgatggacgcgttggagatgggtcagaacactcccgagagtgagattcctcgaatccgtgaggatgagttcgacagtgccgccgagtccggtattgaaaaccatgaaggtgccttcggtgaagggaatgaccctcgttgacccacgcgtctacgtaggctcgagaaggaactgagcagggagttagggttagagccattgcaggttaagttttggtttcagaacaagcgtactcagatgaagacacagcacgagcggcatgagaatacaaatctcagaaccgaaaacgagaagcttcgagcagataatatgaggtatagggaggctcttagcaatgcttcgtgtcctaattgtggtggaccaaccgctataggagaaatgtcattcgatgaacatcacttgaggcttgaaaacgcaaggctaagagaagagattgatcgcatctcagcaattgctgcaaagtatgtagggaagccagtggtgaactattcaaatatttctccttctctccctcctcgtccattagaactgggggttggtggtgctggttttggaggccaaccagggattggtgtggacatgtatggagctggggatcttcttaggtcaattagtggacccactgaagctgataagccaataatcatagagctagctgttgcagctatggaggagctcattgggatggcacaaatgggtgagcctctttggttaactacccttgatggcacatccactatgctcaatgaggatgagtacattaggtcttttcctcgagggattggtccaaaacctagtggcttcaaatgtgaagcttcaagagaaactgctgttgttatcatgaaccatgtcaacctcgttgagattctcatggatgtgaaccaatggtccacagtgttctctggtatagtctcaagagccatgactctggaagttctatcaacaggggtggctgggaactacaatggtgccttacaagtgatgacagcagaactacaactacctacaccacttgtgccaactcgcgagagttattttgtgaggtattgtaagcaacatgcagatgggacttgggcagttgtggatgtttctttggataatttgcgcccaggtccttcagccagatgtagaagaaggccttctggttgcttaattcaagaaatgccaaatggctattcaaaggtcacatgggttgagcatgtagaagtggatgatagaggtgttcacaatctttacaagcagcttgttagctctggacatgcatttggtgcaaaacgttgggttgcaaccttagatcgacaatgtgaaagactcgctagtgccatggcaacaaacattcccactgtagatgttggcgtgataacaaaccaagacgggagaaagagcatgatgaagctggctgaaagaatggtgataagcttttgtgctggagtgagtgcttccactgctcacacatggacaacactctctgggaccggtgctgatgatgtaagggttatgaccagaaagagtgtggatgaccctggaagaccccctggcatagttctcagtgctgccacttctttttggcttcctgttccacctaaacgagtctttgacttcctccgtgacgaaaactctaggaatgagtgggacattctttccaatggaggagttgtccaagaaatggcacacattgcaaacggaagagacacaggaaactgtgtatctctacttcgagtaaatagtgcaaattcgagccagagcaacatgttgatattacaagagagttgcaccaattcaacaggctcttttgtcatttatgctccggtggacattgttgcaatgaatgtggttctaaatggtggagacccagattacgtggcacttcttccttcagggtttgctattctccctgatggaaccacatcgcataatggaagtggtggcattggcgaaactggccctagtggttctctcttaaccgttgcgtttcaaatattggtggattctgttccaaccgcgaagctttctcttggatctgtggccactgtgaacaatctcattgcatgcactgttgagagaatcaaggcttctttgtctggtgaacctgcttgatcagagcttcaagacttttggattctgcgttgcagtttacaagaaggatcaacgggacgcattgcattgtggaaaattaaaaagttggtgttgaacctcggcttatattacaaagacggggagaagtcaagagcgcaccttgcatgattccttctcagtgccccaaaagagttatgagaggattaaggttcgggaattgacttccctagctagatatagtaaacgttaagagcacattttaagatcttgctaccctttaccatttccaagactaaaatatatatatagctagctaggattaaccttttgagtaactagggtttaacattaatgtaaaactcttgtctttttcaatatctgattttgtgtgatttagaagtagtagcaccggcactagttggtgggaaaatttgcatttaaaaaacagaaaaatttctcaccaaacctccttttttaaaaggttttgcaatggatttttcct

SEQ ID NO: 27895 - DNA, 2736 bp, Glycine max
  unsure (1)..(2736): unsure at all n locations
  Clone ID: TF_GmC1817_1
aattcggctcgaggtgaagaactccaagttcttggtgcctgcacaagaccttctcaacgagttttgtagccttgacgcaaagcaaagcgacttgggaaagccaacaaaatcgttgaataagaagcagtgggaagaggaaaataacggtatcggttcctcgaagaagcattctctgacctctctagagttcgtggagttgcagaagagaaagacaaagctgctttcgatgctggaagaggttgacagaaggtacaagcactaccgcaatcagatgaagagcgtggtgtcgtcgttcgaagcggtggcggggaatggtgctgccacggtgtactcagctttggcgttgaaagccatgtcgagacatttcaggtgtttgaaggatgggattatggcgcagattcaagcaacaagaaaagccatgggagagaaagacccagttgcaccaggcacaacaaggggcgaaacgccaaggctcaaagttattgaccaaacactgaggcaacaaagggcgtttcagcaaatgagcatgatggaaacccatccttggagacaccaacgtggccttcctgagcgagctgtggcagttcttcgggcttggctctttgagcatatccaacaatgttagcgaaccgatgccgaggctcatattttagcacgccaaaccggtctctcgagacgacaagtttcgtattggtttattaatgcaagggtgagactatggaagccaatggtggaggaaatgtacttggaggaagtgaaggaccctgaaaacaacatagcttcctcagaaggggctactgatcaagacaatgatataaacccaaataatgttgaataccctccacctccttcttcatcacgatcagaggatcagaagccatctctggttcgaattgactccgagtgtgcatcctccatcatcaacaaccacagtaccccagataacaaaaacgacccaaagggccacgaacagtgctttgggccagccctgcctgctttcgctcgcactctctccacccctcgcgtacagcctccttcgggagtttggttcggcgtgggcccgacatccggtctggggtgtccctgtcgctaggcttgcacaacagatgttgtcacaagatgggtatgtgagttctaattctaaagttgcaagtgtttatcaacaaggacatttcctggtgaagaactccaagttcttggttcctgcacaggaccttctcaacgagttttgtagcctttgtgcaaagcaaagcgacttgggaaagccaacaaaatcgttgaagaagcagtgggaagatcaggaaaataacggtgtcggttcttcgaagaagcattctctgacctctctagagttcgtggagttgcagaagagaaagacaaagctgctttcgatgctggaagaggttgacagaaggtacaagcactaccggaatcagatgaagagtgtggtgtcatcgtttgaagcggtggcggggaatggtgctgcgacagtgtactcagctttggcgttgaaggccatgtcgagacatttcaggtgtttgaaagatgggattttgtcgcagattcaggcaacaagaaaagccatgggagagaaagacccagttgcaccaggcacaacaaggggcgaaacgccaagacttaaagtcattgaccaaacactgagacaacaaagggcgtttcagcaaatgagcatgatggaaacacatccttggagaccccaacgtggccttccagagcgtgccgtttcagttcttcgggcttggctctttgaacattttctccatccgtacccaagcgatgttgataagcatattttagcacgccaaaccggtctctcgagaggccaggtttcgaattggtttattaatgcaagggtgagactatggaagccaatggtagaagaaatgtacttggaggaagtgaaggatcctgagaacaacatagcttcctcagaaggggctactgatcaagacaatgatataaacccaaataatgttcaataccctccacctcctttatcatcaagatcagaggatcagaagccatcactggttcgaattgactccgagtgtgcgtcctccatcatcaacaaccacagtaccccagataacaaaaacgatccaaagggccaagaacagtgctttgggtcagtggagcttgatttttcatcatacacacaccactcctcgggcatggtttcttacggaagtagtgatcagaatgggaacaacaaccagagtggggtgtctttgacgctagggttacagcaacatggggtgagtctagcgttcccgccagcaacacagagttcactgtactatccaagggaccaaattgaagattgtcaaccagttcatcagtactctcttttggacggtgaaggacaaaacctgccttacaggaatttgatgggagcacagcttctgcatgacttggcaggatagattatatatattaattcttgatttgaggaattgagattaaaatggtgagtataatcaacaacaaattaagattagtctctttttttttcacttttagctagctacgtacaaaattattatatagtacacaattaatgcttaattccatacataaagctatatatactcggttaatttgataaacgtacagtttaatttctacatgtgtatttatgttataatttggaatgcggacgcctaagtcaagagatccgggggcccggtttcgccggtnttnaaaaacatcatcgca

SEQ ID NO: 27896 - DNA, 779 bp, Glycine max
  unsure (1)..(779): unsure at all n locations
  Clone ID: TF_LIB4280-027-R1-K1-D7
ccacgcgtccgtttcaatttaaactatttatttatttttcatcagagaggataataattctgtgcctttccattccttgactatcacggaatttttttgatttccaaagagaaaaaaagagatgacaaaaataaataaaaacaaagaaacaccaaaatcgattctattcggttgccctaattattattattttccccttttcttctctgtgctgcttggttgggtttctttttgtggcttcgttgtggattcctagggtttgaaggtggaaagaggttcgatctcgatcgatggaggccgaggcagagaacaacgacgtgaagaaggaagaaaacagcaatgataacaacaacaacaacaacaatgaaagtaacagcaaaattgggaattcgagtgagggtctgagcaagcccaagcgtcagatgaagacgccgtttcagcttgaaacgctcgagaaagcttatgctgttgagaattacccgtcggagactatgagggtgngagttgtcggagaagttggggttgtcggatcggcagttgcagatgtggttctgtcaccggcggttgaaggacaagaaggagttgccgtcaaagaagccgcgaaagggcagcggcgttgccggattctccggtggaggagcccaagttggggcctgaagtgggtgttgaatatggatccgggtcaggtttcggngtccagcccgtttgcccggtcggagttgangaaatgtggtgcctccggggggtactatgagtcaccacangactatatggagctt

SEQ ID NO: 27897 - DNA, 731 bp, Glycine max
  Clone ID: TF_LIB4366-009-R1-K1-A7
ctcttttttcacctatataccctctaatattctaattctctctcttgatccaacaaacaaacactaccattttgtttgttctgagtagtgatccatgatggaacctcaacaacaacaacaacaagcacaagggagccaacaacaacaacaaaacgaggatggtggcagtggaaaaggggggtttctgagcaggcaaagtagtacacggtggactccaacaaacgaccagataagaatattgaaggaactttactacaacaatggaattagatccccgagtgcagagcagattcagaggatctctgctaggctgaggcagtacggtaagattgaaggcaagaatgtcttttattggttccagaaccacaaagctcgagaaaggcagaagaaaaggttcacttctgatcataatcataataatgtccccatgcaaagacccccaactaatccttctgctgcttggaaacctgatctagctgatcccattcacaccaccaagtattgtaacatctcttctactgcagggatctcttcggcatcatcttctgttgagatggttactgtgggacagatggggaattatgggtatggttctgtgcccatggagaaaagttttagggactgctcgatatcagctgggggtagcagtggccatgttggattaataaaccacaaacttgggtgggttggtgtggacccatataatttctcaacctatgccaacttctttg

SEQ ID NO: 27898 - DNA, 493 bp, Glycine max
  Clone ID: TF_uC-gmroLIB3259P256d10a1
cccccccccttaaaatataacatgggtttttggggtcaacccccccaaaaaactggggtaaaaaaaaattccataaacccctgaattttttatctctccccaaaggggggggtttccatcggggccggggggttgggaaccaaacggttttttgtttagggtgcaacccaagtttttggggaagcttgaccttcctttaagggtaaagcttgttttaaacccaaaagtttttttccaaagccttaatttgttccaaacttaaggaaccctttttttaaaaaggaggccccggtttttaaacacacccttttttgggggggccccccaaaaaaaaagggaaccccccgccaaacaagggggggggggtcccgggacaatgcccctttggggaaaaaaaaggaaaaattgtcttgggggccggggaaaaaactcagaccttaaaactctttctgagggggaaaaaggggatctttttgttgtggggagaaaaaca

SEQ ID NO: 27899 - DNA, 422 bp, Glycine max
  Clone ID: TF_10847932
acatggacgagggcttgtcaggcttttgcattatatcatcatcaggaagtgtccgtggcaaaagtggcaccaagtgtgggcgttggaatcccaccactgaacaggttaaacttctaactgaactcttcagatcagggctccgaaccccaagcactgaccagattcaaaagatctccactcagcttaccttttatggcaagatagagagcaagaatgtcttctattggtttcagaaccataaggctcgggaaagacagaagaaccgtaagctctcctttgatgatcacaaggatctcatttgtagacaaaatgcaccttctacacaaagtaagtaatatatatcttcgttccaatatactttttcataactatttacaataaataataataataataaaatgaattaaacttctcatataatt

SEQ ID NO: 27900 - DNA, 1520 bp, Glycine max
  Clone ID: TF_GmC1705_1
cccttcaatttattcatctctgacaccctcttaattctgcttccagatcttctccatgatcggttcctatcacctgattgattttaactatgtctctccaaactcaaatacctttatgtttttcttttcagtttattcgtctgatgagaaccttttaaagtctgcctccaggttcctccagaatgatgggtatgatcactcgtctctcacgcaatcaagtccatatcctaatactcatcatctacttctttcataataaataatagataagaatccactcacttgcacaacattttgcctttcagccaaggcaagttgctatatggttccaaaaccgaaggacaaggttcaagaccaagcagctagaaaaagactatggcgtgttgaaagctagttatgacagactcaaaagcgactatgaaagttttgggcaagagattgagatgcaaaatccacgggtgatgatgattacgattattcaaccaaaaaacaagcaaggcgcctattttggatttattaatttcaaaaaatgcaacaacattctagaaaatggaatcgaaagtgtcaacacttattatttatcctattaatgtaacatggaagcgagtggcagacaattcttcctaaagagaggtgcatgattcggagagcaaacattgcattaaagatggggagaagcaggagcattcggatgaaaagtcatctcctgatgatgctgtcaattcctcttcaccccacaacaacaaggagccaatggatttattaattatttcaaaaaatgcaacaacaacaacaacatctgaaaatgggaccaaagtgttgtcaccactcccactccctattatggtaacatgctgcaagcaagaagatgccaactcagccaaaagtgatgtccttgattcggatagcccacattgcacttcattcgtggagcctgctgattcctctcatgcctttgaaccagaagaccactcagaagacttctcccaagatgaagaggataaccttagtgaaaaccttttgatgaccttcccttcttcttgttgcttacctaaggttgaagaacactgctatgacggccctcctgaaaactcttgtaattttggcttccaggttgaggatcaaaccttctgtttctggccctattgaaccaaaccaaccaaccaaccgctagcaatgttttaaaaaactttgcagttgtaaccatgtactagaaagcaataaaaatggtattgttacttctactattcgttgagcctgctgattcctctcatgcctttgaaccggaagaccactcagaagacttctcccaagatgaagaggataaccttagtgaaaaccttttgatgaccttcccttcttcttgttgcttacctaaggttgaagaacactgctatgacggccctcctgaaaactcttgtaattttggcttccaggttgaggatcaaaccttctgtttctggccctattgaaccaaaccaaccaaccaaccgctagcaatgtttaaaaaactttgcagt

SEQ ID NO: 27901 - DNA, 750 bp, Glycine max
  Clone ID: TF_GmC1293_3
ggaaaatgatgtactaccaaagcaaaagtgctctcaaaagaacaagcagtgggaagaaggtaatagcggtggtggttcctcaaagaaccacttctcttagctctctagagtatgtggaattgcagaagagaaagacaaagctgctcgcgatgctggaagaggttgatagaagatacaaacactaccgtaaccaaatgaagggtgtggtgtcctcctttgaagcagtggcgggtaatggtgcagccactgtttactcggctctggctttgaaagccatgtcaagacattttaggtgtttgaaggatggaattatggatgaaattgaagccacaagaaaaggcatgggagagaaagaccacgtagcggcagtacccggcacaacaaggggcgaaacaccaaggcttagaatcgttgaccaatcgctgagacaacaaagggcctttcagcaaattagcatcatggaaacccatccttggagaccccaacgtggccttcccgaacgttccgtttctgttcttcgagcttggctttttgagcactttctccatccgtacccaagcgatgttgataaacatatcctagcccgccaagccggtctcttcagacgtcaggtttcgaattggtttattaacgcgagggtgaggctatggaagccgatggtggaggaaatgtatctggaagatgagaaagagcacgaacacgacgtagcatcatcgatattaatgttcccaagaggatgagaagccaacg

SEQ ID NO: 27902 - DNA, 861 bp, Glycine max
  Clone ID: TF_GmC2011_2
ccacgcgtccgattttcctccatctgttccccacttctctctctccttcaatgcccttgtccctctctcttcttcttcttcttcttcttctgcgtccgtctctgcgtgggcttctcttcatgatatagcttcttcaccttttttttctttcttttctttgttaccatatataagtaaactagattccataactgtcccaagcccttccttcaaaagggtcctctcttttcaacccaaaacagatctacaccttcatcttccaccaccactctcactgaatccaagggctcaacctcttaagctttttctctatccaagaacctcttaagagagagaaagaataagagaaagagaaagtgagagagccaattctacatttgttggtggtggtttttgaggcatgtgaaatatgcaagccggtattatgatgattccggcgagaaacatgccttcgatgatagcaagaaacaacaacgttgtagggttttttggatcatctgcacttttcactcttgcccagattgagaaactataagcctctccggaaccttaaaagatctatagcaataataatgttccagccgaacctgatggacgcgttggagatgggtcagaacacttccgagagtgaggttcctcgaatcctagaagacgagttcgacagtgccaccaagtccggtagtgaaaaccatgaaggtgcctctggtgaagaccaagaccctcgtcccaacaaaaagaagcgttaccaccgccacacccaacaccagatccaagaaatggaagcttttttcaaggagtgtccgcacccagatgacaagcaaaggaaggaactgagcagggagttagggttagagccattgc

SEQ ID NO: 27903 - DNA, 422 bp, Glycine max
  Clone ID: TF_LIB3108-022-Q1-K1-A9
agcatcctggtggtgaacatacaggagaaaaagatagaacctttgaaacatcgtttatcagagaacaatgggctttgcaacagctgagaaggaacgagcaacaatcttggaggcctcagaggggcctgcctgagaaatctgtctcggttctacgtgcatggatgttccaaaactttcttcacccgtacccaaaagacaacgaaaagcatttgctagccattcaaagtggattgacgagaagccaggtgtccaactggtttataaatgcgagagttcgcctctggaaaccattgatagaggaaatgtactcggaggtaaacaaaaagaatcgtccaatagaaggatcaggctgcgatagcaggaactatgcaagcattgggaatcaaagaattcagatgaattgaattactgaaatattctta

SEQ ID NO: 27904 - DNA, 646 bp, Glycine max
  Clone ID: TF_GmC419_97
ggctcgaggacctctgtccttaaagcttggtggcaatcacattccaagtggccttaccccacagaggaggataaggcacggttggtgcaggaaacgggtttgcagctaaagcagatcaataattggtttatcaatcaaaggaagaggaactggcatagcaacccctcaacttctactgccttgaagagcaagcgcaaaaggtcatagtggtgctgatcatcacatgtaaatggaggaaaactcaagaaccaatccctgactctgtactctgttagtttgtctctgcggtcaatcatggtgcatggcaagggattcaagtaaagccaatcataaaaaaaaaggttcacatttagcttccgctcatggaacgggcctaacacagatgtggaggatcaaaagcctgcagtacggtgatgcatcaaaattagggagttcaattaggaattacaccgctatcaaaatgggtaactccatgggagcatgatttttagtgatatatatatatatatatatacattaatgtttgtgaaatatatataatagtgaggggttgtgggtgtatagtaataatcagagcatttttccttcaataatgctaaatttgtttttgtgcttgaattcttggcctcgagggccaaattcccta

SEQ ID NO: 27905 - DNA, 1132 bp, Glycine max
  Clone ID: TF_GmC228470_1
agtacaaaaaaaccagtatcatttccctttctctttgatatctatgatcttcactgtctaaaattttctgctgcctttttttctgatttcaccgtgaataaaaccagaaaaagaaggataatacacagagagattcaaacaagaaaaaaaaaaaacccaattatccaaattttatatgaccccctacacccccacaaaaaaaatctatcagcctctcagaatcaattaaccttccctatatacaaaaataaaatcaatttccaagcctcaattcaacagcactagtcttgatgaacttcatatctttcaagatgctgtggattggtgttgatggggttgttggctactgtgaacaaatgggtggaacctcggtttgccaaaggggaatccaatggctttggaggttgagtcattgttgttattgttattacttgttttgacactggccatggctcctgaatttgtagcattgatggtggcactaatagataaggaagtggatgtagaatttgtggccacgcgctcacaagaagggcacattagtggaaggtaattgcttgtaattgcattttgaagtcttcaaagcccgtatttcttgaccctcattcctgaagctcctattctcttccgttaatgccccacaacatctcttcaagtaccaacaatccacttctgtttgcttcaacttagtcctgcatgcaatacacacattcacgattatttattagtataaccaatagtattactcataagtcataaccatgcatataacaaaaatgaaactaatcaagtgtatgacactcccatgtaaagttctttctaagattaaataaaaattaaaccatacccttttatataatatggtgtatgaaaaaaaatggtatgaaatttgaaaaatctagcaaatagcaaggtcatgtggaatagaactatgctcatgtgtaggatgttgtaccttgctcttcggttttggaaccaaacttctacttggcgaggttgaagattgagttgtttagcaagagcaagcttttgtttctgcatcacaaaattacgcgtccaacaccattattaattaggtacaaatactactaaaaaaacaaaaccaaacaaagaaaaagagacaagataaatt

SEQ ID NO: 27906 - DNA, 718 bp, Glycine max
  unsure (1)..(718): unsure at all n locations
  Clone ID: TF_GmC143165_1
ttttgttgcactgagtcatgataggttactaggagatacaagcaataccatcaacaaatgcagatggttgttcaatcattcgagtcagtggtgggtcttagttcggctaccccgtacgtctccttggctctcaagtcaatatcaaaacacttcaggtgcctaaaaaatgcaatctcagatcaactgaagcttacatgtgaagtcttgggagaggactattcaataccaaccacaagtactggtagtaaatttgacaacaatgtggccaggctaaggtgcatggaccaaaactttcaaaaaaacaaatctggcggggctaacataaactttcttgagccccaacaacacgtatggaggccccagaggggcttaccagaacgctccgtggcaattcttaaagcttggttatttgagcattttcttcatccttaccccacggacactgataaacacatgttggctagccaaacgggtctatcacgacaccaggtatcccattggtgcataaatgctcgagtccgcgtgtggaagccaatggttgaggaaatacacatgcttgaaacaaaaggcgcaacagaagcccaccaacaccaaacctctagttaaaatgaccagttagcttctgcctctngaggcagcaacaacccagctcaatctgataaccaacctgctcacgagtttggcgcgcatgcattgcattcacatgccatccctgaaa

SEQ ID NO: 27907 - DNA, 280 bp, Glycine max
  unsure (1)..(280): unsure at all n locations
  Clone ID: TF_701134378H1
gagaacagcnacnacatgnatggnnggnnagttccgatcgatntngganggnctcnncgaggaagggtgtgncgaagaancggggnntcanatctgagaagacngcgtcgactaagtgtggnacaagtganngctttggagaagaactttgaggttgaaancaagcttgaacctgagaggnaggtcaagcttgcccaagancttgggttgcagcctagcacaagtagccgtttggttccanaaccgccgagccncatggaaaaccagacantggagagag

SEQ ID NO: 27908 - DNA, 750 bp, Glycine max
  unsure (1)..(750): unsure at all n locations
  Clone ID: TF_LIB4392-003-Q1-K1-B8
cggactcttgggcggacgcgtgggcggacgcgtgggcggacgcgtgggttcacacaccaccaaactccaaacccaatcaattaacctcattgttccaaagcttcaaatttcaagtgactccaccccaatgggggatttcatcttctccttcaaaacacaacaacaagaacatcatgcacaccaccaaagagcaaagcatattttctttaagaagaggctaaccgaggaccaagtttcaattctcgagaagtgcttttcctccaacatgaagctcgaaccggagcagaagttccaccttgcaaaccaacttggtctgcctccaagacaagttgcaatttggtaccaaaacaaaagggcacgatggaagacccaaagccttgaggtggaccatggtgtgcttcaggcaggctagagaatgtggtggctgaaaagaagcagctagagaaagatgttgaaaggctcaaagctgagcttaagaaggctcaagagatgttgcttattaccaatagtgtcaaaggtggagaccataataataataatgcttgtgaattttcaacttcttttgaagaaggagggagtntctggggtggtgcttgatgatgccacttatcatcatcatcantgagtgttggcaaagtgggggntgagggtatgccangtttgaggagctctatgcttacttcggtgggtgcanattatggggacaggcttgcatgagaaagggcataaaatataacaaactttttgcta

SEQ ID NO: 27909 - DNA, 1597 bp, Glycine max
  Clone ID: TF_GmC53_2
caaatcctttctactgttacggtcctctcatcttcagagagcacttgccagattcagattagattcatttcatttctcatttacacgaattcggctcgaggtaagtatggtggttatcttagcagcttgagaaaggaatttctaaagaaaaggaaaaaaggtaagctaccaaaggatgcaaggatgatactcatggactggtggaacacacactataggtggccttatcctacggtaattgaaattaatatcatgaagtatatatatagcaatatagcttacgttatattgtgtattgctcattaacagtagtatgtgatctgatttgatgaaatatgccaaattgccaatataaagccaccttgaataatgtatgtccatcagcaatgatttgaaatccatagtttgtaattatggtcaagttgtgtgttatgttaaccctgcacaaaacattctaattgcttaattgcagaaaaattgtaacttggtgaattttgtcgccgatttgtatattgtagtgatatagtaattttcttcttaaggtagtccatgactagaggattcataacttgcatatttgtactgtgttccacatgcctagagaattcctattgttttgtaaaggaaaaaaatgtggttttagtccttatactttccacttaaactttttagttaaacttggctttatcctgataatttcaaagtgatgaatttaatcttccaacttttggaaatacgtgaattcagtccctcttcatgttttaacttgaactttttgaggtggattttagcctctaagaagaagagggactaaatttacatattttctaaagttggagaactaaatcaattgaaaagtatgggaatcaaaaccatgtttgaatgagagtatagagacaaaaaacgaatatttttcccttttttatatatttctagtagaggatgaactctacaaagttttgtatgaacttctgaatttaatatgcgagcatgggtaatttcatttttgttagttgcagaaaatgaggatgaaattgggtaattactaattaagcatgcgtgcttaacttaaatttgcacatgcaacttaccctgagccctggtggccaattaatcaatcaagcacagtttccatttaaatagacattgccaaatcttatataaatgccttgaaactaatcatttgttaggaggaagagaaagtgcagctatcagaaatgaccggacttgatcaaaagcagatcaataattggttcatcaatcaaaggaaacggcattggaaaccaacagaggacatgcgatttgccattatggatggtgtaagtggcagtggcttaggaggacctatgtgatttatttctcgagatggaccgtgttgattcccaatacttgtatcttctgctcgtgtgatgtgtgtataccttctattccgcgagatattaattttttgaacctacatttgtatgctaagtaggtccttcagctatatatatatatatatatgcaagtgtaaaaaactgtagctaatatacgcgacgacagtgataatcgatcaatgttactgaatcattatttcatggcaatacgttatactatt

SEQ ID NO: 27910 - DNA, 2939 bp, Glycine max
  Clone ID: TF_GmC378_1
cccacgcgttttttttttttgggagataaaagagaaagggtcaatccatttttttaaagtcttttgtgcgggtctgagggttgcagtgtgggggtgcaagagttacgactgatatttatttctcaatccattccctgttcaatgcaaaattcatcatgcttcttgtgctcaactcaaaggaaaatggagggccccagtgagataggtctcattggagaaaattttgatgctggtttgatggggaggatgagggacgatgagtatgaaagccgttctggaagtgataactttgaaggcgcatctggtgatgatcaggatggtggtgatgatcagccacagaggaagaagagataccacagacacacccctcaccaaattcaagagcttgaggctttcttcaaggagtgtcctcatcctgatgagaagcaaaggttggatctcagtaagaggcttggcttggagaataagcaagtcaagttctggtttcagaatcgacgaacccaaatgaagacccaactggaacgccatgagaacataatgcttaggcaggagaatgataagctcagagctgagaacagtttgatcaaggaagccatgtcaaatccagtgtgtaacaactgcggtggccctgcaattcctggccaaatttcatttgaggagcaccagattagaattgagaatgccagactaaaggatgaattgaaccgtatatgtgtcctagcaaacaagttccttggcaagccaatctcatcattgaccagtcccatggccctcacaacctcaaattctggtcttgaacttggtattggaaggaatgggattggtggttcaagcactcttggcactcccttgccaatggggcttgatttgggagatggagtgttaggcacccaacctgcaatgcctggggttagaccagcattgggtttgatgggaaatgaagttcagcttgagagatctatgcttatagatcttgcattggctgccatggaggaattactgaagatgactcaggcagagagccctctttggatcaagagtttggatggtgagaaggaaatctttaaccatgaggagtatgcaaggttgttttctccttgcattggtccaaaacccgctggctatataactgaagctacaagagaaactggaatagtaatcatcaacagtttagcccttgtggaaactttgatggacgcgaatcgatgggcagagatgtttccgtctatgattgctagagctatcaacctcgatgttatatctaatggcatgggtggaacaagaaatggtgctctacaagtgatgcatgctgaggttcaattgctttctccactagtccccgttcgtcaagtatacggctgcaagaagacgacagaaggggcagaaggtgtatgggctgtagttgatgtttccattgagataggtcacgatgctgctaatgcacagccatccattagctgtagaaggcttccttctggctgtattgtgcaggatatgccgaatggttactccaaggttacttggcttgagcattgggagtacgatgagaatgttgtccaccaactttatcgcccgttgctaagttctggtgttggattcggtgctcatagatggattgccaccctccaaaggcagtgtgaatgcttggctatcctaatgtcctcttccatttcaagtgatagtcacacagcattgagccaagctggtaggagaagcatgttgaaattggcacaacgcatgactagcaacttctgttccggggtttgtgcttcgtcagctcgcaagtgggacagccttcacattgggactcttggtgatgacatgaaagtgatgacaaggaaaaacgtggatgaccctggtgagcctcctgggattgtgctcagtgctgcaacttctgtttggatgccagtgtcacggcaaaggctgttcgactttctgcgtgatgaacggctgagaagtgagtgggacatcttgtccaatggtggaccaatgcaggagatggtacatattgccaaaggacaaggacatggaaactgtgtttctcttctccgtgctaatgctgttaacgccaacgatagcagcatgctgattctgcaagagacatggatggacgcgtcatgctcagtggtggtatatgcacctgttgacgtgcaatcactgaacgtggtgatgagtggtggagattctgcatacgttgcactcttgccttcaggctttgcaattcttcccgatggccactgcaacgacaacggctgcaacgggagtctgcagaagggccgcggcagcgacgacggcagtggcggaagccttctcacagtcggtttccaaattctggtgaatagtctcccaacagcaaagctcacagtggagtcagtggacactgtgaataacctcatctcctgcaccattcagaagatcaaagctgcactcagagttgcatgatgccaacaacaacaacaacaacaaccattttgttaatgcagtaataatatgcaaaagttaagttaccttaaaattattattttgtggtcttttttaattttttggtttctaagatgaatattattcggagaggggttatataattcggttgggtgtataggatttataattatatagagtagtggaagaggctgaggcagaaagggtcgcgtaaggaaggtttcgagtcaagaacgaaccgcgatggaggaacttgaattgtgctgtttgcatttgcatgcagcttttctctgctcatagtggttcgggtattgactcgttgacctgcgagttagtctcagtgctcttgtttagataagatgacagaaaaaaaaaaaacaaatgtgcgtgtgttactacttaaattattactagtgcccatccatccgatacagttgcaaattgctgaactaatgtattttggaattatgcatttttcatattttagtagtcttttt

SEQ ID NO: 27911 - DNA, 395 bp, Glycine max
  Clone ID: TF_LIB3242-270-Q1-J1-B8
cggctcgagggtccatgtcgttatcaggcatagagaacaagtgcaatgaagtacatggagatgatgagttatccgatgatggggtcttccagagtggggagaagaagaagaggttgaatttggaacaggtgaaggcccttgagaagagttttgatcaggggaacaaacttgagccagaaaggaaagtgcagttagctaaggctttggggttgcagccaagacaagttgccatatggtttcagaatagaagggctagatggaaaaccaagcaattggagaaagaatacgaagtcctcaagaagcagtttgaagcagtcaaggctgataatgatgttcttaaggttcggaaccagaaactacaggcagagttacaagctgtaaaaagtaaggattgg

SEQ ID NO: 27912 - DNA, 981 bp, Glycine max
  Clone ID: TF_GmC1019_2
atggtgaacgcgatggagtggcagaagcagcgttgttggcaaccaaacagaaacgcggaaatgatgtgcgtgaaagtgatgaccgacgaacagctcgagattctgcgcaaacagattgcggtttacgcaacaatctgcgaacaactcatcgagatgcacaaaaacatctctgcacaccaagatctcgcaggtattaggctggggaatatgtattgtgatccattgttggggtctggtggtctcaaaatagcttcaaggcagcggtggactccaactgctatgcagcttcagattctggagcgaatatttgatcaagggattgggactcccaccaaggaaaagatcaaggagatcactaatgagctcagccagcatggtcagatttctgagaccaatgtgtataattggttccagaacaggcgggctcgctccaaaagaaagcagcagaatgtggcgcctagtgctaatgctgaatcagaagtggagactgaggttgattctaaggataagaagacaaagccggacgaatttcaggcccctcctagcgtttctgctgggcctgctgataatttaggcttccagaaccatgatagtttgcagtacttgaatccagaatccaacaaaccagattctgtcttcccgtctgatgggaccagaaattttcatcatgtgcctgcttttgatgggctgctatcaaactcaaggagcaactatcttactggaaaactggaaacacctgagaactacgaattataccagccagcaggtgactacaacattgcaggttgacattcaatattattctgatgactgtgattagctgtaaagaattgctggtgtggttttgggcttgtgttgatgagaaaaattgaaccaattgaaacgtgaaacttatagtttgtagtatatagatacaatgatcttttatgtggtaggtggacattttacttgataatggaatataatcatgagttcatattg

SEQ ID NO: 27913 - DNA, 1005 bp, Glycine max
  unsure (1)..(1005): unsure at all n locations
  Clone ID: TF_GmC597467_1
ccaaaaaagacattgttgcttttcattttggcatcacagagtatcagagagaaagagagagagagcggttttgcagaaaaaatccaagtaaatttaaggagccaccactgttccaatcagcccctttcattttgcagtgcccgtttattttttcgtgtttgcattcaccgttccacagaaggaaaaaagagtgctttgttccatctctttctgtggtgtgtctcaagataaaaagctcactcactcacagcagcaacaacccttttaccttaactcttgaaactttgttcagagtttggattttgagagagcatgatctgatgaaggagtgtggaggctctcttgggggagagggcaaggaagaagaggactacacaaaacaagtgttgtctttttgaaccccaaaaaaaaacgtttttttttgttttgttgttatggcactttgtatgcagagtcagcagagagattcagcatcaaacaagctgctcatggattgtggcaagtatgtgaggtacacacctgaacaggtggaggctttggagagggtttatattgaatgtccaaagcctagttcttccagaaggcaacaaatcattagggagtgtccactccttgctaacattgaaacaaagcagatcaaagtgtggttccagaatcgcagatgtcgtgaaaagcagcggaaggaagcctctcgtctgcagacagtgaatagaaagctgtctgcaatgaacaagttgttgatggaagagaacgaccgactgcagaagcaggtctcacagttggtttatgataatggattcatgaaacaacaaatacatactgcatctgctactactactactgacaatagctgtgaatctgtggtagtgagtggtcaacgccaacatcaaaaccccaaaattcagcatccccagtgggatgccaacaacccagctggtcttcttgcaattgctcaggagaccctggcggctntcctttcaaaagctactggaactgctgtcaact

SEQ ID NO: 27914 - DNA, 2258 bp, Glycine max
  Clone ID: TF_GmC1502_1
cccccccttcgccttgagctcctttctctgttcctaagaggagttatgggggcaaattgaaaacgcattcaattacaacaaacacgttttttttttcggttaatgttgttgcattctcttttccttttgccgtaaacgggggccctcgcttttctcataagccactgaaaaattttgctcctttcgcccctaaactttaacagaggtcgttgttctgtcatatgatggagattggattatgatctaaatatatattatttagtattttaattttgatttcatatttaggaatcaagtgaattgcaatcagaagaaaataaagtctccaatgagaaaaataagaaaagaaagctgaaaacaccggcccagcttaaggccttggagaatttttataatgagcacaaataccccacagaggaaatgaaattagtacttgctgaggagttaggattgacagaaaagcaaatatctggatggttttgccacagaaggttaaaagataaaagattgatgaaagatgaagctgttgctaatgggcgacaagatcgttcaagtggtgtcatccaagatcgtggcagtggacttgggcaagattcatgcggaagcagtaagcatgctgatcacaggtatctggatcctaaggaggttgagagccatggcctctacaatcacgaattgtcagttgcagatatgacccacagacgtaggaaccattatcctgaaaatgttagcggggtggatgacacatcatctgagagcagctcatttttgcaagaaaggttttctcaaggtcaggatccatatgatatggagccttctagacatcttacacctaatggagctcttccacccctaaatcccaaaggtgcagttaagatggggcacaaaccatcaggatatttgaaagtgaagggcgagatagagcatgctgctataactgctgttagaaagcaattaggaaggcattatctggaagatggtccactacttggtatagaattcgatccacttcctccaggggcatttgaatgccaaactgcagatccagctaatgaaccgtactctgttacaaatcctctgctttcgaattctccagaaatctctgctgcaaaaagacaacccagtattagctctagatatgattcatattatactaaatttcgttcccaagattcgcatatggaaggagctgactttggttccttgcatgaatctgatttccaggataaacaagataagaaagcatgccagaatataaaacaaaggcaatctttatacggttataccaatcattttcctggaaggaacactttcccagatttgtatgaagactctactggagaagcatctgcttataatagcaataagagtcatagaatgagcactaaacatggtgttgaggggatgcgatctgattctgcttctaaccatagtgatcactatgaagagaagcttacagttaagcagaaaaccttgatgctgcatggttatgataacatcaatccaaagaatatacaaaggagtgaacatgtaaaatctaaaccttctagttcaatccataattcccgtgttcctatggatactgaagaacgggggttatctgctaggatggcaaaggaagagatgtttaagggggacaggaaagcaaaaaatacatactgcaatgtagatggagcaggaatgctttcaaatgaaattatggttgcaaaacgagctaaagttgacatgcttcaacaatacaatgtgaaaaaatcacctgttgctgagatggaacaaaggaaaattcagagatctgctgcagacttgccttctagctttagcgaggatgaaactgctgacaccaattcctcactggattattaagtgatgttgataaatgctaacaagtgtgtgggatttctctaagccattgggtatgtacagcctaaaatgacacatacattttctctgtaacgtgggaaccattgtttctggcagcaatggcagtgactcgctccatttgctgttttttgtgctcacctatttgcctttgtaaaagaaaaaaaatacaccccaggttattcttttgatgtaaaatctcatttcctgaagctacttgtggtaggtttaatgcagcttatatacttgtcacttgtcttttattgatttaattatggtagtgtgtatggcatcctaatttgctccaatttgatctcttgttttggagtgttggctacttctaatttatgatttaacaatttgatctcttgttttggagt

SEQ ID NO: 27915 - DNA, 608 bp, Glycine max
  Clone ID: TF_GmC1502_3
cccacgcgttggctcgagggaatgcaaagactgattggaacaagccagcaagcattgaacttgtttcttctccctttgtcttaccagaagctcctttcctgttcctaagcggagttagggggtcaaattgaattcatttgcaacaaacacctttttgttaatgttgttgcattctcttttcctattgccgtaaacgggtcctgtcctcgcttttctcacaagccactgaaaaattttgcacctttcgccccaaaactttaacagaggggtgttgttcaccgcaattcctcaccccgatggaagaatcaagtgaattgcaatcagaagaaaataaagtctccaatgagaaaaataagaaaagaaagctgaaaacaccggcccagcttaaggccttggagaatttttataatgagcacaaataccccacagaggaaatgaaattagtacttgctgaggagttaggattgacagaaaagcaaatatctggatggttttgccacagaaggttaaaagataaaagattgatgaaagatgaagcttgtgctaatgggcgacagatcgttcaagggtgtcatccagatcgtgcagtggacttgggcagattcatg

SEQ ID NO: 27916 - DNA, 998 bp, Glycine max
  Clone ID: TF_GmC18168_1
aattcggctcgagaacctttgctgacttctgtctttctctctcttatcatcataattcacaatcatcagagacagagagagatggtgaacgtggtggaatccagaaacagttgcagaggtggcagcagagtgggaatgtgaatgtgaatgtgaatgttgatgccaacggagaactcatgtatgtcaaggtcatgactgatgaacagttggaaactctgaggaagcaaatagccgtttatggcaccatttgtgagcaacttattgagatgcacagaacactctcagctcaacaggatcttgcaggggttaggttgggaaacatatactgtgaccaattgatgacatctggtgggcacaaaataacctcaagacaaaggtggacacctacacctgtgcagctacaaattcttgaacgtatatttgatcagggaaatggaactccaagcaaggaaaaaatcaaggaaatcactgctgaactgggccagcatggccaaatttctgaaacaaatgtgtataattggtttcagaataggcgtgctcgatccaaaagaaagctgcaaaatgtggctccttatagcactgaatcagaagtggacactgaggttgattctaagaataagaagacaaaagctgaggaggagtttcagtcccaacataacataacaacttctggaggggctgaaaagttgtgcttccagaaccctcaagtatactctgatcacttgcactacttgaaccctgattccaacaaaccatattccatgtgccaatcagattgcaatctgaaatccacaagaaattcgagtcatgtgtctgtttttaatgagatgctgtcaaactcaaggagtgagtatgtaggtggaaaaatggaagttgctgggagtgtgagctacaatttattccaccaaacaggagactgcaatctggcgggttgagatttagtgtgagctgtaaagaaccctgagttgtgtggatgggcttgtgttcatgtttatgac

SEQ ID NO: 27917 - DNA, 2166 bp, Glycine max
  Clone ID: TF_GmC30_1
gtaagaacatccctaccagataacaatcccctttacagcaaacacccacgcgatgtgggggctctgaagctacttcaccactccaaacccaccacaccaccattattcatatctcattctctaacctttcactctgccttactcactctctactttgctcatcatcgtagatgaaccaacacttctagtctctcttactttataaccatgtaaaaatgagtcacctaatgaaaaattagtagcttcttgttgtgctttttattttgtttgtgttgagataaatttgtttgtttgtttggtattgttttgtgttttatgaattatttgatgggtgaagaaggagaagtggtgagaaagcaaggacaaaggggtgttggtggagataagtggtacttgtatagctgcttacaagactgtaaatattggtgctgtttaatacacgagactagttctctttcgatggtcccttttgagtgaaaaaccttgtcttctcagctttctttcgagagatcttaaagacattgactaacaacaataaagtggatcaatcaaaagacttacttcttcttctaacaacaataagatcacatctttcccactcatgaagagacttagcagctcagattcttccagtgccctcatgacaatttgtccatcaacagaggaacatagtccgaggaacagccaacacatgtatggtagggagttccaatcgatgttggacggactcgacgaggaagggtgtgttgaagaaccggggtatcaatctgagaagaagcgtcgtctaagtgtggatcaagtgaaggctttggagaagaactttgaggttgaaaacaagcttgaacctgagaggaaggtgaagcttgcccaagaacttgggttgcaacctagacaggtagccgtatggttccaaaaccgtcgagccagatggaaaaccaaacaattggagagagattatggtgtactcaaagccaattatgatgctcttaagcttaactttgacaccctcgatcaggacaacgaagccttacgaaagcaggttaaggaattgaaatcgaggctgctgcaagaagagaacacaggaggaagcggtgtttcggtgaaggaagagataataacgaggcctgcagactcagaagacaaaacgatggaacaaagtaagagtgacccatcttctgaaacctcaaatattaatcctagttcggagtcggaggaggatcacttgaactacgagtgtttcaacaacaacgacgactgcgtcggaggaaccgccgcatcgctcttgcaagtggacttcaaagacggttcttccgacagcgacggatcaagcgcgattttgaacgaagacaacatgtactctcccttgaaattcaacaattgctccatatcaacctcgccgtcatcgtcttcgatgatgaactgttttcagttccagaaaccgtatcatcaccacgcgcagtacgtgaagatggaggagcacaatttcctcagcgcggatgaggcctgcaatttcttctcggatgaacaagcaccgacccttcaatggtactgtccagaacagtggagctgagataagaaacatggaaattaaaccgctttcagaaatttttgtttaatatgttgggttgtgttgaacactcattgaggtaaaagttgtaaaaaaaggtttgccggaaggtagaaaatgaaacactgtgcagaagatagagtgaaagagagaacagagatcaatggctgcatggcgtggggtcggagatgaaggatgacgattaaggttaattattactctcgatcgtgggtaatatcaataattattcaatcgtaaagcaaaccatgctgtaaaaaacaaatttcaattcaagtatagaataacgatgtagtactttatcaaacagaaaacgaaaaaaaaaattataaatctgttaaacaatatccttttgcctcactgaactcagtttactagtgtttatgattgattatccttttcctgtaaaagtatttttttttcaccaacaattgctactaaactgaatttgagttggaggcaacatatgagttgttttttaatgttcatttccattgacattgtttattcattagtcgtgtcaagtaaaaatatttttgttattagtatatcattcaaataaaatttattttatcaaaaaa

SEQ ID NO: 27918 - DNA, 1934 bp, Glycine max
  Clone ID: TF_GmC30_3
accacactaccattattcatatctcattctctaacctttcactctgccttactcactctctactttgctcatcatcgtagatgaaccaacacttctagtctctcttactttataaccatgtaaaaatgagtcacctaatgaaaaattagtagcttcttgttgtgctttttattttgtttgtgttgagataaatttgtttgtttgtttggtattgttttgtgttttatgaattatttgatgggtgaagaaggagaagtggtgagaaagcaaggacaaaggggtgttggtggagataagtggtacttgtatagctgcttacaagactgtaaatattggtgctgtttaatacacgagactagttctctttcgatggtcccttttgagtgaaaaaccttgtcttctcagctttctttcgagagatcttaaagacattgactaacaacaataaagtggatcaatcaaaagacttacttcttcttctaacaacaataagatcacatctttcccactcatgaagagacttagcagctcagattcttccagtgccctcatgacaatttgtccatcaacagaggaacatagtccgaggaacagccaacacatgtatggtagggagttccaatcgatgttggacggactcgacgaggaagggtgtgttgaagaaccggggtatcaatctgagaagaagcgtcgtctaagtgtggatcaagtgaaggctttggagaagaactttgaggttgaaaacaagcttgaacctgagaggaaggtgaagcttgcccaagaacttgggttgcaacctagacaggtagccgtatggttccaaaaccgtcgagccagatggaaaaccaaacaattggagagagattatggtgtactcaaagccaattatgatgctcttaagcttaactttgacaccctcgatcaggacaacgaagccttacgaaagcaggttaaggaattgaaatcgaggctgctgcaagaagagaacacaggaggaagcggtgtttcggtgaaggaagagataataacgaggcctgcagactcagaagacaaaacgatggaacaaagtaagagtgacccatcttctgaaacctcaaatattaatcctagttcggagtcggaggaggatcacttgaactacgagtgtttcaacaacaacgacgactgcgtcggaggaaccgccgcatcgctcttgcaagtggacttcaaagacggttcttccgacagcgacggatcaagcgcgattttgaacgaagacaacatgtactctcccttgaaattcaacaattgctccatatcaacctcgccgtcatcgtcttcgatgatgaactgttttcagttccagaaaccgtatcatcaccacgcgcagtacgtgaagatggaggagcacaatttcctcagcgcggatgaggcctgcaatttcttctcggatgaacaagcaccgacccttcaatggtactgtccagaacagtggagctgagaaaagaaacatggaaattaaaccgcttttagaaatttttgtttgaaggtagaaaatgaaatactgtgcaaaagaaaaagagagaacagagatcaatggctgcatggcgtggggtcggagatggaaggttgattattactactctcgaccgtgcggcagggggtaatattaataattattcaatcgtaaagcaaaccatgctgtaaaaacaaatttccattcaagtatggaataacggtgtagtacttttttaataaataaaaaaaacaacaacaacggtgtactacttttaggaaagagaaaacaaaaaaaaaaataattaaatcggttaaacaatatccccttcgcctcattgaactcaattttctagtatttatgatttgattattcttcggtgttcttctttttggaaaaaaaaaaaaaaaaaaaaaaaaaaaaaaaaaaaaaaggaaaa

SEQ ID NO: 27919 - DNA, 825 bp, Glycine max
  unsure (1)..(825): unsure at all n locations
  Clone ID: TF_GmC30_5
atttgtattggtttagaggaacatagtccgaggaacagccaacacatgtatggtagggagttccaatcgatgttggacggactcgacgaggaagggtgtgttgaagaaccggggtatcaatctgagaagaagcgtcgtctaagtgtggatcaagtgaaggctttggagaagaactttgaggttgaaaacaagcttgaacctgagaggaaggtgaagcttgcccaagaacttgggttgcaacctagacaggtagccgtatggttccaaaaccgtcgagccagatggaaaaccaaacaattggagagagattatggtgtactcaaagccaattatgatgctcttaagcttaactttgacaccctcgatcaggacaacgaagccttacgaaagcaggtagaataatactccttccaaaatataaacaaatttcgattatttatctgtcttattaatgatattttctccaaattatattttatttaataagataaaaaaaaaactatgtttaatataattaaaaaaaactatttatattttaattaaaaataatataatttattgaaattaattaatttttttaataagtatgaaatgtgtttgtttttcttataattaagatgggagagaatacataggagtataatatttatttcattttgagtctaattaattttaaattagaaaactacaggtaaattttgagtgagatagcanacttcatactaaatttgttnttttgtcctagaatttatgggtgtcttttttcaatcggatactaaatttgtcgagccttctgcttgaaattagtagtttttttctaattta

SEQ ID NO: 27920 - DNA, 1227 bp, Glycine max
  unsure (1)..(1227): unsure at all n locations
  Clone ID: TF_GmC30_6
nagaactactcatcactcactccaaacccaacaaaacaccattattcatatcccaattcccaaactttcactattccctctcattcactctctagctagtttcctcatcatcgtagaagaaccaatacttgtactctctcttactttttaaccatgtagaatgattcacctaaggaaaaattagtagcttcttgttgtgctttttattttgttttgttttgtgtagagataaatctgtttggtattgttttgtgttttatgaattatttgatgggtgaagaaggagaagtggtgagaaagcaaggacaaaggggtgttgaggaacatagtccgaggaacagccaacacatgtatggtagggagttccaatcgatgttggacggactcgacgaggaagggtgtgttgaagaaccggggtatcaatctgagaagaagcgtcgtctaagtgtggatcaagtgaaggctttggagaagaactttgaggttgaaaacaagcttgaacctgagaggaaggtgaagcttgcccaagaacttgggttgcaacctagacaggtagccgtatggttccaaaaccgtcgagccagatggaaaaccaaacaattggagagagattatggtgtactcaaagccaattatgatgctcttaagcttaactttgacaccctcgatcaggacaacgaagccttacgaaagcaggttaaggaattgaaatcgaggctgctgcaagaagagaacacaggaggaagcggtgtttcggtgaaggaagagataataacgaggcctgcagactcagaagacaaaacgatggaacaaagtaagagtgacccatcttctgaaacctcaaatattaatcctagttcggagtcggaggaggatcacttgaactacgagtgtttcaacaacaacgacgactgcgtcggaggaaccgccgcatcgctcttgcaagtggacttcaaagacggttcttccgacagcgacggatcaagcgcgattttgaacgaagacaacatgtactctcccttgaaattcaacaattgctccatatcaacctcgccgtcatcgtcttcgatgatgaactgttttcagttccagaaaccgtatcatcaccacgcgcagtacgtgaagatggaggagcacaatttcctcagcgcggatgaggcctgcaatttcttctcggatgaacaagcaccgacccttcaatggtactgtccagaacagtggagctga

SEQ ID NO: 27921 - DNA, 670 bp, Glycine max
  Clone ID: TF_GmC73539_1
ccacgcgtccgatatagggagggtgcacacaaacaagagtttattgagagagagagagagagagaagaagagggtggtgttgttgctgattcagtggagagaaagtggtggtgttgagagtgatcaagagagagagagagaaaagacaaaaaatggagtttggaagtggttctcctggtgatcaccatcatcaccatgatggttcttctgattcccagagaaggaagaagcgttaccaccgtcacacagctaaccagattcagaggcttgaatcgatgttcaaggagtgtccgcacccagatgagaagcagaggttgcagttgagtagggagttaggcttggcgcctagacagatcaaattttggttccagaacaggaggacccagatgaaggctcagcatgagagagctgataattgtgcactccgggcagagaatgacaagatacgttgtgagaacatagccataagggaagccttgaaaaatgttatctgcccctcttgtggtggtcctcctatgaatgatgattgttattttgatgaacagaagttgagattggagaatgcccaactcaaagaggagcttgatagagtatctagcattgcagctaagtacattggaaggccaatttctcaactcccacctgttgaggctattgacatatgttgtgt

SEQ ID NO: 27922 - DNA, 469 bp, Glycine max
  Clone ID: TF_GmC391285_1
ggctcgaggtttaggcggggcggcgagggtgctagacgtgaacctattccgggcggcgaccgcggaggatggcgacgacggcacgtcgttgtcgtcgtcgccaaacagcgcggtgtcaccgtttcagatggatttctgcaccaggaactgtaatgcagagttcggaggcagaaacaagagagagcagcaagaggctgagggtagagcgagtgatgacgatgaaaatggctccacgaggaagaaactcaggctctctaaggaacaatcagcttttcttgaagaaagtttcaaagaacacaccactctcaatcccaagcaaaaacttgctttggcaaaacagttaaatcttcgtcctcgtcaagtggaggtttgtgtttagaacagaagggccaggaccaagttgaagcaaacagaactgggttgtgagtatttgaagaaatgctgtgagaaccttaacagaagaagatta

SEQ ID NO: 27923 - DNA, 1842 bp, Glycine max
  Clone ID: TF_GmC4473_2
cgtaagctccacgcgcggctccaggcgtgcgctcacaaacagacacagagtgcgttcgttgacgacaaacacacacaaacacacaacaaaagctcgccggaaaatctttctccggcgacctggaattccgacgaaggtagttgcggctccttcgtcccgaaactgaggccctcaaagtataaactttggtggtggtgggtaggatctggcggtgtatgatgggatcttgcatatgcccgttggagactccggcgaggttgctttggaccacaagcttcttccgtcataagcttatgatcttctaataattaataattcacgcacacaaacaaacaaacaaacaaacaaaaaacacttcataacaacaacaacaacccttctgaaattctcaacacaagtttcaaaaaacagagtaaaagaaacagagcaaaaacacacacacaaaaacacaaacacagacaccttttaagtattaaggtgtctctttctctccccggaaagtttctccgtcggcggtggtgattgaccggagtgccatggagtctggacggattttctttggtgcctctgcttcaagcggcaacaacatgctctttctcggcaacactgaacttgcttttcgagggagatcgattatgagcatggaggaagcctcgaagaggcgacctttcttcacctcaccggatgaactgtatgatgaagagtattatgagaagcagtcgccggagaagaagcaccgcctcagttccgaacaggtccatctgttggagaagagctttgaggaagagaacaaattggagcctgagaggaagacccagttggctaagaagctgggattgcagcccaggcaggtggctgtgtggtttcagaaccgcagggctcgatggaagaccaagcaacttgaaagggattatgatgttctcaagtcttcatacgataccctactttcatcctatgattcaattatgaaggagaatgagaaactcaaatctgaggtggtatccttaaatgaaaagcttcaagttcaagctaaagaggtgcctgaggaaccattatgtgacaagaaagttgatccaattccagtagatgaagatatggctccgattttcggcacaagggtggaggaccacctgagtagtgggagtgttggaagtgcggtggtggatgagggtagtccacaggtggttgttgacagtgttgattcatacattctagctgacaactatggtggatgtgtgggcccggtcgagagggttcagtcggaggaggaggatgggagtgatgatgggaggagttacttggatgtgtttgtggtatctgaaactgagcaccaaaaccatgaggaaggagagacattgggttggtggactaatatgtattatgttggataaaatggtaatgcagcagtgctttcgaaattagatgcttaattaagaaaacgtaataatattgtataatgtatcatgtgggcgagggaggaaaaagtaaacgcctggattgggtggcttggacccctaggaggagttgaagtgtccttaacccgagtttaataaataaagtctagtagtaatttggtcaatggtgtcttgtgttggttaatggttgtactgccaaaattaaagtaagtatatttcttgttcaagtattaaaacatggttaattagtactatacaaaatttgagctgtatcttttttttttttgaatccaattttcgaaaaccattttgccaacttaatcaaaataaaatcgggggtaaggcccccaaaaaaggcaaagccctccccattgtcttgtaacccgtttcgaatagggcctattagcaaaaattattttccccccct

SEQ ID NO: 27924 - DNA, 1470 bp, Glycine max
  Clone ID: TF_GmC444_2
gggagaccctcttgtccctctctctcttctttcttctctcaccttttcctctctcaatttcctttcccttttgaaattatgatataagagaacaaaaactcccccttaaacagataaggtatatataagccacccttcagagcaatttgtccatcttcttcaatttattagcagaagatgtggtgcattagattaccttagtctttgtcctagtgtcttccacaacaacacgcgtccgcgtttccaaatattcacataagagaagaacaatagttctctccctagaaactcatgatatgctagataagccatccttaggagcaatatatccgtcctcttcaatttattagcagaaggtgtgttgcgtattagaccatagtctttttgtcattgttgtttcccaacaacgcagtttagcctttgagagcatcagcaatcacatggtgatcagaatatcattcagcaattgaagatcagtggcatcaggcataggctagcaagcaatgatatggctttcttcccagcaaatttcatgctacaaacacctcaccaagatgaccatcaacctccaccttcactcaactcaattataacttcatgtgcacctcaagagtaccatggtggaggagcatcctttcttggcaagagatctatgtcattttcagggattgagcttggagaagaagctaatgctgaggaagatttgtctgatgatggatcacaggcaggagagaagaaaaggaggcttaacatggaacaagtgaagacacttgagaagagctttgagttgggaaacaagcttgaacctgagaggaaaatgcagcttgcaagggctcttggcttgcaacctagacaaattgctatatggttccagaacagaagggctaggtggaagaccaagcagttggagaaagactatgatcttctcaaaagacaatatgaagctatcaagtcagataatgatgcacttcaagctcagaaccaaaaacttcaggctgaaatattggcactgaaaagcagagaaccaactgaatccatcaacctcaacaaagaaactgagggatccagcagcaatagaagtgagaacagctcagagatcaagttggatatctcaagaacaccagctattgacagtcctctatccactcagcagaacaacaacaacagaaccctctttccatcttctgctagaccaacaggagtggctcagcttttccaaaccactccaaggccagagattcagtgccaaaagattgatcacatggtcaaagaagagagcctaagcaacatgttctgtgccattgatgatcaatctggcctttggccttggttggagcagcaacatttcaattgatcatcatgcaaaaggagagtgtgagagtgagtgagagagtttcatattgcaatgtaatttttccttttccgaatgaaaatgaaatcatctagaggtgtctgtgtcaattgattacc

SEQ ID NO: 27925 - DNA, 1400 bp, Glycine max
  Clone ID: TF_GmC444_3
ctctctctctctttcctcccttccttccctctcaacttcattttcctttcaaatagtaacactagagaacaaaagctctggctagaacttgtaatgtatatgcaagccatcatcattcagaacaattagtgcatcatcctccttcaactgaagaactttatttaatttgctcctaaaatattttgtcagaggatgtggtgcagcataaaacctgcaatgagatggctttcttcccagcaaatttcatgctccaaacccctcaccatgatgatcaccatcatcatcaacctccaccttctctcacctcaattctaccaacgtgtgcacctcaagaatatcatgggggagtgaccattctaggaaagagatccatgtcattttcatcagggattgagcatggagaagaggccaataatgctgaggaagatttgtctgatgatggatcacaagcaggggagaagaagagaaggctcaacatggagcaagtgaagacacttgagaagagctttgagttggggaacaagcttgagccagagagaaaaatgcagcttgcaagagcacttggcttgcaaccaagacaaattgctatatggttccagaatagaagggccaggtggaagaccaagcagttggagaaagactatgatgttctcaaaagacagtatgaagctgtcaagtcagataatgatgcacttcaagctcagaaccaaaaacttcaggctgagatattggcactgaaaagtagagagccaactgaatccataaaccttaacaaagaaacagaaggatcctgcagcaatagaagtgagaacagctcagacatcaagttggatatctcaaggacaccagctattgacagtcctcattctacacatcagcaaagcagacccttctttcctccttcttctgctaggcctgcaggagttgctcagcttttccaaacttcttcaagaccagaccttccatcatgccaaaagattgaccaaatggtcaaagaagaaagcctaagcaacatgttttgtggcatggatgatcaatcggggttttggccatggttggagcagcaacatttcaattgaatattccaaaggaagagagagttattaattaatttaaaaaattggatgtagtaggttttctttttccctgtgaaatcaagagggtgtccatcaatttatcacaccatactttattatgatgagttcttaaattaaaaacccatgttttggaaacttggtgtataaaataggatatatatcaagtagaaattttctggcggcgcttgaaaattttcttgaaacttttgagtaatgctactatttggttcatgagttaattaatggggaatgagaagctgtcaagtcagattatgatgcacttcaagctcaggaccaaaaact

SEQ ID NO: 27926 - DNA, 830 bp, Glycine max
  Clone ID: TF_GmC444_4
cggccgctcgagccggcggccgggcgcctgctcgatctctctctctctctctctttcctcccttccttccctctcaacttcattttcctttcaaatagtaacactagagaacaaaagctctggctagaacttgtaatgtatatgcaagccatcatcattcagaacaattagtgcatcatcctccttcaactgaagaactttatttaatttgctcctaaaatattttgtcagaggatgtggtgcagtaatcctttgccattccttctttatttttaagcttacagcatctgcaatcatctcttattattacttcaaagtggcgatcacactatcattcattcagctgatcttgaagattttgtggcaggcataaaacctgcaatgagatggctttcttcccagcaaatttcatgctccaaacccctcaccatgatgatcaccatcatcatcaacctccaccttctctcacctcaattctaccaacgtgtgcacctcaagaatatcatgggggagtgaccattctaggaaagagatccatgtcattttcatcagggattgagcatggagaagaggccaataatgctgaggaagatttgtctgatgatggatcacaagcaggggagaagaagagaaggctcaacatggagcaagtgaagacacttgagaagagctttgagttggggaacaagcttgagccagagagaaaaatgcagcttgcaagagcacttggcttgcaaccaagacaaattgctatatggttccagaatagaagggccaggtggaagaccaagcagttggagaaagactatgatgttcccaaaagacagcat

SEQ ID NO: 27927 - DNA, 1585 bp, Glycine max
  Clone ID: TF_GmC3110_1
cggctcgaggctattttgaaccgcacgataccgaaaagctattttggccctgtgccaccaaagccatctcccccatttttgctcctctatctcttttttctaatcatcacaattgggtgagaaaaaaacacacacacaactcaacaatgggtgagaaagatgatggcttgggtttggggttgagtttgaagttaggatggggagaaaataatgataacaataataatcaacaacaacaccctttcaacgtgcacaagcctcctcaatcggttccaaaccaaagggtttccgtcaatagcttgttccattttcatgatcggagctccgagatgcggtcgttcttccgcggaatagacgtgaatttgccaccgcccccgccttcggcggctctggcggcgttcgatgacgagaacggggtgtcctcgccgaacagcacgatatcgagcatcaacgggaagcggagcgagagagagggaaacggagaggagaacgagagaacgtcgagttctcgcggcggcggcggaagcgacgacgatgaaggcggcgcgtgtggtggagacgccgacgccgatgcgtcgaggaagaagctgaggttgtctaaggaacaggccttggtgctggaagaaacagtcaaggaacacaatactctgaacccggagcaaaagcaagctttggcaaagcagttgaatttgatgcctaggcaggtggaggtgtggtttcaaaacagaagagcaaggaccaaattgaagcagactgaagtggattgtgaatatttgaagaggtgctgtgagaatctaactgaagagaataggaggcttcaaaaggaagtgcaagagctcagggcattgaagttatccccacagctttacatgcaaatgaaccctcccaccactctcacaatgtgcccttcatgtgagcgtgttgctgtctcatccgcatcctcttcctcatcggccaccatgccctctgccctgcctccagctaatctcaacccggtgggccctaccatccagcggccaatgcccgtcaacccttgggcagcaatgttgaatcagcaccgtggccggccataatcaaaccctccaggccgtaggtaatagggtaaagttcaggatggaagctaggacattttagttgtgctagacagaaatgaatcaaagaaataggaatcttatgtgttggttaactttactaggactttgagagctcatggtttgggaaattctatttgcatccttttttttttcattgcaccttccattctcttttacattgcagaaattagttttcggaatctacaatgcaattatagaaattaatttttgaaatgtaaaagaaaaggtagagattttgaagagttaaaaaaaaaggatgcaactagaatcatcctcatgcttttggttaactctttttgtctaggcttattttactttgagcatagatagaacatgtttttagtcaactttaggatgtgtaaagtttggacatgttaaagtagttagtgttttcatctgctgaacagtgtttgttatttgttaaccttggaaagttggaaaagggaattggaatctgtattttattttaa

SEQ ID NO: 27928 - DNA, 455 bp, Glycine max
  Clone ID: TF_jC-gmle01810092g05a1
agctgatctaatttgcattggtttagatgaacatagtccgaggaacagcctccatatgtgtggcatggagttcctatctatgttggacggacttgacgaggaacggtgcggtgactaaccgcggcattattctgtcaagaggcttcgactaactgtgctacaagtgtacgctatgtagaagaactttgactgagataacacgcttgcacctgagacgaaagtgaagcttgcccaagaacttgggttgccacctacaccagtagccatttggatccaaaacctccgaacccgatggagaaccatactgttggagagagattatggagacctcatagccaatgatgacgctcttaagcttaactacggcactctcaatgaggacaacctaatcttattatagcacgtagaataatcatacaacatagtataatatgtagaatagttgattatgagtc

SEQ ID NO: 27929 - DNA, 571 bp, Glycine max
  unsure (1)..(571): unsure at all n locations
  Clone ID: TF_jC-gmro02910022c12d1
ccacgcgtccggcaacgacgacgacgacggcgctcaggactcaggtgctttcggttcaggcggaggagggcatggagcgcggcgactgccagttcacggtggtgccgccgcggcagtacgacgaggcccagttcatgcaccagctgatggtggccggcgaccagcaggaccccgcgggcgcggggcggggagctgccgccgccggcggggagaggaagcggcggttcacggaggagcaggtgcggtcgctggagacgacgttccacgcgcggcgcgccaagctggagccccgggagaaggcggagctggcgcgggagcttggcctgcagccgcgccaggtggccatctggttccagaataagcgtgcgcggtggcgctccaagcagctggagcatgactacgccgcgctccgggctcagttcgacgcgatgcacgcccgcgtcgagtcgctcaggcaggagaagatcgcgctcgccgcgcaggtagacgagctgcgngggaggctgaacgagcggcaagaccagagcggcagctgcgaggtcaacgacgcggaggcggctgcggacgacaa

SEQ ID NO: 27930 - DNA, 1594 bp, Glycine max
  Clone ID: TF_GmC1705_3
ttaagagggaatctctctctttatttctttcactctctcagaaccaaaattttccaaactcctcaactctcatcagatatcaaccatctctctctctccaaactcaaatacctttctgttctgctcttcaatttattcatctctgacaccctcttaattctgcttccagttcctctgagtgatgggtatgatctctcctcactcccacaattcccacattatagtaatcctcatcacctgcttctttcgtcataaattctagatcaaactccactccctgatcctcccttttacttcttatgtagcatgtatgaactcaaatcatcaaatgaatatgaccctttaatctaagaagaagaaaaaaacacacacatacacacacacactttaaagtccaaagtctaaaccaacccaccaaaagtcttgttcccatggcgagtggcaagctttatgcgggttcaaacatgtcacttctcctccaaaacgaaaggctcccttgctcctctgaagtccttgagtctctttgggctcagacctctaaccctgcttccttccaaggttcaaaacccgtggttgattttgagaatgtaagtgggagcaggatgacggataggcctttctttcaagcgttggagaaggaagagaactgtgatgaggattacgaggggtgtttccaccaaccggggaagaaaaggaggctcacaagcgaacaagttcagttccttgaaaggaactttgaggtagagaacaagcttgaacccgaaaggaaagtccaacttgcaaaagagcttggcttgcagccaaggcaagttgctatatggttccaaaaccgaagggcaaggttcaagaccaagcagctagaaaaagactatggcgtgttgaaagctagttatgacagactcaaaagtgactatgaaagtcttgttcaagagaatgacaagttaaaagcagaggtgaattctctggagagcaaattgattcttagagataaagagaaggaggagaattcggatgacaagtcatctcctgatgatgctgtcaattcttcttcaccccacaacaacaaggagcctatggatttattaattatttcaaaaaatgcaacaacaacaacaacatctgaaaatgggaccaaagtgttgtcaccactcccactccctattatggtaacatgctgcaagcaagaagatgccaactcagccaaaagtgatgtccttgattcggatagcccacattgcacttcattcgtggagcctgctgattcctctcatgcctttgaaccagaagaccactcagaagacttctcccaagatgaagaggataaccttagtgaaaaccttttgatgaccttcccttcttcttgttgcttacctaaggttgaagaacactgctatgacggccctcctgaaaactcttgtaattttggcttccaggttgaggatcaaaccttctgtttctggccctattgaaccaaaccaaccaaccaaccgctagcaatgttttaaaaaactttgcagttgtaaccatgtactagaaagcaataaaaatggtattgttacttctaaaaaaaaaaaaaaaaaaaaaaaaaaaaaaa

SEQ ID NO: 27931 - DNA, 1740 bp, Glycine max
  Clone ID: TF_GmC1520_1
ggctcgagatcatccccgtattataaacccaggattgcctcttcttccaggaaccccctcaacaaaaggaaactctcattcaccttcttctctctccctcactccctctctttcttaatacaccaccttcccaaccctcttccattctccttctccaactccaacccctgcttcccttttttcattttctcactccccatcttctgagagtgatgggtgtttgctaccgctgttcccacacctcccacatcaccgccatcatcatcaccagcttcttccgccacaagccttagaattatactattcccaccctccctctttcttcaacaacaaccgttgacttcactacagtcacgtggtctttctctgaggatccaaccatggcggctggaactgtcttctgcgctgctgctactgctgcttctaatttgacaacaaccacttttcttcacaaccaaacacctccttccacctcctctcagcctcctctcgattctcttttcctctctgcctcttcccctttcctcggttcaagatctatagtgagttttggagatgttcaaggagggaaggggtgcaatgattcattcttccgcccctatgatgagaatggggatgaggacatggacgagtacttccaccagcctgagaagaagcgcaggctctccgtggagcaagtgaagtttcttgagaagagctttgatgaggagaacaagctcgagcccgagaggaagatttggctagccaaggaactcggcttgcagcctaggcaggtggcgatttggtttcagaaccgccgcgcgcgctggaagaccaagcagatggaaaaggactatgattccctgcaggctagttacaatgatctcaaggctaactatgacaaccttctcagggaaaaggataaactcaaagctgaggtggcaaggctcactgagaaggtgcttggaagagagaaaaatgagagtcacttggaacaggctgaaaccaacggattgcaggagccgctgcacaagtctttggttgattcagcttctgagggtgaagggtccaaagtgacctttgaggcttgtaaacaggaggacattagctcagccaagagtgacatatttgattcatcagaaagcccacaatacactgatggagttcactctgcacttctagagactggtgattcttcttatgtgttcgaacctgatcgatctgatgtgtctcaggatgaagaagataacttgagcaagacccttctgcctcattacatttttcccaagcttgaagatgttgattactccgacccacctcatggttcatgtaattttggaattccggaggaagatcaagccatttggtcttggccttactgaattttctctatagcatatagagcatgtctctaccttctactctcaagttcttctgtttaaacttgagatcatgtggtagaaaagggtgagttaataataagccaaagaaaaaatggcactctactggtttgttcccaatggtggtttcttgccagctttttttttttttttttttactttgcaatgtaacttttggttcaaatgtaaataaataatatcttcttgttgaggatgtagctctgaatatcacttcaaggatgaatttacatagcaaattagatgagaaaaatgggaagataaaaaaaggttatgttttcaaaaaaaaaaaaaaaaaaaaaaaaaaaaaaaaaaaaaaaaaaaaaaaaaaaaaaaaaaaatt

SEQ ID NO: 27932 - DNA, 1896 bp, Glycine max
  Clone ID: TF_GmC952_1
gaattcggccgagatcaaaacaagaacttgttcacccttccccttctccttacttctcactctctttccaaaacactccctttctctttccccttacccttcttctgtgtgtgatgatgtagatagagaataaaaagagaccagtgtgcagtgagaaagaggttggtcacttcttgtgtggctttgttttgttctttgtgttggaatttgttgatgggtgaagagggagaagaggtgtcaagagataaggaacagcaacacatgggagtttatggaaatgagtggttgtttagtagtttctgtgcaaattggcgccgtttaagacaccagaattcctgttctatgcctccttttgagtgaaaaaaaaaaaagcatcaaaacaaaaacttgttctctctcagcttttcatcttccgatcttaatatacattgactaaaagaaaaataaaaagggatcaaatttaagttccttgatctaattaaagatccttgcttttaattgtatactcatgaagagacttggcagttcggatacactgggtgctctcatgacgatttgtccaccaacagacgaacacagtccgaggaacaaccacgcgtatgggagggagtttcagtccatgctggaaggactcgacgaagaagggtgcgtggaagaaccagggcaccactctgagaagaaacgacgactaagcgtggatcaggtgaaggctttggagaagaacttcgaagtagagaacaaactcgaacctgaccgaaagttgaagctggcacaagaacttggcttgcaaccaagacaagttgcggtttggttccaaaaccgccgtgccagatggaagacaaagcaattggaaagagattacggcgtcctcaaagccaattatgaatcacttaaacttaactacgacaccctccaacaagacgacgaagccttactcaaagagataaaggaattgaaatcgaggctggtgcaagaagagaacaacaacaacactgaaagcgatgtttcggtgaaggaagagatgctaaccaccacgctctgtgaaaccgccattcctggatcggacacgaaggagttgagttacgagtgttttaacaagagtgatgaggtgggagggggttcttctgtgttccatgtggatttcaaagatggctcttctgatagtgactcaagcgcgatcttgaacgaggagaacaacaaccacagccccaacaataacgcggcgatttcgtcgtgtggggttctgcaaagtcacgggcttttgtcgtcgccttcttcttcgtcgatgaacaactgtttccagttccagaaacagtaccagacgacgacgcagtacgtgaagatggaggagcacaattttctcagcgccgacgaggcctgcaatttcttctcggacgaacaagcaccaactctgcagtggtactgttcagaggaatggagttaagagggaagaagaagaagcttaattaattgagagcgagggagggaatagaaagaataaggcattttgcagggtgtatagtaatgggatggagagagaaacattgtaaaaatgaaatggtcaaggattgaagaagagagggaaattgaagagcttgagagagaggggatggggttgaagcacgcatggcgtggggtcggagatgagaggttgatgacgataaaaaaaaaggggggtaataataatcatcaacatccgtgcggggaaaggggagtaatttatgaataataataatgattaggtcgtaatgaagtgaaatctatctagtgagtaatgctgtaaaaaatccacaattcacctctgcttccacctttctttctagctctcaccagttttatcggcttttgtatttctatatctagattaatttcttttataaaaaatctggaattaat

SEQ ID NO: 27933 - DNA, 1975 bp, Glycine max
  unsure (1)..(1975): unsure at all n locations
  Clone ID: TF_GmC952_2
ccttggtttatttaaagacacaaactcttgttcacccctgggcgtccgcttgttcacccttcttccctttctcacttaccactctcccccttctttccaaaacactccctttccctttctattcacttcccctacccttccgtgatgatgtagatagagaataaaaagagaccagtgtgcagtgagaaagagattgctcacttcttgtgtgggtttgttttgttctttgtgttggaatttgttcatgggtgaagaaggagaagaggtgtcaagagagaaggaacaatacatgggagtttatggaaatgagtggttgtattgtggttgctctgcaaattggcgccgtttaagacaccagaattcctgttccatgccttttttcaagtgaaaaaaaaaaacaattacttgttatctctcagcttttcttcttgagatcttaatatacattgacttaaaaaaaaaaaaaaaagggatcaaatttaagttccttgatcttaataaagttccgtgcttttgtttgtactcatgaagagacttggcagttctgattctctgggtgctctcatgacgatttgtccaccaacagacgaacacagtccgaggaacaaccacgcgtatgggagggagtttcagtccatgctggaaggactcgacgaagaagggtgcgtggaagaaccagggcaccactctgagaagaaacgacgactaagcgtggatcaggtgaaggctttggagaagaacttcgaagtagagaacaaactcgaacctgaccgaaagttgaagctggcacaagaacttggcttgcaaccaagacaagttgcggtttggttccaaaaccgtcgtgccagatggaagacaaagcaattggaaagagattacggcgtcctcaaagccaattatgaatcacttaaacttaactacgacaccctccaacaagaccacgaagccttactcaaagagataaaggaattgaaatcgaggctggtgcaagaagagaacaacaacaacactgaaagcgatgtttcggtgaaggaagagatgctgaccaccacgctctgtgaaaccgccattcctggatcggacacgaaggagttgagttacgagtgttttaacaagagtgatgaggtgggagggggttcttctgtgttccatgtggatttcaaagatggctcttctgatagtgactcaagcgcgatcttgaacgaggagaacaacaaccacagccccaacaataacgcggcgatttcgtcgtgtggggttctgcaaagtcacgggcttttgttgtcgccttcttcgtcgtcgatgaacaactgtttccagttccagaaacagtaccagacgacgacgacgcagtacgtaaagatggaggagcacaattttcttagcgccgacgaggcctgcaatttcttctcggatgaacaagcaccaactctgcagtggtactgttcagaggaatggagttaagaggaagaagcttaatgaggtttaattaattgagagcgagggagggcattttgcagggtgtatagtaatgggattgagagagaaactttgtaaaaatgaaatgctgaagattgaagaagagagggaatgaattgaagagcttgagagagagagaggggagggggttgaagcacacgcatggcttggggtcagagatgagaggttgatgacgataaaaaggggtaataataatactaataatcatcaatctctcggccgtgcgggggtaatttatgaataataatgatgattaggtcctaatgaaatctatctatctagtgagtaatgctgtaaaaatcagtccacaattcacctctgcttccactccttcctctcccaccacttttatcggcttttgtaattttatccagactttaactagattaatttgtcctttttttatttatcaaaatccccaattcataagtttttaagattaaaactaaatttctgtaaaaaaaatnnnntttat

SEQ ID NO: 27934 - DNA, 893 bp, Glycine max
  unsure (1)..(893): unsure at all n locations
  Clone ID: TF_GmC1502_2
ccacgcgtccgctttccaccttcaccataagctcctttctctgttcctaagaggagttatgggggcaaattgaaaacgcattcaattacaacaaacacgttttttttttgttaatgttgttgcattctcttttccttttgccgtaaacgggggccctcgcttttctcataagccactgaaaaattttgctcctttcgcccctaaactttaacagaggtcgttgttcaccgcaattcctcaccccaatggaagaatcaagtgaattgcaatcagaagaaaataaagtctccaatgagaaaaataagaaaagaaagctgaaaacaccggcgcagcttaaagccttggaggatttttataatgagcacaaataccccacggaggaaatgaaattagtacttgctgaggagttaggattgacagaaaagcaaatatctggatggttttgccacagaaggttaaaagataaaagattgatgaaagatgaagccgttgctaatgggagacaagatcgttcaagtggtgtcatccaagatcgtggcagtggacttgggcaagattcatgcggaagcagtaagcatgctgatcacaggtatctggatccgaaggaggttgagagccatggcctctacaatcacgaattgtcagttgcagatatgacccacagacgtaggaaccattatcctgaaaatgttagtggggtggatgacacatcatctgagagcagctcatttttgcaagaaaggttttctcaaggtcaggatccgtatgatatggagccttctagacatcttacacctaatggagctcttccacccctaaatcccaaaggtgcagttaagatggggcacaaaccatcangatatttgaaagtgaagggcgagatagagcatgct

SEQ ID NO: 27935 - DNA, 923 bp, Glycine max
  Clone ID: TF_GmC30_10
cttgtactctctcttactttttaaccatgtagaatgattcaccgaaggaaaaattagtagcttcttgttgtgctttttattttgttttgttttgtgtagagataaatctgtttggtattgttttgtgttttatgaattatttgatgggtgaagagggagaagaagtggtgagaaagcaaggacaaaggggtgttgatggagataaatggtacttgtatagctgcttacaagactgtaaatattggtgctgtaatttaatacacgagactagcagttctttttcgatggttccttttgagtgaaaaaaaccttgtcttctcatcagctttctttggagagatcttaaagacgacattgactgctaacaacaataaactggatcaatcattaaaggcttacttcttcttcttcttcttcttcttcttcttctaacaacaataagatcccatctttcccactcatgaagagacttaacagctcagattcttccactgccctcatgacaatttttccatcatcatcaacagaggaacatagtccgaggaacagccaccacatgtatggcagggagttccgatcgatgttggacggactcgacgaggaagggtgtgttgaagaaccggggcatcaatctgagaagaagcgtcgactaagtgtggaacaagtgaaggctttggagaagaactttgaggttgaaaacaagcttgaacctgagaggaaggtcaagcttgcccaagaacttgggttgcaacctagacaagtagccgtttggttccaaaaccgccgagccagatggaaaaccaaacaattggagagagattatggtgtcctcaaagccaattatgatgctcttaagcttaactttggcaccctcaatcaggacaacgaagccttacgaaagcagataaaggaattgaaatcga

SEQ ID NO: 27936 - DNA, 665 bp, Glycine max
  Clone ID: TF_GmC75260_1
aattcggctcgaggaatttcaattcaacaattaaaaacaaaaaaaaaaacaaaaattgatttccctgttcaatcagaaggtaaaaacaaaaccaaatgtgaaagctgattggaggaagaagcaaatgaaataaaaaagagagagaaattgttcttctgtctctattggctttcaactttccccagaagttactttctctctttcttttctctatgacgaattaagtgtcaaattgaatgaatcacacagacccacatgttaattttgcattttctcttggtttgggtcaaatgggtctcatttttctgagaacccagtgaaaacgcttgcacctttgactccaaaagctgcagagtagagggagattcatcacaattcctcacaaccatggaagaagcaactgagttccactctgaagaaaataaattgtctatggagaaaaataagaaaagaaggctcaaaacaccggcccagcttaagggcttggaagatttttataatgataacaaatatcccacggaggaaatgaaatcagaacttgccgatgagttagagttgacagaaaagcaaatatctggatggttttgccacagaagattgaaagataaaaaaatgttgaatgatgaagtatgtgctaatggacgacatgatcgttcaagtggtgt

SEQ ID NO: 27937 - DNA, 683 bp, Glycine max
  Clone ID: TF_GmC451723_1
ttcttgcgtccgcttaaatccaccacttcctgcgtcactttctctcttccccctggcctctctgccatttttgatccttcataaacacaccattcttcatttccttcatcaatgggcgccgacatgtccaacaataataatcctcctcccacttctcacgccaaagacttgtttgcttctccagctctctctctcagcctcgctggcatttttcgccatgctggggtggccgcggctgatgaggctgccacttctgtggaggagggcgccggagggagtggaggagctgctgataggttagaggagattagcagcgagaactccggccccacgagatccagatcagaggatgacttgtcaggaggagaagctgatcctgaagatgatgacgatgcccatggagacagcgaggacaagaagacgaagaagaagaagaagaagtatcacaggcacactgctgaacagatcagagaaatggaagcgcttttcaagagtcaccgcatcctgatgaaaagcagaggcaacaactcagcaaccaacttggccttgctccaaggctagttaagttttggttccaaaatcgtcgaacccaaatcaaggcaatacaagagcgccatgaatattcattggtgaagacagaattagacagacttagggaggaaaataaggccatgagagagacc

SEQ ID NO: 27938 - DNA, 1435 bp, Glycine max
  Clone ID: TF_GmC1235_1
aattatcaagcacaaattaataatatccgttcttgtggaacgataaagctttagttgtgcaaatattaaacaattgaggtaattaattaacacctacaatcatttgctggttggtgtctaattagaaaggcttattaatattgaatttgtgtggttcacaagtttgataaattcataagataataacatgactttgtggtatattaagattttggggagtgtgttgcacaccatatatcattcccaactgggctcgagcacacgtacatctatctctcccccccaaacccaccgttttattctctcaaatgggtcttgatcaggatgccaatagctcaggccttcacctcgttctagggctttctttgactgctagtgttaaggaaaccactcaatccaccaagcctgatgatgatcatcatctttgtgttatcaagccaactccaacgaaaccttatccttccaatgaaccgtctttgacgttggggctgtccggtaagggttaccacgtgcccaatcacgttgccatcaacaaggtttattgtgaggaccctcttgagttctctagacagacatcacctcacagtgttgtttcgtctttctcaactgggagggtcatcaagagggagagagatcttagctgtgaagacatggaggtagaggcagaagagagggtttcttcaagagtgagtgatgaagacgaagatggaaccaatgctagaaagaagctcagactcaccaaagaacaatctgcactgctagaagagagcttcaaacaacacagcactctcaaccccaaacagaagcaagctttagccagacggttaaatctccggcctcgacaagttgaagtgtggttccagaatcggagagccagaacaaagctgaagcaaacggaggtggactgtgagttcttaaagaaatgctgtgaaacattgaaggacgaaaacaggaggttaaagaaggagctgcaagagctgaaggcactgaaactagctcaacccttgtacatgcctatgcctgctgccacactcaccatgtgcccttcttgcgacaggctcggtggcgttaacgataacggttcgaataaaagccccttctccatggctcccaagcctcacttctataaccccttcgccaatccttcagcagcatgttgattattgtggttaggttttcactattcattcggggcgaagaggttaaaaaggcaagagttatttcccacaaccattgtatttttttggttgagggcgatgcgtctagctagctagggaaaattaagctgtaattagctaatactgttgagaatagtaactgctgattgaaattatcttttgcttttttcttcatctattgtatgtttatataaaccgttacagaaggtgttcatctatgaaggaattagaattttttttcttttgtcgttcaaaaa

SEQ ID NO: 27939 - DNA, 1305 bp, Glycine max
  Clone ID: TF_GmC66552_1
atatttccaaccgcaccatcatttttttcatctatatatataatatctattcacaacatattgcaagtttcaggtagcaaaccccttcaacatttttcaccctcagaattcatatcatgagttttcatgatacatcaaacacagggcttggacttggtcttggtcttggtcttgttagcttccatgatcaatcagggaattgcatgaagagtacaaataatgatcccatgagagaaagccataagatcaaaaaagtggagaatccatcatcaaaatgtaacaacacatacccttcacttacattaggaccaccagatgatgatgatggtgatgatgatgatgaagtgaataataataatcaaccaagttcaaagactgagtcctatgaatattttcgtccccaagtttcttctcctagtgcggtgtcttcattttccaactcttctagcatcaagagggaaagagatcaggtcttgggaggagaagaatttgaggtagtggtagagaaagttccaacaagggttgttggtgatgttgatgaggatggtaaccccagaaagaaacttagactcacaaagaacaagcagcagtcttggaggaaaatttcagagagcattctactctcaatccgaagcaaaagcaagaattggcaatgaaactgaatctgcgagcaagacaagtagaggtgtggtttcagaataggagagccaggacaaaactaaagcaaaccgagtcagattgtgaactactcaagaagtgctgtgatactctaacagtagaaaataagaagctgcaaaaggagctgcaagaactaaagtcaatgcaagcaacgccagtgcctctttatatgcagattccagcagccacactttccatatgcccttcttgtgagagaatctgcggtggcaacgaaaacaacggtgacaacaacaacaatggctcttcacacacgacaacgttgctcattggctcaaagacgcatcatcattccttttacaaaagtaacaactatccattccctcattcatcatccgcggcatgctagatatatatacatatatatatagttccgagctaatatatatatgtaattaaagataggtgattagtgattattactattagagatcaatcccccatgcaccacatgctttcttatatatatgtatacttcataaatggaaagatcaattcatagagatttttctaatttgttgtaatttattttatatgtaatatatttatggtctatgcgtacattacatatgaataacaatgcagggttatcacatagttcaatcaaaa

SEQ ID NO: 27940 - DNA, 590 bp, Glycine max
  unsure (1)..(590): unsure at all n locations
  Clone ID: TF_LIB4167-033-R1-K1-F6
cacgcgtccggtgtgttgtgtaactgangaactctaagtgaactagataccaaaaacactctcatacaacctcctcatacattgctccttctgttacgcaagtgaagtgtagttttgggaagcaagaatgtatggggattgccaagttatgtcaagtatgggagggaacgtagtagtaaactcagacactctcttctcctcctcgatccagaactctagcttcaacttcatccccaccatgccctttcaaccttttccttccatgaaagaagaagatgggatcttgcgagggaaggaagagatggaaagtggatcaggaagtgaacaattagttgaagacaaatcagggtatgaacaagagagtcatgaagaacccacaaagaagaaacgttatcacaggcacactgctcgccagatccaagaaatggaatctttgttcaaggaatgcccacaccctgatgataagcagaggctgaaactgagccatgaattgngtcttaaaccgcgccaggtcaagttctggttccagaaccgtcgaacccagatgaaggcacaacaagaccgggcagataatatgatacttagagctg

SEQ ID NO: 27941 - DNA, 1289 bp, Glycine max
  Clone ID: TF_GmC1019_1
cctcgtgggtttcggacaagaatatccctcaagacattggaataagacaaaccctatccttggtctgttccttcattcttattgtctccccgcatcgtacgccgccgacacagcttcgaatcgctgccaagtgctaacaaacgcctctgagtctctgacaccaacgcaactctctctgctcacatttttgaaggagatggtgaacgtgatggagtggcagaagcagcgttggcaaccgaatgggaacgcggaaatgatgtacgtgaaagtgatgaccgacgaacagctcgagactctgcgcaaacagattgcagtttacgcaaccatctgtgaacaactcatcgaaatgcacaaaaacatctcctcgcaccaagatcttgcagggattaggctggggaatatgtattgtgatccattgttggggtctggtgggcacaaaatagcttcaaggcagcggtggactccgtccgctatgcagcttcagattcttgagcgaatatttgatcaagggactggaacccccaccaaggaaaagatcaaggagatcactaatgagctcagccagcatggccagatttctgagaccaatgtgtataattggttccagaacaggcgtgctcgctccaaaagaaagcagcagaatgtggcacctagtgctaatgctgaatcggaagtggagactgaggttgattctaaggataagaagacaaagccggacgaatttcagtcccctcctagcgtttctgctgtgcctgctgatgataatttaggcttccagaaccatggcagtttgcagtacttgaatccagagtccaacaaaccagattctgtgttcccatctgatgcaagtttaagatctacaagaaatttcaatcatgtgcctgtttttgatgggctgctatcgaactcaacgagtgactatcttactggaaaaatggaagcacctgagaactacgacttataccagccagcaggcgacttcaacatggcaggttgacgtccaatgtaatttctgaagactgtgattagctgtaaagaattgctggtgtggttttgggcttgtgttgatgtgaaaagttgaaccaattgaagcatgaaacttatagtttatagtatatagataaaatgatcttttataatggtaggcggacattttacttgataattgaatataattatgagttaatattgatattgtgaagttggattttaaaaaaaatggtgaaccgtaagcgtcttccaccattggcttggctttggtatttggttaaaagagaaatggtaagaat

SEQ ID NO: 27942 - DNA, 2349 bp, Glycine max
  Clone ID: TF_GM240G09rgnA1.C1.o4.ma
atgtatccttcaaacttgggtggttcaggtcgtggtaatcgtctcaatcatgctacggtatctaaactcgaagcaatcttcagggaatgcccatatccgaatgaaaatcgacgccgtcaaataagtgaggagctagagcttagtctaaatcaagtcaaattttggtttcaaaataggaagactaaactaaaggtagtctattattttctttatgatgcttcatttttaaggacaattatttatacactagttttgtgtaattttcaggctataagtgagcgaatagataacaatgctcttcggcgtgagaatgaaaacatacaatcagaaaacctattaatgagagagtctctgcagaatgcattctgcttatcttgtgggggtctacccgtgggatcagtagagcgaaaacttcaattgcaatcattaaaggcaaaaaatattcaattagctaaagaggcaagaggaagattgctaaacccaatagttggacttccttctccttatcaacatagtcatgttcttagtactcctggtttcaatcaagatattcctgctccagctcctgctcttgattgctatattcctgatcctcctagtgatgatgttgcacttgattattgtattcctactcctgctagtgttcttgcggttgatcactctattccagctcttgctagtgatccttggcttggtcaagatattcctcatcttcccactcttgccacattggatcaagatattccacctcttggtcaagatacttctacccttcctcaggatcatatgcccaaggatcttgatcaagaattggatgcattgcgcggaattttgaacaatgatttgatattccaatctatcattaaccaaaggatagacctggacaatgcaatgatgtcacaaattgcaaataatgcaatcgaagagttaattaagcttttggatatgaaccaacccttctggtctatacatgactggaagttagttcttaaacgtgataattaccaaagcatacttggtaggagacattgcttacctggacctcatgcacggatagaatcctcaaaagattcacgaatagtggacatgaatgcggaacaacttgttcaaatgtttatgaatttggaaaaatgggttgatctgttcccaacaattgttacaaaagcccaaacaattcaagtactcgaaaacggtttggtaggaaatcgaagtggagctttgttgttgattaatgcagaaatgcacattctttcacatttggttccaactcgacaattctacttccttcgttattgtaaacaaattaaagaaggtgtgtgggtgataggggatgtgtcaattgattccttagaatacaaaaccattgttcctcgcatttggaggcgtccatctggatgcctcattcaagaaatgaatcacggattgtgcaaggtttcttgggtggagcacgtggaagtggatgataagatgcaaactcaccagcttttcactgatgttatttgttgcaataatgcatatggagcagaaagatggctttcgacacttaaaagaatgtgtgagagatttgcatgcgcttcagctgaaactatacccagttgtgacgagtctggagaagccattttatcacttgaaggaaagaagagtgtgatgcacttggctcatcgaatggttaagactttttgccgcactttagacgtgtcagattgtgagaacttcccatatttaacgaggatgatgaataatggtgaggttacaataattgttcgcaagaataactcagaacaagatgtgccacaaggcttgattctcagtgctgctacctcttttctacttccgcactctccagaaaatgtttttgacttcttgatagacaacaagaaacgagctaagtgggaacctttttggtatggaaagccagggcacgagattcaacgcatctcaactggaaataatccaggaaatttcatttcaattacgaaggctcttggccccagtgataacaatatgatagttcttcaagaaagttatgcagatggtttgggatctatgatggtatactcagcttttgatacggagacaatgaattttgccatgaggggagaagacacgtcacagttgttggttcttccctctggctttaccatatctggggatggtcattcaaatgcttttgaaggacaatctagacaagtggtgtcaaaaggttcattggttactctaatgttacaagttctagcttctagtactcctagcatggacatgatagacatggaatttgtaggttctgtcactacacttgtgtcctcaacagtggagaaaattaaagctgctttgaattgttccaattaa

SEQ ID NO: 27943 - DNA, 1819 bp, Glycine max
  Clone ID: TF_GmC3892_1
caatgaagaaagttcaagctctgatttcacatctgattccgaggatcaagagaatggatttggggataacacatcccctttccagaatgagatcacccatactagctttaaaaaggcgaataagctaagaatatctatggatgatgaactgtcatctttactagagccagattctcagcaacggagtgccacagcctgttaaggagattgacatggcgaaggcggaaactactcgaagcagattgaagatacggggatcagtgatactagtgatgatgaagattggaatgacgcagctgctccaagtagaaaaaagaaactcactggcaatgtgactccagtgtcaccaaatgcaaatgcttcaaataattctatacatactcttaagagaaatgctcatcagaataaagttgaaaatacaaatagttcacccactaaatcccttgatggccgttcgaaatctggttccagggataaaaggtctggatcttcagcacacaaaagactaggagaagccgtagttcagagacttcacaaatcttttaaagaaaatcagtatccagatagaagcacaaaagaaagcctggcacaagaacttggacttacttatcagcaggttgccaaatggttcgacaatacacgttggagcttccggcattcatcacaaatggaaaccaattctggtagaaatgcttcaccggaaggtaccgaaggcagggctgaaaagggatgatgaagattggaatgacactgctgctccaagtggaaaaaagaaactcactggcaatgtaactcctgtgtcaccaaatggaaatgcttcaaataattctatacatactcctaagaggaatgctcatcagaataatgttgaaaatacaaataattcacccactaaatcacttgagggctgttcgaaatctggttccagggataaaaagtctggatcttcagcacacaaaagactaggagaagccgtagttcagagacttcacaaatcttttaaagaaaatcagtatccagatagaaccacaaaagaaagcttggcacaagaacttggacttacttatcagcaggttgccaaatggtttggcaatacacgttggagcttccggcattcatcacaaatggaaaccaattcaggtataaatgcttcacagcaagttactgatggcagagctgaaaatgagggggagaaggaatgtgaattaatatctctggagttcagtggagaaaaatcaaaaaccccaaactctagaaaaaggaagcatttgtcagaacccctatctgaagcacagctggatatcaatggctcagcagcaagttcaccaaatgttcatctaacgcaaataggcaataaaatgaagacaaggaaaaggaaatgatgcttagttgagaagtcgggtttaaccttttcctaaggcttcaaattgcagtatccatccttttgtgagattgagatcccatgagatgatcagctcagatctcgatggatttgtttccatttaggaagggaaccctagtaaatattgcagcttatgtgtttgactgttcacaatgtatggatatggctctcatcttgcattgatcgtgtgtggttcgacattcaaggtgggttgttttcgggaatcatgaagctgctacgttggtcaattgttggcaatccccatttcctttaaacaaaaatttgtcatggatctgtgatttgagtaatagagtggggggatgggagcatcatatattccaattgctgcatgcacattgcttaacttaataacctattattattgtgaggaatggaagtaaaataacacattgaggg

SEQ ID NO: 27944 - DNA, 681 bp, Glycine max
  Clone ID: TF_GmC617300_1
gagagagagagagagtggatgaaatgttagagagagaaactctgaattcacgcgtccagctaccccttttggctctgattttgctttccgtgttcttcgagggtttttggtttctgggttgtttctgattttggggttttgggtttctctggaacaaaaatagttcaattttgttgttggggttttgtgagtaaaaagcttgatatttgtgtatggagggtgtttctgaaggagagaagaagaaggagccagtggaaggagagaataagagcaagcgcaaaatgaagacggcttcacagttggaagttctggaaaaagcctatgctgcggaggcttacccttcggaggctttgcgggctgagctatccgtgaagctgagtctgtctgatcgtcaattgcagatgtggttctgtcaccggagactgaaggaccgaaatgccaagaagctgcaaaatgattcatcccttgcgggggctccggcggtgggtgaggagggtgttgagcaagtgacaggggctgatgttgggcgtgattgtggtttagcttctgggccattcaatcatctggattcgcggaaaattgcgcctcggcctgggatgacggcctttcctagtatgggagctggattgccagcagtggtgggcagcagttactatgaaccacctcagaacatggatgtgc

SEQ ID NO: 27945 - DNA, 3124 bp, Glycine max
  Clone ID: TF_GmC6526_1
ctcttataagcaaccccatctctctgtcccaatcccaacataccccccactggtccttttccattctttatacagacacacacaataaagaaaaagaaaaactacgttttcctttcactattctttttcaccctctccctctctcccatatatgatccaatatattgctataatacaatagaaccaacaactgtgacagacaaactctgagtagtacctcttttattctcctcctccttctctttcattctcaaaccactctgccatagtcttttctttcacctcttaatgaaacctcttggtttgtgtggttgaaacaaacaaagataagtcataataataaatcgggttggattcggaagggatgatggcggtgagttcagcctgcaaagatgggagcaaggtggcactggacaacggcaagtacgttaggtacacacctgaacaggtggaagcactggagaggctctaccatgaatgtccaaaaccaagttctcttcgccgtcaacaactcatcagagagtgtcccattctctccaacatcgaacccaaacagatcaaggtttggttccaaaaccgaaggtgcagagagaagcagcggaaagaagcgtcacggctgcaagctgtgaacaggaagctaacagcaatgaataaattactgatggaggaaaacgacagattgcagaagcaggtgtcacacctcgtctatgaaaacagctttttccgccaacagacacacaacaacaacgctacgcttgccacaacagacacaaacacaagctgtgagtcggtggtgacgagtggtcagcggaacttgacaccgcagcagcatccaccgagggatgctagccctgcaggacttttgtccattgcagaggagactttagcagagtttctttcaaaggccactggaactgctgtcgagtgggtccaaatgcctgggatgaagcctggtccggattccattggaatcgttgctatttctcacggttgccctggagtggctgcacgtgcttgcggccttgtgggtctagaacctacccgggttgtcttttcctcttgcaactttgcagtggagtggatgagcatgcagttggcaccagcgcagaacttgtttttgctccaatcgatgcatctttctctgatgatgcgcccattttaccttctggttttcgcatcatacctcttgattctggcacagatgctgctagtccacatcacttttggaggacggtagttttgtggtctgtgaaagatcacttaacaacactcagaatggtcctgctatgcccccagtgcagcattttgttagagcagacatgctgccaagcgggtatttgataagaccctgcgaaggagggggatcccaaccatggccagacaatatgttcgtagtatcattgcatctgttcaaagggtttcattagcactttctccttcgcgctttggttctcacaatgctttccacttaccacctggcactcctgaggcacaaacacttgctcgatggatctgtaacagctaccggttctatcttggggtagaacttctaaaatgtgaaggcagtgaatccattctcaagtctctttggcatcactcagatgcagttttgtgctgctctttagtccatgttagagagtgatggcattgatgatgtcacccttcttgtgaattcctcacctagcaagatgatgggagttagccttgtctataacaacaatggatttccttctgtgagcagttctgtgctatgtgagttcccccagataatgcagcagaatgtccctccagcaattcttcttagattcttgcgggagcaccgatcagaatgggcagacagcagtattgatgcttactcagctgctgccatcaaagctggtccctgtagcttgccaggggcccgatcaggaggttttggcggtcgggttattcttccactagctcacacaattgagcatgaagagttcatggaggttatcaagcttgaaaacatgggctactatagggacgacatgagtatacctggtgatgttttcctcttgcaactttgcagtggagtggatgagcatgcggttggcaccagtgcagaacttgtttttgctccaattgacgcatctttctctgatgatgcacccattttaccttctggttttcgcatcatacctctagattctggcacagatgctgctagtccaaaccgtacacttgatttggcttctgcacttgaggttggcacaacagcaaacaaagcagctagtgacaactcagctcattctgggagcacaaagtctgtgatgacaatagcattccagtttgcattcgaagttcaccttcaagagaacatagcaaccatggccaggcaatatgttcgtagcatcattgcatctgttcagagggtttcattagcactttctccttcgcgctttggttctcacaatgcttttcacttaccacctggcactcctgaggcacaaacacttgctcgatggatctgtaacagctatcggttctatcttggggtagaacttctaaaatgtgaaggcagtgagtccattctcaagtctctttggcatcactcggatgcagttttgtgctgctctttaaaggcattacccgttttcacgtttgcaaatcaagctggacttgacatgcttgagacaactttggttgcacttcaagacatcactctggaaaagatttttgatgacaatggaaagaaaactctgtgcactgagttcccccagataatgcagcagggtttcatgtgtattcaaggtggtatctgtttatccagcatgggaaggccagtgtcctatgagagagcagttgcatggaaagtgttaaacgaagaagaatccgcccattgcatctgttttatgttcatcaattggtcctttgtctaatatattaaacagtattaggatgtaggaaagaaaagtagagcacaagagtacctaactttggcgaatccctagaatgctttaaaactctagtgggcatatgcgccaccaagatctatctatggccccatttgttttatttttaaaaaaaagggcggccgcccacaaattagctagctggtccagccattaattcagtccgggcccgtgccggcgggcgagcc

SEQ ID NO: 27946 - DNA, 785 bp, Glycine max
  Clone ID: TF_GmC69305_1
ggttgtagaaaggaggaaggtttattcatttttgcagcactctccaactttcttctttgctttctataacttactgggcacatatatagaaatagatagatagtctttgctttcaaagtttacactttgcttcgcgattaatccacgctcctagctcttctaaataccctttctttcttttgcaaccatataataccccgaaaccgttctcttttacatcggtatcgttgtcgcagatggagctagctttgagcttaggcgacacacccaagcccttctctttgcccgcaaaaaatgattctgtgagtttcaaaatagcactgggtgacgacaaaagggtttcttcagatccacccgttcagctcgaccttcttccttcaacaccagttcttccttcttcacgccttcgaattccatggctctccgatgcactgggtatggaacgtgtgacatcagagattccggtgagggcggtggatgacactgacgatggtgctgcactttcatcccccaacagtgcagtgtcatcttttcagatggatttttgtttcaggaacagtagaaagtcttgtgagggtgccagcgacgaggacgacgaaaatggctcaacaaggaagaaacttagactctccaaacaacaatcagttttcctcgaagagagcttcaaagaacacaccactctcaatcccaagcaaaaacttgcgcttgcaaaacagttaaatctccgtccacgtcaagtggaagtttggtttcagaacagaagggcaaggacaaagttgaagcag

SEQ ID NO: 27947 - DNA, 1058 bp, Glycine max
  Clone ID: TF_GmC1889_1
tgaatgcatgtttttaactgtttcgtgagcaacaatggtccctttcattgttttctgtgtgttttctatggcggttttaccaagtagctcctcaagcttggaattgaccatatctgtacctggttttgcttcttcaccaacccttcttccctcatcatctgtgaaagaattggacataaatcaagtacctcttgaagaagattggatggcatcaaacatggaagatgaagaagaaagcagcaatggagaacctcctcgaaagaaactccgtctcacaaaggaacaatctcttctccttgaagaaagctttagacaaaaccacacgttgaacccaaagcagaaagagtctttggcaatgcaactgaagctgcgaccaaggcaagtggaggtgtggtttcagaaccgtagggccaggtatcctaataataataatgaataaagtggagtaggtgtttattatgcaggagcaagctgaagcagacagagatggagtgcgagtacctcaagaggtggttcggttccctcacagagcagaaccggaggctccagagggaagtggaggagctgcgagccattaaggtgggcccacccaccgtgatctcccctcactcctgcgaaccgctcccggcctccacactttccatgtgtccccgctgcgagcgtgtcacctccaccgccgacaaaccgccctccgccgcggccactttgtccgctaaagtgccgccaactcaatcccgccaaccctccgcggcctgttgaccctataactatagtccatcgcctactctgcacgccacctctactacctcatcatctaattaatcagaaacagggcacaaacttaactaaactttacaaaactaaaaagttagtgtgaatgaagatataatatgtgttagaaaaaataatgtttttttttttttttttactaaaagggcgttttcggatagggaaacttttgtagttagtagtagtactttcaatggtcaatgcgtatctgattattgggctttcatattgactttctcctttttcaaatatggatagaacttttattt

SEQ ID NO: 27948 - DNA, 524 bp, Glycine max
  Clone ID: TF_GmC126645_1
acggctgcaagaagacgacagaagggggaagttgaaggcttgggaagagagacaagaaaacaaagccagacatggaggggaattatgggagcacaagacgttatgttccccgagcagattcttccttgagcttcctttacaactacaactacaccccttatccaggaatggaagtgaagcaacaaacactggctggcacaagttcatccatggaaaaagtgaactgcgggaaccaggagaagaagaagcgattaacaagtgaccagttagattcgttggagaatagttttcagaaggagatcaagttagatcctgataggaagatgaagctttccaaggagttagggcttcaacctcgccaaattgctgtttggttccaaaataggcgtgcaaggtggaagaacaagcaacttgagcacttgtacgattcgcttaaacaggaatttgatgtcatatccaaggaaaaacacaatctcggggaagaggtaatgaagttgaatactttgctgagagagcaagctttt

SEQ ID NO: 27949 - DNA, 3131 bp, Glycine max
  Clone ID: TF_GmC95_1
ctcctggcttggaaattccggggttggatgaatcaatcgacacaacaaggattgacaatttttcacccatgaggccgagccattattagttgcttcaccttgtttttcttcaaaggcagtttctgttgtggtgtgcttgattgaagagagaggagagaaaaagaaaagaaaaaagggaagcaaaagtggctactttgatgagttttggggggtttcttgagaccaaacaaagtgatggaggtggtggtaggattgtagtttcagatattccttacaacagcaacaacggttcaaaccacagcaacgatataatgccctctggtgcaatctcgctgcctcgtttagccactcctactttggccaaatccatgttcaactctcctggcctttctcttgcacttcaaagtgatatagatggacaaggggatatgaacagattaatgcccgaaaattttgagcagaatggtttgagaaggagccgggaagaggagcatgaaagcagatctggcagtgacaacatggatggtggttctggtgatgattttgatgctgccgacaacccaccgaggaaaaaacgctatcaccgacacactcctcagcaaattcaagagcttgaatcgctcttcaaggagtgtcctcacccggatgagaagcaaaggcttgaactcagcagaaggcttaatttggaaacgaggcaagtaaagttttggttccaaaatcgaagaacacaaatgaagacacaattggaacggcacgagaactcgctgctaaggcaagagaatgacaagcttagagctgaaaacatgtctatgagggaagccatgagaaatcccatatgctcaaactgtggaggtcctgctatgatcggtgaaatttcactcgaagaacagcaccttagaattgagaatgctagattgaaggacgaactagaccgtgtttgtgcactcgctggcaagtttttaggtcgacccatttcatctctaacaggctcaattgggcctccaatgccaaactcaagtttggagcttggtgttgggagcaatggttttggaggtttaagcactgtgccttcaacaatgcctgattttggggttggaatatcaagccctttagctatggtgtcaccttcaagtactagaccaaccacaacagcattggtgactccttctggctttgacaacagatcaattgagaggtctattgttcttgaacttgctttggctgcaatggatgagttggtgaagatggcgcagactggtgagcctctttggatgagaagcttggaaggaggaagagaaattctcaacaatgaggagtacacaaggactatcactccttgcattggcttgagacccaatggctttgtcactgaggcctctagacaaactggaatggtcatcataaacagcttggcccttgttgaaacattaatggactcaaatcgttggtcagagatgttcccttgtatgattgctagaacctccaccacggaagtgatatctagtggaataaatggaactagaaatggtgcacttcaactaatgcatgctgagcttcaagttctttctcccttggttcctgttcgtgaggtcaattttctacgcttttgcaagcagcacgcagaggggttatgggcagtggtagatgtgtccatagataccatccgagaaacttctggagcacccacttttgtgaactgtaggaggcttccttctggttgcgtggtgcaagatatgccaaatggttactctaaggtgacatgggtggaacatgcagaatacgacgaaagccaaattcaccagctctttagacccttgttgagctcaggcatggggtttggtgcacaacgttgggttaccactcttcaacgccaatgcgagtgcctagccattctaatgtcctcagcagctccctctagagaacattcagcaataagctcaggtggaaggagaagcatgttgaagctggcacatcgcatgacgaacaatttctgttcgggtgtgtgtgcctccacagtgcacaagtggaacaagctgaacgcaggaaacgtgggggaggacgtgagggtgatgaccaggaagagtgtggacgacccgggcgagccgcccgggatcgtcctaagcgctgccacctcagtgtggcttcccgtctcgtcgcagaggctctttgacttcctccgcgacgagcggctccgaagcgagtgggatatcctctccaacggtggacccatgcaagagatggctcacattgcaaagggacaagaccatgctaactgtgtctccctccttagagccagtgctataaatgcgaaccagagcagcatgttgattttgcaggagacgtgcaccgacgcgtcggggtcgcttgtggtgtacgcgccggtggacattccggcaatgcacgtcgtgatgaacggcggcgactctgcttacgtggcgcttcttccgtcggggttcgccatcgtgcccgacgggtccgtcgaggagaacggtggcgcgtcgcagcagagggcggcgagtggcgggtgcctcctgacggtggcgtttcagattctggtgaacagcctccccacggcgaagctcacggtggagtcggtggagacggtgaacaacctcatctcctgcaccgtgcagaagatcaaatcagcgcttcactgcgaaagctgaaagtcacgtgactctggctttgtctattattattattattatttttgttttggagaatttaggttacattttgtagttaaaggtggcgcgtgtgaaggacgcgaggggtgggggtgttgagtcaagaacgaaccgcgcgtgggtgagagaactccttgcatggtgatatgaggatccgagaccttttccgggttgggttaggattttcaacacaaagcaagggtggtggttcgggtattgactcgggtcgacccctttgtttgctccatacagtagcagaagaaggaaaaaaaaaaatgaatagaaatgtgagaaacaaaaaggaacaaaattgtgtttctggttaggaatatttattgtaagttatcatcattttgatttgtattgacttggtgggagtatgctagaattggatctagtagtttgttgcatatgatcaaatcaataatttgtgttcattttttc

SEQ ID NO: 27950 - DNA, 1028 bp, Glycine max
  Clone ID: TF_GmC1282_1
gaaagatgcgcctgcctatgaactattgagtgaagatgaagactggggtcctggcaaaagaaagcgaagagaaaaggagtctgatgctgttgattctcttatgactttgcatgaaagtgagaataggcatcccaataatgagcacaacatgacaagtaaagattcttcaagcataaagatcaaaaggcattgttttaggattccacgtgatgcagttgagaggcttcgccaagtttttgctgagaacgaacttcctccaagatctataagagagggtctttcaaaagagctgggccttgacaccgagaaggtcagcaaatggttcaaaaatgcacgttacttagcacttaaaaacagaaagcatcaagcagaaggagtagcagatcagcttcagagtatcacttctacaaagaacagattacaaaaacaggagaatgtcgatcctttgaaatcaaagaccccaaaaattactaggacacattcccagaaggatgttaaaaatgtcaatggaagaaagaaaatgaagtcatctaacaagaaaagacaaccagaaattcctccacctccaggagaaaatggcaagaaggactttatggagatcagtgatgatgtgagcttgaagaaactgttgaagaaaagaaagaagaggttgataaattttacgtttggaggagactctcagttggcagagttggaatttgaaagactaagcgaattgaagactaaagtagatagtatgaagcaaaaattaactgcaattcaaaattacagagttaagggttcaccctattcgaatgaaccatccattgtatatgtacccacagctgtgttaagggaaaaggttgaatgataactttaattgaaaaatgcacagtgggggaatacatgatttgtagttagttcctgtctttcctttgtagtattcaaagaaaggaactgttttgaagttaatgatattaatacttgtctcacataacttggtattaaatattaatgatattggcttgctcaaagccaccttcagtatg

SEQ ID NO: 27951 - DNA, 1051 bp, Glycine max
  Clone ID: TF_GmC6828_1
cggccctttgccctttctcttgagggctgtgggcgccggctctctgcaaaatgcaaatcgaaattcaattcttgctgccaaagccaccaaaacaaaactgagtcctttccttgtttggttctgcaaaagcaaaaatggaagcagagcatcatcaccagacctcaaacgctggtggtattattggaggcctttacgtcaaagttatgaccgacgatcaaatggaactgctcaggcaacagatttctgtctatgccaccatctgtcaacagctcgttgagatgcacaaggccgtaactatccaacaggacctcgcagggctgaggctgggtaatttgtactgtgatccgttgatggcgtgctctggacacaagataactgcgaggcagcgctggactccaacacctttgcagcttcaagtacttgagcgtatttttgacgagggaaatggtactccgagcaagcagaagatcaaggacataaccattgaacttggccaacatggccaaatatcagagacaaatgtttataactggttccagaacagaagagctcgttcaaagcggaagcaactcactcccgcactgaatgttgtggaaccagaagtggagacagaagttgaagttgagtctccaaaagagaaaaagactcgtgcagaaggctttcaggttcagccctatgagaaatcatcacctcataggatcaaggatatgtacatccagagtcctgacataggatttgaccaattgatgagtaaaatagaagttgcaggctgctacagttcttattttctttgagaaatctgtggaatggatgggttgaagacttaaattcttgattgcagcttggtggactcaagtttgttgatgatactgttagatatatgggctttttgtccaatatgttgatgaaccacacatgatgtggtataactatatattgtataaattgttttgcttaggtgctttgcagtgctaactgttgacaaccgttactgtgtgacatgttataattttacaagtttaaacatgattgcttctcctagctgctgggg

SEQ ID NO: 27952 - DNA, 476 bp, Glycine max
  Clone ID: TF_GmC294_2
gcaataagcaaaagccaattgatacgtgcatatcacaaaaactactcttacacaccaaaaaaatcctctatcaccaaactcacctataccctcaaactcaaggccctatagtccaagcaagtgagtgagtgttacaacttacacagcatggaatatagtcaatatactacttattcagcagaaggtgttgaggcagaaacttacacaagtagctgcaccaccccatcaagatcaaagaagagaaacaacaacaacacaagaaggttcagtgatgaacaaatcaaatcattggagaccatgtttgagtcagagacaaggcttgagcctagaaagaagttgcagcttgcaagagagcttggattgcagccaaggcaagttgctatatggtttcagaacaagagggctagatggaagtcaaagcaacttgagagagactatgccatactccaatccaattataacacttttgcttcacg

SEQ ID NO: 27953 - DNA, 892 bp, Glycine max
  Clone ID: TF_GmC776238_1
gctctttctttctctctctaatggaagacaataatgaagaatgcatcgcggggctatgtttgggactgggactgggattgggatcaggacatgttccaaagaagaataagcagaaagagaacaaggctgtggtgtgcctagacctagcgtttgagctttgtccaaaaggagaaaaagccgttaataacgtgaatcatcatcatgataaggtagagagaatcagcttggagagaatccacgactaccccaatgaaaagagcactgattctgataacagcaacaacaacggatgcagaaagaaactgaggctttccaaggatcaatcatccatgcttgagaacagcttcaaacagcatagcactcttaatccggtcctcattcatgcacttgctgctcgattgaatttaaagactagacaagttgaagtttggtttcagaacagaagagcaaggaccaaactgaagcagacagaagtggaccgcgagttgttgaaaaaacactgtcaaaatctaagtgatgagaacaaaagattgaagaaggaattgcaggaactacgtgccactaaaggttggaccgtcgccaccatgcattccactatccaaaccggcgaccctgacaacgttgggttcttcctgcgttcgcgagttatgtcctgtcgtttttgctcctgtccctggggggtaggacggcgttgtgtttgcgggtggttttgggttccctctggccggtcccaagaccttactcgtgcatcaagcaccggttacaatacgtaactcaaaaactttctgattataattagaaggaaaaacagtacatattattgtattcctccggtccccacatcacaaacatatagaaaactggggcggcttagatacgtatcgttagtaat

SEQ ID NO: 27954 - DNA, 1573 bp, Glycine max
  Clone ID: TF_GmC722_2
cttctacaatcaaaatattatatggggcggtagatagataggctacaagtaaacgaagcaagataatttcttcctacttaacaaaagatagtaagagccacacggtatcttatcccataggtcaccatgatccttccattagaagttgcaataacgtgatagaaatggctttgagatacactttcttttatggttagctatatattctgaacccgatcccccctcaccagacttttaaatcacataattcttttttttatttcttggtggaaaacagattgtgcatctaattccaaattcacccataaaaatacttccttttgctcaccagccatatattatgatggagggagatgagaatattcaagcatcatcaaagggaaaatatgttgaaagcttcaactgctcggaggcaccaaggaagaaaagcaagaagatagaaaacaagaggaggtttagtgatgaacagataagatcactagaatgcatatttgagtcagagtcaaagcttgagccaaggaagaagatgcaactggctagagatcttggcctgcagcctcgccaagtggctatatggttccaaaacagaagggcaaggtggaaatcaaaacgaatagagcaagagtaccgaaaactcaaagatgaatatgacaatttagcatcaaggtttgagtccctaaagaaagagaaggactctttgcaattagagaaactaagtgatttgttggaggcatgtcaagatgatggaagggaagacaaggctggcaaagaaaacagcatagaagatggtggctcaggcagtggatacagcagttggaagcctgaagcaaaaccaaggttttcaaatgagggtttggaggagaggataggtgtgtactcagatgatcaaaatgagaatagcatcataaggggtggtgagaaatctgaagacaaaggacaccaacttctcagaatggatgatcatgcagagatgccattggcatcacttgaaaaatggtatagtggtgtggaccctagtggcatcttggaccagtcatgtagcagttctcaatggctagatttctggacttgaaaaaaacaagcgagccacactttgtgctgcatctgcatgtgtgatgttttgtttcctccgagagaaggaacaaaagattggttgattggttggctcttgtgctgccagcaggtccaaaacattccagcctagccaagaaactcgaaggaagttttgtaggcttgatttgataggcgagagaattaagatagcctcactcaattcaattgtgtagagatttggaaaaaaacaaataatgtgcaatgtctctgtctgttcatgcttgcatgcctttccaacccgtctttgcgtgtgttctttcttcttcttttttttcttttcccacttcaaggggttagttaatctagaacctctttatatttcttaaaggggtctctcttttatcactttagcttattcccatattaacaagtttgatccttatagcacgaccgagacacacaaaaataaaacttaatgaacggtgtgaatgagatattgctcgacttcatgaagcagtga

SEQ ID NO: 27955 - DNA, 899 bp, Glycine max
  Clone ID: TF_GmC4674_2
gaagacggcgccgccaccagaaagaaacttaggctcaagagggagagggatctcagctgtgaagaagttgtggatgcaaaagagattgatcagagggatcttagctgtgaaggaataataagagccaccgaagaagaagaagacggcgccgccaccagaaagaaacttaggctcaccaaagaacaatctgctttgctagaagaaagcttcaaacaacatagcaccctcaatcctaaacagaagcaagctttgtcgaagcagttaaatctaaggccacgacaagttgaggtgtggttccagaacaggagagccagaacaaagctgaagcagacagaggtggactgcgagttcctaaagaaatgttgtgaaacattaacagatgaaaacagacggttacagaaggagcttcaagagctgaaggcactgaaactggctcagccgttgtacatgcctatgcctgcggcaacactcgccatgtgcccctcttgcgagaggctcggcggcagcgccgtcaacggtgccggcggttcccccaagacatcattctccatggcccctaagcctcacttcttcaaccccttcgccaatccttctgcagcatgttgattgatattgttattataattaggcttttagttttcattaaaaaaaacaaaagacaaccaaagaagagttcccccacaacctttgtatttttttggttgagggatacgtcttatgaaccagtgaaaaaaggctaaaggtgtaattaactaatatactgtagaaatttgtaaccgctgattagaattactttttactcttcctttattaatgtatgtttataaatcgttatagaagacatccatctatgaaggaattaatgactattttttttaatagtccatttttgtaatggt

SEQ ID NO: 27956 - DNA, 751 bp, Glycine max
  Clone ID: TF_LIB4280-016-R1-K1-E12
ccacgcgtccgcaaatcagtgcatgaaaagaagaagaagaagaagaagaagtgagtttaaggggtttgagagacaagtggtttttggcttgttggggtgcttttgttaaatagaaaagtggcttctttgatgagttttgggggttttttagacgacaaatcaggtagtggcggtgccagaatcaacaatttttcagatattccttacaataacaacaacgttaccaacaccaccaccaccaacaacaacaacaacgatagaatgccctttggtgcaatctctcagccacgcctcgtgaccacaactcccactttagccaaatccatgttcaactcaccagggctatctctggcacttcaaacgagtatagatggacaagaagatgtgaatagaatggctgagaatagcttcgaaccgaacggtttgagaagaagccgtgaagatgaacatgaaagcagatctggcagcgacaacatggacggcggttccggcgacgaacacgacgccgccgacaaccctccgaggaaaaaacgctatcaccgacacacccctcagcagatacaagaacttgaagcgttgttcaaggagtgtcctcatccagatgaaaagcaaaggcttgaactgagtagaaggctgtgtttggaaactcgtcaggtgaagttttggttccaaaatcgtcgaacccaaatgaagacccagttggagcggcacgagaacacgttgctgaggcaagagaaacgacagcttcgag

SEQ ID NO: 27957 - DNA, 3860 bp, Glycine max
  Clone ID: TF_GmC13446_1
ccacgcgtccgctctttctcctttctttttctctctttctctacaatctcgagattggtgtgtggagcgtccgaaagaccactgtttcccccctttagtttctcttctaagttggattttgaaggaactgagcagcatctaatgaaggagagtggaggctctcttggagaagagagcctgcccgagactaacaccaagaacagtgaagaagaagaaccaattaactagttcctttttttctttctttctttctcactcactccctccctcccaatcccattttcttcaaatagtgtgcgtgtgtgtgttaagagaagaatagggtgtgtgtgtttagagtgatggcactttctatgcacaaggactcagccaacaaccagatggattcaagcaagtatgtgaggtacacaccagagcaggttgaggctttggagagggtctatgctgaatgccctaagccaagttccttgaggaggcagcaactcatcagagagtgccccatactttccaacattgaacccaaacagatcaaagtttggttccagaatagaaggtgtcgtgagaagcagaggaaggaagcttctcgcttgcagacagtgaacagaaagctgactgcaatgaacaagctgttaatggaggagaatgaccgtttgcagaagcaggtttctcatctggtgtatgagaatggttacatgaagcaacagatacacactgcttctgctggtactaccacagacaatagctgtgagtctgtggaaatgagtgggcacaaccaacagcaaagaccccacacctaaggatcccaatagggaggctaacaacccagctggtccgattcccggcgtcgaccccacgcgtccggaaaggccttgggggctcgtgctcgacgtgtctttgctccgagtgctccgtcctttgccgacggggccctgttgcttccctccgctttccgtgtctttccgctggtgccccttgcagttggtcctgctgcatctaggcctgcagagttacgagcaacaatggaagtaggttctggtaatgctcgtccagctggggaagctgacttgaacggctacaaccttaggtcggtccgtaccactgttctcagtttcatccccgcgggccatgcgcgcgccattgtgcccgcgttcgcgcgcccgtatgcgcctactgctgtggcagctgctcggggcgtcgccacgccgagtgccccttccaggttcaatacccggcgggggccaaagtcactttctggatcacccgaggcccttaccttagcgcgatggatctgtagaagctacagggttcacactggcacagagctttttaaagctgagtccacagctggtgatgcaatccttaagcaactttggcaccatcccgatgcaatcatatgctgttctgtgaaaacaaatgcatctccagtgttcaccttttcgaaccaggctggtttagacatgcttgaaactactcttgtttcccttcaagatataatgcttgataaagttcttgatgaatctggcaggaagattctctgctccgagttctccaagataatgcaacagggttttgcatctctccctgcaggaatatgtgtatctagtatgaatcggccagtcggctcgaggattatttgtttgtttcagtcttctcgccatagctgaggagaccctggcagagttcctttccaaggctactggaactgctgtcgactgggtccagatgattgggatgaagcctggtccggattctattggaatcgttgctgtttcccgcaactgtagtggcgtggcagcacgagcctgcggccttgtgagcctagagcccactaaggttgctgagatactaaaagatcgacagtcgtggtatcgtgactgtcgatgcgtggatgtgttaagtatagtccccactgggaatgggggcaccatcgagctcctgtacatgcagacatatgcgcccacaactttggctgcagcacgggacttctggacactaagatacacgacaagtttggaagatggaagtcttgtgatatgtgagagatcattgacatcctcaactggtggccccacagggcctccttctacaacctttgtacgagctgaaatgcttcccagtggttttctagttagatcttgtgagggtggtggatccattattcatattgttgatcatattgatttagatgtctggagtgtacctgaagtactgaggcccctgtatgaatcatcaaaattcttggctcagaaattgactactgctgcattgcaacatataagacaaattgcacaggaatcaagtggagaagttcattatggtgggggtcgtcagcctgctgtcttgaggacatttagtcaaaggctttgcaaagggttcaatgatgctgtcaatgggtttgtggatgatggttggtcactgatgggtaatgatggggtggaagatgtgaccatagccataaactcatctccaaacaaatttttgggctccaattacaacgcatcaatgtttccagcatttggaggtggggtcttgtgtgccaaggcatcaatgctcctgcagaatgttcctcctgctttgcttgttcggtttttgagggagcatcgatcagagtgggctgattatggagttgatgcatactctgccgcatgccttaaagctagtccctatgcagttccttgtgcaagacctggaggcttccccagcacccaggtcattttaccccttgctcatactattgagcacgaggagttcctggaggtagttcgaatagagggtcatgcattttctcctgaggacgtagcgatggcacgcgatatgtatctattgcagctgtgcagtggagttgatgaaagtgcagttggggcatgtgctcaacttgtgtttgcacctattgatgagtcatttgctgatgatgctctgttactgccatctggttttcgtgtcattccgttggatcctaaatcagatggtccagctccaactaggacattagatttggcatcaacgatggaagtaggttctggtaatgcccgtccagctggggaagcagacttgaatgggtacaaccttaggtcggtcctcactattgctttccaatttacctttgagaaccatacacgggacaatgtggctgctatggctcgccagtatgtgcgtagtgttgtgggatcagttcagagggttgccatggcaattgctccctccaggctcaatacccagttggctccaaagtctcttcctggttcgcccgaggcccttaccttagcccgatggatctttagaagctacagggtgcacactggtacggagctttttaaagctgagtccacagctggtgatgcaatctttaagcaactttggcaccatcccgatgcaatcatatgctgttctgtgaaaacaaatgcatctccagtgttcaccttttcgaaccaggctggtttagacatgcttgaaactactcttgtttcccttcaagatataatgcttgataaagttcttgatgaatctggcaggaagattctctgctccgagttctccaagataatgcaacagggttttgcatctctccctgcaggaatatgtgtatctagtatgaatcggccagtgtcctatgagcaggttgttgcatggaaagtcctcaatgatgatgattctaatcactgcctagccttcatgttcatcaattggtcttttgtatgatggatgaaccatatctagagactactacttattttatctactaatcagatgatactatcacagacagatgtactgatgtcagcttttctttatgccctatgtatgaagtatgctaatgttacttattcgctatatatataaaatatctagttaatttggtg

SEQ ID NO: 27958 - DNA, 1223 bp, Glycine max
  Clone ID: TF_GmC13446_2
tcgtctctttcttcttctctctctctctctcacaatctcgagattggtgtgtgtgtgtgttgggggagataaagaccactgttgcccactcaggtttctcttccaagtttggattttgagggaacttacagcatctaatgaaggagagtggaggctctcttggagaagagagcacccccaccaccaacagcagtgaagaagaagaaccaattaactagttcctttccttctttctctcacccattcccatttttaacctaatagtagtgtaggtttaaagaaatatagtgtgttagagtgatggcactttctatgcacaaggactcagccaacaaccagatggactcgagcaagtatgtgaggtacacaccagagcaggttgaggctttggagagggtatatgctgaatgccctaagccgagttccttaagaaggcagcaactcatcagagagtgccccatactttccaacattgaacccaaacagatcaaagtttggtttcagaatagaaggtgtcgtgagaagcagaggaaggaagcttctcggctgcagacagtgaacagaaagctgactgcaatgaacaagcttttaatggaggaaaatgaccgtttgcagaagcaggtttctcatctggtttatgagaatggttacatgaagcaacagatacacactgcttctgctggtactaccacagacaatagctgtgagtctgtggtaatgagtggtcaaaaccaacagcaaaacccaacacctcagcatcccaatagggatgctaacaacccagctggtcttctcgatagctgaggagaccctcagagttccactggaactgctgtcgactgggtccagatgattgggatgaagcctggtccggattcttcgtacccgcacgtggcgtggcagagagcctgcagcctaagcttagagccctctacttgatagactacactctgttagctgttggagttagtactggattatgtatgctttagaaatgagtaacatctatttctaaacatatagatgtgtattttgaaaagcatgatgagttttaaatctaggatacatctattccaattttataccctttcctatatattcttaacattctctttgtgggctgcatatctctcagtatatgattatgagccttcgatgatgattcatcatcatgactaaagttgctgagatactaaaagatcgacagtcgtggtatcgtgact

SEQ ID NO: 27959 - DNA, 2006 bp, Glycine max
  Clone ID: TF_GmC221_1
ctcgagccgaatcggctcgacggcgcaggttcagtttctggagaagagtttcgacacatacaaacatagtaaccgcttctctctctctctctctctctctctctctttttccatgtccatctgataaccctttcctgattctctttcgtggttgttgctattctgagtgatgggtatgccctgccgctctcccccaaaaactcccgttttctctctctgtttttccatggccatctgatcaaacttttcttgattctctctctcagtttttgctattctgagtgatgggtatgccctgccgctgttcccacacctcccacatcactgaaatcatcatcaccagcttcttccgccacaagtcttaaattacaacaatttccctcaattattcatcaaccaaccaccttaatagccttttccaatggttccttaaagatccaacttggtcggagtaaacatggcggctagtggaagttccttttccaacatcactagcttccttcgcaaccaacaaccctcttcccaacctctcgattcttctctcttcctctctgctccttcaatttttgtttcaggttcgagatccatggtgagttttgaagcagaaggagggaaggggtgtaacggctccttcttccgcgcgtttgacatggacgacaatggggacgagtgcatggatgagtactttcataaacccgagaagaagcgtcgtctctccatgaaccaggttcagtttctggagaagagtttcgaggaggagaacaagcttgaaccggagagaaagaccaagcttgccaaagaccttggtttgcggccacggcaagttgctatttggttccagaaccgtcgagctcgctggaagaccaagacgctggagaaggattacgaggctctgcatgcaagttttgagaatcttaagtccaactatgacagcctcctcaaggagaaagacaacttaaaagctgaggtggcgagcctcaatgagaaggtgcttgcaagagggaaacaagaggggcacatgaagcagcaggctgaaagtgaagaagaaacaaaaagattattgcatttgcaggaacaggaaccaccccagaggcttttactggaatcagtttcggagggagaaggatccaaagtctcttctgttgtcgggggttgtaaacaggaagatatcagttcagccaggagtgatattttggattcagatagtccacattacaccgatggagttaactccgcactgctagagcatggtgattcttcttatgtgtttgagcatgatcaatcggatatgtcacaagatgaagaagataacctcagcaaaagtctctacccttcgtacctctttcccaaacttgaagaagatgtggattactccgacccgcctgaaagttcttgtaattttggattttctgaggaagatcacgccctttggacctgggcatactaagttttcttccatgttcatgtgtgtgtttgtgtcatatgtttttttagtaattagtatttagtatttgcactttttgtccaggcttcaaaaatggctatagctttagctttatcaggaaagaaatgtttgttttctttttgcctcattttgttagtacttgtaatcaaactgttggttccaatgtaattaaataatgtcttctcgttgagaatgtaactatggatttcatttaatttcactaagaaattcaaataagaaacttgatgaaatggggaaaaaaaaatggaagccaattgcttggtagagtggaaaagattgaggcctatagtatttatactatttaagatgactatgattcattgattcttcttcacttgggttctggacttctgggtccatgttgttttgattggtaagcaaccctgcatgacgaagttgacttgcttgcacctttgcaatactttcctacttgagagcatttaagttttgtgacagaaggggtgtcactttcactatgaattggacaaaaatggccactctccattggatgaggatcacc

SEQ ID NO: 27960 - DNA, 1334 bp, Glycine max
  Clone ID: TF_701009968_FLI
cttgttcacccttccccttctccttacttctcactctctttccaaaacactccctttctctttccccttacccttcttctgtgtgtgatgatgtagatagagaataaaaagagaccagtgtgcagtgagaaagagacgaacacagtccgaggaacaaccacgtgtatgggaaggagttccagtccatgctggaaggactcgacgaagaagggtgcgtggaagaagcagggcaccactctgagaagaaacgacgactaaacgtagatcaggtgaaggccttggagaagaacttcgaagtagagaacaaactggaacctgaccgaaaggtgaagctcgcgcaagaactcggcttgcaaccaagacaagttgcggtttggttccaaaaccgccgtgccagatggaaaacaaagcaattggaaagagattacggcgtcctcaaagccaattacggatcacttaaacttaactttgacaccctccaacaagacaacgaagccttactcaaacagataaaggaattgaaatcgaggctggtgcaagaagagaacaacaacaacactgaaagcgatgtttcggtgaaggaagagatgatagccactctgcaggatagtaacccgctctgtgaatccgccattcctggatcggactcgaaggagttgagttacgagtgtttcaacaagagtgatgaggtgggagggggttctgtgttccctgtggatttcaaagatgggtcttctgatagcgactcaagtgcgatcttgaacgaggagaacaacaaccacagccccaacaacaacgcggcgatttcgtcgtgtggggttctgcaaagtcacgggcttttgtcgtcgccttcttcttcgtcgatgaacaactgtttccagttccagaaacagtaccagacgacgacgcagtacgtgaagatggaggagcacaattttctcagcgccgacgaggcctgcaatttcttctcggacgaacaagcaccaactctgcagtggtactgttcagaggaatggagttaagagggaagaagaagaagcttaattaattgagagcgagggagggaatagaaagaataaggcattttgcagggtgtatagtaatgggatggagagagaaacattgtaaaaatgaaatggtcaaggattgaagaagagagggaaattgaagagcttgagagagaggggatggggtcgaagcacgcatggcgtggggtcggagatgagaggttgatgacgataaaaaaaaaggggggtaataataatcatcaacatccgtgcggggaaaggggagtaatttatgaataataataatgattaggtcgtaatgaagtg

SEQ ID NO: 27961 - DNA, 3641 bp, Glycine max
  Clone ID: TF_GmC556_1
gagctacttaaatctaataacgaggggaatgaatctttgctcaagtccttgtggcatcactctgatgcaatattgtgctgcactctaaaggtatgcttgaaatttaattcaatttcatagcgcatgtatctatttcgtgcttataaaaaatatatatatctattttgtgctctgtccataatgcaattcaaattctctaactcataaaggttttactctgaaatagagggtatcattgtatcaacatgggctatatagcctgagtagtagcctagtaaaatatgtgagatgaatttgtattatgctggcctaagttaaatttgccctgacctggtccaagaaaaatttcccccaacctcaactatagacccatttctgggtagtattctgcaaagagctttactggtcacttgtcagcgtttcaagtctattattcattcctcttccaactacagtgcatataagttgtataacccaacatggatgacatgttattctgtactgtctaattttgttctaacagtggaaatggcttgaaaacagtttcaactctagtcaagtgaaagtatctggtttgggtacagagactggacggagtgaatgctcgaaaaactttctaaagtaggcgggtcaagagttgatctagctggtcgatccgctctccctcgtcttctcactttcacacatccatccatgtcttgaaacgatgctctcgcagatcaagcatagtctgattccaattcgcgcaagctcatggacggagatcgctgatgcggcggagcaaatggttgcacgagattccacacatgacactcgatcttagttaggagcagtgctggaaagcagaacctacttggttcttttgaaggtttgatttggatgtggaaagtatgtcctgcaaggatggtagcagaaacggaatcggaatggataacgggaagtacgtccgttacacgcctgagcaggttgaagccctagaaaggctctatcacgattgccccaaacctagttccattcgccgccagcagctcattcgcgagtgccccattctctccaacatcgaacccaagcaaatcaaggtttggttccagaacagaagatgtagagagaagcagagaaaggagtcgtcgcggctgcaagctgtcaataggaagctgactgctatgaacaagctgctgatggaagagaatgataggttgcagaagcaggtgtctcaactcgtctatgaaaatggctattttcgtcaacacacccagattactacgcaggcaaccaaagacacaaactgtgaatcagttgtgacgagtggtcagcagcacaatttgataactcaacatcccccacgggatgcaagtcctgcagggcttttgtccattgcagaagagactttagcagaatttctttctaaggctactgggactgctgttgagtgggtccaaatgcctggaatgaagcctggtccggattccattggaatcgttgctatttctcatggttgcactggtgtggcagcaagagcttgtggtctagtgggactagaacccactagggttgcagaaatcctcaaagatcggcctttgtggtttcgcgattgccgagctgttgatgttctcaatgtgctgcccacagcaaatggtggaaccattgagctgctttatatgcagctatatgcaccaaccacattggctcctgctcgagacttctggttgttgcgctacacttctgttttagaagatggcagcttagtgatctgtgagaggtcacttaaaaatactcaaaatggtccaagcatgcctcctgtgcagcattttgttagagcagagatgctgcctagtgggtacctgatcagaccttgtgaaggaggtggttccatcatccacattgttgatcatatggatttagagccatggagtgtgccagaagtgctacgtccactgtacgaatcatcaacagtactggctcagaagacaactatggcggccctacgtcatctaaggcagatttcacatgaagtttctcagtccaacgtcactgggtggggtagacgaccagcagcactacgagctcttagccaaagattgagccggggtttcaatgaggcactcaatgggtttactgatgagggatggacaacaattggcaatgatggtgtagatgatgttactattctagtgaattcatcccctgacaagttaatgggtctgaatctttcctttgccaatggatttccgtctgtcagtaatgcagtgctatgtgccaaagcatcgatgctattacagaatgtgccccctgccattctcctaaggttcctgcgggagcatagatcagaatgggcagacaacaatatggatgcttacacagctgctgctattaaagtcggcccttgcagcctatcaggatctcgtgttggaaactatggaggtcaagttatactccccctagcacacacaattgagcatgaggagtttttggaagtcattaaattggaaggaatagctcattctcctgaagacacaataatgcctagagaaatgtttcttttgcaactctgcagtggaatggatgagaatgctgttggcacctgtgctgaacttatatctgctccaattgatgcttcctttgctgatgatgccccccttttaccttctggatttcgcatcattcctcttgaatctggaaaggaagcttccagccccaatcgcacccttgaccttgcatctgcccttgacgttggtcccagtggaaaccgagcttcaaatggatgtgctaattccagctgtatgagatctgtgatgacaatagcatttgaatttgcatttgaaagccatatgcaagagcatgtagcatctatggcacgtcaatatgttcggagcattatatcatcagtccaaagggtagcattagcactttctccttctcatttgagttcacatgcagggcttaggtcaccattgggtactcctgaagcgcaaacccttgctcattggatctgcaacagttataggtgctacttgggtgtggagctacttaaatctaataacgaggggaatgaatctttgctcaagtccttgtggcatcactcagatgcaatattgtgctgcactctaaaggcattgccagtgttcactttctcgaaccaggctgggcttgacatgctggagaccaccctagttgcattacaagatataactttagagaaaatatttgatgatcatggacgaaaaattctcttttcagagtttccccagattattcaacagggttttgcatgtcttcaaggtggtatttgtctttcaagcatggggcgacctgtctcatacgaaagagttgttgcttggaaggtgctgaatgaagaagagaatgctcattgtatttgctttatgtttatgaactggtcttttgtttgacattttgttctgagtacagtagtgcttattgtatcctaaagtgttagataaagatttactcaagacacttgtgctttgttggttggtgttttactgtatttgcactaaatacttggattgcacattaaatgactatttgttgtgttattagcttatgtaacttgtttccttattcaacctccagctaatatttaatgcaatcttaagaagtgttgcagctttttatgtgagtgg

SEQ ID NO: 27962 - DNA, 367 bp, Glycine max
  Clone ID: TF_GmC556_10
cggacgcgtgggcggacgcgtgggtgcttggcagatcgttgcacagattcctccatcctagtttagtgctagaaagagtaaagtatgtcctgcaaggatggtagcagaaacggaatcggaatggataacgggaagtatgtccgttacacgcctgagcaggttgaagccctagaaaggctctatcacgattgccccaaacctagttccattcgccgccagcagctcattcgcgagtgccccattctctccaacatcgaacccaagcaaatcaaggtttggttccagaacagaagatgtagagagaagcagagaaaggagtcgtcgcggctccaagctgtcaataggaagctgactgctatgaacaagc

SEQ ID NO: 27963 - DNA, 1080 bp, Glycine max
  Clone ID: TF_GmC556_9
ccacgcgtccgcactcctgagctagctagggtttccactttccccatttcctctctcccacgtcttcgtctttctagaaaagcaaaaaacaattcacactttcacagtgccaaagattctcttctgccaatttcacttcacacatccatccatccatccatccatgtcttgaaacgatgcttcgcagatcaagcagagtcgattcatattcgcgtaaccccatgcacggagatcggtgatccggcggagcagatcgttgcacgagattcatcacgtgagctagaaagcgaaactagaagtagaagaaggtacttggtagttggttcttttcaaggtttgattttggatgtggaaataatgtcctgcaaggatggtagcagaaacggaatcggaatggataacgggaagtatgtccgttacacgcctgagcaggttgaagccctagaaaggctctatcacgattgccccaaacctagttccattcgccgccagcagctcattcgcgagtgccctattctctccaacattgagcccaaacaaatcaaggtttggttccagaacagaagatgtagagagaagcagaggaaggaagtcgtcacggctgcgagaagacgacagaaggggggaatcgttgctatttctcacagttgcactggagtagcagcaagagcttgtggtttagtgggactagaacccactagggttgcagaaatcctcaaagatcggcctttgtggtttcaggattgccgagctgttgatgttctcaatgtgctgcccacagcaaatggtggaaccattgagctgctttatatgcagctatatgcaccaaccacattggctcctgctcgagacttctggttgttgcgctacacttctgttttagaagatggcagcttagtgatctgtgagaggtcacttaaaaatactcaaaatggtccaagcatgcctcctgtgcagcattttgttagagcagagatgctgcctagtgggtacctgatcagaccatgtgaaggaggcggttccatcatccacattgttgatcatatgaatttagagccatggagtgtgccagaagtgcta

SEQ ID NO: 27964 - DNA, 1653 bp, Glycine max
  Clone ID: TF_GmC5011_1
agagaaaacagggtttgtattatttgcggggcaaatgtcatgattgagataactggccttgctgacataagtcatcattgaacttacacaccactcccacccattctctctcctttctatataacctcacacccacacggcccctcctatcactccaaaacctaaactccccttgcttttcttaccatctccttcaattctctctcactctcttttttctctcaccaaaacctttcacccaatatcctcaaactactacttctgataaattgctaatttttataaagctagctagagatgatggttcaaaaggaagatttgggtttgagtttaagcctcaacttccctcatcacaataccccaaatcctcaacatccgagtctcatgtcatcctctactcattcctcttctccttctggttgcaaccctcaaaaaccctcttggaacgaggctttcacttcttcggatcgaaactccgacacatgcagaggcgaaacgcgatcgttcctgcgcggaatcgacgtgaaccggttaccttccgccgtggacaccgaggaggaaacgggagtttcgtctccgaacagcaccgtctctagcgtgagtggaaaacgtagcgagagagaagaaccgaacggcgaagaacacgacatggacagagcctgttcccgcggaatcagcgacgaggaagacgctgaaaccgcaaggaaaaaacttagactctccaaagaccaatccgctatactcgaagaaagcttcaaagaacacaacaccctcaaccccaagcaaaaattggcactggcgaaacagctaggacttcgacctagacaagtggaggtgtggttccagaacagaagagcaaggactaagctgaagcaaaccgaggtggactgcgaagtattgaaaaggtgctgcgagaatctgacggaggaaaatagaaggttgcagaaggaggttcaggagcttagagcactgaaactttccccacagttttacatgcaaatgaccccacccacgacgctcaccatgtgcccctcttgcgagcgtgtggctgttccgtcctccgccgtcgatgctgccacgcgtcatcatcccatggcccaggcccaggcccaggcccagattcggcacaggcccattggcccgtgggcttccgcctctcccattacgcaccggccgtttgatgtcttccaccactgatcttgagggtgttttggtcattgtgaaattattattatttactattctgggcctacttgtaccaccgtgtaggtgtgtaaccccaaaaggagagaaaaattgggggaaacagaaagagtgagggagcggtcgaaacagcgtgctgtggaattgtgcggtctaaggatatggtcattagaagaagggatttggtgggtctccaatgttttgtaccagtttgacctatcatcttttgttttgttgggtatgacctatatattagttactagttaggtgtttttttttattcagtttatagtattacttaacttttccccctctaaacagagactttgtgtaaagtgcaattatctagttaaattatatagggtttggttcccgtggcctatttcacttaattgagatcattatttattattcttttaaaaattaagggcggccgccgactagtagctc

SEQ ID NO: 27965 - DNA, 1067 bp, Glycine max
  Clone ID: TF_GmC294_1
gctataagaagacgacagttgaggataggaactccaataagcaaaagccaattgatacgtgcatatcacaaaactactcttaaacacacacgcaccccaaaaaaatcctctatcaccaaactcacctatttcctcaactcaaggccctatagtcccagcaagtgagtgagcgtcacacaacatggaatatacttattcagcaggtgtagaggcagaaactcacacaagtagcagcaccaccccatcaagatcaaagaagagaaacaacaacacaagaaggttcagtgatgaacaaatcaaatcattggagaccatgtttgaatcagagtcaaggcttgagcctagaaagaagttgcagctggccagagagcttggattgcagccaaggcaagttgctatatggtttcagaacaagagggctaggtggaagtcaaagcaacttgagagagactatggcatactccaatccaattacaacagtttggcttcccgttttgaagctcttaagaaggaaaatcaaacattactaattcagctgcagaagctgaatcatctaatgcagaagccaatggagccaggtcagagatgcacacaagttgaagcagcaaacagcatggacagtgaatcagaaaatggaggcaccatgaaatgtgaagctgagggaaagccaagcccatcaatggaaatatcagaacatttacttggtgttctgtctgatgatgacacaagcataaaggtggaagactttggcctagaagatgaacatggccttctgaattttgctaagcatgttgatggttccttgacttcaccagaagattggaatgcttttgaatccaatgatctattaggccaatcaaccactgatgattaccaatggtgggacttctggtcctgaatgaaacagagcaaccaaaattttgtggaggaaatatttatgcatatgaatgcttcatgtttggttccgcctcggcaactgagttgcgattactgggatccaccttgtttttgctaatatgaaaaaaaaaaaaaaaaaaaaaaaaaaaaaaaaaaaaaaaaaaaaaaaa

SEQ ID NO: 27966 - DNA, 913 bp, Glycine max
  Clone ID: TF_GmC1605_1
caccttttctatcttctctctgcctatgtggtccatcccaacccagtgaagcccttgatcaggccatataagacagatcaattttgccggctgcaagaaacgacagaaggggagacagggaactggagacagatatggattggcatcacggcacaaagccacttgttcctcggccagagaccttaagcttcttctacaactataactacaacagtccatatccaggagtggaagtgaaacaagcagcattgatggagacaggagaagggtcagttccagcattaatggacagcagaaacaaagagaagaagaagcgattaacaaataaccagatagagttattggagaggagttttcaggaggagataaagttggaccctgaaaggaagatgaagctttccagggagctaggccttcagcctcgccaaatcgctgtttggttccaaaatagacgaacaaggtggaagaccaagcagcttgagcacttgtacgatgtgcttaaacaccaatatgatgtcgtctccaacgaaaagcaaaagcttcaagaagaggttatgaagttgaaggcaatgctaagtaaagagcaaggttttgggaagcaaacatttggctgttatacagaaatatcaggggaagaaacagtagaaagcacgtcagagggtctaactctaagaggaaagagtaacattgagcacgttgcagatcaaggctactgttctttcactgtggaggattataacaccactgttttactgcctcctcactgtcactggcctgctgtgccttattagttattaattaatattatccctgattaatcttccacaactttgaacttgaactctgtgagtactcagcttaattaatattatagtgttctagcccaaataaagagggaaaaggagaaggaaat

SEQ ID NO: 27967 - DNA, 1511 bp, Glycine max
  Clone ID: TF_GmC6963_1
aattcggctcccggtgaaaaggctgttacacacactgccaccaaagaggcctttttcctccattttgacgtgccccaaatcagagttttttctttccacacacacacacactggtggttgagtggttcttctcaaaatgggtgagaaagatgatgattttgggttgagtttgagtttgagtttggggagagtgaaccaacaacaacaacaccctcctcctttgaatcacatgcaccagcctcaacaactacaacctgttcccatgaatcacaataagactctctttggtgatttgtctcagttaccagaccggagctccgaaatgatacgaggaatcgacgtcaattcggcggcggagtgcgacggcgtttcctcgccgaacagcgctgtctcgagcgtgagcggcggcgacggcaagcagagcgagagggacgacgataataatgctgccgccgtggccggtgagaggacctcgtgctcgcgagggagcgacgatgacgacggtggtggcagcgatgcctcgaggaagaagctgaggctgacgaaagaacagtccatggtgttggaagaaacgttcaaggagcatagcacgctgaatccgaaacggaagcaagcgttggcagaggagttgaatctgaagcccagacaagtagaggtgtggtttcagaacagaagagcaaggaccaagttgaagcaaactgaagtggattgtgaatacttaaagagatgctatgagaatttaactgaagagaatagaaggttgcacaaggaggtccaagagcttagggcattgaaattatccccacaaatgtacatgcatatgaaccctcccaccactcttacaatatgcccttcttgtgagcgtactcactcctttgcatcctcctccactgccaccatccactcggcggtggcggccacatcgagcaatcgcaaactgttcggcacaaacatccggctgcccgtgtccttcaacactcggccatttgaaggcccaattcctcggccataattggttgaggcctgaggacaatgtgatatttataatgatgtctagacatttttaattactagacatgtatgcatggaaaaaaaatcaaattgcaacggaacaccaatttgtggtttttgttaggaatcaaggatatgagtttggacttggttaagtcttcagtgaagggttgttctattttgtgtatgctataagttatagctagtcaacttcaggatttgtgtagggtagatatgttaccggcgaggtatggtttgagtggggtaagattttcatatgccgaatagtactagcatttattagtttagacttataaaaagaagagaaagagaatccgaatctgtgatgttctcatcaaaatggagattaacgtggaggaatgattgtgatttctcaattggagttttttgtctacctttgcgtagatgtcctagaactacagatgtaaataaataaataaataaacaatttttccttcagattccatgaaggagtagct

SEQ ID NO: 27968 - DNA, 1850 bp, Glycine max
  Clone ID: TF_GmC53_4
agagagctcttgccagattcagattagattcatttcatttctcatttacacgcacacaacacaactctctttcactgttccctctgtcttctttcctttctttcttccttttccccaggttttattggaaaagaaaaaacaaggtctagtccctttccaggtgccgtgactaataacccaactttctctccccccccccccccccctcctcttcctcatccttccttttcatcaacccttctcactccttcatcaacaaccttcttacaccaatttttcttcacttttgttggattcctcaaaataaacctgcatggtttgcactctatgtatgctagatcattttttcttctttctttctttctgttttccacaacatacatgtggctttgtgcaaattggagatatatatatacatatgagagagtaaatattagacctgcttgcttgacttagcagaagagtttttttttttttttttttttttttcagtggagagcatatatatataggtagctagggatggaagatatttacaagatgaaccctctttcatgttccggctttgatgttgttagggaagttaacgttaattccgctactggtgcttctgaattgaatcttggactggtggctaacaacttcttttcggatatttcggatcggttcatcaagtcccagatcgccactcaccctctctatccaaatctagtatccgcttacatagaatgccgaaaggttttggttttgccgcaccagctgccatattaattattttttgttagtttgttagtttttgttagctggaattccaacacctatcccttcctcctttcacccgctgacataatattaccttttgttgttttttttttaattaattggctttcttctcttctatttatgcatttttttattattattgccgaaaggttggagcaccaccagaactggcttcacttcttgaagaaatagcccgtgaaagctacccaacggatgctcttcgtgagataggagatgatcctgaacttgacgaattcatggagtcatactgcgaagttcttcatagatacaagcaggagttgtcgaagccattcaacgaagcgaccttgtttttgtgcagtatcgaatcacaactcagcaatctttgcaagggaacactgacaatgccattggataacaaccactcagatgaggccgctggaacatcagaggatgaattgagttgggagaaggtggaagcagttgaaggtcacgaatcttctggcccacgtccaggtgatcaagagcttaaagaaatgctccttcgtaagtatggtggttatcttagcagcttgaaaaaggaatttcttaagaaaaggaaaaagggtaagctaccaaaggatgcaaggatggtactcatggactggtggaacacccactatcggtggccttatcctacggaggaggagaaagtgcagctatcagaaatgactggacttgatcaaaagcagatcaataattggttcatcaatcaaagaaaacggcattggaaaccatcagaggacatgcgatttgccattatggatggtgtaagtggcagtggctttggaggacctatctaatatatttctggagatggaccgtgttgattcctgctacttgtaccttcctgctcgtgtgatgtgtgtatacgttcttttccacgagatatgtattaattttttgaacctgcatttgtatgctaagtaaataggtccttcagcttatatatatatgcaagagtgtaaaaaacctgtagctaatatacgcgacagtgataatcgatcaatgctactgaatcattatttcatgacaatttacattatagt

SEQ ID NO: 27969 - DNA, 875 bp, Glycine max
  unsure (1)..(875): unsure at all n locations
  Clone ID: TF_GmC189414_1
ccagcgtccggaacgtagaaaagaaaactaggataaggtaaaggacgagaaaaagaaagagaaagagagaaagggactctgtccccttttgtgtgcgtgtgttgtgtcaactgagtgaactctcaagtgaactaacatcaccaaaaaaaccactctcttgcaacctcctcatcacattgctccttctgagacaggtttggctcaactgaagtaaggtttggttatcttattaccttatctctcaccacatttaaaaacacacaaaacacagttacacaagtgaagtgtggttttgggaagcaagaatgtatggggattgccaagttatgtcaagtatgggagggaacgtagtagtaaacccagacaccctcttctcttcctcgatccagaactctagcttcaactcatccccaccatgccctttcaaccttttccttccatgaaagaagaagatgggatcttgcgagggaaggaagagattgagagtggatcagggagtgaacaattagttgaagacaagtcagggaatgaacaagagagtcatgaacaacccacaaagaagaaacgttatcacaggcacactgctcgccagatccaagaaatggaagctttgttcaaggaatgtccacacccggatgataagcagagactgaaactgagccatgaattgggtcttaaaccgcgccaggtcaagttctggttccagaaccgtcgaacccagatgaaggcacaacaagaccgtgcagataatgtgatacttagagctgagaatgagtctcttaagagtgagaattatncgttacaagctgcactgcgtaacgtaatttgtccaaactgtgtggccatgcataatgggtgctgatatgggcttggat

SEQ ID NO: 27970 - DNA, 1692 bp, Glycine max
  Clone ID: TF_GmC1705_2
tacggctgcgagaagacgacagaagggggaagaatctctctttatttctttcactctctcagaaccaaaattttgaaactcctcaactctcatagggtcaaccttctctctctccaaactctcgcacctttctgctctgcccttcaatttattcacctctgacaccctcttaattctgcttccagttcctctgagtggttcaaaatccgtggttgattttgagaatgttaatgggagcagggtgacggataggcccttttttcaagcgttggagaaagaagagaactgtgatgaggattacgaggggtgtttccatcaaccggtgaagaaaaggaggctcacaagcgaacaagttcagttccttgaaaggaactttgaggcccacgacaagctcgaacccgaaaggaaggtccaacttgcaaaagagcttggcttgcagccaaggcaagttgctatatggttccaaaaccgaagggcaaggttcaagaccaagcagctagaaaaagactatggcgtgttgaaagctagttatgataggctcaaaagtgactatgaaagtcttgttcaagagaatgacaagttaaaagcagaggtgaattctctggagagcaaattgattcttagagataaagagaaggaggagaattcggatgacaagtcatctcctgatgatgctgtcaattcttcaccccacaacaacaaggagcctattatggatttattaatttcaaaaaatgcaacaacatctgaaaatggaaccgaagtgtcaacactcccactccctattatggtaacatgcaagcaagaagatgccaattcagccaaaagtgatgtgcttgattcggatagcccacattgcactgattatgggaaccacccttcctcattcgtggagcctgctgattcctctcatgcctttgaaccagaagaccactcagaagacttctcacaagatgaagaggataaccttagtgaaaactttttgaccctcccttcttcttgttgcttacctaaggttgaagaaccctgctatgatgaccctccagaaaactcttgtaattttggcttccatgttgaggatcaaaccttctgtttctggccctactgaaccaaccaaccaaccaaccgcttccaatgttataaaaacttcgcagttgtaaccatgtactagaaatcaataaaaatggtattgttacttctactaaggaataaaaatcagaaggctaatgcaatgcatcatgctatcatcactggtggtgttaatagttagcagtgaaagtgtaacacaatgttactactagctaaaattcaaaaacttggttcaggtgtgcgcgtaggtatcccaaaatttcaggtggggtacagcaaccaatcgttgttttactttcggatgtggaaaatggaaaccctgttttctctttctctctgcactcctctggatcacaccgttgttttactcatgtattaggaagaccctttcatcatgattcacctgtcctcactgctcagcataaagttacagttttatatgcgtcccagtaatcattagagtcatcatagcaaccagagtttgagtagattaaataagatctcacattcaaattttcctgttgttattggacactgagaaaaacttgtgtctaagttgatgatgattatgtaagaaatatttggcatattttaatgaaattg

SEQ ID NO: 27971 - DNA, 921 bp, Glycine max
  Clone ID: TF_GmC4807_1
ttcggcgcgatgtccttttaagaaggagaacattaacatcacactggttttgcgatcaaagagatcgaagccagtgaagagcgagcgagagagctaggaacgtaacataccataccacattgaatcatcgaccacctttccaagaccacatgatgctcatgtctcagttattccctgctgatgcatacactcaaattatttctcaacaaggagagactaataagaagccaagacgccgtcgtaacaagcagcaccgagaagacgaaagaaggggaagcttagtgatgaagaagtggaagcttagtgaggtgcaagttaatttacttgaacaaaactttggaaatgaacgcaaacttgagtccgaaagaaaggataggctggcaatggagcttggtttggaccctcgacaagttgctgtgtggtttcaaaacagaagagcccgttggaagaacaaaaagttggaagaagagtactccagccttaaaaaaaatcatgaagccaccttgcttgagaaatgttgcctggagagtgaggtgttgaagctcaaagagcaactttctgaggcagagaaagagattcagaggctgctagagagtgccgagagagtcccaagcaacagttctagttcgtcacagtcacaatcaatggaagcggtggacccaccattctttggggaatttggagttgatggatatgaggatgatgtgttttacgtgcctgagacccattacatcaacggcatggaatggattaatctgtatatgtaaaactaccaataggaatttagaattttgtagataatgtgaatggtccaatgtatattaattgttcctagctagctaggtagctaagtgtgtttgtttcactatggtttggaaattggaaagtatccattaacataataatttgcaatttgacccg

SEQ ID NO: 27972 - DNA, 850 bp, Glycine max
  Clone ID: TF_GmC1455_1
caagccctgatagcaccaatagcaataacggcagcagaaagaaactgaagctcacaaaggagcaatcagccacccttgaagatattttcaagctgcatagctctcttaaccccgcacagaaacaggcacttgctgaacaattgaattattagcatagacgggttgaagtttggtttcagaacagaagagcaaggaccaagctgaagcaaacagaggtggattgcgagttcctgaagaaatgttgtgagaaactgaccgatgagaatctaaggctgaagaaggagttgcaagagctgcgtgcacaaaagcttggatcaacaccactgtacattcaactctccaaggccacaaccttgaccatttgttcatcgtgcgagaaactgttgaagcccaatgaagggaacaaaggagccattaacaaattgcagaacagtatagagttagggggtatctagagggtataaaataaaactatgaggaactcataatttggtgaagggtattggaatgtcagaatgcaattatcaaacatggatagtttagtttaattaatcagcacaaaaaagaaaagtacacaccctcagtccccacatcgaataatttgtatagccatgtaggactgcttgtggtatatatgctaaggctagaatctagatagttaaggtaacttgttgtctctttctagtttctattcattcaaaatacaaattaatcaaaattaaccccctctatttgctttattttgtttggcttgatttgcaaatgaaaatgtgtgagtgtgtacggacaaaaaaaacgtgtgtttgaatgattgaattaggatgagacaaatatgatgatgattcactcg

SEQ ID NO: 27973 - DNA, 1653 bp, Glycine max
  Clone ID: TF_GmC1443_1
cagcttttatattttaccctttatctatttgttgatattgttttcatcccttgtgccttttcattccttggcgattacgaaattggggtttgatccagagaaagagagagaaaggcataaaatttaaggaagaacagagattgattttccataggaaccctaattttctctttcttgttcttttggggttctgcaatttgttggggttttgtgaagcggtgatcggaaagtctcgatctttgatcggttttcgtcgatggagggcgaggcttgttcagagggagagaataatctgaaaaggggtggctctgatgatgatagcaatgagaataacaacaacaacaataacggaagcagtggcaagattgtgaattctaatgaggggcagagcaagcccaagcgccagatgaaaaccccttttcagcttgaaaccctcgagaaggcttatgctgtggataattacccttcggagacgatgagggtggagctgtctgagaaattggggttgtcagatcgacagcttcagatgtggttctgccacaggaggttgaaggacaagaaggacttgccgtctaagaagccaccacggaaggtgctggcagagccattgccggattcgccaagggacgaccccaggttgagccttgagcttgctaatgaatatggatccgggtccggttcaggttccagcccgtatgcccgagtggagcccctgaatgtggttcctcggtgtgtgcctggttattatgagtccccacaggctaagttggagcttagagcaattgcttgtgtcgaggcgcagttaggggagccattgagggatgatggaccgattctagggctagagtttgatccattgccaccagatgctttggggcacctatagcagcagttacagaacagcagaagctacctagttttgcctatgacagtaaaatatatgaaagacatgatgctagaacaaataaggctttggcaaggacattccgtgacaatcaatttctaccaaacaagtctggcattaggtctgatgcttctggacagttcagccaatctcatttacacgatccaattgaaggttttgtcagaaatcctccttttgcacatggaaatgaacatctacctagaattcatgctactaaaggtcattcttctcgtgttcgtctcttgtctcaacaagacaagcaattgattccctatcaatctccttctcgggatgatgatgctgcccctcaaagggaattgtacccaaacatagctaatgctggaaagaactctcactctactggtcaccaaattgttgggccagaaaatctccatgctctacctagtgtacaagttttgcataacaatgctacatggattgagaagaaacgaaagagtgatgatgcccacgatgttgaagcccacgagatgaaaatccggaaagagcttgagaaacaagacaacctcagacgaaagagtgaagagcggacaagaaaagaaatggagagacaggatcgtgaaagaaagaaggaagaagaaaggttgatgcgtgagagacagcgagaggaggaaagagcaagacgtgagcaaaaacgtgaaatggagcgaagggaaaagtttctgctgaaagaaaatttacaagcagagaaaaccaggcaaagagaaaag

SEQ ID NO: 27974 - DNA, 474 bp, Glycine max
  Clone ID: TF_LIB3242-123-Q1-J1-B9
cggctgcgagagacgacagaagggggaaacaaacatggattggcatcatggcacaaaaccatttgttcctcggccagagaccttaagcttcttctacaactatgacaacaacaactcatatccatgagtggaagtgaaacaagcggcattgatggagacaggagaaaggtcggttccggcaatggaccgtggaaacaaagagaagaagaagcggttaacaaataaccagatagagttattggagaggagttttcaggaggagataaagttggaccctgaaaggaagatgaagctttcgagggagctaggtctgcagcctcgccaaatcgctgtttggttccaaaatagacgtacaaggtggaaggccaagcagcttgagcacttgtacgatatgcttaaacaccaatatgatgtcgtctccaacgaaaagcagaagcttcaagagaagttattaagttgaaggcatgctaagta

SEQ ID NO: 27975 - DNA, 914 bp, Glycine max
  Clone ID: TF_GmC1517_1
ggctcgagcacacactcatctccacttcccacattttaatattcacacaccaccttattgttccaaagcttcaatatgggggatttcatcttctccttcaagacccaaccacaagaccatgctcaccaccaaagagcaaagcacaacaacaacaacaacaagaggctaaccgaggaccaggtcgcgattctcgagaagtgcttcgcctccaacatgaagctcgagccggagcagaagttccaccttgcaaaccaacttggtgtgcctccaagacaagttgcaatttggtatcaaaacaaaagggcacgctggaagacccagagcctcgaggtggaccatggtgtgcttcaggcaaggctagagaatgtagtggctgaaaagaagcagctagagaaagatgttgaaaggctcaaagctgagctgaagaaggctcaagagatgttgttaatcaccaataatgtcaaaagtggagaccaataataataataatgcttcttgtgaattttcaacttcttttgaagaaggagggagttctggggtggtgcttgatgatgccactcatcatcatcatcatgagtgttggcaaagtggtggtgaggttatgcaggttgaggagctctatgcttacttcgtgggtgcaaattatgggacaggcttgcatgagaaagggcataaaatataacaaacttttgctagtttgtacattttatttttgttatgtcattcagcagcagggtcaaaaaattggaatttgttaatttacaattttgtgtcatgaaatatattgtataaatccatgtccatatgtcacggtgatgagacaaaggagactggagagtaccctttaacgggaaaaaaaaaaaaaactaaaattgaataatgagcaattcgatgaccctgcattgcattttggt

SEQ ID NO: 27976 - DNA, 1098 bp, Glycine max
  Clone ID: TF_GmC357_3
ccacgcgtccgcggttcaaaaggaagatttgggcttgagtctaagtttgagcttccctctcctctcctcttctccttccagccacaaccctcagaaaccctcttggaacgaccctattttcacttcttcaggtgaagctggatcattcctccgcggaatcgatgtgaaccgtttaccttctgtggttgattgcgaagaggaagcaggtgtttcatctccaaacagcacggtttctagcgtcagtggaaagcgcagcgagagggaaaccaatggagaagaaaacgacacagacagagcttgttccagaggcatcatcagcgacgaagaagatgctgaaacctctagaaagaaacttagactctccaaagatcagtcaattgtcctggaagagagcttcaaagaacacaacactcttaaccccaagcaaaagttggcactggcgaaacagctgggtcttcgagcgagacaagtggaggtgtggttccagaacagaagggcaaggacgaagctgaagcaaacggaggttgactgcgagtttttgaaaaggtgctgcgagaatctgacggaggaaaacaggaggttgcagaaggaagtgcaagagcttagagcactgaaactttccccgcagttctacatgcacatgaccccacccaccaccctcaccatgtgcccctcgtgtgagcgtgtcgcgttcccccctcctctgccgttgatcctgccacgcgtcaccatcacgtgcctccatctcacccccgggcctttcccattggcccatggccaggcccttcgatgccctccgtcccagatcttagactcgcggaaacaaaatgacaaaattgaaaaaaaagataggaagccatgaattatgtgttcaaagtgtggtctaagatatggttgttaggaaaactgattttgtgggtctctaatgttttgtactagtttgacccttcgtctttcttttggatttcggggcatgacctggtctagttactagttaggttttttagttttataatacttactgcgttactctcgtttctcatgattaaatccgagactttctgtaaagtttactggtcttaattaatagtattatat

SEQ ID NO: 27977 - DNA, 1489 bp, Glycine max
  unsure (1)..(1489): unsure at all n locations
  Clone ID: TF_GmC4674_1
ctcgagccgaatcggctcctctctcttctcttcattctccctcttaattcttttctcttttctttctttcacacaaactcctcttattatgatgggtcttgatcaagatgctagcagcaactctggccttcatcttattctagggttagctttgactgccaccaccaccactactccatcactaccatccatttccaacaagcttgatcatgttgatcatcatcaccatcttataactcttagaccaacaacaaagtcaccctataattcctctgaggctgaaccatcattaacgttgggcttgtcccgtgagagttacctcaaagtacccaaaaacatcataggacaaaacagcaacaacaaagtctcgtcttgtgatgaccctcttgatcacttgtccacacagactaattcacctcatcacagtgctgtttcctccttctccagtggcagggtcaagagggagagggatctcagttgcgaagaagttgtggatgcaacagagattgatcagagggaccatagctgtgaaggaatagtaagagccactgacgaagacgaagacggcaccgccgccagaaagaaacttaggcttagtaaagaacaatctgctttgctagaagaaagcttcaaacaacatagcaccctcaatcctaaacagaagcaagctttggcgaagcagttgaatcttaggccacgacaagttgaggtgtggttccagaacaggagagccagaacaaagctgaagcagacagaggtggactgcgagttcctaaagaaatgttgtgagacattaacagacgaaaacagacggttacagaaggagcttcaagagcttaaagcactgaaactggctcagcctctgtacatgcctatgcctgcggcaacactcaccatgtgcccctcttgtgagaggctcggcggcggcatcaacggtggcggcggcggttcccctaagacaccattctccatggctcctaagcctcacttcttcaaccccttcgccaacccttctgcagcatgttgattgattgttattataattaggcttttaattagttttcatttaaaaaaaaaaaaaacagcaaaaaccaaagaagagttgccccacaacctttgtatttttttggttgagggatacgtcttatgaactacatagctagtgaaaaaaaggttaagggtgtaattaattaactaatatactgtagaaatttgtaactgctgattcagaattactttttactcttcctttattaaaggtattttgatcaagtgaaaaaaggctaaaggtgtaattaactaatatactgtagttttttgtaaccgctgattagaattactttttactcttcctttattaatgtatgtttataaatcgttatagaagacatccatctatgaaggaattaatgactattttttttaatagcccnaaaaaaaaaaaaaaaaaaaaaaannnaagcggccctctagaggatccaagcttacg

SEQ ID NO: 27978 - DNA, 686 bp, Glycine max
  Clone ID: TF_uC-gmflLIB3275P163e04b1
ctttttctctgagagagaaccgtactatactacatgtgtttgaattgtgttttgttagattgagaaactataagcctctccggaaccttaaaagatctatagcaataataatgttccagccgaacctgatggacgcgttggagatgggtcagaacacttccgagagtgaggttcctcgaatcctagaagacgagttcgacagtgccaccaagtccggtagtgaaaaccatgaaggtgcctctggtgaagaccaagaccctcgtcccaacaaaaagaagcgttaccaccgccacacccaacaccagatccaagaaatggaagcttttttcaaggagtgtccgcacccagatgacaagcaaaggaaggaactgagcagggagttagggttagagccattgcaggttaagttttggtttcagaacaagcgtactcagatgaagacacagcacgagcggcatgagaatacaaatctcagaaccgaaaacgagaagcttcgagcagataatatgaggtatagggaggctcttagcaatgcttcgtgtcctaattgtggtggaccaaccgctataggagaaatgtcattcgatgaacatcacttgaggcttgaaaacgcaaggctaagagaagagattgatcgcatctcagcaattgctgcaaagtatgtaggggaagcccgtggtgaacta

SEQ ID NO: 27979 - DNA, 3544 bp, Glycine max
  Clone ID: TF_GmC571_1
gcaaagagagatgggaaccgttagtaacattggcttcctttcagtattcagagttcctctagattcacaacaagcactatcaaagcagatgaagaataaatcatcgtgttgtttcatggttcctcctaatcataactattctattaggcctagtccaatacgttgtaattaactatcagtaagtgggattcagcagaaccccacgaccacaagcacgagcaacacgtcctgaaagaacaaggataagatggatggcaataaaatatactcactgtttttctcagtctacattcatttctctccgctttaacgttgccccagttaagttttcttatgtaaaggcacaccctttgcctctttactagtaccaacaccaaagacaaccttgcctttttatattctctccttcttgtgttacctttgtttagtagtgagtgagtgaaagcatggctatggttgtggctcaacacagagaaagtagcagcagtggaagcattgacaagcacttagattctggtaagtatgtgaggtatactgctgagcaagttgaggctcttgaaagggtctatgccgagtgccctaagcctagttctctgcggaggcaacaattgatcagagagtgccccattctctccaacatcgagcctaagcaaatcaaggtttggttccagaaccgtaggtgtagggagaagcaaagaaaagaggcatctaggcttcagaccgtgaaccgcaaactcactgcaatgaacaagttgttgatggaggagaatgatcggttgcagaagcaggtgtcacagcttgtttgtgagaatggttttatgaggcagcaattgcatactccatcggcaacaactactgatgctagttgtgattcggtggttaccactcctcagcataccctgagagatgctagtaaccctgctggactcctatcaattgcagaggaaactttgacagagttcctttcaaaggctacaggaactgctgtagattgggtccagatgcctgggatgaagcctggtccggattcggttgggatctttgccatttcacaaagttgcagtggagtggcagctcgagcctgtggtcttgttagtttagaacctacaaagattgcagagatccttaaagatcgtccatcttggttccgtgactgtcggagcctagaagtttttactatgtttcctgctggaaatggaggaaccattgaacttgtttacacacagacatatgctccaacaacactggctcctgctcgggatttctggactctgagatataccacaagtttggaaaatggcagtcttgtggtttgtgagaggtccctgtctggttctggaactggccctaatccagctgctgctgctcagtttgtaagggctgaaacactccctagtggctacttgatccgaccatgtgaaggtggagggtcaatcattcacatagtagaccacctaaatctcgaggcatggagtgtgccagaagtgttgcggccactttatgaatcatccaaggtggttgctcagaaaatgacaattgcagcgcttcgctatatcaggcaaatagctcaggaaacaagtggtgaggttgtttatggattgggtaggcagcctgctgttctgcggactttcagccagagattgagcagaggcttcaatgacgctgtaaatggattcaatgatgatgggtggactgtattgaactgtgatggtgctgaggatgtaattattgctgttaattcaaccaagaatttgagtggcacttctaacccagcaagttcccttacattccttggaggaattctctgtgcaaaagcttctatgttgcttcaaaatgtccctcctgcagttttggttcgttttctgagggagcaccgctcagagtgggctgatttcaatgttgatgcttattctgctgcatcactgaaagctggcacctatgcctatccagggatgaggcctacaagattcactggcagtcaaataattatgcctcttggtcatacaattgaacatgaagagatgcttgaagttattaggctggaaggtcactctcttgctcaagaagacgcttttgtttctagggacattcatctcttacagatatgtagtgggattgatgagaatgctgtgggggcttgttcagagctcgtatttgctccaattgatgaaatgttccctgatgatgctccattggttccttctggtttccgcattatcccattagattcaaaaccaggtgacaaaaaggatgctgttgctacaaatcggaccctggatttgacatctggttttgaagttggtcctgcaacaactgctggtgcagatgcatcatcaagtcaaaacactcgatcggtgttgactattgccttccagttcccttttgacagcagtctgcaagacaacgtcgcggtcatggcacgccaatatgtccgcagtgtgatttcctccgtgcagagggttgccatggctatatctccatctggtataaacccatcaattggagctaaactttctcctggttctccagaggctgttacactagctcactggatctgccaaagttatagttactatttagggtccgacttactgagatcagattctcttgttggtgacatgatgctgaaacaactgtggcatcaccaggatgccattctatgctgttcactgaagtcattgccagtgttcatatttgcaaatcaagctggccttgacatgttggaaacaaccctagttgccttacaagatatcacattggataaaatatttgatgaggctggacgcaaggcattgtgtacagactttgccaagttaatggagcagggttttgcttatctgccagctggaatctgcatgtcgacgatggggcgccatgtgtcatatgaccaagccattgcatggaaagttcttactggggaagacaacactgttcactgcttggctttctctttcataaattggtcatttgtatgaaaaatccaattcgtgtgccctgctttttcccacttgaacataaaaatgaaagggttaaaagggagacaagacaagtttggggggaaaaagaagtcgtaaatttttgtataacacatcaggatcaggtttgcatttaattcgatttaatttatttcttatttagtgcagagaccaaattgaattaatcttgtaaattatttagtgctagagtgaagttgagacttttgaatgacacatgttgagtactttgtttttgtcaaaaaaaaaaaaaaaaaaaagtcaccccaaaaacacaagaacttttatgttcaagtgggaacttgcggggcgcgcccggcccccttttcccccttttggcctttttttgcccccccctcccgggccgtgttctgtgtcctcggccccgggaagacccttgggtttccccattttattccctttgcaccaattccccttttccccacttgggttattacaaaaaaggccccccccattcccctttccaaaaatttgcccaccttaatgggaaaagggaaccccccttgtaccggccctttaaccccgggggg

SEQ ID NO: 27980 - DNA, 503 bp, Glycine max
  Clone ID: TF_GmC114_3
cggcattcactgtactttatccctttctgtgagggaattatggtaattgatatcgaggttttgactcatggattctgatcgccccagaaaaccttccaaaaatttagttcactctcgcttcttccttttcggcttctattgctgggattgggagttcttaaccgctctcctcctttttagttgttccccttaatcttgttccttcatatttttatttttttttcttattagatcagattgaacaaaagggttgctctttattttttaatcttgggggaataatagaaatagaaataagaaaagattagtgaggttgaaatgttgcaacaacgatcggtgccggcaccgttcttgacgaagacgtatcagttggtggaggatccggggacggacgaggtaatatcgtggggtgaaagtgggaacacttttgtggtgtggaagcatgcggattttgcaaaggatttgcttccaaaatatttcaagcacaacaacttttccagctt

SEQ ID NO: 27981 - DNA, 458 bp, Glycine max
  Clone ID: TF_LIB3242-385-Q1-J1-H5
tgcgagtgcgatggtgaaatcaaacgagaacggggctgtttacgcttatgtgcctactgacctgaaaacatgttacgagctggttggagagcgcgccactgattctatcataccctggagcgatggcggcgacatggttactcttctacgacattactcacttatacgacacgctccttcctacctattgcagacacaactctttctccagtttcgtcagacagctcagtatctatgggagcaggagaattgagtcggattgctactaattggccagagagaacatagttagatgccaaaagcatatgatgaagacaatacgtagaaagacacattctcacaatacagatcagcaaaaagcattgccactttaagacgattgtgtggaaccatcacaagaagcaccggaccatggtctttggaaagaagtggtgtatctaacacttgataagaatttg

SEQ ID NO: 27982 - DNA, 664 bp, Glycine max
  Clone ID: TF_uC-gmflLIB3275P163e11b1
ttagtctcctctcggaaacttctagaaacaacaacaacctacagctcattttttttccgattccgatcctctttctgcttctccgttcgctgggtgcatgccctctcagtaaccctatcagatagatcaaggggttccggaaggttgtccctgaccgttgggaattcgccaacgactgtttccggcgaggcgagagagctcttcttcgcgacatacagcgccggaaattactgccggttccgcctgcagccgcggcaccggcagcagtcacagccaatacggtgacggtggctgtggcagcaccggcggtgagaactgtgtctccaacgacttccggcgacgaacaggtactatcttcgaactcatctccgattgctgggaataataataataatacagtacaccgcaccacaagttgcaccactgcgcccgagctgttagaagagaatgaaaggcttaggaaagagaacatacaactgagtaacgagttgagtcaattgaagggtttgtgtaataacatactctctttgatgaccaattatgcttctggttttagccgccagcagttagaatcctccacaagcgctgtgaggaccgtgccggggccggacgggaaggcgcccgtggagcttttgcccgcgaaacatgtttcatcggctgatga

SEQ ID NO: 27983 - DNA, 409 bp, Glycine max
  Clone ID: TF_GmC1369_2
tccacacgctttctccagagaccttcttcctagatacttcaagcacaacaatttctcaagcttcgtcaggcaactaaacacttacgttgcagctgttgcttggacaagaatctatggtagtgatagcaatcgttatttactcaagattattcagaagccgtagaatggatacgaattcgaagtagctggtctccaagaatcataactgattgttgcttttgaaccaagatccggttggtggttaaccttgtcggtttgattttttttcccctctatacttttcattgcttgagacttcgtcatgtggcttgaaattccacgtgtggcctcgttttatttcaagccacatgacgaagtctcaagcaatgaaaagtatagaggccacacgtggaatttcataatgttacat

SEQ ID NO: 27984 - DNA, 1439 bp, Glycine max
  Clone ID: TF_GmC1369_1
gcacagggacgcaggcgtaggctcgcgctctggctcgatcaattatggtttccaatttattaattgtgtgttgagtttttgtttttggattttgggtactaaaaattatgtattggggtttaaatttcatagggttttagaaaaattgatccagataggtgggagtttgcaaatgaaggattccttagagggcacaggcacctgttggcaaacataaggagaaggaaacaaccttcttctcagccttcttcttcttcttcttcatcctcttattattattattcttcttcttctcaacaagcacaacaaggtcactgtgttgaagttggtcgctttggacttgatgaagagattgatcgtttgaggcgtgacaagcacgtgttgatgatggagcttgtgaagctgagacagcagcaacagaacaaaggtcataccttcaagcaatggaggagaggctaagagggacggaaattaagcagcaacaaatgatggctttcttggctagagctttgaaaaatccaacctttattcagcagctacttcagcagaaggagaagaggaaggagcttgaagaggccatgtccaagaagaggagaaggccaattgagagagggccaaaccatggggttgttggagaagaatcaagcagtgttaaggttgagtctcttgtgtttggtgatgaatatggttttggagtgtcagagttggaagtgttagctatggagatgcaaggttatggtaagggaaggagggaacaagaggaggagcctgatgaggcactagatcaatcacaagagaggctggagaaagagcttgatgaagggttctgggaagaacttttcagtgagggttttgagggtgaattggatactaatccaactaattcccaagaccaagatgaagaagaagaagatcatgtcaatgtgttggccaatcgctttggttacttgggttcaagtcctaaatgaaaccaaccacatatagtactcaagattattattggttaacattgttcattaatttggttcaagtggaggcactcatgtggtgaatggaggaggaggcatcccatttggcatgatacatgtggaaatgatttactttttggtgtttctaacccccccattatatgatgatgcatgtccttttgtagaacctaaaaaatttctcacttttctctgtttgattaggtaggttgcagctgttgcttggacaagaatctatggtagtgatagcaatcgttatttactcaaggttcagttttatgtgttttttttttttttaaccactcaaattaaaccccctctcctttgtaatgttcatcttaattaattatattatatatcaaccaagctattgctgtaaaaaaaaaaaaaaaaaaaaaaaaaaaaaaaaaaaaaaaaaaaaaaaaaaaaaaaaaaaaaaaaaaaaaaaaaaaa

SEQ ID NO: 27985 - DNA, 2508 bp, Glycine max
  Clone ID: TF_GmC1855_1
gttcccggaatagacccacgcgtccgctaaaaagtaggtaattcgagcaaggcgcaacccaaagagggtgaccacaacctttaattcaatccatttcccctctctctctgttcaaagccacaatctaattaatttcccattcttctccaacaacttagggtttcccttttcccaacaacaatgccacccattccctaattagtaattacgctttttcttttcctattaaattcatttccccgacatggacggcggcgggtccactccggcggcgccgattccgaacgcgaacgcgccgccgccttttctgagcaagacctacgacatggtggaggacccttccaccgacgcgatcgtgtcgtggagcgcaacgaacaacagcttcatcgtgtgggaccctccgcagtttgccagagaccttttgcccaaatacttcaaacacaacaacttctccagcttcgttagacagttaaacacttacggtttcaggaaggttgatccagatcgctgggaatttgcaaatgagggttttttgaagggtcaaaagcacttgcttaggagtattacacgacgaaaacctgcccatggtcaaaatcatcaacagcctcagcaaccgcatggacagagttcatcggtaggggcatgtgtagaagttgggaagtttgggcttgaggaagaggttgagaggcttaaaagagataagaatgtgctcatgcaagagcttgtgaggttgaggcagcagcaacagaccactgataaccagctgcaaacaatggttcagcgccttcagggaatggagcaacgacagcagcaaatgatgtcattccttgccaaagctgtccagagccctggcttctttgctcagtttgtacaacagcaaaatgacagcaataggcgcataactgaagtcaacaaaaagcgtcggcttaaacaggaaggtatggctgaaacagagcatgctgctactccagatggacaaattattaaatatcaacctatggtgaatgaagcagcaaaagcaatgcttaggcagatcatgaaatgggatacttcttgtgtagaatctttgaataaaaattctgataactacgtgattggtgatgcttcatcatcttccagtggaatggacagtagcagctcttcaggctggacttctggagtaactcttaaagaggtctctccagcttcggtgcagtcttcacatgttccagctgcaactgggactcaagggcatgtcccctcaaccgttaaacctgaaattttatctgtaccacaagcagtagcttctgaaaaagttatgaaagatggagcacatgatccaccttctatccctgtgtctcaagcagatgtaatgatccctgatcttcctccaataacagagatggtgacaggaaatattcttgatattcctgaagaaaattatatggcaactgagacagatgagggatacatggattcttcattgggggctggtgggtcatttcccattgatttcgaaggtatttcacctgatgcagacattgatgatttgttagccaatcctatttgggatgaaattttgcaaacttcagttccagaggatatcgataccaatgtggctgaagcatccaaagggaatgaggtccaaccaatggaaaatggatggggcaaaactcaacatatggatcaccttacagagcagatgggtcttctttcttccgatgcaaaaagagtttgatatctatgatatatgattaatcttcatattgtctgaggtagtccctgacccaaacaatacatgactgaagtgatgtctataatatataattagtaattacactcccacttggtcactgaaaaagacaatgtttttcatttggtcttcaatggctttttttagtttgttgtgcataccaaggctaaatccaactttctcacacgtgcatttacattgatttttcattcgacttcgtgttgaaaacaagttatgaacttatggccttgtcatggcatcctcaggaagtgtttgtgatcacaagatcagtttttccaatgttataggcaatctgtcaagttgagttatatgtgaacgattcggttctttcccaattttcaagtttccttgatgaggggaaaaagagaacatgttgggtgatgattgactgctcaaggcgtctgaaaaatgcacattggaagatttgctttttgaacaagggcggcaacaatggacagcagtggtacgatgttaagctgcaggctgtttgcttcttcgtcaattttattttgtcctttccgaggttatgtttcaactgatggaaaatagaaggaaatgaaattgaatgatattagtccccattgttgaaattgttcataacatgatggaattgaacttgatggaatttattccatttctttttatccaatgctcttaccccctaatttgggtatatggtagaactattttattgtttgtcaagcaatctccttaccattctgtttgctttaatgaaatgaaaagttctattacgc

SEQ ID NO: 27986 - DNA, 495 bp, Glycine max
  Clone ID: TF_jC-gmXLIB3563P087Cb01a1
atagaacattatgtgaggttgagatgtgtcatcgatatggtgccggctcctttcttgacgaatacgtatgatgtgctggagagatcacagtgactgaccaagcgataatcgtgtggagaaagtgataacaccttcttgatgcgtggaagcatgccgattttgcataatgattggcttgcgaagtatttcaggtcacaacatcttatcctattatggtcgacagcgtaaatccctatatgattcctagacattgtaccagacaaatgggaattctcgaacgagcatttctggcgagggctcaacgatcttctatccgagatcaaacgccagatgaccgagcctgactcttgctaacatcccacggaggcctgaaagtccggagagggctgcatctatcacgtgaactctggcagcgacgactagggctccaccttaacctggagctcgttctccggctccatgatccagggatcggaggaaacactcacaacggct

SEQ ID NO: 27987 - DNA, 478 bp, Glycine max
  Clone ID: TF_uC-gmropic020d07b1
cggatgcgtgggtggcaacaactctcccagtcccaagcccttggagatggtcaacccggttcctccgattctttctaagaccttcgacctcgtcgacgccccgactctcgacccgatcatctcgtggaactccacgggcctcagcttcgtcgtgtgggaccctctcgagttcgcgagaattgtccttcctcgacatttcaagtacaacaacttttccagcttcgttcgccagctcaatacttatgtaactaggtgtttgtcttcagggattccgcaagattgacacagacaagtgggagtttttcaacgaagctttccagcgagggaagaagcacttgctgaagaacatccaaaggcgcaggtcatctcaatcccagccggttggtagctatattggaatcggatcttctaccgaggcaggggggtcagaggttgagattgagatagaaaggcttaggaaagaaaagactatgctgat

SEQ ID NO: 27988 - DNA, 1819 bp, Glycine max
  Clone ID: TF_GmC2149_1
tatttctcacactcgcaagtctcaagcaactcacacaggaagcggcaaacaaagcacacagaaagtaaaaagcggaaattaaggagcggtggtgacggtggtagtgaataaataaaagcagcaccataccatggggggagaagaagtagcaagagtcaaagcagagttgttcgacgacaacgaaagcgatcgcaacgacgacgacgttttgagcgagagcaaggactcgggagtgacgacggctcacgcagtgaaagaagagatggatgacggcgccgctaactggtcttcgtcgtcgtcgacttcgcccaaaccgatggaagggttgcacgaggtgggcccccctccgttcctgaagaagacgtttgaaatggtggaggaccctcacaccaaccccattgtgtcgtggagccaaactcgccatagtttcgtcgtttgggactcgcacgagttctccaaaacccttctcccaaagtacttcaagcacagtaatttctcaagcttcgttcgccagctcaacacctatggctttaggaaggttgattcggaccgttgggagtttgcgaatgaaggattccaaggagggaagaagcatttgctgaagaacataaggaggaggagtaagtgcaacaaactgcatcagggagcattcaatatgatgaagccagacgtggattctgaagtggagaagctgaagaaagaccagaacattttgaaggtggagattctgaagctgaggcagcagcaggaaaattctcatgttcagctcacaaatgttcaggagagaattcggtgtgcagagatgaagcagtttcagatgatgtatttcctcaccagaatggctagaaggcctgcgtttgttgagcagttagtccataagattaggcgaaaaagagagattgatggtaatgacatggttaagaggcctagattgatgggaaatccgtgccatgtacccttccctaagacaatggaaacaacacctaattttgattatagacaccaacaaggtcataaacaatttgcaacattgcaatctgagctcaatgtgacagaagtgaactccagtaggatggagcacccaactccctctcctttagaagatgaattaggcaactctttgcaagggttaagggctcatggttgttctagagcaagggcacaagatgcatcttcttctgcctatcatgttatgtcagaaaaactaatgagagaaaattctatagttgatgaagaactagatgtgaatgactccaatatctatcttgaattagaggatttgattactaagcctacagattggtctgttggatctgcaagtggattggtggaacaaactagttgaattaatctcactagtggaatagtgccttgtaatggttgcaagagtgtgcttgtgtggatgctctgctgcaacacaagatgaagaacttgatattataaggctcttcgattaccacttatcagtcttgaaagtgtaggacgtagatgctcgccccagctttttatatgatcaagcgagagtgcgagactttccatgtttctgtttggccgggtccaaattgttcatatgttgttgtatatatttccctctccgctttgtgttccttttgttaacttaggatctcaagtcctatattagcatatatagtaggcatagctaagcctcttgtgacgtagtaattaactatgtaaatgtaaagttgtaaatttgtaatgcagaaaatgtttttcagttccctgcttccctttgtctttcccacggaatcaaatcacttttttttttcagtcagaaataaaataactttttttttcagtc

SEQ ID NO: 27989 - DNA, 1611 bp, Glycine max
  Clone ID: TF_GmC1045_1
cccacgcgtccgcccacgcgtcggcccacgcctctctctccttcatccttatatttccaacggaaccttctagaaccaccataacatcattctcccttccctcgcgtttcaacaccgataacccgcaaaaatacccattgatctgcgcctcctcttccatggctccaccgccgccggtggaacacaacggcgactccgccactaccgcctcagcatccgcctccgcgccgcggagtctcagagatccattcccacgccctttctcaccaaaacctttcaactcgtcgacgaccaatccatcgacgacgttatttcctggaacgacgacggatcaacgtttatcgtctggaaccctaccgtcttcgccagagacttgcttcctaaatatttcaaacacaacaatttctctagcttcgttcgccaactcaacacttacggattcaggaaagttgtgcctgatcggtgggagttctcgaacgattatttccgccgaggcgagaagcggcttctttgcgaaattcagcggcggaagatctcatcgccggcgccgtctccgactgcgccgacgacggttacggtgccgatgccgttgaccgcgataccgatcatatcgccgtcgaactctggcgaggagcaggtgatatcgtcgaactcgtcgccgttgcgagcgccggcggagcttctcgacgagaacgagcggcttaggaaagagaacgttcagttaacgaaagaactcgccgagatgagatcgctctgcaacaacatatattctctcatgtcaagctacggaaacaaaaacggaaacagcaacggcagttaccaaactgacggcggcgccggtggagcacagggaagcagggagtccggcatgacggcggtgaagccactggatttgatgccggtgaaacggagctccggcgaggacgcggcggatacggtgccgaaggagataaatctaattccgaatccgaagctgtttggcgtggcgattggagcgaagcgagcgagagagggaggaggaggaagtggaagtggtcgagattgcggaggaggaggaggaggaggagaggaagataccctgctgcgcctgcatcacgtgggttctgcagacgtgaaatctgagccgttggattgccagaaccatcgcgagaatcaggaaacgccgtggttgagtccgtgtcacaggacaaatcaaagggtgtgcaactgacacgcggcgacggctaatcgaatgaaacattttagattagatacgtagtgctgtagggaatccgaaaccggcacgcggagacgtcacgtgcgtcgtttaaccgtttgggaccgattcccagaagtttctcagaagtcagaggaaaacgatactttctaatccttttttcttcgctatctcttttttatttatattatatattcgttaaattggacttggactgtagctttgccattgagggtagtgttgaatatttcattagtcctataaattattttacttgcctgtagaaactcaacattcatacttatgtgaatatatttatagttttattaattacaaagtgcaaaaactcgaaactagttcaataaccttatgtgaatatatttatagttttatta

SEQ ID NO: 27990 - DNA, 1747 bp, Glycine max
  Clone ID: TF_GmC688_2
ctttctcttccaccgccatcatctctccaccctccaccgccctcacacccttttaatatcctcactccccccaccacctcccactcttttcttttcacacccctcctcattcttcttcttcacactaattcagaatcaacatgaacccaaatgatgctaactctcctaagccgttggagattctgcagatgaaccctgttcctccgtttttgtccaagaccttcgacctcgtcgacgacccgactctcgaccccattatctcatggggctccaccggttttagcttcgtcgtgtgggaccctctcgagttcgcgagaatcgtccttcctcggcatttcaagcacaacaacttctccagtttcgttcgtcagctcaatacttatggattccgcaagattgacacggacaagtgggagtttttcaacgaagctttccagcgagggaagaagcacttgctgaagaacatccaaaggcgcaggtcatctcaatcccagcaggttggtagctatattggaatcgaatgttctactgaggcaggaaggtctgatgttgagattgagatagaaaggcttaggaaagaaaggactatgttgatggaagaggttgttgatttgaaacaagagcagcgaagaatggctcaccgcgcaggagaagtgaatcaaaggctccaatccacagaacaaaggcagaaacaaatggtttctttcctggtcaagttaatccagaaccccgcctttttagcccgccttaggcatgaggagcaaaaagaaatagattctccaagagtggtaaggaagtttgtcaagcagcaccaacatgaaactggaacagcagaaactctccaagaagggcagatagtgaggtaccaacatgattggagaaatataggcatgtcttccgaaactccaaaactaagtccagtttccattgaacagtctcctcactacctttcacagggtttggcaggagaagtgagtgtaggcgcagaagatcttactgctcaaatagagaatattgtatcaaatgacttggctgcagtgcacgggatcacagtgtctcaggaaattatgattggagaaggattatctagctttggagctgaagacccccttttcaaagggaaaagtgtcatgagtccaattctagaagttcctccagagtattttgcttccttcccagagggtttgaccaaggggaaagactttcaagatttttctgctcttggaactgaaggcatgataaagctagaagatatatgggactctggccttaatgttagtggtgctgcttcaggtagtgggaatgagctgtggagcaatcatgtcaactatgaagagtttccagaatttggagtcacaagtggtatgtctgactcagacatctgggatattggcttaggaagtttgggaattgataagtggccaactgatgaaccttctcttggtgaaacaaatggtcaagctggtcaaccaaaagaagataggcctaagaattttggtccatagggtttcatttgctcctgcacttgttgccctttggttacttgctatatttatagttcctaggaggcatattattgaatcatttgatttataaatagtattcattcacctgcttttattcatcatttactttcaatttttttattcttttagatgaattctttaactgtccatgtttttcttcgtaaattctaattgtgtaattattgataacttccactcaagtaaatcatacttttcctttc

SEQ ID NO: 27991 - DNA, 558 bp, Glycine max
  unsure (1)..(558): unsure at all n locations
  Clone ID: TF_jC-gmro02910062b09a1
ggctcgaggttgttgttttatttcattccattcgattcgattcgattcgatgtagcacagtctacctttcaattctgtggcgtctcattgattggtattatgaatctcgaatttgcaggttcaaatataccaattcgtgtatgaggaaaccgagattgatgacctttgataaaaatgctttcgattttcccctgtttctgcactgggatttagttgtttaggagttgaagtccggtaagggtttcagaaaggttgacccagatcgatgggaatttgcaaatgaaggatttttaagaggtgaaaaacaacttttaaaaagtatcagtaggcggaaatctgctcatgtaaatggtagtcaacaaccatctcaagtgcataaatcagctgttagagcatgtgttgaagtggggaaatttgggtttgaggaagaggtggaaagactgaaaagggataagaatgttcttatgcangaacttgntaggttgagacagaaacagcaagggactgataaccatttgaaaatgttggcaacgtgtgcagtcaatgagcagcgtcagc

SEQ ID NO: 27992 - DNA, 792 bp, Glycine max
  Clone ID: TF_GmC12036_2
cgctttctctctcgaaactgcatagcgtcagcgtagttgcaaattccaggttttcttcctttagcctagcttttactcattatctctctttctctctctctcagaggttctagaaagatccactccgaaatggacggtgcgccacaatccgccggtgccggaggtccggcgccgttccttctcaagacctacgacatggtggacgatgcctccaccaacgacatcgtttcttggagctccaccaacaacagcttcgtcgtgtggaaccctcccgagttcgctcgcctccttctcccgacctatttcaagcacaacaacttttccagcttcatccgccagctcaatacctacgtaagtttttcgattcctttgtttcgccttcggattcatggcgcgcttccttcgttttaattggattctaattcgttcttctgatttatgtcttccgtttaattgtttgcatgtattgattgtgcctttgcaataaaatgttgatcgccggatttgactaattttttgtaatcgttgttgttggatattggcactgagaatgttagcaatcatagtaggctgcaagcgatggttgttgtacactaatacttgacctatcttaaaatagtggttggtatctattagttccttcgtgtaagcaggtttggatgggtttttgtcactattcactaaccctaggcccctccaaaaggcatattcaatcacaaattcctttgaaaaatcctgtctccttaatactggagttgttattatcacatctttcaacttcatgaaagccat

SEQ ID NO: 27993 - DNA, 1330 bp, Glycine max
  Clone ID: TF_GmC5651_2
tgctcgagccgaatcggctcgaggcgaagacgacaccaccttcgtcgtttggcgtcctcctgaattcgccagagaccttcttcctaactacttcaaacacaacaacttctccagcttcgttcgccaactcaacacctatggttttagaaagattgtgccagaccgatgggagttcgcgaacgaattcttcaagaagggagagaaacacttgctgtgcgagatccatagaagaaaaacggctcagcctcaacaaggaatcatgaaccaccatcaccaccatgctcattctccgttgggagtcaacgttaacgttccaactttctttcccttctccagcagagtcagcatctctacttccaacgactccgacgaccaatccaactggtgcgactcgccgccacgtggagccacctcattggtgaacggtgcagcagcagccaactacaacacttccgtcacggcgctttcggaggacaacgagagactcagaagaagcaacaacatgctcatgtcggaactcgcgcacatgaagaagctctacaatgacatcatctacttcgttcagaaccatgtcaagccagtggctccaagcaattcttactcttcttctttgctactatgcaatacaccttctgccactccaataagtagtgccaataatgtttcaatgatgcaaaggccaatgaaccagcttctggggtattattctactaaccctaaacaaggagctacacaaattactcaacctcagacctatgttgtgaactctcccaccaacacatcaaggagttctataaccatttttgaagggcctgccagcagtaacattaatagctgcaagaccaagctttttggggtgtcgctgcagtccaagaaaagggtgcacccggattgtggatctaatccagagaccaacagggctcgtttggttttggaaaaagatgacttgggcttgaatctcatgcctccatccacttgttagttccactactgatgattaattctaagaaaaagtatgatatcccaagctagctagctacttatattaattttcttttacttgctttgatttgttttcttttttcttttttaactttttaaatcactactctcaagttttgagtcatggaggaggaaaacggaattcatggaaacgtgagtgtgtgtgtgcgtgcgtgggttcgtttgtgtgactgtttttgtgattctgtgtacatataacttagtgccgatattattatctttgctcccgacccatcatctattgatgtaggtgggttttggttagactaaaagatcagaaattaaagcaaaactctaaatgttcttc

SEQ ID NO: 27994 - DNA, 1993 bp, Glycine max
  Clone ID: TF_GmC790_1
ctcgagccgctatttttttataaaaaaaactattaattaaatattcatttattatttacttgaccagcaagttctttttcatttgttaaaactttatgaaattagatatttcattttctgtgaaaaaatcaattcattaaatactgctgaaaatcatggtcagaatttgagcttttggcaactatggacagaaatatgaacttttcgtatttggaggagaagcaatcctttttcggtgtcgttaactttatttttttggaggataagcaatcccttttgtggttcgctgtttccattttcagcttttttcttgtgtttgagcatttgaatctggacaaaggtttcacctttgggtgagtgattcaacaccagctatagctgggggagtgaaggtaaggttgtgagcattaatttgctttaaggggaattattaattggtgtttactgggattaatgaaacctagctagaaaggaaaatgatgggagaacaagggagtgtattttatatatatatatgtaaaaatttgtgtattgtttgtagtggttaaatttgtgaaaaaggtaaaaggttttttctttctttctgggtatacatactaaagggtttttgagagttcagtctgctttgagatttgtgttttggatgatggaggaagctcagggcagttctagttccctgccacctttcctcaccaagatttatgagatggtggatgatccttcaactaattccattgtttcatggagtgccaccaataggagtttcattgtttggaacccaccagagttttcaagggatttgttacccaaatactttaagcacaacaacttttccagtttcatcaggcagctcaacacttacggctttagaaagattgatcctgaacaatgggaatttgcaaatgatgattttgtaagaggtcagccacatcttttgaagaacatccataggcgcaaacctgtccatagccattctttgcagaatatccagggtcaaggggtttcttcgctgactgaatcagaaaggcagagttttaaggatgagatagagaagcttaaacatgaaaaagaacaacttcttcgggagttagagatgcatgaacaggagtggaaaatgtatgaggtacaattacaacactccaatgatcgtttggaaaagttggaaaagaagcaagaaaatttggtttcttctgtctctcaagtgttgcagaaacctgggattgccttaaatctcttgctgttgacagaaaacatggatagaaaacggaggttgccaagaagtggtctctttagtgatgacgctagcattgaagatcatatggaaacttcccaagtattaccaagggaaaatgcagatggtgcttctattttctcatcgagcacagaacggttggatctccttgagtcatccatgacgttttgggagaatattacacatgatgttggtgacgtctttgttcaaagtcatttaaacttggattttgatgaatctacaagttgtgcagatagtccagctatatcttgtgtgcaactagaagttgaagatcagcctaagtcacatggaatcaacgtgaattctgagccagctgtagttgcggctcctgatcttgatgcatcaaaagaacaacctgtcgaaacagctcctctgactactggtgttaatgacatattctgggaacgattcttgacagagaatcctggttcgtcagaaatgcaggaagctcagtctgaaagagaggattctgatggcagaagtaatgccaaattttggtggaacattaggaatgtaaataaccctccagaacagatggggcattcttagcaaagcagagcaaacttagttgcaattgattattccttttagcttgtgatgcccctcaattttcatgtaataaatgtaggtatacatattctatatttttggttaaatgattgcatcctctatagaatttagtcaatttttatactgctcactctcttttagttctctata

SEQ ID NO: 27995 - DNA, 3389 bp, Glycine max
  Clone ID: TF_GmC688_3
tgaacatgaaccccaacgatggcaacaactctcccagtcccaagcccttggagatggtcaacccggttcctccgtttctttctaagaccttcgacctcgtcgacgccccgactctcgacccgatcatctcgtggaactccacgggcctcagcttcgtcgtgtgggaccctctcgagttcgcgagaattgtccttcctcgacatttcaagcacaacaacttttccagcttcgttcgccagctcaatacttatgtgagtatcatttcaatcaaagaaataactgtgttttggttttgttttttgggtaggttggtatgtaatgttttctttggctgtttttgtaatttggtatgtaagtattttttttttattatgggcgaattttagtttgttatgttagattttttttttttttatcaatgttagtttgatagtttgactagaaatttcagcagcttggagattcgaacctcgaactcttctgtctccctttctcgtgggagttttcaattttatatctctgttagtggaagaagcacttgctgaagaacataccaaggcgcaggtcatctcaatcccagcatggttggtagctatattggaatcgattgttctactgaggcaggaaggtctgatgttgagattgagatagaaaggcttaggaaagaaaggactatgttgatggaagaggttgttgatttgaaacaagagcagcgaagaatggctcaccgcgcagtgaaggaatcttctgaatgcgtgtgggtttgtaatggttgggtgtgtagtgtgtttgtggagggaggtagaatgatgcttaactttgtttaaggccttgtttgtttgtttacttatttcaagaatagttttttgtttttagaaatttgtctgtcccagcccttgatcatattgggaagtgtttgtcccatgagcatattttttgttttttaaaagtttgtttttttgagtacttggatagagagtacttgaagaaaaccaaaagatggggaaacatctcctagtttttgccttttgatttttaaaactcttgttttagaaacgattttcaaaacttaatgggttttggatgagaaattaagcgctaagttgtatcaaattgatttagaaaacaatttttaaaacaaatagtgagaagacaatcagacaagccctaagtttcttggcttgtgttttctcatttgttaaaggcagggttggtttcatatttgaataaagattgtaggacacctccactctagttgacacctagagagataaagagagccaagagagaaatatataggtataataggtaatataatataaaaggaagagaaagatagagataaatagtaggtgttaatgaggtgttcctaagggatttagcagtttcgggttattttcttttctttctaacgagtgaagggcattctgcttaaattaagagagttcatcaaccctcaagctagctcgtgccccatatcgtatcgtttgaaatgatggaatgttcacatatcactactctaatattttgttatgttgaatctgctatttgtaattgctatcttgaggtgtacttttttgaatctgctatttgttcctaaggaatatttctcaatgatggaatgttcacatatcattacttatggaattgagtaataagaatatggtttggatgtttaccatttgcattgtagttaggattgagacatgagagactactactattggaagtggcaacaggagaaatattcctcctcttgtagaagggatttcatatttcacaggtagtactgtactactactcagggttctgtgggttgtttgtgtcattttgacttttccttatgtctgtgtaaagcttgctttggatttgcagattgcattaatccaatacaagcttgctctctctattagctcatagtgcctaagtttcagtgtacctaaaccatatatcttgttttgctttgctgatctttcttcccttttccctcctcctcattcttgtcttggggctttctgcttctgctccattcattctcaggtaacttggtgtttgtcttcagggattccgcaagattgacacagacaagtgggagtttttcaacgaagctttccagcgagggaagaagcacttgctgaagaacatccaaaggcgcaggtcatctcaatcccagccggttggtagctatattggaatcggatcttctaccgaggcaggggggtcagaggttgagattgagatagaaaggcttaggaaagaaaagactatgctgatggaagaggtggttgatttgcagcaagagcaacgaagaacagctcaccacgcaggagaagtgaatctaaggctccaatctgcagaacaaaggcagaaacaaatggtttctttccttgccaagttgatccaaaaccccgcctttttagcccgccttagacataagaaggagcaaaaggaaatagattctccaagagtggtaaggaagtttgtcaaacagcaccatgaaactggaacaacaacaacagcagaaactctccaagaagggcagatagtgaggtatcaacctgattggagaaatatagccatgtcttctgaaactccaaaactaagttcagtttccattgaacaatctcctcactacctttcacagggtttggcaggagaaatgagtgtagtaggtgcagaagaccttactgctcaaattgacaatattgtatcagatgatttggctgcagtgcaccggattacgccatctcaagaaatgatgattggagaaggatcatctacctttggagctgaagaccccctcttcaaagggaagagtgtcatgagtccaattctagaagttcctccagagtattttccttccttcccagagggtttgaccaaggagaagaaagactttcaagatttttctgctcttggaactgaaggcatgataaagctagaagatatatgggactctggcctcaatgttagtggtgctgctttaagcagtgggaatgagctgtggggcaatcatgtcaactatgaagagtttccacaatttggagtcacaagtggtatgtctgactcagatatctgggatattggcttaggaagttttggaattgatacgtggccaactgatgaaccttctcttggtgaaacagatggtcaatctggtcagccaaatgaagataggtctaagaattttgatccatagggcttctttggtcctctgcacttgttgccctttggttactttgctatatttatggttcctaggggtcatattattgaatcatttgacttataaacattattccttcacctgctttcattccttatttactttcaatttttcttattcttttagattaattaattctttaattgtccatatttttctttgt

SEQ ID NO: 27996 - DNA, 2895 bp, Glycine max
  Clone ID: TF_GmC1242_1
ccacgcgtccgcagtccgcaacaaaccaaagcaagcatccaaaaacgcacactctcacatcacaatgctctcttcccattcccctcctcctcctcctccttccttctccaccactacttcaacaacaacaaccaccttcacttcttctccatgcccaagaagaatctacctgaataatcccacacagattccaaaaccatacccatacacacacctttttacacatcactcttcattgcttaataattattttactaacatgaatccctcttgtcgcttctcttcaactaaacacacccctttccttcacaactccaaacccacttcccctttcttccttagacactctcactctcattcccaccaagtgaaaccttttcccttatcccctccaataacaacaacaacagcaaagccttatcctttaaacattctaaggctcagaaacatcaaactctctcaccctttggccacgctatcatctttcgcggagggagaagaagagaatcagaaggagggagcagagtcaccaccgaacaacgatgaattgggaggaattgcgaaggccttcaacatatcgtctcggacggcctctgccatatcgatatgcatggcattggcggttctcacttttccgctgttcatgacttctttggggcaaggcatggctctgaagacgaaggtgctctcttatgcgacgctgctgttcgggttctacatggcgtggaacattggggcgaatgacgtggcaaatgccatggggacctccgtggggtccggcgccctcacgctccggcaggccgtgctgaccgccgcggtgctcgaattctccggggcgctgatgatggggacgcacgtgaccagcacgatgcagaaggggattctcgtcgccaacgtgttcaatggaaaggattctttgctcttcgccgggttgctctcgtctcttgccgctgctggtacttggttacagtttgcatcatattatggttggccagtatctactacacattgtatagtgggagcaatggtggggtttggtctagcttattaataatccattatcgaacccacaaacgcctccctttttcctttgctatccactccatgattttagtctcctctccgaaacttctagaaacaactacaacctaccgctcatttttttccggttccgaccctctttctgccctctcagtaaccttatcagatccgatcaaggtaaccaaataatatcacaagttattcttcttcacttatttatatttattttccttttggatttgataatattaagaggaaccaggatagataggtaggttctagcctttctgttatcattttcgaaacaaaccaaattgaaactgtttgagttttgtttagaaggctgttatgaatgaaactttgaagcttagaaaagcggttaggtagctaggtttcagtttcagatctggtagagagcttcatcatgaagccattaccggcggagcaaaccggtgaatcagcgccgacggagttgcagagatccattccgacgccttttctgaccaagacgtaccagctcgtcgatgatccctccgcggatgacctaatttcctggaacgaagatggcaccagcttcatcgtatggcgacccgcggaatttgcaagggatttgcttcctaagtacttcaaacacaacaacttttccagtttcgtccgtcaacttaacacctatgggttccggaaggttgtccctgaccgttgggaattcgccaacgactgtttccggcgaggcgagagagctcttcttcgcgacatacagcgccggaaattactgccggttccgcctgcagccgcggcaccggcagcagtcacagccaatacggtgacggtggctgtggcagcaccggcggtgagaactgtgtctccaacgacttccggcgacgaacagccgccagcagttagaatcctccacaagcgctgtgaggaccgtgccggtgccggacgggaaggcgccgctggagcttttgcccgcgaaacatgtttcatcggctgatgacgccctgcatgtcggtggcgccgccggtgccgcggcgtgcgcgacggggaacgcggcggaagcagaggttccgaagctgtttggggtttcgattggactgaaacgatgtaggacagagtgcgaggccgaaccagaaggagaagatcagaatcagatgcaaacgcgagcacaaacacaatcacaatcgtcgcaagaaccagatcacggttcagatgtgaaatctgaaccgcttgatggtgatgattcggattatcaggatcatgaccctcattggttggagctatagggaaatgaaatgatgctccttcttcttcttgatctctctactaatttggtgaaatgacagtgcgcacttgctgcctgtactattagtgctgtgacgctgccattgggccggcacgtgacttggccatgtatttaactcgcggttggggtgaaaagtgcgaaacattgtactataaggaattatgtattcttctgattgctgggggttaaagaaagattatcatcgcgtcaaaatggagtaactgaagcaagggaaggacagacccctaaaagactcacgtctcggttttttatttcaaggaacatttgttggatacagcaaaatgtgtagatatttgtgtctgacatcattaaattttcgaatttgattcgtgtattgtaatgtttccatcctttgaaccaagtttgttcctaagcttcataattgtagcatgtatgttcttttaatgaaatgaaattctaatattatctaaaaaaaaaaaaaaaaaaaaaaaaaaaaaaaaattaaaaaaaaaaaaaccctaaaaactccaactttagaaacccttaaaagagggaaaatagcccactag

SEQ ID NO: 27997 - DNA, 1438 bp, Glycine max
  Clone ID: TF_GmC1045_2
attctgcccttccctcgcgtttcaacaccgataacccgcaaaaatctccattgatctgcgcctcctgttccatggcaaagctgcctgtggaatacaacggcgactgcgccaccaccgcctcagcatccgcctccgcagccgcggagtctcagagatccattcccacgccgtttctcaccaaaacctttcaactcgtcgacgaccaatccatcgacgatgttatttcctggaacgacgacggatcaacgtttatcgtctggaaccctaccgtcttcgccagagggctgcttcctaaatatttcaaacacaacaatttctctagcttcgttcgccagctcaacacttacggattcagaaaagttgtacctgatcggtgggagttctcgaacgagtatttccgccgaggcgagaagcggcttctgtgcgaaattcagcggcggaagatctcctcgccggcgtcgtctccgacggcgccggcgacggtttcggtcactgcgccgatgccgttgactgcgataccgatcatatcgccgtcgaactccggcgaggagcaggtgacgtcgtcgaactcatcgccggcggagcttctcgacgagaacgagcgactgaggaaagagaacgttcagttaacgaaagagctcgcggagatgagatcgctctgcaacaatatttattctctcatgtcaaattatgcaaacgccaacggaaaaggaaacagcaacggcagttacaaaactaaaggcggcgccggtgtcgcgcacggaagtttagagtccggcatgacggcggtgaagctgctggatttgatgccggtgatgcgaagctccgatgaggacgcggcggagatggcgccggaggagatgaatccgaagctgtttggtgtggcgattggagcgaagcgagcgagagagggaggaggtggtggagattgtggaggtggaggagaggaagatacgctgctgcgcctgcatcacgcgggttctgcggacgtgaaatctgagccgttggatttccagaaccatcgcgagaatcagaaaacgccgtggttgagtccgtgttacaggacaaatcaaagagtgtgcaactgacacgcggcgacggttaagcaaaggaaacattttagattagattacgtagtggcgtagggaatccgagaccggcacgcggagacgtcacgtgcgtcgtttaaccgtttgggaccgattcccagaagtttctcagaagtcggaggaaaacgatactttgtagtccttttttcttctctctctcttttttttttatataaatatattttttttgttgcatgaaattggacttggactgtagctatgcctttgagggtagtgttaaatatttcatttagttctataaattattttacttgccagggaaaactcaagattcatattcatgtgaatatatttaatagttttatact

SEQ ID NO: 27998 - DNA, 671 bp, Glycine max
  Clone ID: TF_GmC8373_1
gaattccgtaaccatactaactagtagtacttgtgttgtgccactcaaactaaactaaactcaatttccaatttccttaatcttgttgtgttgatgtacatggagagaattagagtgaaggaggaagaagcagtgacatgtggtggtggttcatcatcatcatcatcttcgtcttcaagcttttctccacagcctatggaagggttgcacgaggtgggtccccctccgtttctgagcaagatctttgacatggtagaagattcttccacggactccattgtgtcatggagcatggctcgcaacagctttgtggtgtgggattctcacaagttttctgctgacattctgcctcgttacttcaagcacggcaatttctccagcttcattcgccagctcaacgcctatgggtttaggaaagttgatcctgatagatgggaatttgcaaacgaaggttttttggcaggacaaaggcacttattgaagaccattaagagaagaagaaatgtgtcacagagtttgcaacaaaaaggaggaagtggagcttgtgttgaagtgggggagtttggactcgaaggtgagttggagaggttgaaaagagacaggaacattttgatggcagaaattgtgagattgaggcaccaacaactgaactcaagggaacaattgaattc

SEQ ID NO: 27999 - DNA, 1987 bp, Glycine max
  Clone ID: TF_GmC1242_2
gcgatctagcactccatgattttagtctcctctcggaaacttctagaaacaacaacaacctacagctcattttttttccgattccgatcctctttctgcttctccgttcgctgggtgcatgccctctcagtaaccctatcagatagatcaaggtaaccaaaataatcataaattatcattcttcacttattaatattatttatcttctttttggattggataatattaagaagaaccagcgttagctaaggatagataggttctagcctttctgttatcattttcgaaagaatctgtagcagtgtaagtaccaaattgaaatggttagattttgtttagaaagcagttatgaacgaaactttgaagcttagaaaagcggttaggtagctaggttgagttccagatctggtagagaagttcatcatggcgccgttaccggcggagcaaaccggtgaatcagcgccgacggagttgcagagatccattccgacgccgtttctgaccaagacgtaccagctcgtcgatgatccctccgcggatgacctaatttcctggaacgaagacggcaccagcttcattgtatggcgacccgcggaattcgctagggatttgcttcctaagtacttcaaacacaacaacttttccagtttcgtccgtcaccttaacacctatgggttccggaaggttgtccctgaccgttgggaattcgccaacgactgtttccggcgaggcgagagagctcttcttcgcgacatacagcgccggaaattactgccggttccgcctgcagccgcggcaccggcagcagtcacagccaatacggtgacggtggctgtggcagcaccggcggtgagaactgtgtctccaacgacttccggcgacgaacaggtactatcttcgaactcatctccgattgctgggaataataataataatacagtacaccgcaccacaagttgcaccactgcgcccgagctgttagaagagaatgaaaggcttaggaaagagaacatacaactgagtaacgagttgagtcaattgaagggtttgtgtaataacatactctctttgatgaccaattatgcttctggttttagccgccagcagttagaatcctccacaagcgctgtgaggaccgtgccggtgccggacgggaaggcgccgctggagcttttgcctgcgaaacagccatgtttcatcggctgatgaggccgggcatgtaggtggtgccgcgccgtgcgcgacggcgaacgcgggggaagcagaggttccgaagctgtttggggtttcgattggactgaaacgatgtaggacagagtgcgagggcgaagcggagggagaagatcagaatcaaatgcaaacgcgagcacaagcacaaacgcaaacacaatcgtcgcaagaaccagatcacggttcagatgtgaaatctgaaccgcttgatggcgatgactcggatgatcaggatcatgatcctcgttggttggagctaggtaaatgaaatgatgctcctccttcttctaatttggtgaaaatgacagaaggcacgtgacttgggtggggacacgctgtactattagcgctgcgacgctgccattgattgggccatgtatgtaatgtaacattacgctagatggaaagggcggatgaccatccttgtatgtaactcgcggatgggatgaaaagtgtcaaagtcaaagctttgcttgagcgccaaaatttgtaatataaggatttatgtattcttgataagctggggttaaagaacatgtcaaaatggagtaactgaagcaacccctaaaagattcacttctcgttttcctttttaaggaacatttgtgggttacagcaaaatatgtagataaacgtgtctgacatcattacatttttcgaatttgattcgtgtattctaatgtttccatcctttgaaccgagttgttcctaagattcataatcgtaccatgtttctttttaatgaaaaaaaaaaaac

SEQ ID NO: 28000 - DNA, 1849 bp, Glycine max
  Clone ID: TF_GmC688_1
ctttctcttccaccgccatcatctctccaccctccaccgccctcacacccttttaatatcctcactccccccaccacctcccactcttttcttttcacacccctcctcattcttcttcttcacactaattcagaatcaacatgaacccaaatgatgctaactctcctaagccgttggagattctgcagatgaaccctgttcctccgtttttgtccaagaccttcgacctcgtcgacgacccgactctcgaccccattatctcatggggctccaccggttttagcttcgtcgtgtgggaccctctcgagttcgcgagaatcgtccttcctcggcatttcaagcacaacaacttctccagtttcgttcgtcagctcaatacttattctcatggggctccacccgttttagttaggattgagacttgagagactactactactgctggaagttgcaacaggagaaatattccccttcctgtagaagggatttcatattccacagggattccgcaagattgacacggacaagtgggagtttttcaacgaagctttccagcgagggaagaagcacttgctgaagaacatccaaaggcgcaggtcatctcaatcccagcaggttggtagctatattggaatcgaatgttctactgaggcaggaaggtctgatgttgagattgagatagaaaggcttaggaaagaaaggactatgttgatggaagaggttgttgatttgaaacaagagcagcgaagaatggctcaccgcgcaggagaagtgaatcaaaggctccaatccacagaacaaaggcagaaacaaatggtttctttcctggtcaagttaatccaaaaccccgcctttttagcccgccttaggcatgaggagcaaaaagaaatagattctccaagagtggtaaggaagtttgtcaagcagcaccaacatgaaactggaacaacaacacagcagaaactctccaagaagggcagatagtgaggtatcaacctgattggagaaatatagccatgtcttctgaaactccaaaactaagttcagtttccattgaacaatctcctcactacctttcacagggtttggcaggagaaatgagtgtagtaggtgcagaagaccttactgctcaaattgacaatattgtatcagatgatttggctgcagtgcacgggattacgccgtctcaagaaatgatgattggagaaggatcatctacctttggagctgaagaccccctcttcaaagggaaaagtgtcatgagtccaattctagaagttcctccagagtattttgcttccttcccagagggtttgaccaaggggaaagactttcaagatttttctgctcttggaactgaaggcatgataaagctagaagatatatgggactctggcctcaatgttagtggtgctgctttaagcagtgggaatgagctgtggggcaatcatgtcaactatgaagagtttccacaatttggagtcacaagtggtatgtctgactcagatatctgggatattggcttaggaagttttggaattgatacgtggccaactgatgaaccttctcttggtgaaacagatggtcaatctggtcagccaaatgaagataggtctaagaattttgatccatagggcttctttggtcctctgcacttgttgccctttggttactttgctatatttatagttcctaggggtcatattattgaatcatttgacttataaacattattccttcacctgctttcattccttatttactttcaatttttcttattcttttagattaattaattctttaattgtccatatttttctttgtaaattctaattgtgtaattattgat

SEQ ID NO: 28001 - DNA, 616 bp, Glycine max
  Clone ID: TF_GmC92665_2
gagaaagctaggaagagaaaggaggaaaatattaaagctcttgcaattctcatgaactgtggagtcgtgttgggtttctattgttggggttgggagttcttaactgcccttcttctcttctctcatcaaccttattgatcattctcttcttcctcttcttcttcaaaaaccaatttctttttatacaaataaagaagataccaaagaaaaacatagcaaaaaaataaaaataaaaaaatggaaggaacaagcaataaggggttgttggaatgtggaaggaagtgcactccaccgccgtttttgttgaagacttatatgcttgtggaggatccggccaccgacgacgtcatttcgtggaatgccaaagggacggcgttcgtggtgtggcagccgccggagtttgctcgggatctcctcccaacactcttcaagcacagcaacttctctagctttgtacgccagctcaatacttatgtacgtttcggaaagatattgcactctattaggataagcatatgattgcatcaagaaattctgcctaggggtattgctttaacaacttgaacttatattaaggatgtaacctctattaaacaaaaagttgcggacagggggg

SEQ ID NO: 28002 - DNA, 632 bp, Glycine max
  Clone ID: TF_GmC1242_6
gcgacgcaagctcagcggctcgagtttcctatcctctcctctccgaaacttctagaaacaactacaacctaccgctcatttttccggttccgaccctctttctgccctctcagtaaccttatcagatccgatcaaggtaaccaaataatatcacaagttattcttcttcacttatttatattattttccttttggatttgataatattaagaggaaccaggatagataggtaggttctagcctttctgttatcattttcgaaacaaaccaaattgaaactgtttgagttttgtttagaaggctgttatgaatgaaactttgaagcttagaaaagcggttaggtagctaggtttcagtttcagatctggtagagagcttcatcatgaagccattaccggcggagcaaaccggtgaatcagcgccgacggagttgcagagatccattccgacgccttttctgaccaagacgtaccagctcgtcgatgatccctccgcggatgacctaatttcctggaacgaagatggcaccagcttcatcgtttggcgacccgcggaattcgctagggatttgcttcctaagtacttcaaacacaacaactattccagtttcgtccgtcagcttaacacctatg

SEQ ID NO: 28003 - DNA, 380 bp, Glycine max
  Clone ID: TF_jC-gmfl02220076c10a1
gctcggaattcggctcgagctctctcttaatttttctccataggctcttcttctagacaactgtgaaggcattttactctcttaggactcacacaaatcagagcctgctcctttcctcaccaaaacataccaactggtggatgatcccgccacagatcacattgtgtctaggggcgaagacaacaccaccttcgccgctaggcgtcctcctgagttggaaagagaccttgttcctaactacttgaaacacaacaacttctcaagctgagttcgccagctcaacacctatgggtctagaaagatagagccagaccgatgggaggtcgccaacgaattcttccagaaaggagagaaacacttgctgtgccagatccataaaa

SEQ ID NO: 28004 - DNA, 357 bp, Glycine max
  Clone ID: TF_12689193
cttgggaccttctccccaactatttcaaacacaacaacttctccagctacgttcgccaactcaacacctatgtatgtatcatacacccatcatgtctctcttctttttcttaatttctactcatacgttcttccgagacaatcttattcaatacattatgaaacactaaatataagagacagaacttagataccgtttagatgttttttgtttgttgttctattagaattggagtttcttcgataatgtgtctcttccttttgtttttcacattttcttctctgtgaagaggattctgtccgaaacatcattaagagacaattgtaacttagatataattattatatacttttgatg

SEQ ID NO: 28005 - DNA, 1732 bp, Glycine max
  unsure (1)..(1732): unsure at all n locations
  Clone ID: TF_GmC5651_1
ccacgcgtccgctgatcttttcattctgtctcttctcttgaattccgctctcttctctctttacttccctcaatagcaaaagctatggctcttctactagacaactgtgaaagcattttgctgtctttggacacacacaaatcagttcctgcacctttccttaccaaaacataccaacttgtagacgacccttccaccgaccacatagtctcttggggcgaagacgacaccaccttcgtcgtttggagaccccccgagttcgctagggaccttctccccaactatttcaaacacaacaacttctccagcttcgttcgccaactcaacacctatggttttagaaagattgtgcctgatagatgggagttcgcgaatgagttcttcaagaaaggagagaagaacttgttgtgcgagattcacagaagaaaaacccatcaccagcatcatcaacaagtacccatgaacaaccatcaccaccatcataagtttggactcaacgttaacgttcctactatctttcccttccacaataacagactcagtgtttccccttctcatgattcggacgaggtaataatacccaattggtgtgactcgcccccaagaggagcttgccggtgtaaacagcagcagccaactacaacacgcctaacagcaacattaacagctgcaagaccaaactttttggggtgtcgctgcagtccaagaaaagggtgcacccggattatggatctaatccagagaccaacaaggctcgcagaaccatgtcaagcccgtggctcctagcaacaacaacaatttcccttcttttctactctgcagtgataatagtaatatcaacaacaacacatcaccacaaacacaaacacaagcacaagcctctcctatgagtaaggtttcaacggtgcaaaggcaactgaagcagtttgtagggtgctattccaacaacacaaagcaagcgcgtgctgtgaactctcccactaacagttccataaccattgttgaggaagaggctagcagtaacagttgcaagaccaagctttttggggtgtctcttcaatccaagaaaagggtgcaccctgagtacgggtctaacaatgttcttcaaagctccgaaacgaataaggcgcgtttggctttggaaaatgatgaactattaggcttgaatcttatgcccccttcaacttgttaattagttagttaagttagtcctcccaaaattcataaccttagaaccttgctattttctaattttaattgcttcatatatgtataaatatatatatttttcttctttaatcccttaatttgagttttgaagaaggcaaatgctgttgatggaagcttgtgttcgtgcgtgatcctgtgtacatttaacttggtgccgaggttatatccttcgtttttccttaaaaaaagaaaaatccaaacattattgggagaagatccagtccaaaaaaagggagcacccggaatatggatctaatcagatgaccaaacaggctagtttggttttggaaaaggataacttaggcttgaatatcatgcctccatccccttgttagttcccctactgatgattaattctaagtatgatatgatatcccaagctagctatatagctgcttaaattaattttcttttaatacttgctttgatttgttttctattttaacttttaaatcaccacactcaagttttgagtcttggaggatgcctattaannnnttat

SEQ ID NO: 28006 - DNA, 649 bp, Glycine max
  Clone ID: TF_GmC12036_4
gcaaattccaggttttcttcctttagcctagcttttactcattatctctctttctctctctctcagaggttctagaaagatccactccgaaatggacggtgcgccacaatccgccggtgccggaggtccggcgccgttccttctgaagacctacgacatggtggacgatgcctccaccaacgacatcgtttcgtggagctctaccaacaacagcttcgtcgtgtggaaccctcccgagttcgctcgcctccttctcccgacctatttcaagcacaacaacttctccagcttcatccgtcagctcaatacctacggatttcgaaaaatacatccagagcgatgggaatttgctaatgatgagtttctgaaagatcagaagcatcttcttaagaatatatatcgcaggaaacctatccacagtcatagtcatcctccaggttcacttgtagatccagaaagggcagcatttgaggaagaaatagacaaactttcccgtgagaaaacttcttttgaatccaatatttataacttcaaacaacatcagtcaacagcaaagcctaagctagaagattttctgcagcgattagatggtattgagcacaggcagaagcaattgctgaacttcttgagagggctcttcagaatccta

SEQ ID NO: 28007 - DNA, 573 bp, Glycine max
  Clone ID: TF_GmC864765_1
ctttttaggcaacagctagagagtacttttaaattatcaagcatggctgataattataatgtgttagagctcaacattggtttaggcaacaacaacaacagcaaagttggtggtcatgcagggcaatcaccaaggcaaaggtgccctgcaccgtttctgttgaaaacgtacgaattgttggaagaattaagtgagaatgaaaaagatagcaccaaaattgtgtcgtggaatgcagaaggaactggctttgttgtgtggtccccagctgagttctctgagctcaccttgcccagatatttcaagcacaacaacttctctagcttcattcgccaattgaatacatatggatgtaagttattgtcctcctacctttgcgagctcgtgcccggcatgcttcagcgggcctgctggcacagtctagccgaaggcacgaggtgattgtgcctgccatgtgtggtgcctccattcctgatgccttcttctgcgggttttcttccatcgtgtcccgcggaggtattctctgatcgtcgtcctctccgcattgaagttagttatttatcaactttcttgaat

SEQ ID NO: 28008 - DNA, 1561 bp, Glycine max
  Clone ID: TF_GmC403_2
acgcctgcaggtacgggtgcgcagtgtcccggggggaccccgcgttacggctgcgagaagacgacagaaggggacaacaccctctattaacctttctctctcctctctttcctctctcttggaacaaacgacaagttatggtagtatttgtcattcatttcacaaaactggttcacctttggacccatggcttctaaaaactccacgttgttccagtctcgcttcttcctcttcggcttctattgctgggactgggagtttctcaccgctcttctcctctttagttcttcttcctaatcaaataaccttctccaccatacataaacctttttttttttgtcttttgtacttaaatttctcattactacatcaacaaaagaggcatagattttttcttcttttattaaaataatagtttgtgaggtaggtggagggtagatcgggaagaaaaatgtcgcagcagcagcgttcgatgccggcgccgtttttgacgaaatcgtatctgttggtggatgatcccgccaccgacgacgtcgtttcgtggagcgaaggtggcaacacctttgtcgtttggaaacacgccgatttcgctaatgatttgctccccaagtacttcaagcacaacaacttctccagcttcgttcgccaactcaacacctatggattccgaaaaactgttcccgacaaatgggaattcgccaacgagtatttcaagcgaggacaaaaggatcttctcgccgagatcaagcggcggaagacggtgtcttcggtgtccggaaaatccggcagtggcggtaacatttcggcgtcccactccggcggcgatgacatggggtcgacatcgacggggtcgatggaggcggcgacggcgacagtaacaacgactcagtgcgcggatttatcgggcgagaacgagaaattgaagaaggacaacgagaaattgagcgacgagttagcccgcacgaagaaacattgcgacgatttggtggcgtttcttagagactcgctgaacgtgggccccgatgtgatagattgcatcattcggcaaggaacgtgtgggtccagcaacgatgatgcggtgcgttttgatgctactgaaaatcttaataatcataatcatgatgacgacgaaaatgcggtaggtgagtgtgaaccagaacaacccaaaggtgacaatggagaaagtttgaaactgtttggggtttggttgaagggtcaaaatgggaaagagaattcaattggtagctgccgcaagagagggcgccaagaccctattgctgccactgccaaggaattgaagacccttgtctaggacatatcctaaggttgttaattaattaccttataatatttcaagaaacaactattatagtcagatctagaacacaaaaaagaactctctcttggtcatcatggaacatgtatggtcgatagtagttgttgttaattcatggcattttgtagtttggtttggtgatggtgcaagggacttcgtaaattatactaataatgatgatgattaaaaaaaaatgaaaaagcattaatttgtatgattggattt

SEQ ID NO: 28009 - DNA, 1624 bp, Glycine max
  Clone ID: TF_GmC403_1
cctcgagccgaatcggctcgcgtcaccctctattcacttctctctctcaaaacaagttatggtagtatttgtcattcatttcacaaaaccggttcacctttggacccatggcttctaaaacccctaccttattccactctcgtttcttcctcttcggcttctattgctgggactgggaatttctcaccgctctcctcctctttagttcttcttcctaattaattaaattacatacaccttttctttttttttttttacctaaatttctcattactacaacatcaacaaaagaggcataggttttttttttcttttcttcttttattaaaataataatagtttctgtgaggtaggtggagggtagatcgggaagaaaaaaaaatgtcacagcagcagcgttcgacgccggcgccgttcttgacgaagacgtatctgctggtggatgaccccgccaccgacgacgtcgtttcgtggagcgaaggtggcaataccttcgtcgtttggaaacacgccgatttcgctaaggacttgcttccgaagtacttcaagcataataatttctccagcttcgttcgccaactcaacacctatggattccgaaaaactgttcccgacaaatgggaatttgccaatgagtatttcaagcgaggacagacggatcttctcgccgagatcaggcggcggaaggtggtgtctccggtgaccggaaaatctaccggcggtggcgttaacatctcggcgtcccactccggcggcgacgacatggggtcgacatcgacgggatcgatggaggcggcaacggcggcgggcgctgatatatcgggcgagaacgagaaattgaagaaggacaacgagaaattgagcggcgagttagcgctggcgaagaaacaatgcgaggagttggtggcgtttcttagagactcgctgaacgtgagccccgatgtgatagagcgcatcattcggcaaggaacgtgtgtgtccagcaacaatgatgcggtgcgttttgatgctattattaataatgatcttgatgacgacgaaaatgcggtaggtgagtgtgaaccacaacaaccaccacccaaaggtgacaatggagaaagtttgaaactatttggggtttggttgaagggtcaaaatgggaaagagaattcaattggtaaatgccgcaagagagggcgccaagactaccctattgctgccactgccaaggaattgaagaccctagtctagtacaacatatcatattcttgttaattaattaccttttaagaaacaactattgtagccagatctagaacacaaagaaaaatactctcttagtcatcatggaaaatgtatggctctttcatggtatttcgttgtttggtttgatggtgcaagggacctaataaaggatactaatgatgatgattaagattatgtttatagacattaatttgtatgattggaaataaatgtgtcttgtttaaggaatttgacattgacggtctcattattacgtgggacagagctattgtagtaccatgccaattttaattactgtatgactgtgtatgtttgattttccgttataaatagatgtcggtagcaaaaaaaaaaaaaaaaaactcgagactagttctct

SEQ ID NO: 28010 - DNA, 1465 bp, Glycine max
  unsure (1)..(1465): unsure at all n locations
  Clone ID: TF_GmC662_1
nnaaggctcgagcagactttctctctctctctttctcactctctctctctctctctctctgtcacgcacagagaaaaactcagacacccacgttcacacttcgcacacaccatctctcactgttctttcttcttcctctttttctttttttttttcttttctcttaatggaatgatggaacacaacatcatcgtcaacaacaacgtgatcgcaccgtttgtcataaaaacctacaatatggtgaacgatcccaccaccgataaactcatcacgtggggcccagccaacaacagcttcatcgtcctcgatcccctcgacttctcccactccctcctccctactttcttcaagcacaacaacttctccagcttcgttcgccaactcaacacctatggtttcagaaaggtggatccggatcggtgggagttcgcgaacgagtggttcctgcgaggacaaaagcacttattgaggaacatcgtgcggaagaagcacggtggagctgggaggaccaattccaattcgcattattcgcatcccttgaagctggaggagttggacgacgaggctatggtgatggagatagcgaggttgaaggaggagcaaaaagcgttggaggaagagcttcatgaaatgaacaagaggttagagacaacagaaaaacgaccacaacaaatgatggcttttctgtgtaaggttgtcgaggacccgcagattctttctcggattctccgagaaagagaaaagaaacacctgggagagaaaaagcgacgcctcattccgcctccgccgccgacggcagcgacgtcgtcgtcgtcgtcctccggcatcaagacagagttcgaagaagacgaaggtaattataatatcaagtcttcgtcgccggagacagggttggaaatcgacaacaatagtaacaatatttgttcgccgccgccgctggggtgttggggtgaacagggttgttatgggtacaattgcgcctccgtgccggcacctttgacggtggtagcgccggcgtttccgacgatgggaggagggtatttgaggcgtggggggttttggggggaaatggcggcggaggggaatgcggtgccgccttatccgttttcgttgttggaagggggcttttagatttagttttaggttatgaaatgaatgaattattactgccacaaaatttcatcttggattttctgtcgtattgaaagttctatccttttttgtgcgttgattctgtgtaaagaaaaaaggttgggaaaaagagtaaaaaggtagtgggaaaattgttagatatttatagttgtgttcggtttcaggttttttttttcataaatattgtttttaaataaatgctttgcggatggtgtagatcaagtaacatagagttgtttcaatttaatgagtaggatcggattagaatcttgcatatataattatgtaaaatattcaaactgtgagttttgtt

SEQ ID NO: 28011 - DNA, 1750 bp, Glycine max
  Clone ID: TF_GmC114_1
ccaatccactgttgttgttgttgtctaaagcaaaataaagtggctagtgtacgtgtggattcgattttcgtttggtccaaaattaacattaggattttatagtagtgcttctcaaaatttctagaacccacgtcacacttactctgggaaggatggggttggaaaatgtctggttccgtattatataagagtctcgccctagaatcctcgagcagaagaatttaattcactgtactttatccttttgtgtggggaattatggtaattgattttgagggtttgactactcatggattatgatggtatgagaaaaccttccaaaaacttatttcactctcgcttcttcctttttgggttctattgctgggattgggagttcttgaccgctctcctcctttttagttcttccccttaatcttctttcttcacaatttttatttccttccttattagacgtattagatcagattgaacaaaagggtttttctttctttctttcttggggaataatagaaataagaaaagattagtgaggttgaaatgtcgcaacgatcggtgccggcgccgttcttgacgaagacgtatcagttggtggaggatcaggggacggaccaggtgatatcgtggggtgaaagtgggaacacttttgtggtgtggaagcatgcggattttgcaaaggatttgcttccaaaatatttcaagcacaacaacttctccagctttgttcgacagctcaatacctatggattccgaaaaattgtgccagacaaatgggaattcgcgaacgagcatttcaagcgagggcagaaggagcttctctccgagatcaaacgccgcaagaccgtgcctcaatcgtcggcacatcccccggaggccggaaagtccggcggcgacggcaactctccgttgaactccggcagcgacgacgcgggctccacctcaacctcgtcctcgtcctccggttccaagaaccagggatcggtggaaacaaacacaacgccttctcaccagttatcgagcgagaacgagaaactgaagaaggataacgaaacgctgagttgcgagctggcacgtgcgaggaagcagtgcgatgagctcgtggcttttctcagggaccgtctgatggtgggtcccgatcagatcgatcgcatcatgcggcaaggaagttgcggatctgaaaacgcggtaggtgaaggcggtggtggaggacactgtttgaaactgtttggtgtttggttaaaaggggatacactaacagacaaaagaaacaaccacaagagaggccgcgaagaccaaatgggcttcggtgggcctcgcctcaaggagtcaaagcccgttgttgactttagtaggaataggatgatgatgattaatgaaaaaggaaaaggctaagcggtaatcatgtttgggtaaaaagaccaaatgcgctagcctatgcttcctaaacatgttgaggctgtgtaatttttaatgtacgtaggtaaatgcctctatgaatattgattgggaaattaaacaggttttaataatcaatttatggccttttatgtcaatgcatgtaatgcttaaatggcagcattctgtagactgtagtttggtttgatgatatagtggagctgcacgatccctgccaacgaggttctctgccttcattacatatggagaactaaggaatttataatagtgactatgattatatgcacaccacgttagctaaacattttcaaataatagtgggcatagtattttc

SEQ ID NO: 28012 - DNA, 1497 bp, Glycine max
  Clone ID: TF_GmC114_2
gaattccgtggggaattatggtaattaattttgagggtttgactactcatggattatgatggtatgagaaaaccttccaaaaacttatttcactctcgcttcttcctttttgggttctattgctgggattgggagttcttgaccgctctcctcctttttagttcttccccttaatcttctttcttcacaatttttatttccttccttattagacgtattagatcagattgaacaaaagggtttttctttctttctttcttggggaataatagaaataagaaaagattagtgaggttgaaatgtcgcaacgatcggtgccggcgccgttcttgacgaagacgtatcagttggtggaggatcaggggacggaccaggtgatatcgtggggtgaaagtgggaacacttttgtggtgtggaagcatgcggattttgcaaaggatttgcttccaaaatatttcaagcacaacaacttctccagctttgttcgacagctcaatacctatggattccgaaaaattgtgccagacaaatgggaattcgcgaacgagcatttcaagcgagggcagaaggagcttctctccgagatcaaacgccgcaagaccgtgcctcaatcgtcggcacatcccccggaggccggaaagtccggcggcgacggcaactctccgttgaactccggcagcgacgacgcgggctccacctcaacctcgtcctcgtcctccggttccaagaaccagggatcggtggaaacaaacacaacgccttctcaccagttatcgagcgagaacgagaaactgaagaaggataacgaaacgctgagttgcgagctggcacgtgcgaggaagcagtgcgatgagctcgtggctttcctcagggaccgtctgatggtgggtcccgatcagatcgatcgcatcatgcggcaaggaagttgcggatctgaaaacgtggtaggtgaaggcggtggaggagactgtttgaaactgtttggtgtttggttaaaaggggatacgctaacagacaaaagaaacaaccacaaaagaggccgcgaagaccaaatgggcttcggtgggcctcgcctcaaggagtcaaagcccgttgttgactttggagctgtaaatatcatgatgaagagcaacagggtttgcaactgaatgaggctctcacctcgccacgtaatcttttaagcaattaaagaaggaataggataatgattagtgaaaaaagaaaaggctaagcgataattattttgggtaaaagaccaaatgcactagcctatgctttctacacatgttgaggttgtgtaatttgtaatgtacgtaggtcaatgcctctatgaatattgattaggaaattaaacaggttttaatagtcaattatgactttttatgtcaatgcattttaatgattttttttttttctttcgaaaaacgcatgtaatggttaaatggctgcattctgtagtttggtctgatgatatagtggagcttcacgatccgtggt

SEQ ID NO: 28013 - DNA, 438 bp, Glycine max
  Clone ID: TF_11689459
aacatggtgttcactttcgagtctcagaagtcagtgccagcaccctttctgacaaagacataccagcttgtggatgaccctcacactgaccacattgtgtcatggggtgaagatgaaaccacatttgttgtgtggaagccccctgagtttgccagagatcttcttcccaactatttcaaacacaacaacttctcaagctttgttaggcaactcaacacctatgtaagcatccttatcttttcttatgtacttctctacaatccctattcttcatctttgcttcatttcacttcattgagtttgaaggtaaagctctttccatttgagcaaattgaccaaatacttatgttagaagttaaatatgatggaacttaagttctttagtataactagagatctaacattcctttttgttccattatcttgaactacataagg

SEQ ID NO: 28014 - DNA, 1226 bp, Glycine max
  Clone ID: TF_GmC1086_1
gggtttcttggagaaagttcttccttttgtggtggctatgatccgcagccaataatggttgttccccaaccaattgaggggcttcatgaaactggtcctccaccattcctcacaaaaacatacgacatagttgatgacccttccacgaaccatatagtttcctggagcacagggaacaacagcttcgttgtgtgggatccacaggccttttcggtaacccttctccccaaattcttcaagcacaacaatttctccagtttgtcaggcaactcaacacctatgggtttaaaaaggttgatccagataagtgggagtttgctaatgagatgtttcttagagggcaaaggattcttctgaagaacattagaaggaggaaagcaaatcatcatcaatcccatcagcacgcgatgcagcaaggtgtagaagagccttttgttgaggtggggcagtttgaattagatggagaaattgatcggttaaggcgagacaggcaagttcttatggtggagttggtgaagctcagacaacagcaacaaagtaccaaatctcacctccaagaaatggaaggaaggatcaaaatgactgaacagaaacagaaacaaatgatgaatttcttggccagggcaatgcagaatccaaatttcgtgcaacaattggctcagcaaaaggagtgctcgagggagcttgaggaagttttttccaacaagaagaggaggcctattgatcaagggcctaatgttgttgaagttgccgatgacgatgatgagttattaggttgtgctgaagagtgttcagatttcgttaaacttgaaccgcaggaatattacagtgatgacaaggtattagagtttgaggtacctgacttggaccttgctttgaatctcgatgaggagaatattgaaagccagaagagaataatggaggaagaacatgttcaactagaaaatagtagagagagatatattgatgaagtgttttggcaagatttgctcaatgagggtatagaagatcaaggtgtactaggtgttgaagatgtagatgtattggccaagcaactaggttatttggcctaaataggagattatcaaggctgtattttctattattcattgaactagctgggtgacagtatctccttataattccttagatgtatactttctgaccagtttttgtgtagccagactcaatttcttggcccaaatttaaagcacgtggttatcaag

SEQ ID NO: 28015 - DNA, 870 bp, Glycine max
  unsure (1)..(870): unsure at all n locations
  Clone ID: TF_GmC1242_3
ggctcgagccacggacgcccccctttttcctttcctatcctctcctctccgaaacttctagaaacaactacaacctaccgctcatttttccggttccgaccctctttctgccctctcagtaaccttatcagatcgatcaagggaaactttgaagcttagaaaagcggttaggtagctaggttgagttccagatctggtagagaagttcatcatggcgccgttaccggcggagcaaaccggtgaatcagcgccgacggagttgcagagatccattccgacgccgtttctgaccaagacgtaccagctcgtcgatgatccctccgcggatgacctaatttcctggaacgaagacggcaccagcttcattgtatggcgacccgcggaatttgcaagggatttgcttcctaagtacttcaaacacaacaacttttccagtttcgtccgtcaacttaacacctatgggttccggaaggttgtccctgaccgttgggaattcgccaacgactgtttccggcgaggcgagagagctcttcttcgcgacatacagcgccggaaattactgccggttccgcggcgtgcgcgacggggaacgcggcggaagcagaggttccgaagctgtttggggtttcgattggactgaaacgatgtaggacagagtgcgaggccgaaccagaaggagaagatcagaatcagatgcaaacgcgagcacaaacacaatcacaatcgtcgcaagaaccagatcacggttcagatgtgaaatctgaaccgcttgatggtgatgatttcgattatcaggatcatgaccctcattgttggagctatagggaaatgaaatatgcntcttctttctcttgatctctctactaattg

SEQ ID NO: 28016 - DNA, 1621 bp, Glycine max
  Clone ID: TF_GmC802_1
gccaccgccttctcatcctttataaactcataccttgccttcgtcttccctcgagccgctcgagcccatgaactcgtctccgtcttcttcccagttaccttcatcaagcgctgattttgacaagtttaatagtttgccgcgcttccgcccacttgaatgcttgcaagggaacccggttccggcgttcctgtccaagactttcgaactcgtcgacgatccctcgctggatccgatcatatcctggggctccaccggtgttagcttcgtggtgtgggatcctaccctgtttgcaagacacgtcttgccgaggaatttcaagcataacaatttctccagttttgttcgccagttaaatacctatggattccgcaagattgacactgaaaaatgggagtttttcaatgaagctttccagcgaggaaagagacatcttctgaagaacatccggaggcgcgggccacctcagtcccatcaggttggtggcaatattgtgccttattccgatgcagataaggccgggcttgaatttgagctagaaagtctaaggaaagaaaggagtgtgctaatgcaagaggtggttgagttgcaacaacagcagagaacgacacttcaacgtgcgagacaggtgaatcagaggcttcaatctgcagaactgatacagaaacaaatggtttctttcttggcaaggttatttgaaaagccagcatttttaaccagtctccagcatgcgaaggaacaaagagatttagggtgtcctaaagttagaaggagatttatcaagcagcaccaaggccaaacagaaatatcagattttttaaatgaagggcagattgtaagataccaacctgattggagaaatgtaaccacctcttctgaaatacaagaaatgtatccagtttcacttgaagagtctccaaattacctttctcaggctttggcaaaagaatttagtgaaggcacagagaatctgatatcagatgaagtcatgtcaattgctgacaccatggggtttaagtcatcaagctttggacttgatggtaaccttttcaaagggaaaaatgtcatgagctcaaacgaaggtcttcttgcagaggagtttgtgtctttcccagaggatttgaccaaggagacaggatttccagagttttcacctcttggaactgaaggcatcatcaagcgagaagataaacggaacaccaactttgatgttagtggtgctgattcaagctctgggaatgaacagtggggaaatcctatcaattatgaagtgccagaatttgtagtcacaagtggtatgacagacatgtgggatattaactatttaactcacagcaagtgacagaaagtatcccaactgatgattcaacacttgatgaaaaagaaagataatataaataagaatatggatgcatcgggcttcatctgcttctgcacatattgtgctgtgtttagttcccaggggtccaattattaaataaattgatttgtaactggtgctcattcactaatcaccaggtttcattcttttagattagttgtgtagttgttcatgctagtagttatgaaccaaattcttaatttaaatatgttaagatttaaagaatttgtgaaactttatatc

SEQ ID NO: 28017 - DNA, 860 bp, Glycine max
  Clone ID: TF_GmC790_2
ccttctatcaatctccttcaaaatggtaatttaccttattttattgtatttctagttttttattaaaaaaactagtaattaaatattcatttattatttacttgacctgcaagttctttttcctttttaaaactttatgaaattagatattccattttctctggaaaaaaaaaaccaattcattaatactgtcgaaaaacatggtcagaatttgagcttttggcaactatggacagagatatgaactttccatatttggaggagaagcaatcccttttgtgtttcgctgtttccattttcagcttttttcttgtgtttgagcatttgaatctggacaaaggtttcacctttgggtgagtgattcaacaccagctatagctgggggagtgaaggtaaggttgtgagcattaatttgcttgaaggagggtttgtgaattgaattggtaaaaagggtctctgttttatgggaattattaattggtgtttactgggattaatgaaacctagatagaaaggaaaagggggaagaacaagggagtctattttttatataaatatgtatattgttttgtagtggttaaatttgtgaaaaggtaaaaggtttttttctttctttctgggtatactaaagggcttttgagagttcactttgctgtgagatttgtgtttttgatgatggaggaagctcagggcaattctagttccctgccacctttcctcaccaagacttatgagatggtggatgatccttccactaattctattgtttcatggagtgccaccaataggagtttcattgtttggaacccaccagagttttcaagggatttggtaccccaaatactttaaagcacaacaac

SEQ ID NO: 28018 - DNA, 438 bp, Glycine max
  Clone ID: TF_GmC5805_1
gtttcgtggagcagaggaaacaacagcttcgttgtgtgggatcctcaggctttttccatcactcttctccccagatacttcaagcacaacaacttctccagctttgtcagacaactcaacacctatgggtttagaaaggtagatccggataagtgggagtttgctaatgaagggtttcttagaggacagaagcatctattgaagaacataaggagaaagaagacattaactaatcaacaacaagctcttccaatagaccattgtgttgaagtggggaggtttggatcattagatggtgaagttgatgcattgagacgtgacaagcaagttctcatggtggagctagtgaagctcagacaacaacagcagaacacaagatcctttctccattccctttgttgaaccaattgttgcaagaagttggggttcctagatcgc

SEQ ID NO: 28019 - DNA, 414 bp, Glycine max
  Clone ID: TF_GmC1855_4
ggatgctaaataggtaattcgagcaaggcgcaaccccaaagagggtgaccacaaccttgattcaatccattcccctttcttctccaacaaattagggtttcccttttcccaacattgccacgcattccctaattactctttctttcttttcttttccacttaaatttaatttcttgatatggaaggcggcgggtccactccggcggcgccgattccgaacgcgaacgcgccgccgccgtttctgagcaagacctacgacatggtggaggacccttccaccgacgcgatcgtgtcgtggagcgcaacgaacaacagcttcatcgtgtgggacccacccgagttcgccagagaccttttgcccaaatacttcaaacacaacaacttctccagcttcgttagacagttaaacactta

SEQ ID NO: 28020 - DNA, 255 bp, Glycine max
  Clone ID: TF_LIB3139-119-P1-N1-A12
agaaatgatttttgaggacgaaatgacatatcgtgcgggtgtttttttctatcttgaccaacacttatcattatgttgtaagatcattttacggaccaagtgatatcatggtgtgaatgttttaacatttttttttttgtttaagctagcttattatgcaaaggatttgttttcatattatttcaagcacaacaactttttcagttttattcgacagttaaatacctatggatttttaaaaattgttccatacaa

SEQ ID NO: 28021 - DNA, 2071 bp, Glycine max
  Clone ID: TF_GmC1065_1
ctcttcacccatcaaaaaaaacactcaatgaagggagttacagtgaaagttgaagaaacaatggcgtatgctaatgctgcttcaactagcccaacaacatcttcaaacctctccccgcaacccatggaagggttgcacgaggtgggtccccctccgtttctcaccaaaaccttcgacgtggtggaagacccatccaccaacgacatcgtttcgtggagcagatcccgcaacagtttcgtcgtttgggactctcacaagttctctaccaccatcctgcctcgctacttcaagcacaacaatttctccagcttcgtacgacaactcaacacctacggttttagaaaaattgatcctgacaagtggtagtttgcgaacgaagggtttttggcggggcagaggcaattgttgaagacgataaagaggaggaggcacgtgacagtgacacagacacagtcacacgagggaggaagtggggcttgtgttgaattgggggagtttgggttggaaggtgagatggagaggttgaggagagacaggacagtgttgatggctgaaattgtgaggttgagacaacaacagcacaactcgagggagcaattgggagaggttgaggagagacaggacagtgttgatggctgaaattgtgaggttgagacaacaacagcacaactcgagggagcaattgttgtccatggagactaggttgcaagccactgagaagaaacatcaacagatgatgaattttctggctaaagcactcaacaaccaggcttttattcagcagtttcttcaaaggaatgctcagaacaaagagttgcaaggtgcgagaagaaagaggagactaactgctaccccaagtgtggagaatttgcagcaagatcatttcgctttgtcaattgaagaaggatcggctactattgagtcacagatggagtcttttttctatttgggggagatgggtgattctgattgagaggacttgctgaaacaagacttggttgctggggtccctgaagagggagttgtgattggtgatttttcaaaagttgctgttcctgtggaggatttgattgcggatgctgatgagtggagtcctgaagaggaagttgtgattggtgatttttcacaagttgatgttcctgcgtagtggtaaggaaggattttcattatctagggggttcagataaaactttccctggatcacatgggttatcttgggtccaaaccgtagtggaaaggaaggattttcattatctagggggttcagataaaactttcccctttgaaccgtggtggtattatttcataaggcttcattgtttttttgttgatatttgtcgtttgataatttctgtgattgtaattgatgtagaatattggatggttctatatgcagcagcgaagatggtaatactagttgaagaagtggtcgacagatattgcctcattatccgtatcctttgtaaagaatatgatgttttgtgaatagctgagtattcgttgtgctagtgatgatgctatttttactcttctgttgcccagtttataactacattgtacatttttgcagggtaggttactcaaaagcagatgttcaatggggtgtgatcgactgggaaaagaagtagtattagtctaatcataatttgttggattctcaaattttcagtgttgagggaggttgtagtaagatcatttgattgattcttgtacggtggctgattccatagtggaacatcaattaacaattctttgcttaccagtcatctcacctgatttaatagaggaataagcattcgtctcccttttcaacttttattttgttcaattatttgtaatcattgagttctgttgctctttctgttaaaaggttatgttgggtacttttttttttttttttttactgaatgttgggtaatttctgagatattactccatctctatctatgaacatttcaattcttctaattaccaagtcagtccttaagttcatgtaaaaaaaaaaaaaaaaaaaaaaaaaaaaaaaaaaaaaaaaaaaaaaaaaaaaaaaaacaaaaaaaaaaaaaaaaaa

SEQ ID NO: 28022 - DNA, 567 bp, Glycine max
  unsure (1)..(567): unsure at all n locations
  Clone ID: TF_11413503
gaacacaactcccttcacttgttctccccttacacaatcattcaatcccccactttctccatgtcttctgataaacttaaatcaaaatctaaaaacaaattcgcagttgatgactctattccaacattcatccgtaaaacctatgaaatcctcgaagaaaacaaattccctgatataattgactggaactacgaaggtcttgctcttatcattaaaaaacctgctgaattttgccaaaaggtccttccactctacttcaaacacaataatctcacttcatttattcgtcaattaaacatgtacaatttccataaaagaagaactcaagacgttgaccacatctactgccatgagcttttccaacgcggcaaaaagcaccttctcaaagacatcagacgcaaaaacaacgagcacagtctcacaatccanaaaagcatggacatgcttgaaaacatcangaactccaatgacaacactggccttttacaagagaaccaacttctcaagatacttaataaagaagccgccgttaaagtctcgacctatgaaaagaaaatcaaggacctt

SEQ ID NO: 28023 - DNA, 2251 bp, Glycine max
  Clone ID: TF_GmC58_1
agtgactgattttgcaacccaatatcaaggcattactcccagcccacggtattgcccttcaaaacctacagcaccattaagcactactacaagtatacatgctgaggacaattggagtgtttcaaacttcaagtcaccaaagtcgaggtcttcaacactgaggatgaagctagctgaagatgatgacttcaatcaaaatggtttgacccatgatggaattggaaggaattctagatttaaggctatttgcgctattccaacccaacccaaaaaaatgcttagtaagttctggtctactaccaatagaactgctgctgccacttaaaagaattgagtgaaatatgtttggaacataagttgaaacaagttccatagagcttcatattctctggagggaagtggaagctagtagtccgtttcagcgtgtgtgatactttcctttcatcttcttcttctctctgcgataaaagcaaaacctaaaatttggtttaggcataggaatctgttgtagagttgatctacctggaatggagggagcatcgtggaatagtagtgtttgtgtggcaccgtttctgagcaagacctacgacatggttgatgatccttccaccgacttagtggtgtcgtggggcgaaaacaacaactcctttgttgtttggaacgttccccaattcgccacagacatcttgcccaatcattttaagcacaacaacttctccagcttcgtcagacagttgaatacttatggttttagaaaggttgacccagatcgatgggaatttgcaaatgaaggatttttaagaggtgaaaaacaacttttaaaaagtatcagtaggcggaaatctgctcatgtaaatggtagtcaacaagcatctcaagtgcataaatcagctgctggagcatgtgttgaagtggggaaatttgggcttgaggaagaggtggaaagactgaaaagggataagaatgttcttatgcaggaacttgttaggttgagacagaaacagcaagggactgataaccaattgcaaaatgttgggcaacgtgtgcagtcaatggagcagcgtcagcagcaaatgatgtcattcctggctaaggccatgcagagcccaggcttcttagctcaatttgttcagcagcagaatgaaagtagtaaacatatccctgggagcaataaaaagaggaggctccagcgacaagaagaagatagtttagccaccaaggatctccatagttctcttgatggacacattgtcaagtaccagagttccataaatgaggctgcaaaagcattatttcgccagatattgcaaataaacaattctacaacacaatcatcaattaagaaccctgatgttttccttattgatgatattccttctgccattgcatcagatagcagtagttcatccactcaggtttctaatgtgatggttccacctatatctgagctgacgtctatggaagtaggatcacagtttcctctcagttgtatgcccagtaacatatctgaggtgcagtcttcacctgctgttttgggtttctgtagaagtcaggggatggagacagaaagcagtttattgaatcatgagctgaatgttatgggggctgatactaggaacatgggggagatagatatgatgtcaactgttttagatgaggcagacgaagctgatcatttttcacctgacacagatggaatttctaaactcccagaaatcagtgatgaattctgggaactgtttttaaggccaagcccacttacagaagacacagaggaaactaaatgtagctctctaggatgtggtttgactgaagatcagggtttgccttcagaaatgggaaataagcaggaaaattttgatacaatacaacatgttgactgtcttactcaacagatgggacttcatgcattggagtactgattgtgtgtatatatgttactcacaactgaaggttgaggtcccctttgctactgagcagacaaagccatcttacttatacaacaaagaaacctgacagatccaacaacttgatcggtgcttttatccgcttgtaatgtcgtcgtgtgttctgtttgtcattgggggcttaaaaacatacaagttcacgaaacttcatatatctccatgtattttgaattttaataactatgcccccgtttccaatgcgatgatatttttgtggggatgttccgtataattggatcataactcttgaattgctgttgaataactactgtttactgaaaaaa

SEQ ID NO: 28024 - DNA, 354 bp, Glycine max
  Clone ID: TF_LIB3065-001-Q1-N1-A6
aaactcaattataaaaacaatgcaaaaaagaacaaaaccgaatattatagaaaaccaaaaaaatggaggacgatgcctacaaccaacgacatcaattaataaaggtctaccaacaacaactgtcctcgtgtgccaccctatcaagttcggtcgggtccttgtagggacctattttaagcacatcatctgctccatcttaattcggcatctcaatacctacagatttcgacagatacatacagagcgatgggaatatgctaatgatgagtttctgccagatcctaaacatgttattccgaatatacatagcaggaaacctatccacagtcataggcattctgcaagttcacttgt

SEQ ID NO: 28025 - DNA, 524 bp, Glycine max
  Clone ID: TF_jC-gmro02910071a08a1
ggctcgagctctctctctctcatccttatatttccaacggaaccttctagaaccaccataacatcattctccgttccctcgcgtttcaacaccgataacccgcaaaaatacccattgatctgcgcctcctcttccatggctccaccgccgccggtggaacacaacggcgactccgccgctaccgcctccgcctccgcctccgcggagtctcagagatcaattcccacgccctttctcaccaaaacctatcaactcgtcgacgaccaatccatcgacgacgttatttcctggaacgacgacgggtcaacgtttatcgtctggaaccctaccgttttcgccagagacttgcttcctaaatttttcaaacacaataatttctctagcttcgttcgccaactcaacacttacgtaattatttcaattcaactctttggtttggtttttttttttttttttgcttaggtttcgatgattttgaattttatttctaaaatttgtttataattttgcttgatttgcaggga

SEQ ID NO: 28026 - DNA, 1651 bp, Glycine max
  Clone ID: TF_700891365_FLI
gggtgaaaagggattgaaggattgttgttcttttctattggggttatatctgtgctttatgggaagccctatctgtcttcttgttgttttatttcgattcgatgtggcacattctacctttcatttctgtggcgtctcattgattggtattatgaatctcgaatttgcagggttttagaaaggttgacccagatcgatgggaatttgcaaatgaaggatttttaagaggtgaaaaacaacttttaaaaagtatcagtaggcggaaatctgctcatgtaaatggtagtcaacaagcatctcaagtgcataaatcagctgctggagcatgtgttgaagtggggaaatttgggcttgaggaagaggtggaaagactgaaaagggataagaatgttcttatgcaggaacttgttaggttgagacagaaacagcaagggactgataaccaattgcaaaatgttgggcaacgtgtgcagtcaatggagcagcgtcagcagcaaatgatgtcattcctggctaaggccatgcagagcccaggcttcttagctcaatttgttcagcagcagaatgaaagtagtaaacatatccctgggagcaataaaaagaggaggctccagcgacaagaagaagatagtttagccaccaaggatctccatagttctcttgatggacacattgtcaagtaccagagttccataaatgaggctgcaaaagcattatttcgccagatattgcaaataaacaattctacaacacaatcatcaattaagaaccctgatgttttccttattgatgatattccttctgccattgcatcagatagcagtagttcatccactcaggtttctaatgtgatggttccacctatatctgagctgacgtctatggaagtaggatcacagtttcctctcagttgtatgcccagtaacatatctgaggtgcagtcttcacctgctgttttgggtttctgtagaagtcaggggttggagacagaaagcagtttattgaatcatgagctgaatgttatgggggctgatactaggaacatgggggagatagatatgatgtcaactgttttagatgaggcagacgaagctgatcatttttcacctgacacagatggaatttctaaactcccagaaatcagtgatgaattctgggaactgtttttaaggccaagcccacttacagaagacacagaggaaactaaatgtagctctctaggatgtggtttgactgaagatcagggtttgccttcagaaatgggaaataagcaggaaaattttgatacaatacaacatgttgactgtcttactcaacagatgggacttcatgcattggagtactgattgtgtgtatatatgttactcacaactgaaggttgaggtcccctttgctactgagcagacaaagccatcttacttatacaacaaagaaacctgacagatccaacaacttgatcggtgcttttatccgcttgtaatgtcgtcgtgtgttctgtttgtcattgggggcttaaaaacatacaagttcacgaaacttcatatatctccatgtattttgaattttaataactatgcccccgtttccaatgcgatgatatttttgtggggatgttccgtataattggatcataactcttgaattgctgttg

SEQ ID NO: 28027 - DNA, 2391 bp, Glycine max
  Clone ID: TF_GmC58_2
ctgacatctatggaagtaggatcacagtttcctctcaattgtatgcccagtaacatatctgagttgcagtcttcgcctgctgttttgggtttctgtagaaatcaagggatggagacagaaagcagtttattgaatcatgatctgaatgttatgggggctgatactaggaacatgggggagatagatatgatgtcaactgttttagatgaggcagatgaagctaatcatttttcacctgacacagatggaatttctaaactcccagaaatcagtgatgaattctgggaacttcttttaaggccaaggtgtgatactttcctttcatcttcttcttctctctgcgataaaagcaaaacctaaaatttggtttaggcataggaatctgttgtagagttgatctacctggaatggagggagcatcgtggaatagtagtgtttgtgtggcaccgtttctgagcaagacctacgacatggttgatgatccttccaccgacttagtggtgtcgtggggcgaaaacaacaactcctttgttgtttggaacgttccccaattcgccacagacatcttgcccaatcattttaagcacaacaacttctccagcttcgtcagacagttgaatacttatgtgggcatcacatcactttttctcccatcattatcatcttatcttatttcttcttcttcttcttcttcttcttcttcttattattattattattattgctttttgcttatgctaaacccctctttttctattatggggtgaaaagggattgaaggattgttgttcttttctattggggttatatctgtgctttatgggaagccctatctgtcttcttgttgttttatttcgattcgatgtggcacattctacctttcatttctgtggcgtctcattgattggtattatgaatctcgaatttgcagggttttagaaaggttgacccagatcgatgggaatttgcaaatgaaggatttttaagaggtgaaaaacaacttttaaaaagtatcagtaggcggaaatctgctcatgtaaatggtagtcaacaagcatctcaagtgcataaatcagctgctggagcatgtgttgaagtggggaaatttgggcttgaggaagaggtggaaagactgaaaagggataagaatgttcttatgcaggaacttgttaggttgagacagaaacagcaagggactgataaccaattgcaaaatgttgggcaacgtgtgcagtcaatggagcagcgtcagcagcaaatgatgtcattcctggctaaggccatgcagagcccaggcttcttagctcaatttgttcagcagcagaatgaaagtagtaaacatatccctgggagcaataaaaagaggaggctccagcgacaagaagaagatagtttagccaccaaggatctccatagttctcttgatggacacattgtcaagtaccagagttccataaatgaggctgcaaaagcattatttcgccagatattgcaaataaacaattctacaacacaatcatcaattaagaaccctgatgttttccttattgatgatattccttctgccattgcatcagatagcagtagttcatccactcaggtttctaatgtgatggttccacctatatctgagctgacgtctatggaagtaggatcacagtttcctctcagttgtatgcccagtaacatatctgaggtgcagtcttcacctgctgttttgggtttctgtagaagtcaggggatggagacagaaagcagtttattgaatcatgagctgaatgttatgggggctgatactaggaacatgggggagatagatatgatgtcaactgttttagatgaggcagacgaagctgatcatttttcacctgacacagatggaatttctaaactcccagaaatcagtgatgaattctgggaactgtttttaaggccaagcccacttacagaagacacagaggaaactaaatgtagctctctaggatgtggtttgactgaagatcagggtttgccttcagaaatgggaaataagcaggaaaattttgatacaatacaacatgttgactgtcttactcaacagatgggacttcatgcattggagtactgattgtgtgtatatatgttactcacaactgaaggtaaactttttagcttgcagcctctcacttatgcataactttataagcatactggctcaattagttccctgaaatgaaaccagtgtaaaatctcctttcattatcatcatacccaattgctgccattaaagagtgagaacagtgagggagtaaatcaggagtgtttaaaacaattacattgaatgtctacaaaaatgtctgatgtattatgatcatacatacacattattaagatagaaatttactacgtaac

SEQ ID NO: 28028 - DNA, 532 bp, Glycine max
  unsure (1)..(532): unsure at all n locations
  Clone ID: TF_GmC1855_3
gcgttcgcccacgcgtccgctctattcctctgacttcccatagaccacaatacactcaccccaggcaaaaaatttcgtttcaaaattgtgatatggacggaagagcgagcagcagcgtgggcggagaagcatcgccagctccagcaccggtgccgataacgaatgcgaacgcgccgccgcctttcttgagcaagacatacgagatggtagaggacccttcgacggactcgatagtgtcgtggagtccaacgaacaacagtttcgtggtttggaaccctcccgagttcgccagagatctcttgcccaaacacttcaagcacaacaacttctccagcttcgttcgccaattaaacacctacggatttaggaaggtagatccagatcgctgggaatttgcaaatgagggatttttgaggggtcaaaagcacttgcttaagactataactcggcggaaacctgcccatggtcataatcaacaggcacagcaagcacatggacangagtcatctgttngggcttgtgttgaaagttg

SEQ ID NO: 28029 - DNA, 1202 bp, Glycine max
  Clone ID: TF_GmC92665_1
ctaggaagagagaaagaaggaaaatattgaagctcttgcaattctcatgaactgtggagtcgtgttgggtttctattgttggggttgggagttcttaactgcccttcttctcttctcttctcatcaaccttattgatcattctcttcatcctcctcttcttcttcaaaaaccaatttctttttatatatatacaaataaggaagacatcaaagaaaaaaatagcaaaatatttttttaaaaatatggaaggaacaagtgaaaaggggttgtgggaatgtggaaggaagtgcactccaccaccgtttttgttgaagacttatatgctcgtggacgatccggccacggacgacgtcgtttcatggaattccgaagggacggcgttcgtggtgtggcagccagcggagtttgctcgtgatctcctcccaacactcttcaaacacagcaacttctctagctttgtgcgccagctcaatacttatggatttcgtaaaattgcaacaagcagatgggagtttttcaatgaaaggttcaagaaaggtgaaagagaacttctacatgagattcggcgaagaaaagcttggaccagcaagcaacaaccaaatgcaccaaaccaagcaacactccaagactctgatgaagatcaaaggtcctcatcaatctcatcatcttctggttacactacccttgtggatgaaaacaagcgactcaagaaggagaatggggtgttgaactctgagctcacaagtatgaaaaggaagtgcaaggaacttcttgatttggttgccaaatattcatcacatgcaaaagaggagaaagaggatgaaaggccaatgctgtttggagtgagattagatgttcaaggagagagggagatgaagaggcatagagctgagatgagtgaaagcgcaagcattatgttgtctcagtcatgcaaatagctagacatgttattatacatagaagcttaagagtattcagtatagatactgaaaaagtaataatcaaatatttggaagtcataatttattgattaattaatggatagttaggcttgcaaagagtattttcgccctagtttgtagttactttggatatcatattggatgcatcaaggaactaattaagacacctcaagcatatatagcatatgctgtaattatatatgtagtgtgattcagaaccgatgaaacataatttatgt

SEQ ID NO: 28030 - DNA, 752 bp, Glycine max
  unsure (1)..(752): unsure at all n locations
  Clone ID: TF_GmC62779_1
gtaccgcccctgcaggntaccccggtncggctcgagtccccatttggaatcacccagaaacagaaaaagagctcttctttctcttcaatgcgatttctcatctttctctcctcgctttcctttttcaggtgcaaggcttcaataacgtaactgccatttttatttttaatttaattatcgttgctttacgtgcaagcttctacattttttcccgtccagggaaagaagaatccctagttatcatttttggggaaattcaacccatgattctgtgagatttgtttgagtgtaaacgttgcttgtttgggtatttggggtcacagaggagagaaagctgaaaactttttatgccttgtgattttgttgatttcatgggtttagtgttgttctcatcagacaaatggggtttttaaatgataggctattattaattttgctctaagtgtaatttttttttttgggttttgtctaggtcagatttggaaagaaaaaaaagtttctttttttgaggggtgttctatgtaaagtcccagtggggattgagggttgacttcttttgaaagtttggaaattgattggtgattgggttttgaattggggaggttgagatttgtgagtagggttgattgaggtttggtttgagcgatggatgatgcacagggtagttcaaattctctgccccctttcctggcaaagacttatgagatggtggatgatccttncacggattcggttgtttcgtggagtgtcac

SEQ ID NO: 28031 - DNA, 490 bp, Glycine max
  Clone ID: TF_jC-gmXLIB3563P024ab12a1
aatttctcacactcgcaagtctcacgctgctcacacaggaagcgtcatacaaatgcacacagaaagtaaaaagcgggagttaaggagcggtggtcacggagagggagaataaataaaatcatcaccataccatggggggagaagaagtagtaagagttacatcagagtggttcgacgacaacgaaagcgatctgaacgactacaacattttgagcgagatcaaggacttgggagtgacgacggctcacgcattgaaagaagagatggatgacggctgccgctaactggacattcgggtagtcgacttctctcaaaccgatgtaagggttgcacgaccgtgggccactctccgatcctgaagaagacgtctgaaatggtgtacgaccctcacaccaaccctattgtgtcgtggagccaaactcgccatattttcttaatttaggactcgcacgagttctgcaaagcccttatctcaaagtacttcaagcac

SEQ ID NO: 28032 - DNA, 1105 bp, Glycine max
  Clone ID: TF_GmC1873_1
cctcgagccgaatcggctcgagggcaacccctttgggtctagcactagcagccccttgtgttgtctatctgataatgctcctgcaggcatacagggagccaggcatgctcaaattggaatatctttatcagatctccaccttaacaattaagctgcagttggggttgcttcctgactaacgtccaccagcttaatttgcacactgggatttgtaatggcaacatcaccaaccatggtaagagtaaagaaagtctatcatgcttgctgaccatgggaaattctaacaagagcttggagatatctgatcatggtgaacgagacaaccaatatttctgcttgatcggaacaacagagaacgtcaccggggctacaaatcactaaatcttcaagtggtgtatggtctcaaaatttctacatgttaaacaaggaatgagagttgaatcaaataagacgggaagggatttcttagtgactcccagtcttcagtttcaccaggaaagttatcttctactgccgagttctcttggcaagtcggttctgataccagtcattgcaaggttttcatggagtctgaagatgtaggacggacacttgacttgtcctgcctttcttcttatcaagagttgtacatgagactcgctaacatgtttggaatagagaggtctgatatgttgagtcatgttctctactgcgactcatccggtgctcttaagcaaattggagaggaacccttcagtgagttcatgaagacagcaaaaagattgaccattctgacggattcaaacaacaaagatagtagaagtctgttttgcagggtttggatcacaggaactcgaaatgctgaacatggattggatgctgcatcaaataagacaggtcctctcagtatatttgcttaatatggtgtggcatggcatcggagacattgtttttagatatgaaaagttgaaggacatagttattactcagttgtaagagatgctaatatgaactgaaaattccatcaatattggcgtctttgttttcgatgtccatttgtagaaaataatgatttttcctgtatgatggacaattactattctaatattaattaattaattaacct

SEQ ID NO: 28033 - DNA, 411 bp, Glycine max
  Clone ID: TF_jC-gmle01810073g03d1
aaaataacaaattctagtacattcattcattacagacattacttataaattgtacattgctgtctaatcttcaatgttgaaaggaaccacaatgtcgaatataaacactcttcggtcttcacatgtcaggatggaaaaaaacctcctatcgattaatgcttcattaataattgccgggtcaagggagaagctagtcttgcttactaccaagggtaaaagcacgaggattagaactcttcaacaccctcagactcttcactgttgacacaaacatgtgccacggtacatctccaacaagcatcctgactccttcgttaacctcataaacaagagtatattgcccacttccaaccaagagaacccgaattggatgtcgtgttactgatcccttgcttagaattccaccagcac

SEQ ID NO: 28034 - DNA, 202 bp, Glycine max
  Clone ID: TF_6725509
ttctgcttttgcatttttccatatgtcttggcgcaagccccatcgcttttgatcccttcatttttcgcaaacgcgttggtgactcaacagacatctcccatggggcattacccacgaacattcagtcaccattcttatcttcatagcttggcgcatactcacagctgttgagaagaaccatcaacttgctcttattcatgaa

SEQ ID NO: 28035 - DNA, 232 bp, Glycine max
  Clone ID: TF_10709975
tggcgctctctttgtcatggtcatcatggatggtgcttcttatctcaggaaggttgatcttaaaagttatacatcatatcacgtactatctactgcctttgagaagatgttcctaacctgtcctaccctaagtcagagtggctcccatggagctccacgaggattactgttgagggatagaatgctgatggatcttttgcctggtccttagtgtgtactatcttatgaagac

SEQ ID NO: 28036 - DNA, 562 bp, Glycine max
  Clone ID: TF_LIB4200-008-Q1-N1-G8
ctaacagacagacaatccattagagagggaaaatcatacttgtttacatgctgatggcactctaggattaaaaaaaaagaagatattcacaaatataagtacctaaaatccaactgcactacctattgctttcatattatataataagtccacttaaactagcccactaatctgcagttgctgtgaaagttcattaaaatggagcaacctatgccatcagatatatttcccttcccagaccccaaaaaaaaaggaaaaaaaaaaaaaaaactaagttgtctaaggcatgtgagactgttgagtctcatccctattctgggaatctggactcaatagaacctcttcaacctctgatgaaaaagcaggtagcttgcagcatttcatcttcttcaagtcctcccgtgaacaaatgaaaatcctcttcaccatgttgcagaactccctgcatgttaggtggcacgagaaaataaataaataggagaaaatagtttcccctatgaccattaaaaaaaattacattctcccatgatcataaattaacatgtgtgataaatttattatt

SEQ ID NO: 28037 - DNA, 709 bp, Glycine max
  Clone ID: TF_GmC1873_2
ccgagttctcttggcaagttggttcggataccagtcattgcaaggttttcatagagtcagaggatgtgggacggacccttgacttgtcctgtcttggttcatatgaagagttgtacatgagactggctaacatgtttggaatagaaaggtctgagatgttgagtcatgttctctaccgtgacgcagctggtgctcttaagcaaactggagaggaacccttcagtgagttcatgaagacagcaaaaagattgacaattctgacggattcaaacaacaaagatagtagaaggtgggagaaagaaaattaatgaaattatgtataggatgtgcttccggggaagatactattgtatgtgcaagtgtaactgttccttcctctttgtgacttcaaagtctgttttgcagggtttggatcacaggaactcgaaatgctgaacatggattggatgctgcatcaaataagacaggtcctctcagtatatttgcttaatatggtgtggcatggcatcggagacattgtttttagatatgaaaagttgaaggacatagttattactcagttgtaagagatgctaatatgaactgaaaattccatcaatattggcgtctttgttttcgatgtccatttgtagaaaataatgatttttcctgtatgatggccaattactattttaatattaattaattaattaacctagatttggttccc

SEQ ID NO: 28038 - DNA, 238 bp, Glycine max
  Clone ID: TF_7285393
atataaagaactatattatgaccttgagaagatgaaccaaaactgatataccataagtgaaagtggttcccatggagctccaggaggagaaatgttgagtgaaagcaaggtgagggatgttgtgcatggatctgagtatgtgctcagttatgaagataaagatggggatgggatgccttgcggggatgtgagatgggaaatgtgcctagatatttgaaataagatgaagttagtaagg

SEQ ID NO: 28039 - DNA, 295 bp, Glycine max
  Clone ID: TF_LIB3242-736-P1-J1-A7
ttctcaattctttttaagaacttattttttttcggagggggggagggacaacagaatacttggcttttgatttataccacctattcaaactaatactttggggcagacacacgcaccattaacaccatggggggacatttccaaatgggagtcaaatagtttcacttccattagtgagtatcactaaacgccgaacacttcctataaaggattgccatggaacatgtcctacttgaaaacattccccttgttttttggaaaaggtgaacaaggaactttctacaacttcctcaaa

SEQ ID NO: 28040 - DNA, 1009 bp, Glycine max
  Clone ID: TF_GmC234576_1
caccgaaaaacttctccttggtaacacttaaacttggaaaatagtatactatatatccaatatcaatgtttttctgtcgttgatatcgataacatgtctgctaatggtatcaatacatttttgcttgattttcaatcaaaacattaattctaactattatgaatgaatcgatagggctttgatttggttgagaattagaaattaattaaggtgataggtaggtaggatgcacttgcctccatggtacatcttgggcgagaagccagtcaccttctttgtccagataagcaagttcatagttgtttgattgttgatgatgacctgttaatttgaactcgactaattaataaattaactggaattgaacaagggcatgcatggatgaactttgtcatatatagtttatacttacattttccaaacatgtccatcaaggtttccttgagcgtgtgaaatgattgatgcatactgagatcaaccttccgtgcaatccccacaccctccatcttcaccttcacgtacagagtattcgatgaatatccttggagactatgagtttgacgatgatcaacccataccatgtgatcaatattattattattcccgacaacctcttccacatgaagtttcttcctccaatggtttactggtggccaacccactacaccctcctcctcctcatccttggtgatgttagagcattggctatggtgatcatcaacaacatggtggcttggagttaaagggaggagagacagagtaggaagcataacatggtgtggtggtggtgcatgttccatcatcatgagttgggagaaggtacgttttttgtggctgaaaggctggtcgtaggcacgagaatgggttgagagagcgagacccagttgaagctccattcaacgcaagcaaatgatgcaatgtgttgttgttagtatggtctggaacaataagaagaagaaaagagagagagtgagggctggggatgagggttttaagttggcctggcggg

SEQ ID NO: 28041 - DNA, 193 bp, Glycine max
  Clone ID: TF_12689612
tttggaaaacatgttcaattgcacatgtggttgatattcggtaagggaagggattaatggattctaatatgctccgacttatgaaaaccaggatggggataatatgctggttggatatgttccgtggtacctgtttgtgtcaatcggcaatacgctcatgatgactattggtataaagcctaaggggtatggt

SEQ ID NO: 28042 - DNA, 822 bp, Glycine max
  Clone ID: TF_GmC31466_2
ccacgcgtccgggcaacaatcacaccacccttttgtgaacatttattcacaagttcctgctgaagtgaatgattgcagcaacgatcatagcagcttctttgtgaaggtgtacatggaagggattccaatcggaaggaagctcaatatactagctcatggaggctactatgagttagtcaggactcttgaacacatgtttgacactaccattctttgtaagtctattgttttatatcctctcattttgttgaatattaacaacacattttttaacatgagcttcctaactcgcaagattttgtaatttataagacagagagtgttgaatcagcaaaataacaatggaatgttgtggtgtgttaacagggggaacagaaatgaatggagtgcaaccagagagatgccatgtgctaacttatgaagatgaagaaggggatttggtcatggttggagatgtcccttgggagtaagttaattgactcttttttgtttttttttcttatctgagaaacaaaagcattatatgttccattttgtgaattgatgtggtatttgttttgatggtgtaggatgttcttatcgacggtgaagaggttgaagatcacaagggtagacacattcgggtgttaagtgaagaacatgacactgcctcttccttcaccggtgattttagattttgtcctctagagtgagactctaatgaggtcgctgatcagaaaatttagaaaaatcttagtgaagtatatgcacagataggtgatgtatatgcatagctcactctgctctttctttcaagataaaaaaccacccggccaacccaag

SEQ ID NO: 28043 - DNA, 973 bp, Glycine max
  Clone ID: TF_GmC6795_2
aattcggctcgagcaaaattattagatggatcttccaagtttgtgctcacttatgaagacaaggaaggagattggatgcttgttggggatgttccctgggggtaagtaattggtccacaaacatcaattttattttagcatcaaatatgcgatgttaaaactgatactgcagtacaaaaatgtgttgccaattaattgtcaaatagtacatgtaatgttttcatcaggcaataaagagattggtaaaaatatttggtgctatactctaaaagctacatgtcaaatattggtgctatactctatcctattaagagattgatagggtcatgtcttttttcttggacaaggaaaaagatttcatatttgtagtttcatttagcttgtctttttatgatttaacactggttatgaggatctctgttcctctgctttgatattcatctatcttgctctttcaaattgctatcaggatgttctttagctcagtgaggaggctaagaatcatgaggacatctgaggctaatggacttggtaagcaaatgctttatttttccaaacacaacttacccatgtttttcttttgctaatgcatacttgtttgcagcaccgagattggaagaaaacataaaaaagagatgcaagcccatatagattccgttttcatggctaaggacatgaaaaacctgtcaaatagatgaagaggaaaaaccgaaacagaaaagtataggaatactgcaaatgtatgaagttttgagatttgaatgataaaatctcacacttttgcttaattaattcagtttgtttgtttaatttggtatctttgttgcggcctctctattcatctcacttggagggtgcaggcatcatagattttcatgcaatacaactaatcatacaagtcagactgcttgttagtgttgtaaatgtggaatgtttgctaactatttcagctataaagttttgtttgaacttt

SEQ ID NO: 28044 - DNA, 500 bp, Glycine max
  unsure (1)..(500): unsure at all n locations
  Clone ID: TF_12487451
gaaaacgtaccttctcccaactcctcatgatggaccatgcagcaccaccagaaagcaccctcaccgaccatgttatgcttcctactctgtctctcctccctttaaccccaaaccaccaccatgatgatgatcaccacagtcaatgctctaacatcaccaaggatgatgaggaggaggagtctgtagtgggttggccaccagtaaactatcattggaggaagaaacttcgtgtggacgaaggtgttaggaataataataataataatcacatggtatcggttgctgatcatcgtcatcatagtgtttacgtgaaggtgaagatggagggtgtgggaattgcacgggaggttgatctcagcatgcaccaatcatttcacacgctcaagcaaacccttgatggacatgtttggaanatgtgatatttaacaatcaacaactatgaactgggctttctggacgaagaaagtgactggcttcttccacaagattacccatggaaa

SEQ ID NO: 28045 - DNA, 373 bp, Glycine max
  Clone ID: TF_LIB3242-504-P1-K1-C5
gaaaacaatacactgattgcaacatacattcaacttatccaaacaaacatgttcctataaagattacaagctccacacttactaatattcaaggtcgcttcataaggtattatagttgaaacaagtgtaacacaaacaaaagaccacgactctcttatgatacttgtaaccatagacaacatcttgaatagcagctaaccatcaaaacccggcattcaggcatttatatcataagttcctggtacattgtataatttgttagatctaccttcctcaaatagggagcgccatccatgctgacctttacaaagagtgccgctgcacccggttttccatctactggatcattattctttgaagcggggggccatga

SEQ ID NO: 28046 - DNA, 454 bp, Glycine max
  Clone ID: TF_jC-gmst02400037e07d2
ggggggaataaagtttgaattaaaattcaaggttttttagcacacaacaattttgacagcatggaagggtcacatttttaacaagcccgactttttaggttaagtttattggtttttggccattacaaatgccccattgatcgggtccttaaaattaaaagttgaattttttttccaacaaaacaaaaaacaccggacacattcaaggttacaacactccgctccatagtctcggtgaagggcttcatatttatatatatattttttgggccactttgggacgggatttcatcgaacattgttttaggcccgcttcaacttctgcttttgcatttttccattgcttttggggcaagcccaatcgcttttgatccctttattattcgcagacgcttgggtgactcaacaaacatttcccatggggaatcacccacgagcattccatcaccatcct

SEQ ID NO: 28047 - DNA, 139 bp, Glycine max
  Clone ID: TF_6964391
ggaatacaaggacggagattgtatgctggttggtgatgttccgagggagatgttcactgattcttgcttgaggctgaagataatgaagagtttggaaacaattgagcttgcacctagagccatggataagtgcaaaagt

SEQ ID NO: 28048 - DNA, 932 bp, Glycine max
  Clone ID: TF_GmC573_11
ttccttttcgtccgagagcacaagtagtgggatggccaccggttcgatcatataggaagaatactctacaacaaaagaaagaggaacagggtgaagggtctgggatgtacgtgaaagttagcatggcaggtgcaccttacttaaggaagatagatctaaatgtttacaagagctacccagaacttctcaaggccttgggaaatatgttcaagtgcacatttggtaagaacctagaacaagttttaaataatctcttattattttttttggctttcttaagattaatttggcatatatatgtgtatgttgaaaggaggaataaagttgtaattgcttgtgatccaggtgaatattcagaaagggaagggtacaatggatctgaatatgctccaacttatgaagacaaggatggggattggatgctggttggagatgttccatggaagtaagtttcttctcctaaatctgttctttgaattaactagtagtaattatttgttgttattatatatatattaaaaggttgtgtttttgctaagcttatgttaattattattgtagcatgtttgtgtcatcctgcaagagactgagaattatgaaagcatcagaagcaaaggggttgggttgtttttgaccaaaataaaaaaacaaagcaggaccatcatgcatgcccatatccaaaacatggagcaaagcaattttcagtgacgtcatccaagagaatttcttctgtttggaatatgcaagagctaggcacttggcctctgtgaaatggttatatttagcttattaaaaagagagatgcacatacacgattttattttccctttatttgtttatttcaaaagctaggtgactttttagacctgcttaattaagtatactattccaaattctcaatgcctaaaccagaattgaaaactgtaatgatg

SEQ ID NO: 28049 - DNA, 1607 bp, Glycine max
  Clone ID: TF_GmC1078_1
gcgcgagccgatgggcagagaaggttcttttctgcatcaacaaaaccaactcctggacttgctgtcaataggagcaggctgttttgtgcatcaacaaaaccagctcctggacttgcttgcatactctctctgttctttctattcaaagatctgtaaatttatatattatcttttatcatatatagtattagtatagtccacttgtttaaaccacctgtgttgcatattctgaatcctatcatcttgtggctttgatgtctagagcattggaacatgattacatagggttggcagagaatccgtcaatggatggtaaaaactcatcatcactgaacttgaaggagacagagctgaggcttggcctccctggttgcgagtctccagagagaaaatcaggttctgcactctgtctttttggcaaagagttgcagaacaacaataacaatgtttgttctttgaaggctggggccaagaggggcttctctgatgccattgacacctcttctgtcactgagggatctcaaggagcttctgctttgttctctccaagaggtggcaatgttgggaagcctcttattggtttagacactcaaactaacaccaccatcaaagaggttggtgcagttcctcaatcagccaaaccggttcaggaaaacaatgatcagtttgctgcaacaaatgcccatgcaattgctcctgctgctaaggcacaagttgtgggatggccaccaattcgatctttccgaaagaacacgatggcctctaatttgacaaagaacaatgatgaagctgagggaaaatcaggatttggttgtctctatgtgaaagtcagtatggatggtgccccttatcttagaaaggttgatctcaaaacctataacaactatatggaactttcctcagctcttgagaagatgttcagctgcttcaccattggtcaatgcaattctcctggacttcctgggaaagatggactaagtgagagctctttgagggatcttctccatggatctgaatatgttcttacatatgaagataaagatggagactggatgcttgtgggtgatgttccttgggagatgttcactgattcatgtcggagactaaggatcatgaagggctctgaggcaattgggctagctccaagggccatggaaaaatctaggagccaaaactaatgcagaaaaaaccccattagaccaaagcggggggtattcattgaagcatataaagatttccaagggtgtttgagtttatgattctgttcaaaatcaaaaacatatgctattcagtgtctcagtttttgtgcattaatatatatagtatgacaagttttatcagtagaattcaactggagacatccagacaatatatacacatattttgtttgtttctctattttgtgtatctttggattctagttgctgtataaaagaattgcttgttgtgcttttcccctctataactattctgaattttctccatgtatttgattttcaatatacatactgaacctttgtattttgttattaaatggtaataaccatatctcttggtcctataatgttagtccccagtaataaccatatctcttggtcctaaaaaaa

SEQ ID NO: 28050 - DNA, 1241 bp, Glycine max
  Clone ID: TF_GmC1078_2
ccacgcgtccgcggttctgttgggcatcaacaaaaccaactcctggacttgctgtcaatatcacaccataactgctattgaagctctgctctctgacttgcttgcatactctctctgttctttctgttcacaaagatttgtaaatttatatttatcataccatatatactatataatatattgtatgctccacttgtttgaagctgtgttgcatattctggatcctatcatcttgtggctttgatgtctagagcattggaacatgattacatagggttggcagagaatccgtcaatggacggaagctctgacaaactgtcttctgaggatggtaaaacctcatcactgaacttgaaggagacagagctgaggcttggcctccctggttgcgagtctccagagagaaaatcaggttctgcactctgtctttttggcaaagagttgcagaacaataacaatgtttgctcagttgtaagccctttgaaggctggggccaagaggggcttctctgatgtcactgagggatctcaaggagctgctttgttctctccaagaggggccaatgttgggaaacctattattggtttagacactcaaactaacacccaacaacaggctaacaccaccatcaaagaggttggtgcagttcttcctcaatctactaaaccggttcaggaaaagaatgatcaggttgctgcaacaaatggccatgcaagtgctcctgctgctaaggcacaagttgtgggatggccaccaattcgatctttccgaaagaacactatggcctctaatttgacaaagaacaatgatgacgatgagggaaaatcaggatttggttgtctctatgtaaaagtcagtatggatggtgccccttatcttagaaaggttgatctcaaaacatataacaactatatggaactttcctcagcccttgagaagatgttcagctgctttaccattggtcaatgcaattctcctggacttcctgggaaagatggactaagtgagagctctttgagggatcttctccatggatctgaatatgttcttacatatgaagacaaagatggagattggatgcttgtgggtgatgttccttgggagatgttcactgattcatgtcggagactaaggatcatgaaaggctctgaggcaattgggctagctccaagggccatggaaaaatctaggagccaaaactaatgcagaaaaaacctgtttgaccgaagctggttattact

SEQ ID NO: 28051 - DNA, 142 bp, Glycine max
  Clone ID: TF_21676827
tgagaacgaagagggcgattggatgcttgctgagaaaggtccatggaagatgatcaccgactcttgcgagaggttgaggatgatgaagagtgctgaatcactaggactatctccaaaagccatggaaaaatgcaaaagtcgc

SEQ ID NO: 28052 - DNA, 663 bp, Glycine max
  unsure (1)..(663): unsure at all n locations
  Clone ID: TF_uC-gmroLIB3259P227g10a1
gggaaaaaaattatttaatgaataaaaattaaaaataaaaagcctataacctgtcacaactaatatccaaccagattttaataaccttacccaaagcatttgctgacccattttcaaacccgtaaaatgaaataatgtctgttcaagatttaaagaaaaacatgaaagaaaagaatgggcgagtgatgtaaatcacaaatatagtgttagaaccgtatgttggctgtaacagatgttcaatttgtccaaaacaaacagattcctacaatgattacagactccacaaacactaaccttccaatgtagcttcatatgatattatagtggtaacaaattaacataataccacgagaaactcttaagggccataaaaacaaataacagcagaagggcgataaaccaccaatgcccgggaattcagtcatatcatcatcctttgcttttccctctccggatccaacaataaaactttgatcagacaacaagcagtccaggatagcctaactcctgcttttggacttttccatggccctgggagctaaaccaatggcatcagaacctttcataattttcagccttttgcaagtgtcaatgaacatttcccatggtacatnccctacaagcatccaatctccatctttatcttcataagtgagaacatac

SEQ ID NO: 28053 - DNA, 683 bp, Glycine max
  Clone ID: TF_GmC573_15
tgcgacacgcagagtaggtggagcagcagggtgatggaagtggaacgtatttgaaagtgagcatggctggtgcaccttacttgaggaagatagatctgaaggtttacaatagctacccagaactcctcattcggctgcaagttaattctgatatatatccaggtgaatattcagagagggaaggttacaatggatctgaatacgctcctacttatgaagacaaggatggtgactggatgctggttggagatgttccatggaacatgtttgtatcctcctgcaagaggctgaaaataatcaaaggatcagaagcaaaggggttgggttgtttgtgaccaacaaaacttgcaaaagcaaatcaaatcaaaatagtcacatgaggtcttcaaagacaaataccctttgtgttgtgcaagcaaatacatggtgtttatgagaactcatatatatatatatatatatatatatatatatatatatatatattaggaaaatagatggatattatctatgtatacattatttttgctttattaatttcagcagaggcggctttgaggtctgctttctaaattatatgtaatcctctaaaaaagaaagagaaagaaaatataagaaaagctaatgctatttcaattgtacagataaaaaatataataataataataatctcactttgtctt

SEQ ID NO: 28054 - DNA, 630 bp, Glycine max
  Clone ID: TF_uC-gmroLIB3258P131f02b1
ctgcaccaaccaaccaactgctttgggtgcttctgttctcaaggaaactgttccacactctccaaaaccattacatgagaataagccccagatttctgctccagctgcaaaggcgcaagttgtgggatggccaccaatccgttcattcaggaagaactcaatggcttctcagcctcagaagaatgatgctgctgctgatgcagaagccaagtctggatgcctttatgttaaagtcagcatggaaggcgccccatatttgaggaaagtggatctgaatagttttaccacttacaaggacctctctttggcacttgaaaagatgtttagttgttttacactcaaatatgttcttacctatgaagacaaggatggagattggatgctagttggtgatgttccgtgggagatgttcactgagtcttgcaagaggctgaggataatgaagagttctgaagcaattgggctagcacctagagccatggaaaagtgcaaaagtcgctactagctagtgcaatgctgtatgcttttgtcttctaatcctgaaagatggaagaccacatttaagcatataatacctgagtatttcttacgtataattctatatacgagattgggtgtcataaacctttt

SEQ ID NO: 28055 - DNA, 1490 bp, Glycine max
  Clone ID: TF_GmC166_1
cttcaatgtaattgggctaaagccatttctctcctacttaacatagcagcttcattcacttattcactaacttaacatatactatctttctactgtggagttgtgattataagctaccatatatgtagttgcgattcttcaataccatatattctctttttctttcttgatttgtgttgtgaaacagttaaaagtggtcttgatgtctgaggcattggaagaggttgttccttcaatgaaaggagggtgtgaagaagaagggttgaacctgaaggctactgagctgaggcttgggttgccagggtgtgagtcaccagagagggagggtgtgtttaagagtgtggtggtgtctggggccaagaggggtttctctgatgccattgatggaaactggaatggtggaggatctgaaaaagatgccgctgccttgttttctccaacttcaaggggtgctgttagtgttagtgttagtgctgccaagtctctcactctcactgcaacagactgcaccaaccaaccaactgctttgggtgcttctgttctcaaggaaactgttccacactctccaaaaccattacatgagaataagccccagatttctgctccagctgcaaaggcgcaagttgtgggatggccaccaatccgttcattcaggaagaactcaatggcttctcagcctcagaagaatgatgctgctgctgatgcagaagccaagtctggatgcctttatgttaaagtcagcatggaaggcgccccatacttgaggaaagtggatctgaatagttttaccacttacaaggacctctctttggcacttgaaaagatgtttagttgttttacactcagtcaatgtggctcatatggggtttctagtcgggaaaatttaagtgaaagtagattgatggatctccttcatggttcagaatatgttcttacctatgaagacaaggatggagattggatgctagttggtgatgttccgtgggagatgttcactgagtcttgcaagaggctgaggataatgaagagttctgaagcaattgggctagcacctagagccatggaaaagtgcaaaagtcgctactagctagtgcaatgctgtatgcttttgtcttctaatcctgaaagatggaagatcacatttaagcatataatacctgagtatttcttacgtataattctatatacgagattggggtgtcctaaactttttagtgggaaatatatattgatgacagcatattagttttgttgtagtagccgtctatatcattgatgtagacgtttaaggtttaaggttttaggttttaggttgttctcccacacttcaattactgccatcatggcttaccgtagtttgtaaattttgcatttctgtaagcgagcattttgtttgtcatggcaagccaagaaaagaaatatcatactttctttatgtgtccactcttacatgtaaagttaaatatttatttttaaattagagtcatttt

SEQ ID NO: 28056 - DNA, 822 bp, Glycine max
  unsure (1)..(822): unsure at all n locations
  Clone ID: TF_GmC166_3
gcagattccaagtctggatgcctttataggtaaagtcagcatggaaggcgccccatacttgaggaaagtggatctgaatagttttaccacttacaaggacctctctttggcacttgaaaagatgtttagttgttttacactcagtcaatgtggctcatatggggtttctagtcgggaaaatttaagtgaaagtagattgatggatctccttcatggttcagaatatgttcttacctatgaagacaaggatggagattggatgctagttggtgatgttccgtgggagatgttcactgagtcttgcaagaggctgaggataatgaagagttctgaagcaattgggctagcacctagagccatggaaaagtgcaaaagtcgctactagctagtgcaatgctgtatgcttttgtcttctaatcctgaaagatggaagaccacatttaagcatataatacctgagtatttcttacgtataattctatatacgagattggggtgtcataaactttttagtgggcaatatatattgatgacagcatattaggtttgttgtagtagccgtctatatcattgatgtagatgtttaaggttttaggttgttctcccacacttcagttacagtcatcaaggcttaccgtagtatgtaaattttgcatttctgtgagcgagcattttgtttgtcatggcaagctaagaaaagaaatatcatactttctttatgttcactcttacatgtaaagttaaatatttatctgtgagcgagcattttgtttgtcatggcaagctaagaaaagaaatatcatactttctttatgttcnnaa

SEQ ID NO: 28057 - DNA, 1524 bp, Glycine max
  Clone ID: TF_GmC2301_8
agtctatattgagaagcacccttgtggggaaacaaagctatctgagccaaagaccctctttgtttgtcaaagtctatatggaaggaatccccatcggaagaaaattgaatctgatggcacattatggctatgatggactagtgaaaactcttggccatatgtttaggacgaacattctctgtcctaactctcaaccacttaattctgggaattttcacgtgctaacttatgaggatcaagaaggggactggatgatggttggagatgtgccgtgggagtaagtgataaatatatgtctcaaaattgaactcttaaatcttattagctccatttttcagtgtatttttttaacccttttgtatttgatatatttaatacaggatgttcttgaacagtgtgaagaggctgaagatcacaagagctgacagatgctagttaatttaataataaactgatggaggtttcaagcctacactgtccaaggttgaaatgaacgtagcatggcaacaaggaaatctgagaaaattctgccaagagaaaggaattcatgtgagtgcatggtcccctttgggagctaatggtgcttcatggggttctcttgctgtgatagatagtccagtcctaaaagacattgcaattgcaataggcaagagtgtggcacagatcctgaaaccgttctatgaactaatcaagagtgaaacaacgatgatgagaactgcttctcagaaatggggctacattcggatcatggctggtacaatctttggaggcatccttggattctatgtcatgcaccgccttgaaactaactacaaggaataaaatccaagatagtaaactaactctcaaagagcttgaaactacgcacaacaactatatgaaaagacaagaggagttagataatgatatgaggaagtgcaaggaagagttcaaagagtttgagaggattgcttgatgaggagaaggtcttagaagaaatcacagagagttccaaagcaaaatatgatgttgcaatatcaacagcatgccatggacttgattatattgtggtggaaacaactaatgtagctcaagcatgtgttgagttacttcgtagagagaatcttggtgtcgctactttcatgatattggtatttttttattttttatattaatcaacttgtttttgtctctaaatggctgtttaatattttgaatggcatgaattaaatatgttcacttttacttctggacccttggatttgtataactgtgactgagttcatgctctacgatatatttgctaatttaaggacatgttggtataagagtgttttctgtttcaatttttgtttattttcacctatagtgacaaaaatgtgataacaatttcaccattttttgtttttaaagattttatatgaaaattgtgaaatcactcattaacttccaactaacagcttgagtttttggcatggttggccacttgagtttttgaaggggaaattataaatttcgcaaaaataataaaaaaaaaaagaaaaa

SEQ ID NO: 28058 - DNA, 1082 bp, Glycine max
  Clone ID: TF_GmC371_5
attgatggttctgcaaataataataacagtgcaccagctaccaaggctcatgttgtgggatgggctgctataagatcattccggaaaaattcattggcaactacttcaaagaacaatgaagtagttgatggaaaaaagggggttggtgcactgttcgtcaaggtcagtatggatggtgccccctatttaaggaaagtagacttgaagaattactctacatatccagaattatcttctgctctagaaaagatgttcagctgttttactataagtaagaaagaattagtttaatgtggaaaaattttacctttcaattatttatgcatggacagtctgtctggatccagttactgcttgttttggtatgatttcaggtaaatgtggatctcatggaattctgggcagggagatgctgaatgaaaccaagctgaaggaccttcttcatggatcagaatatgttcttacatatgaggacaaagatggcgattggatgcttgtgggtgatgttccctgggagatgtttattgaaacatgcaagaggctgaggatcatgaagagttctgatgccattggtctagctcccagggctgttgaaaaaagtaagagcaggacctaggcagtacctgtgttcctctctatccatctaactgtctgcgggactaaaagcttctgggctatcagggacgaacaaatcagaacatggttgtcttggaagcaagaaatgaaggcattttggactggatagaatctcatactatgctgccttaatcctttttttttattatgtctgttttatgttgtcgtggagtttatgttttagtaagcttcttttcaagatgatgttaaaacttaacaaaactccaagaacttgactatgggagtaccgatattttatgtatgcgagattgagaagagttaacgttgtggttgaaggatctgtgatgtgttaattttgcagcgtaccttcaacggggtgtcctatgtttgtgtgaaaaaaaaaacaagttgtatgtcagtatgtcccttgccataactgtatcaaagtcattaaccaaaaagagcatactgttgtcaggacacgg

SEQ ID NO: 28059 - DNA, 1661 bp, Glycine max
  Clone ID: TF_GmC183_2
tttcctccccacgcgtccgtacggctgcgagaagacgacagaaggggactccaaagcttatttgttgctttgtgcttaatggaaggcccttgagcttttctttctttctctgctctcttttcttttaggtttccactctcacacactctccctcttctctttctctgcaataatctctcttctcttcttcactctctcaactcctgccaaacccccatttccgcagttcttaaatttggagtctgatgtctccgccattgctggttaccgaagatgaagggcagtgccatgcctcgatggtagcatctgcatcttcaccatccctgaactgtttctccctaaatgaggccggatttaaagaatgcaattacctgggattgtcagattgctcttcggtggacagttctactgtcccgaatttgtctgatgagaaaaaggagaatctgaatttgaaggctactgagttgaggcttggccttccgggatcccagtcacctgaaagggagacagaacttttctcgttgagctcaacaaaacttgatgagaaaccactgttccctttgcttcctacaaaggatggaatctgctcattgtctcaaaaaactgtggtctcgggcaacaaaagaggttttgctgacacaatggaccctgagtttcctggcaatgcagggataaacatgatgctatcacctaaaccttctggagttcagcctaccacagtgaaagaaataccaagcaaggtgttacaagaacttccttcagcggcaaatggaactggtcataaccatacatcaggagcttctatcagtggcagtgcaccggctgctaaggcacaggttgttggttggcctcctataagatcatttaggaaaaactcattggccaccacaactaacaagaacaatgatgaagtggatgggaaaccaggtgttggcgcactctttgtgaaggtcagcatggatggtgctccgtatcttaggaaggtagatctaagaagttatacaacttatcaggaactatcatctgcccttgagaagatgttcctaagctgttttaccctaggtcagtgtggttcccatggagctccaggaagagaaatgttgagtgagagcaagttgagggatcttctgcatggttctgagtatgttctcacttatgaagataaagatggagattggatgcttgtaggggatgtaccatgggaaatgttcattgacacttgcaaaaggctgaaaattatgaaaggttctgatgccattggtttagctcccagggccatggaaaagtccaaaagcaggagttaggctatcctggactgcttgttgtctgatcaaagttttattgttggatccggagagggaaaagcaaaggatgatgatatgactgaattcccgggcattggtggtttatcgccctctgctgttatttgtttttatggcccttaagagtttctcgtggtattatgttaatttgttaccactataatatcatatgaagctacattggaaggttagtgtttgtggagtctgtaatcattgtaggaatctgtttgttttggacaaattgaacatctgttacagccaacatacggttctaacactatatttgtgatttacatcaaaaaaaaaaaaaaaagggcggccgctctagaggagtcaatg

SEQ ID NO: 28060 - DNA, 1858 bp, Glycine max
  Clone ID: TF_GmC1199_1
caagttttgttttgcctgcgaaaggttgaagaattacgtagaatgataaaaaccatgagcacgcccctatacctcaccccacttactattattattgtacaacacaaccaggtccctgaatgctttttagagagagaaagggtaataagaataaggtagaagaaaaagatattagaagagaaaaaaaaagagaagaagaaaaagaagaagaaaagaaagaatgaggaggatggggggtatggagaaacggagtgaaggctgggactgccctggaacacgtaggaggcactgacactgacagaagtgctcggtcatgaagagaggtttctctgagactgaaactgaaactgaggaggatgagtctgctaccactgtggatttgatgcttaatctttcttctaagtgaagcacaaatcaattaactgaatgcttagagagagaaagaggagaaggagtagtgataaggtgatcatagagcatattataagagagtgaaaactaatggaggttggcctcaagaaggagaacatggggtttgaggaaactgagttaaggcttggactgcctggaaacggaggcactgaagaagtgctcatcaggaagaggggtttctctgagactgaaactggtcatgaagatgagtctgccaccactgtggatttgatgcttaatctttcttctaaggaggccgcaaccactgctgctgctgctgcagatccaactgataagcacaagactttgcctaaggagaagacccttctgccagcagatcctgctaagcctccagccaagacgcaggtggtgggttggccacctgtgcggtccttccggaagaacatgttggctgtgcaaaagagcgttggagaagagagcgagaagaacagcagccctaatgcaagctttgtcaaagttagcatggatggagcaccttaccttcgcaaagtggacttgaagatgtacaagagttaccgagagctctctgattctttaggcaaaatgttcagctccttcaccattggcaattgtgaatcccaaggaatgaaggatttcatgaatgagagcaagctgaatgatcttttgaacagctctgattatgtcccaacctatgaggacaaggatggtgactggatgcttgtcggtgatgtcccatgggagatgtttgttgaatcatgcaagcgtttacgcatcatgaaaggaaaggaggctattggtcttggtcttgcaccaagagccatggcaaaatccaagaacaggagctagactagtcgcacaattcatgacctgccccatcctttgtaattgtggtgcccagttggcttagtaactaaagtaaggataatagctgcagcagacacggatggacattgcagggtgttgaattatagttaatttgtgtatcattatggtttgttataatatttcaaacaaaacaatgagatgcatgtctaattaagtactaattatgaacaggaacataatgactctcaatcatgttgttagacttggctttcttatatatcgatctttgcttgttttgtgtgagtgcttgcttaataataattttaagatgtgtttgtctgttgtagttgtagcgacatgttatcatgctttacatttaaaattgtcttgtaaaggttttccttatcattatgagattccttggtattaatcatttttcatataataacaaaattgtatttattacatttacgttagtttttgttgtgatcatcaagagccgaatatatagtactggaaatgttccctgaacatggtggatgggaaacaagaacatgtgcgtgttcatcaaaaaaaaaaaaaaaaaaaaaaaaaagaaaagagaagagaagaggaaagg

SEQ ID NO: 28061 - DNA, 1022 bp, Glycine max
  Clone ID: TF_GmC2301_5
ctgcgagaagacgacagaaggggagtctcgatcagtttcattcattggaagatatgggaacattagaacaaattgatgcccctcaaaccaggtcatcatcatcttcatcttcttccattgatagcaacaaccacccttctaggactaggactccaccaccctcttccccttcatcaagtgcctgcagaaacagaactgatttgagcactgacctcagacttggtcttagcatctctccttcttctcaatctgaattacccttcaattcaacaccaagggaggaaagttttgactggccaccaattaagtctatattgaggagcacccttgtggggaaacaaagccatctgagccaaagaccctccttgtttgtcaaagtctacatggaaggcatccccataggaagaaaattgaatctgatggcacattatagctatgatggactagtgaaaactcttggccatatgtttaggactaacattctctgtcctaactctcaacctcttaattctaggaattttcacgtgctaacttatgaggatcaagaaggggactggatgatggttggagatgtgccgtgggagatgttcttgaacagtgtgaagaggctgaagatcacaagagctgacagatgctagttaatttaataatgtatacaatctctctcacaacacaagctcctcctcaattttcattgttcataaatttttgctgtagatctagttattaattagtgggttggtgaaactcgttgaagtatttcaccaaaaagaatggatcccgtgattatcatatatctaatagctttatacaccgaaaaacaatatagatgtgtaacttcttacctaattctcaattcagtacatagctgcagtattcctagtctctctgtttgatgatggagtcatctaattttcctctttgttttggaactagctccattattttgtagtcatttggaacaatgcatgtcccttttgtcttcatacctttaatgcatgatgtttcttggtgtctctttt

SEQ ID NO: 28062 - DNA, 777 bp, Glycine max
  Clone ID: TF_uC-gmroLIB3259P204h02a1
catataaacatcttctatattatttcttgtccctaacgaatttccaactattttctcattcgtataatacacatataagaaaattacagagacacataataataataattataattaaactcttattcctaaaagagactcgatcttgctcgagtacatttgcttccttgtgacacagatgaacaaccaagccgattgttgtggccgaaccctaaaatcacttcagcttctgttcttgcacttttccacggctcttggtgcaaggccgatagcctcagaacctttcattatgcgaaggcgctggcatgattcaacgaacattctgtgaaattgtgaaaaagagtagtataagggaatgataaactaaagaaagaaaaagggaaacaagggaatgaagaggggaactgactcccagggcacgtcaccgacgagcatccagtctccgtccttgtcttgataagtgggtacataatcagagccgttcaaaaggtctatcaatttggtctcattcataaagtccttcatcccttgggacccacatttttcaatcgtgaaggaactgaacatcttagccagcgcatctgacagctcctggtagctcttgtacaactttatgtccacctttcgtagatacggtgcaccatccatgctcaccttcacgaaagctgcttcctcttcattcttgttcctttgaactatgttctttctaaatgacctaactggtggccaacccaccacttgtgcctttgcaggtggttttgcagggtcgttggctcg

SEQ ID NO: 28063 - DNA, 501 bp, Glycine max
  Clone ID: TF_uC-gmrominsoy311g10b1
cttttataagatcttttaggaaaaactcgatggccacgacatctaacaagaacaatgatgaagtggatgggaaaccaggtgttggcgcactctttgtgaaggtcagcatggatggtgctccgtatcttaggaaggtagatctaagaagttatacaacttatcaggaactatcatctgcccttgagaagatgttcctaagctgttttaccctaggtcagtgtggttcccatggagctccaggaagagaaatgttgagtgagagcaagttgagggatcttctgcacggttctgagtatgttctcacttatgaagataaagatggagatctggactgcttgtagggggatgtaccatgggaaatgttcattgacacttgcaaaaggctgaaaattatgaagggttctgatgccattggtttagtttgcttaagtagatcttcttggctcacagctcccagggccatggaaaagtccaaaagcagaagttaggctatcctggact

SEQ ID NO: 28064 - DNA, 1747 bp, Glycine max
  unsure (1)..(1747): unsure at all n locations
  Clone ID: TF_GmC435_4
ggactggtgatccgtgtgtttcttaaagttataactcataagactcataaccatgactaatttttagttgcataataagtgataggtacagggattcatgtgaggatacactgttatacacaagtgatagtggaaaatgagacttagaagattgtaaaactgtatatagtttaggaatagtggtgtccaaatttgataattatgcagtagggtaagatgcaatcatagctatgtcacagagtccttcctcagattttacagctgctttacttcctgttctaaacaacctaacggaatttttatgagaacccacgcgtccggcattgtgctctaattccgttcctgttttgtgttcttgggttggttggccaaggggaatctctctggtttttatcacacctctgtctcttttttttttaacctctctccttaaaaagaggaaagacatagatagagagagatagagagagaaagagagcaggagaacccactaagcgtgcaaataaaagacttaaagcaaagctaagattacaatcccatgctattatagctccctccacctttgctttgcttttcgggtgtgtttttattttttattttctcttcctttctctcttggtggggtttccattgagctgtgataatacttgtgtgttcctccttctgctacctcagtctatccaacgttttgcagtggccaaaaccttaaaacccttttatttttaaggtttcctctgtaggtccttcttgctgttcgctcagactctcgcacttgttgcaaggaagcccttgtttctcacaactacaagatgtggtatttatcggatttaagctgcggttagactttgggggattctagagtttgtttttgtttcttgcatacatatatttggtgagtgatatttcagcaaggaggaatcttcctttggagcgtggtgtgaacagaagatggatgaaaggtcaagaaacgaggcatctcctcagctgttagatttgatctcaaacgagagagagtggcagatgaacaagagaaacgaaggaaaatcctcagaagaaagaaagcttgaactgaggcttggtccacctggtgaagactggtctctgggcggtaaaatgaagaacacagaaagagaagaatctcttctctctcttggttgcttctctcctaacaatgggttccagagcaaggcttctccatggccaaactaccaccaccaccaccagggtaacaacaacaaagcctcttcttcatcatttcttcagtgccctaaggttgtggtagagttgcagaatggtggtgatggcaaagtattctctccctcttctgcaaatacagctgtgtcccagcccaacacctctcagaaaagaactgctcctgctccagtggtggggtggcccccaattcgttccttcaggaagaaccttgcaagcagcagcagtgcttctaagccacctcctgagtctcaggctgagcagcacaacaaggttgctggtaaaaaacctgttgacaactatgctaataataaaggtttgtttgtcaagatcaacatggatggtgttcctatagggagaaaagtggacctcaatgcctatgacagctatgaaaatctctcttccgccgtggacgagctattcagaggtcttcttgctgctcaaagagattcctctgctggtggagttcacaacaagcangaggaagagaaagcaattacggngttattggatggaagtggagagtatactcttg

SEQ ID NO: 28065 - DNA, 1130 bp, Glycine max
  Clone ID: TF_GmC1825_3
ccacgcgtccggccaaacaaaccaagcaacattataatagaaagaggacacaagagaaagaagggggagctatagccataaggagaaaaactttcaaagaagtgaaagcaaaaaagagttgttcttttcctttctgctgataagctgtgtgagtgagttcattgacaagcctgaaatgacaactatgctgacaaatgagcatggtctgagtttgaacctcaaggagactgagctttgcctcggtttgcctggcgggggctctgaagtggaaactccaagggccactgggaagagagggttctctgagaccgttgatctgaagcttaatcttcagaccaaggaagatctgaatgagaatctgaagaatgtctcaaaggagaagactctccttaaagatcctgctaagccgccggctaaggctcaagtggttggttggccaccagtgagatcatacaggaagaacatgatggcagtacagaaggttagcaatgaggaagtagctgagaagacaacaagcagcactattgctaattctggggcgtttgtccaggtttccatggatggagcaccttaccttcgcaaggtggacctcccaatgtacaaaagctacataagacttatctgatgccttggccaaaatgttcagctccttcaccatgggtacctatggggccctaggaatgatatattcatgaatgatagcaaattgatggatcttcctcccagctctgagtatgtgcccccccatcaaaatactgatggtgactggatgctcgtgggtgatgtcccatgggagatgtttgtggtggtcatgcaaccgcctggcgaaattatgaatggatcagaaacgattggtccttgcgtccaaaacattggaaaaatgcaaaagcagaaggggaagctggcccaatacaacgttctacgagagatcccgtacgccactggacctatggaacaaattatatcacccacttcagctacactatggagcggaatgttgttggttgaatgtgtctggtgtttggcgttttgttcgtataaagattgtgtagtgtaaaacaacggtgccttaacctatacggtctggcgtgtttaggatgtgatcgtccaggctgtccggatggtatttg

SEQ ID NO: 28066 - DNA, 1514 bp, Glycine max
  Clone ID: TF_GmC870_1
ccgcggccccccagggcgccgaacgcggcgcggtggtgacagccattgttttaacacgagatctctcttaatagtagctgaaaccggattcaggtctgcgtttccctatctacggacctcaagggcattgctgcccattcggcttgtaggtacacaacctcggccatgagggcgggttgcttttctcagaacgttactcttgtgaagaagtgcttaaatatgttctctttcgtaggtttggctttgagggacagctggaggatcggcaatggataggttggggactatgctaggagcaatattacttatgccaataacatttagagccaaataggaatgccactgaatccagattcactcttaaccaaaggcacattaaggttcgggaggtaattttctaaaaatttctcttcagatggcatgctttgaaattgagaaaataacagagatgctcagcaagaactttcgtcttcaatggtttcacagacatttggtgtccctgatatggccttcaattcaattgattccacaatagatgatagtaacttcttgaacagtggtccgtgggctccaccaccagcaccgccacctctgccaccagcacagtttcagcggatgaggacatataccaaggtatataaacgcggagctgtgggaaggtccatagacataacacgatattcaggttatgaggagcttaaaaaggatctagctcgtaggtttggcatagagggacagctggaggatcggcaaaggataggttggaaacttgtctatgtagatcatgagagtgatgttcttctagtgggagatgatccttgggaggagtttgtgaactgtgtccgctgtattaaaatactttctcctcaagaagtgcagcagatgagcttggacggagattttggcaatggtggccttcaaaatcaagcctgtagcagctctgacggtggcaatacttaaatgaagttcagtaatacgctaactattcttccgtattgttaacttagattatttctgggagatgcattattgtcctaattccgaaaggcaattattatgccactgcggacttctgtgtccaccatcaggacttgaaaggagaagttttgtctatgttccggacatgcaaatttgaagagccaaatgagggcggagaagtgagctgctgctctggtttaacattgagcggtaattttgaatgtataaagtcttaggcagctagattttgcggaagctttcatgatcttccatccttggaggcaccttattattttttagccaatatgactgtgaagtagagaaacttcaaatgttgtaaggtcaagtgcatactgttgcattgtttgcttgaagcgtaagtactaaaaatgttggagttatttgactgtacaggagatcaattactagtatttgacacatgaatctaatgttcatcatcgactccctcttattctaattcagtaattgaaaagaaaaaaaaaaaaaaaaaaaaaaaaaaaaaaaaaaaaaaaaaa

SEQ ID NO: 28067 - DNA, 1068 bp, Glycine max
  unsure (1)..(1068): unsure at all n locations
  Clone ID: TF_GmC1199_4
ggctcgagcttgtcccgcccctgcccctataccatagtacattagtacccccacacacccctctatccggctctattgttgccacacacaaatcaattaactgaattcttagacagagaaagaggagtagtactagtgataaggtgatcataatagagcataatataagagagtgaaaactcatggaggttggcctcaacaagaaggagaacatggggtttgaggaaactgagctaaggcttggactgcctggaaacgtaggaggcactggcactgaagaagtgctcatcaggaagagaggtttctctgagactgaaactgaaactgaggaggatgagtctgctaccactgtggatttgatgcttaatctttcttctaaggaagctgctgctgctgcagatccaactgataagcacaagactttgcctaaggagaagactcttctgcctgcagatcctgctaagcctccagccaaggcacaggtggtaggttggccacctgtgcggtccttccggaagaacatgttagctgtacaaaagagcgtcggagaagagaacgagaagaacagcagcagccctaatgcaagctttgtcaaagttagcatggatggagcaccttacctccgcaaagttgacttgaagatgtacaagagttaccctgagctctctgatgccttgggcaaaatgtttagctccttcaccattggaaattgtgaatcccaaggcttcaaggatttcatgaatgagagcaagttgatggatcttctgaacagctccgactatgtcccgacctatgaagacagggatggcgactggatgcttgtcggtgatgtgccatgggagtaatttttttttttctccacttgatgacccgatcgaaattattttggttgcaataatttgaccttgtaatagtttcaatgaaaangaatatggaacacaaaaggcagaaaaaagaagacaggagcttgatatgcacatcacaatgttacttcaaaactagtccttatccaagaaactttgcgtaaaatattatgcatgttctaaggaaatcatgggttatcatctt

SEQ ID NO: 28068 - DNA, 681 bp, Glycine max
  Clone ID: TF_GmC183_4
aggtcagcatggatggtgctccgtatcttaggaaggtagatctaagaagttatacaacatatcaggaactatcttctgcccttgagaagatgttcctaagctgttttaccctaggtcagtgtggttcccatggagctccaggaagagaaatgttgagtgagagcaagctgagggatcttctgcatggttctgagtatgttctcacttatgaagataaagatggagattggatgcttgtaggggatgtgccatgggaaatgttcattgagacttgcaaaaggctgaaaattatgaagggttctgatgccattggtttagctcccagggccatggaaaagtctaaaagcaggatttagggtatcctggatttcctcttttgtctaatcaagtgtttattgttggatcctccggaatgggaaaagcaaaggatgatgactgaaatcctggcattggtggtttaacgcccttccacttatttgttttcaagtccctcaagagtttgtcatggtcctgtgttaatttgttaccactgtaatatcatatgaaagctacaatgaaatattagtatttgtggagtctgtaatcattataggaatccgtttgttttggaagaattgaacatctgttacagccgccaccatacggttctaacactatatttgtgatttgcgtcccctgcct

SEQ ID NO: 28069 - DNA, 940 bp, Glycine max
  Clone ID: TF_GmC590_3
ggagaaaataaaccaatattattccacaaaacaaattaaagttcgtgagagtttaatcaatttgatacacgtacccttatggccaaagaaggtcttggacttgaaatcaccgagctaaggttgggtctacccgatgcggagcatgtaactgtggtcaataagaatgagaagaagagggccttctcgcaaattgatgatgaaaatagctcctccggcggcgaccggaaaatcaagaccaataagagtcaagtggtggggtggcctccggtgtgctcttaccggaagaagaacagcatgaacgaaggttcaaagatgtacgtgaaggttagcatggacggtgctcctttcttgcgcaaaattgatttgggtctccataaggggtactcagatttagccttggctttggacaagctctttggttcctatggaatggtggaggccttgaagaatgcggacaattctgaacacgttcccatttatgaggacaaagatggtgactggatgcttgttggagatgtcccttgggaaatgtttatggagtcatgcaagaggctgaggattatgaagaggtcagatgccaagggcttcggtttgcaaccaaaaggatctctgaagggattcatagaaagcgcggcaaagtgaaacattatgttaggcttctaattaatgtcgtgcacattttgacgatcatcaatccaagtttatgttgtcgttttattatatttgagaaatcatgcatttttagtttgatatatgaatcatacttttgtttatgtcaagtattaatgaatgacatataggaccctatataactaatagggaaaactcattgttttagattaattaatgctttgccatgcttgttaatttgcattcaattgcaatataagttattgtaccagtatattgttttattactgatgatttcaatttgttaatt

SEQ ID NO: 28070 - DNA, 753 bp, Glycine max
  Clone ID: TF_GmC183_3
agtagatggaaaccggggtgcagcagcactctttgtcaaggtcagcatggatggtgctccctatctgaggaaggtagatctaagaaattatacaatgtaccaggaactgtcttctgcccttgagaaaatgttcagctgtttcactctaggtcaatgtggttcccatggagctccaggaagagaaatgttgagtgagagcaagctgaaggacctcctgcatggttcagaatatgtactcacttatgaagataaagatggtgactggatgcttgtcggagatgtaccatgggatatgttcattgacacatgcaaaagactgaaaatcatgaagggttctgatgccattggcttagctcccagggccatggaaaaatccaggagcaggtgctagttggtattggaacatgaagagtgtggaaagagaacttatgatataaatgactgaatgccgggttttgatggttaactgctattcaagatgttgtctatggttacaagtatcataatagtgtcttggtcttttgtttgtgttacatttgtttctactataataccttatgaagctaccttgaatattagtaattgtggagcttgtaatctttataggaacatgtttgtttggataagttgaatgtatgttgcaatcagtgtattgttttcaatgttttgctattccttagcctttctttcttttgtcttgaaagggcattttctcatgcctaccaagatgattcaaatgattccttagagccc

SEQ ID NO: 28071 - DNA, 409 bp, Glycine max
  Clone ID: TF_jC-gmle01810061b03a1
ggtttctctgtttctctcttctcttgatctcatactttcactctcactcactattcttcatggatcataatatgtgctcacatatgaggacaaagatggcgataggatgcttgcgggtgatgttccctgggacatgttgattgaaacatgcaagaagctgaggatcatgctgagctctgaggccattggtctagctgcgacggctgtacgcaaaaaggcagagcatgaccttggcagctcctgtgttgctgtctatgcatctaactgtctgcgggactaaaagcttctgggctatcacggactacctaatcagaacgtggttgacttggaagctacaaatgacagcattcagggctgcatagaatctcatactatgctgccttaatgccttcatgcctgattatgactg

SEQ ID NO: 28072 - DNA, 502 bp, Glycine max
  Clone ID: TF_LIB4366-010-R1-N1-F12
aaaaaaaaggaggaaatttttttttttagctggccaggacaaacaaaaggcccgctcacagaaaggcaaaatttacatcctccgggaagccttggggacggaaacggaagtgtgggaaaacaccctaaaaccttaaacatctacctcaaggatatagacgggtcccacccccaccctaataggcgggcatcaatatatatggcccactaaaaagtttaggcccccccaatctcgtttatagaattatccggaaaaaacccccgggttttataggctaaaagggggcctcccctctttcgggattaaaaaacaaaagcctcccgcattgccctagctaggagcgacttttgcccttttccagggctttaggggccaccccaattgcttaaaaactttttattatcctcagccttttgcaaaactcagggaactttccccccgggacatcaccaactagcctccattctccctccttggcttcaagggaaaaaacattttctga

SEQ ID NO: 28073 - DNA, 513 bp, Glycine max
  Clone ID: TF_GmC435_6
ttcctcgcgtccgggacaagataccacttgactcagcaatgaaatgaacatgtgccatggcacatgtttgtatcaacagtgaagaggctacgagtgttgaagagttctgagctttctgcttttacccttggcagtaagcaggacaagataccacttgactcagcaatgaaacggacgcgtgggcggggcggtttgaggttttgatcacctgctgaaaacttgaagactcttcctaatttgacgttttggttctattgtctgatgaaaagaacatggaatgaagctagttgcgtacattacaactaagtaatgtgatgaatgtgtcttttttttttttttttttctaaatgaagatttgaaatgcctgtagacagatgcaaaggacctgaaaatttctgtcaactttttacttaagttgcttgattcgcactttccctctcaactctcggtgatatgaatctaaatttcattaaccaaaaaacttaccaccacactaacaaaaaaaaggggggg

SEQ ID NO: 28074 - DNA, 1575 bp, Glycine max
  Clone ID: TF_GmC1129_1
gttcattctcccaggatggaacatcccagttacttaacttgagtggatccaattccgttatgtcttctgcagccatgctacccaagcaaataaccactgaacctcctcagcttccatctgctgctcctcagtgtgtattgcctcaggtggaaaacttgggaacatcacaatcaaatgtgtctgaacttgctgctttgcctccatttgctggaagagaacattctgcataccatgctgctgctgatcctcagagcaatcttttatttgggattaacattgacccctcttctcttatgctgcaaaatggcatgtcaaacctgagaaatataggcaatgtgaacaattcattatcgttgccattttctgcttcaaattgtggtggtgcttcaggcactgatttccccttaagttcaaacatgacaacttcgagttgtgtggatgaatcaggtttcttgcagtcttctgaaaatgtagaccaagcaaatacaccaactggaacctttgttaaggttcacaagtcagggtcctttggcaggtcactggacatttccaagttcagcagctatgatgagctcattagtgagcttgctcgcatgtttggccttgaaggccaactagaggaccctaagactcagagatcaggctggcagcttgtatttgttgaccgggagaatgatgttcttcttcttggtgatgatccttggcaggagtttgtgaacaatgtgtggtacataaaaatactatctccactagaagtgcaacaaatgggcaaaggtcttagtccttctacttctgccccaggtaacaaactttctactcctgccaactcttgtgataattatgtgagtcaacaagagttgagaagttcgagaaatggcatggcatcaatgggatcttttcactactaggacactctcccatgtaaggaaatattagttgagaaattatggtggcagaattttatgttacaagttttcttatgtatggattggcccagcattcttgtacacattaatggttgacatgtagtgattttgcaaggtctaaatagatcaacagcaaatgactgtaaattataataggtggccttttttctgtaatggttagttgcttatagcagttattaattattactgtatctcttaactactgtgataattaagagagtgaacaagagttgagaagttcgagaaacggcatggcatcaatggggtcttttcactactaggacactctcccagtcccatgtaaggtatattagttgaaaaattatggtggcagaattttatgttacaagtttcttatgtatggattggcccagcattcttatacacattaatggttgagatgtagtgatttagcaaggtctaaatagatcaacagcaaatgactgtaaattataataggtgaccctgtttctgtaatggttagttgcttatagcagttattaattattatctcttaggtgggaagtatatgtaaattatattaggagggagactggaagtcgaggccataagtagaaattaaagttactagattaaatgaccatcagtcatatacgtcgttacatag

SEQ ID NO: 28075 - DNA, 2637 bp, Glycine max
  Clone ID: TF_GmC22_1
gtccaaccaagccttcgttacggctgcgagaagacaacagaagggggactcgaagtgtaagcactgagcagttgaggaaatgggaacccttgggagagcgatctacagcgttggtaactggattcgagaaactggacaggccattgatcgtctcggttcccgtcttcagggcggttactacttccaagagcagctctctaggcatcgaactctgatgaacatatttgataaggctcctgttgttgataaggatgtatttgttgcgccaagcgcctccgtcattggagacgttcaacttggaagaggatcatccatttggtatggagttgtcttgagaggtgatgttaacatcatcagagttggaaatggaactaacattcaggacaactctctggtgcatgttgcaaagtcaaatttaagtgggaaggtgttgcctacaattattggggataatgttactgtcggccacagtgctgttatccatggttgtactgttgaggacgaggcttttgttggtatgggtgcaatactacttgacggtgtagtagttgagaaaaatgccatggttgctgctggtgcccttgtgagacagaatacaagaattccttctggcgaggtatgggcaggcaatcctgcaaagttcctgagaaagctcactgacgaagagatagctttcatctcccagtcagctaccaattatactaaccttgcacaggtccatgcggccgaaaattcaaagtcctttgatgaaattgagtttgagaaggtgctacgaaagaagtttgcacgcaaagatgaggagtatgactctatgctgggtgttgtgcgtgagatcccaccagagcttattcttcctgataatgtcttacctgataaagcagaaaaagctcttaaaaaatctggtatttaaaagcagtgtttttctattccaatcttgaaatgacatcatgggactctattggacggctgcgataagttcacagaaagtcacaaaccgaaccacttattatctctctctctctgtttcgctttcaccgaaagaataacttgactttcccgaactccacctgagaacaaagatcacccttaattcgcaggcgcgtcttgtgttggacaacaaccacaagatgattaacttcgaagaaaccgagttggcgactcggcctaccctggacaacgactcagcactcaagggataagtgctgtccaagagaggcttcgttctgaaactgcttctcttgatttgaagcttagtctttcttcttgcattaacgactctgcctcggattcaccctcatctatgtctacagagaagcccaaagagaacaagactaccactgatgaacctcctcaagctaatgatccagcaaaacccacctgcaaaggcaccaagtggtgggttggccaccagttaggtcatttagaaagaacatagttcaaaggaacagcaatgaagaagaggcagagaaggagcacgaagaatgctttcgtagaaggtgagcatggatggtgcaccgtatctacaaaagggtggacataaaagttgtacaagaagctaccgatggagctgtcagatgcgctggtctaaagatgttcagttcctttacgatttgaaaagtgtgggtcccaagggatgaaggattttatgaatgaggacctaatggctctggactatgtacccacatatgaagacaaggacggagactggatgctcgtcggttgatgtgccctcgaggagatgttcgttgaatcatgcaagcgtcttcgcataatgaaaggctccgaggcaatcggtcttgcgccaagagccgtggaaaagtgcaagaacagaagctgaagaagtgatttcatctgcgtcacaaggaagcaaattgactcgagcaagatcgagtctaatataggaataagagtttaattatcatgtgcctttgttatcttttttgtaattttcttatatgtgtattatatgaatatgagaaaatagttggaaattcgttagggacacgaaataatatagaagatgtttatatgatcccgtttttgtttccaaagtaaaaaatgtgactttgtctattcagatgctagcttgattatcttatgtgagtattaatggtatagaagaattttttgcaattccatggatgagggattctttacattcccaataattcctaacattttctgcgatagaattgtagctccttacggtccaggaagcaattgttccataaattccgaactctgttgtctaatttgggaaaggcaagtgccatgtaggatatcgtatgctgatctttagtgtttgatgtatccaatgcaagtgatttcacattccccccccttactttttttatgttcaagttgttgttcgtcaacttggtgcataagttctcgttgacatctttattaatgaggacactgacgctaatgtttttgttttaccacctgcaaagtcagttcttcttctccttatgctttcccttgatttcaattccatgtgtttcttcccatagaaaatttggttctttttttttttttttttttgttggtatgaaaagttttagtttgagacaaaaatttgaggattctatattctgctatgctgctggcaactactcatcactcaagggaagtgct

SEQ ID NO: 28076 - DNA, 447 bp, Glycine max
  Clone ID: TF_uC-gmropic110e02b1
tttaccttttgtccgcccaacatcactgccggcgccaagagagctgctgctgattctcttgttgccaataaccgtcccaggatcaaatggtgaggattatggcattattatcggaggagaaagacattcaaaattgttggatggatcttccaagttcgtgctcacttatgaagacaaggaaggagattggatgcttgttggggatgttccctgggggatgttccttagctcggtgaggaggctaagaatcatgaggacatctgaggctaatggacttgcaccaagattggaagaaaacatcaaacagagatgcaagcccatatagatactgttttcatggctaaggacacgaagaacctgtcaaatagatgaagagaaaaaacagaacagaaaagttaaggaatattgcatgtatatgaagttttgagatttgaatgataaaatctc

SEQ ID NO: 28077 - DNA, 684 bp, Glycine max
  unsure (1)..(684): unsure at all n locations
  Clone ID: TF_GmC224473_1
gtcgacccacgcgtccgctactacccaaaatttgcagaactctgctaaaaggagctgcacaaaggttcacaagcaaggcagcttagttggaagagctattgatctttcaagactgagtggctacaatgatctgctgagtgaactagagagactgtttagcatggaaggccttctaaaagatcctgataagggatggaagatcctctacactgacagtgagaatgacataatggttgtgggggatgacccatggcatgagttttgcgatgtggtgtccaagatccatatatacacccaagaagaagtggaaaagatgacaattgagatgatcagtgatgatactcatagctgtttggaagaggcaccagtgattatggaggcttcaaagtcttcctcagtgggtcagccagattattctccaacagcagttagggtctaaaggttttcagggttgtctgaaatatttattatgtttggtcctgtctctgtacaagataaatctacatgtttttatgctgtttggttactaccctacccttttgagtttgtaggcccagcaaaaattgcatggtcagcactagaaaagactgacaattgagtgcattaaactaactaaataagggctagccttggcatcatataataaaccattattatgggttttgttacgtactctngaataat

SEQ ID NO: 28078 - DNA, 1091 bp, Glycine max
  unsure (1)..(1091): unsure at all n locations
  Clone ID: TF_GmC26770_1
atcccaataactttgagaaagctagctagagagctatatctaactttgaaaatttgcccaatatacatgttctactttgcctattgcaacatatcctatagttagcttcttagttcttacattacatacatggaagttgacttagttcttgctctccccactcaaaattccgttgaggaattcaagcttaacaagtcgaaacagatagtgagtttacagttatggagagccagttgcggttcagaaagcgaaaaacgtgtcaaacacaataagcgcagcttcgaagagtcctttggacattttttgaaaccttttcctttactagtttggagtggacagccaaatgaagaagaagaccgtagtgaaaaggtgcaaagaaacattcacacaccaaacaagaatggtgatgaagaaaaccatttggtggggtggccaccagttaaatcatggaggaggaaagagctccatcagcagcatcctgcgagaggccaaattaggaacgataggattcaagctaatgagaatcaaagtagaagaccaaactctttatatgtaaaggttaacatggaaggggtagccataggaaggaaaatcaatttgaggcttttcaattcttatcagacacttacaagcagcttgatcagcatgtttgctaaatgtattctaaattttctttgttatgctcggtaccaaaaatttgaggaagttggagaaagttacacactcaactttcaaaacgaacaaggggattggctgcaagtaggacatgttccatggcagtatgtgcatattttataattaactataaatagattacatactttcagtgacttgcttcagctttgattctttttaataattttgtattgtttcaatcacaagtaacctgatcgaactttcaaatttcaacatctgccaaataatcagcaaaatttacccatgatcgtgaaattgagagcaatggtttaatattaaaacttgtacttgttaagtaatctgcaaggcacttttatagctataattaagcagttggtggggnnnnntaaggatgtggctgtgcatgaagaaagcatgaactaatcaaagtctat

SEQ ID NO: 28079 - DNA, 930 bp, Glycine max
  Clone ID: TF_GmC570_3
gggatatgatgaactccggcatgatttggctcggatgtttggaattgaaggacagctagaagatcctcaaaggaccgagtggaaactagtatatgtggatcatgaaaatgacattcttcttgttggtgatgacccttgggaagaatttgtaagctgtgtccagagcataaagatattgtcatcttctgaggtacagcaaatgagcttggatggggatttaggtcatgttcctgtcccaaatcaagcttgtagtggaacagataatggcaatgcgtggaggggacagtatgatgataattctgcagcctcatttaatcgataaggatgccaagtattgacattttggagcagtcaacttgtatattttgagacatggagaactaacttaacccttaaaatttcttgttggtgcttttatatatatctctagtggaaagaagacatattcattgcagaacttgcaagagatgcagttgatggggtagtgtagaagagggttgatacatagctgcatcctgtttagtggcaagagagtttagatccctagatgtaccaagatccggctcctttactaaaatgatgcagattgcagattctatcttgggatctgctttttctattggctggtagtgtatgcttaggaattttttcctttctttttggcaaggtacagccatataggtcagctggtgtacaatatatgattgttcttatataaagaaaacgttttactttctcttgtaaatcttgttatggttaaagttgtatacggaagtttggtgtccaagtaatggctcagagcctcagacaatgaagaatgcatgccaattctagctcttgtatagtgcctacgatgttacgacgtttacacggtggccattttggaaaagtttagttcattatggatggaagaaaacaaagtttcttttt

SEQ ID NO: 28080 - DNA, 1060 bp, Glycine max
  Clone ID: TF_GmC624_1
gaaatagaggaacgaattttattttattttcaaaatatttgattgaaatttaaattgaaaagacgggagaataaaatctatcaagatgaggttttgagttgattaattcttgttgataattatcttctcatgttactatgttagcctctagtgttggagaagctgataactcttttctatgtaatttaggggatgttccttctatgggaacaagttgtgggatggccaccaatccgttctttcagaaagaactcaatggccactcagccacaaaagaatgatgataatgcagaagccaagtcggtatgcctttatgtgaaggtcagcatggatggtgctccatacttgaggaaagttgacctcaaaaactttggcacttacatggaactgtcttcagcactggaaaagatgtttagttgttttacaatcagtcaatgtggttcccatggagtttgtggtcgagataagttgactgaaaatagattgatggatctcctccatggttcagaatatgtgctcacctatgaagacaaggatggtgattggatgcttgttggtgatgttccatgggagatgttcaccgactcttgcaagaggttgaggataatgaagagttctgaagcaattggactagcaccaagagccatggaaaaatgcaaaagtcgcaactagcaagatggtgttgatacagaaagatgaattattattattacctttaaacacgtacatcatacaagagtccagaggcaagtgcagggcacaagctggggcttttcttgcttgaatatgtatgatataatcctacatatgggatccaagtatcctagactttttagtaggcaagatatgtttgttgtagacatttaaggtttcttaggcttgtttcccctcacttctcttcaatcactgtcactgtggacttcataagactgaagctacgtcgttactatgtaaattttgtaacttaagtctcatatatagattagtttgagatggttaattagagaatattaaaaaaaaaaaaaaaataaattaaaaaacaataaaaaaagaaaagagg

SEQ ID NO: 28081 - DNA, 1032 bp, Glycine max
  Clone ID: TF_GmC573_13
cggctcgagctcacattattattcatatctctctctctctcccccaagaaattcaacagagttttgattaacttgaaattgttcaacaagaaatggagaattcattgggaaagtacggaaaagagcttaatctcgaggctacagagttgaggttggggttgcctggaagcgatgagcctgagaaacgttctgctgttagaagcaacaagagatcttcaccagaagcaagtgaagaagagtgcataagcaagggcaacatgaattcttctgatggttctgatatcacaagtgatgaccaagacaacgttgtgccacctgcaaaggcacaagtagtgggatggccaccggttcgatcatataggaagaatagtctacaacaaaagaaagaagaacaggctgaaggggctgggatgtacgtgaaagttagcatggaaggtgcaccttacttgaggaagatagatctaaaggtttacaagagctacccagaactcctcaaggccttggaaaacatgttcaagtgcacatttggtcaatattcggaaagggaagggtataatggatctgaatatgctccaacttatgaagacaaggatggggattggatgctggttggagatgttccatggaacatgtttgtgtcatcctgcaagaggctgagaattatgaaaggatcagaagcaaaggggttgggttgtttttgaccctaaataaaaaaacaaagcaggaccatcatgcatgcccatatccaaaacatggagcaaagcaattttcagtgacgtcatccaaaagaattttttctgtttggaatatgcaagagctaggcacttggcctctgtgaaatggttatatttagcttattaaaaagagagatgcacatacccgattttattttccccttatttgtttatttcaaaaggtaggtgcctttttagacctgcttccttccgtaaaatattccaaattttcaatgccgaaaaaaaaaaaaaaaaaaaaaaaaaaaaagcggccgctctcccggccccaagcttacgt

SEQ ID NO: 28082 - DNA, 498 bp, Glycine max
  Clone ID: TF_LIB4167-012-R1-N1-A10
cttctttttttttttttttttttttttttttttttttttttttttttttttttttaaaaaaccccctatttttaaaaaattggaaaagttttaaatttccaaaaaaggggaaaaaaaacattattaaacccttcattttttttcttccattcccttcccttttttcccttggatttggctagctctaaagaccccttcccttaccaatatccaaacatcctttaaaaaaaaccaaccatccctttgtttcaggaccagaatcccctaatatggactctcactctataggactaatttggaagccccaggaaaggcaaacctttttcatatgtatgcttttatcccccgaaggcccccacccttgggatcttcaacctttttacaggggaaaaaaacactccccaagggacatccccacccaaaacaaaatccccttctcctatcttaaaagtaaaaacatgacatcttttgggtggccccccctccttttaagccccc

SEQ ID NO: 28083 - DNA, 1155 bp, Glycine max
  Clone ID: TF_GmC960_2
tatcgtcatcatctcacaagggatacaatacaataccaagaagctacctagctacaagagactccactcatcaccacctcaagcaactaattaactagcatagggtgttttggattatagattgtacttggaagaagatggaaaacactactgtgacatatcaaactgatctcaacctcaaggcaacagagcttagactggggcttccaggaacagaagaaagtgaggagaaaacattgtcagcaggtgctagaattaacaacaaaagacctttaactgaaacctctgatgagtgtgcttcaaatggtacttctagtgctccacatgagaaaactgaaacagcccctcctgccaagactaagatagtggggtggccaccaatcagatcctataggaagaacatccttcaagagagtgaaggtgctggaatttatgtgaaagtgagcatggatggagccccttacctcagaaagattgacttgaaagtctatggaagctacacacaactgctcaaatctctagaaaatatgttcaagttgaccataagtgagtactctgaaagagagggttacaagggttctgaatatgcacctacatatgaagacaaagatggtgactggatgctagttggagatgttccatgggacatgtttatgacttcctgcaaaaggctaagagtcatgaaaggctcagaagctagagggttgggttgtggtgtgtgacaaacagttaatttactatggctatgatgaggagattaaatcattctttcatcaattcagttcttggaactaagggattttgaatcaatgcttagctatctgtctatctatcaccatgccaatctgggaggactctaaagtagggatatggaaggctctttctacaagttttgtcaatatttctggttattaattttagcatatgtgattgggggtgctatatgctattatttccattgaaccctttcaagaggaacctcagagaaatttgtcttaaacgaagtttgtggacaagagagataaaagggattgatttgttcatccaaggttttttttttttctttttctttttatctcacacaaaaatatagtgtaatacatcaaatattcatgtaatactttgcaattcaatggacacaaaataaactaaaaa

SEQ ID NO: 28084 - DNA, 488 bp, Glycine max
  unsure (1)..(488): unsure at all n locations
  Clone ID: TF_LIB3242-425-P1-N1-E9
gtagacttgaagaattactctacatatccagaattatcttctgctctagaaaagatgttcagctgttttactataagtaaatgtggatctcatggaattctgggcagggagatgctgaatgaaaccaagctgaaggaccttcttcatggatcagaatatgttcttacatatgaggacaaagatggcgattggatgcttgtgggtgatgttccctgggagatgtttattgaaacatgcaagaggctgaggatcatgaagagttctgatgccattggtctagctcccagggctgttgaaaaaagtaagagcaggacctaggcagtacctgtgttcctctctatccatctaactgtctgcgggactaaaagcttctgggctatcagggacgaacaaatcagaacatggttgtcttggaagcaagaaatgaaggcattttggactggatagaatctcatactatgctgccttaatccttttttntttattat

SEQ ID NO: 28085 - DNA, 522 bp, Glycine max
  Clone ID: TF_GmC1078_3
ggctcgaggtgagagctctttgagggatcttctccatggatctgaatatgttcttacatatgaagacaaagatggagattggatgcttgatgttcactgattcatgtcggagactaaggatcatgaaaggctctgaggcaattgggctagctccaagggccatggaaaaatctaggagccaaaactaatgcagaaaaaacctgtttgaccgaagctggttattactgaagcatataaagatttacaagggcgtttgagtttatgattctgttcaaaatcaaaaacatgtcattcagtgtctcagtttttgtgcattaatagtctgacaagttttattagtagaattcaactggagacatccagacaatatatacacatattttgtttgtttctctattttgtgtatctttggattctagttgctgtataaaagaattgcttgttgtgcttttcccctctataactattctgaattttctccatgtatttgttttcaatatacatactgaacctttgtattta

SEQ ID NO: 28086 - DNA, 684 bp, Glycine max
  Clone ID: TF_GmC274615_1
gataggggaatcttggatgggatgccactatttttactccagaaaatcgtttattacattacatagtgccaggcaatatatgatggattgtggtatcaacagatgtgcaaaatagtatttgatcatatagcatagaaacagggttaacaacacaatacttaagacaactctgaaactacattctaaccactgttggagaagaatctggctgacccacagaggaagactttgaagcctccaccatcactggtgcctgttccaaacaactctggctatcatcattgatcatcatcccaattgtcatcttctccacctcatcttgtgtatgtatatgaatcttggataccacatcacagaactcactgcagacaaaaggcaaaatgcaatttttttcagtgtatttcacctaaaatgttatgttacataggatggaacaggtgtgaggttctattggtcccatcaattaattttgtagaataaggagatgatggccaacgataactaaaacatgaaaaagctaaggaagatgactacttactgccacggatcatcccccacaaccataatgtcgttttcactgtcagtgtagaggattctccatcccttattaggatctattagaaggccttccatgctaaatagtctctctagttcaatcagcaggtcattgtagctgctcaatct

SEQ ID NO: 28087 - DNA, 195 bp, Glycine max
  Clone ID: TF_uC-gmflminsoy007a12b1
ccatgggagaagatggttgagtcatgcaagcgtttgtaaataatgaacggaacagaagcgatgggcatggcgccaagagcaaaggaaatatgcaaaagcagaaagctgaagcggtcccaaatacaatgtacaatgaaataccgaaccaaagaggacgctataaaaatatatatatacatatatatgaagcacttt

SEQ ID NO: 28088 - DNA, 2924 bp, Glycine max
  unsure (1)..(2924): unsure at all n locations
  Clone ID: TF_GmC371_3
ctcaataatcacttttatcatttcaaacaaagaaagttgttagtgcttaacattcctttgaatattaaactaagttcaatttttatttcttaccattagcgtgacatgaaaaaataaatttattaattccaatatatattggtggtataaagcacttccatatatgattggtcacaatttttttttacttagattccatcttcattgaaaaaagttaaaacacatgaaaaattaattatttcagttaaattaattcctttcactttttaaatatattctttatttgggtaaaataattcctttttgttatgtgtgagtttgaaattcttttaatttaatatatttgtaaataaattattttgacctaatatattgtaaatcaattcaaaaatagaatttactgtctaaagactcattattcaaccaaacgagagagttgtgttattctatagtgacggagcaacagaaaggttaagaatgtagcataaccaaaacaatgaaacaggtgatgtagaagatcatgctgtgaacggaggtagcaatggcgatgatgctttgactataaataagttgctatccgatctagcaaggcaggaagactactttgataaaagcttacaatggcgggagagtcagggcaagaagcgcaggagacaagatgacaattggtggaatatgcggaaggacctgttattggagtagatggaatggggggagttggaaaaacatccctggcaactcatttcaagaatgagattaaaagaaaggggactttcaaggatgtcttctgggtcactgtttcccatgatttcaccattttcaaattgcaacatcacattgcagaaacaatgcaggttaagctttacggagatgagatgaccagagcaacacttttgacgtcagagttggagaaaagagaaaaaacactgcctatctcggatgatggttgggaatatattgatctgcanaaagtggtcggattcccgggtcgacccacgcgtccgcggacgcgtgggctttgtgacaaatggagggtccttagttctgtttctctttcttctctctgtgctttcaaccaagttctcaaatcactcttcttcttcacccttctgatctgctaattctcaagcgctttctttctcgttggagggtttttacttgatagtgaattcattcaacctcctgttcggccccatggaaggtccttagttttctctctcttcatctcaaagtttcactctcactcttcttcttcttcttcttcatcctttctgatctgtgctgttttttcagggtacaacaaaattgggtgctttcggttaaactgtgatgtctccgccagtgctgagcataggggaggaggagggtaaaagcaatgtcactttgttggtttcctcatcaaccaccatggaaagtgtgtgtctcaagagcttagaatttaaagagcgcaactacatgggattatctgattgttcttctgtggacagctcggttccgtccttctctgaagagactaaaagtaatctgaacctgaaagccactgaactcaggctcgggcttccaggatcacagtctcctgatagagattctgatctttgcttaagaagctcaactcaatttgatgaaaaaactttgtttccgttgcgtcctttgactgatgatcaccattcttcagccaagactgctgttttgggaaacaaaagagggttctctgatgccatgaacggcttctcctcagaggggaaattcctagttgattcggaggccgccaatccgatactgtctcccaggcctgcttctaacttgggattaaaacctggttctacacttgagaaggttggagttcagcaaaccaaaatgaaagaagtagcaacaacaaaggccaatgaagctagacccactattgatggttctgcaaataataataacagtgcaccagctaccaaggctcaggttgtgggatggcctcctataagatcattccggaaaaattcattggctaccacttcaaagaacaatgaagaagttgatggaaaagtgggggttggtgcactgtttgtcaaggtcagtatggatggtgctccctatttaaggaaagtagacttgaagaattactctacatatccagaattatcttctgctctagaaaagatgttcagctgttttactatgagtaaatgtggatctcatggaattctgggcagggagatgctgaatgaaaccaagctgaaggaccttcttcatggatcagaatatgttcttacatatgaggacagagagggcgattggatgcttgtgggtgatgttccctgggagatgtttattgaaacatgcaagaggctgaggatcatgaagagttctgatgccattggtctagctcccagggctgttgaaaaatgtaagagcagaacctaggcagtaccagtgttcctcttcgaacatggtgtattggaagcgagaactgaaggcatatgggactggatagaatctcatactaagctgccataatccttctattgtttattatgtgtccgttttatgttgtcatggcgtttatgatttagtaagcttcttttcaagattgttgtgataaaacttaacaaaactctaagacttgactgtgggagtagctatattttatgtacccgagttaatgttatggttgaaggatctttgatgtgttaaaaatgcagcgtctcaacggggtgtcctatgtttggaaagaaagaaaaatgtatgtcagtatgtccctttgccaaaagcactgcttattttggatgatgtttgggaatatattgatctgcaaaaggtggggattcctcttaaagtgaatggcattaaattgattatcacaactcgtttgaaacatgtgtgtctacagatggattgccccccctataatataataacaatattcccctttg

SEQ ID NO: 28089 - DNA, 1233 bp, Glycine max
  unsure (1)..(1233): unsure at all n locations
  Clone ID: TF_GmC22_2
actcccncgttccggaatttccttttcgaccgcacgcgtacgcccacgcgtccgcccacgcgtccgtccattttctcattctctgtttcgctttcaccgagtaacttcactttccccaactccacctgagaaaaagatacccataattcgcacgcacgcacgcacgcacttgttctgactcagtgcttgtgttggacgcagaagaaccagaaaagaaaaacaagcacgaggagatgattaacttcgaagaaaccgagttgcgactcggcctccctggcgggtctgcgagtgatcacaacgagtcaacaacggtcaagggcagtggtggaaagagaggcttctctgaaactgcttctgttgatttgaagcttaatctttcttccagtgatgactctgcctcagattcaccttcatctgcgtctacagagaagactaccactgctgcacctcctcctccttctcgagccaacgaccctgcaaaaccacctgcaaaggcacaagtggtgggttggccaccagttaggtcatttagaaagaacatagttcaaaggaacaagaatgaagaggaagcagctttcgtgaaggtgagcatggatggtgcaccgtatctacgaaaggtggacataaagttgtacaagagctaccaggagctgtcagatgcgctggctaagatgttcagttccttcacgattgaaaaatgtgggtcccaagggatgaaggactttatgaatgagaccaaattgatagaccttttgaacggctctgattatgtacccacttatcaagacaaggacggagactggatgctcgtcggtgacgtgccctgggaaatgttcgttgaatcatgccagcgccttcgcataatgaaaggttctgaggctatcggccttgcaccaagagccgtggaaaagtgcaagaacagaagctgaagtgattttagggttcggccacaacaatcggcttggttgttcatctgtgtcacaaggaagcaaatgtactcgagcaagatcgagtctcttttaggaataagagtttaattataattattattattatgtgtctctgtaattttcttatatgtgtattatacgaatgagaaaatagttggaaattcgttagggacaagaaataatatagaagatgtttatatgatcccgtttttgtttccaggtaaaaatatgtgactttgtccattctattgcctgcttaatgataatgtcaatgtttccagtt

SEQ ID NO: 28090 - DNA, 4073 bp, Glycine max
  Clone ID: TF_GmC371_1
ccttattggattctcaaatattcaggcagtgtcataatcggttggacttggacactagctgcttcttcagctagctccgttcctcctccatctcattctcattctcccaaatcttcattcacaagacaaaatgggttgtcatggtagcaaggagaaaaaaatcaaacacttcctatggatcagcagccactggtagtggtagtggtagtggcagtggtggtggttacaacactgttcagccatcaccacctactaccgatcaggttcaagcatcagcacagactccagaaaaccgaaaagcttctcctacagtgcagaagaaagcagacacaagcatcgtggggaaaccctttgacgacataaagaaatactacagtatagggaaggaattgggaaggggccaattcgggataacgtatctgtgcacggagaattcgagcggggggacgtacgcgtgcaagtcgatactgaagaggaagctggtctcgaaggcggacagggaggacatgaagagggagattcagatcatgcagcatttgtcggggcaacccaacattgtcgagttcaagggcgccttcgaggaccgcttctccgttcacctcgtcatggaactctgctccggcggggagctcttcgatcgtatcatcgcccagggtcactactccgagagagccgctgcctctctctgccgctccatcgtcaacgttgtccacatttgccacttcatgggcgtcatgcaccgcgatctcaagcccgagaatttcttgctctctaccaaggacgaccacgccaccctcaaggctactgattttggtctctctgtcttcattgaacaagggaaggtttaccatgatatggttggcagtgcttactatgttgctcctgaggtattgcgtcgtagttatggaaaggaaatagatatttggagtgcaggcatcatattgtatattcttctgagtggtgtaccacctttttgggctgaaactgaaaagggaatatttaatgccatattggaaggtgaaattgattttgtaagtgaaccatggccatccatatcagacagtgctaaagacctagtcaggaagatgctgacacaggatccaaacaagcggattacttcttctcaagtccttgaacacccatggatgagagaaggtggagatgcatctgataaaccaatcgatagtgcagttctatccagaatgaaacaattcagggcaatgaataagctcaagaagctagcattgaaggttatcgctgaaaatctatcagaagaggagattaaaggtctcaaagcaatgtttgccaacatggacactgacaatagtggcactatcacctatgaagaattaaagactggcttggctcgaatcggatcaaaactgtctgaggctgaagtgaagcaactcatggatgcggctgatgttgacggaaatgggtcgattgactatcttgaattcatttctgctacaatgcgtccgcacagacttgaacgtgatgaacatctttacaaagcattccagtattttgataaggataacagtgggtatattacaagagatgaattggagattgctatgactcaaaatggaatgggtgatgaagcaacaataaaggaaataatctctgaggtgagattgtatgactaatggaatgggtgatgaagcaccaataagaataaggtggatgcagataatgatgggagaataaactatgaggaattctgtgcaatgatgagaagtggaatgccacaccagggacagcttctttaagttcactgaattatctttaataattcataatgaaagccgatcggttgagtagtgacttataaaaagcattatctatctccaggaatgggtgacaggccccttcatgcattggtgatttctttgcaatcctcccaattttgcttgagtaaaaatggaaatttctcaaagggtcaggtttttgtatgagcgctttctttttattaaaggcggctattttaatgcatggcttttgttacttcatgccctgtgacaaatggagggtccttagttctgtttctctttcttctctctgttctctcaaccaagttctcaattcactctttcttcacccttcttgatctgctaattctcaaggtattcaaaattgggaggttttcgattgaagtgtgatgtccaagccactgctaggcataggggaggaggaaggtcaaagcaatgtcactttgttggtttcttcctcagtcatcatggaaagtgtgtgcctgaatagctcaaaattgaaagagcgcaactacatggggttatctgattgttcatctgtggacagctccgcgccgtccttctcagatgagactaagaagcaatctgaaccttaaggctactgagctcagactggggcttccgggatcgcagtctcccgaacgagattcagatctttgcttgagaagttcaattcagtttgatgaaaaaccactgtttcctttgcatcctgctactgatgatcaccattcctcatcaaagcctgctgttttgggtaacaaaagagggttctcagatgtcatgagtggattcgccgaggagaaattgcttgttagttctgaggtcaacacaatattgtcaccaaggccttcttctaatgtggggttgaaaccaagctctatgcttgagaatgttggggctcagcaacccaaagccaaagaactcgcaacagcgaaggttggtcttgagaggtctcatgttttcaatgatagcagaacaaatctgaatgattctgctaataacaatagcagtgcaccagctaccaaggcacaggttgttggttggcctcctataagatcatttaggaagaattcattggccactacttcaaagaatgttgaagaagttgatggaaaagtggggtctggtgcactgtttgtaaaggtcagtatggatggtgctccttatttaagaaaagtagacttgaagaattactctgcgtatgccgaactatcttctgcgctggagaagatgttcagctgttttaccataggttcttgtggatctcatggaaatctgggaggggaggtgctgaatgaaaccaagctgaaggatctagcttcatggatcagaatatgttcttacgtacgaggataaagatggcgactggatgctagtgggtgatgttccctgggagatgtttattgagacatgcaagaggctaaggatcatgaagagctccgaagccattggtctagcaccaagagctgttgaaaaaagtaagagaaggaactaggcagtatcaagcatctcatcacactctatccatctaactgcttatggggttaaaaagctttcttggctatgtgagggagcaacacaaggccataatggcttggaaacacaactctaggcatgttggactggatagaatttcgtactaaagctgccttgttgatcatgatattatttactatcagtgtgttctgttgtcatgatgttttatattcagtaagcttttttcatgattgtcacaacttataaaaccccaaaaaacctgtctgtgggaggttcttatattttatgtgctgtcatgttcatgttgtggtgaaggatttgtagtttgtaaattggatcatctcttctatgtttgcaacttggtgtgataaaaaacaacaagttattatatatgtaatgcaccttcaactgtttctcttttgttcaatttagtagtgacttaaaaaatgcattatatatctccaggaatgggtgacagaccacttcatgcattggttgtttccccaattttcttacaaggttgctattgtgcctgtcatgctaaaagtggatttcttgttctgtacttctgtatacatttagtttccggctgtcacattttgcaagtgtcttatcgaagcctgaatttttatgttaaagatataagatactctgatatcgtatggagttgtcatctttattatggctgagttacctgagtaaatgagtaatcagggaagggaactatttcccttaacccgtatatggaaagcctagctcgcgtgccgtgttcacattctgcaagcttgagtgcctagttcccat

SEQ ID NO: 28091 - DNA, 774 bp, Glycine max
  unsure (1)..(774): unsure at all n locations
  Clone ID: TF_GmC39872_1
ccacgcgtccgggtgatctatggagggtggcgcagcagctgaaaaagtcttcttcatagcactgctcacgttctctctttctttctctcttatatatatataaggcctttattaatgtggcggcttcatgtgtaatctagcaaactactagtagtagttagtttccttccacaatgggcaaagcctctagttcttcctcctcctctatctccagctgcagaaacccttccaattcaactgcatcctctctcacacaccaacatagtcaagaccaccttcgcacagatcttaggcttggactaagcctttccgctactcaacatgttggctcttctagttcagggggacactggcaaccgatgcagccacatctaataagtagtttttcacaagctactgaagtgaatgattgcagcgatcataccagcttctttgtgaaggtgtacatggaaggcattccgattggtagaaaactcaacttgttagctcatgatggttatcacgagttagtaaagactcttgaacagatgtttgacactaccattctgtgggggactgaaatggatggagtgcaaccagagagatgtcatgttctaacttatgaagatggagaaggagatttgattatggttggggatgtcccttgggagatgttcttatcagctgtaaagaggttgaagatcacaagggtggaggcattcgggtgataaatgcatacatatgaagaagctntgcctctcctgtgacttcaaatttagtcctatagagtgagag

SEQ ID NO: 28092 - DNA, 2065 bp, Glycine max
  Clone ID: TF_GmC435_2
aattcggctcggctcgaactcagcacaacacaagcacatgccacagcatgctttacttcctgtgctaaacaaccttatttttatgagacttgaggttgcgtgcattgtgctctaattccgttcctgttttgtgttcttgggttggttggtttggccaaggggaatctctctggtttttatcaccactctgtctctctcttttttttttttttttcctctctcctttaaaagaggaaagacagagagaaagagaaagagagcaggagaacccactaagcgtgcaaataaaagacttaaagcaaagctaagattacaatcccatgctattatagctccctccacctttgctttgccttgcttttcggtgcccaaaaccttaaaaaccttttaagttttccattctggctgttcgctcggactctcacacttgtcgcaaagaagcccttgtttctcacaattacaagatgtggtattttgcggatttaagctgcgactagacctgtaacttgggggttctagagtttgtttctgtttcttgcatatatatatatatatatatatatatatatatttggtgagtgatatttgagctaggaggaatcttccttttgagtgtggtgtgaacaaaagatgaatgaaaggtcaagagacgaggcatctcctcagctgttagatttgatctcaaacgagagagagtggcagatgaacaagagaaacgaaggaaagtcctcagaagaaagaaaactcgaactcaggcttggtccacctggtgaagactggtctctgggtggtaaaatgaagaacaacaacacagaaagagaagatcaatctcttctctctcttggttgcttctctcctaacattaacagtaatgcgttccaaagcaaggcctctcatccatggccaaactaccaccaccatggccagggtaacaacaaaaaagcctcttcttcatcatttcttcagttcccatcatcaacccaacctgtgatgatgggaaaagatgcttcttgccctaaggtggtggtagagttgcagcagaatggtggtgatggcaaagtgttctctccctcttctgcaaatacagctgtgtcccagcctaacacctctcagaaaagaactgctcctgctccagtggtggggtggcccccaattcgttcattcaggaagaacctttcaagcagcagcagtgcttctaagccaccaccacctcctgagtctcaggctgagcagcagcacaacaaggttgctggtaaaaaacctgttgacaactatgctaataataaaggtttgtttgtcaagatcaacatggatggtgttccaatagggagaaaagtggacctcaatgcttacgacagctatgaaaacctctcttctgctgtggacgagctattcagaggtcttcttgctgctcaaagagattcctctgctggtggagttcacaacaagcaggaggaagagaaagcaattacggggttattggatggaagtggagagtatactcttgtttatgaggataatgaaggagacaggatgcttgttggggatgtgccatggcacatgtttgtatcaacagtgaagaggctacgagtgttgaagagttctgagctttctgcttttacccttgggagtaagcaagacaagataccccttgactcagcaatgaaatgaacagcggtttgaggttttgatcacctgctgaaaacttgaagactcttcctaatttgacgttttggttctattgtctgatgaaaagaacatggaatgaagctagttgcgtacattacaactaagtaatgtgatgaatgtgtcttttttttttttttttctaaatgaagatttgaaatgtttatgggttttgtataaatagggaagggaaacttcacggatgtgtgtacttatgatttactgttgagtagccattaacttgttttggtttgtattttgaagtcccttttgtaggtggggtttttcagggtcttaataattttcacatcgtcatggcaaagagcgaaatttgggacctgtaaaaatatggctttacttgctggaatatttttctccc

SEQ ID NO: 28093 - DNA, 1261 bp, Glycine max
  Clone ID: TF_GmC11115_1
ttgcatgaccccaaaatgaaagttggtagtaatagcagtaagggtgcaagaagacgacagaaggggatacgcagcataatataagcacgcacgttgccgaagaaaataccactactcctcctaagtctttgaagtcataaagacaaaagaaaagacttagtcatagcagcaaacaaggaaaggcacgtacacgaccaccgtttacctgttttttgaacgttgaaattaattgacctgcgcctgcgcgtgtcactgtttgagagcacacaaacaatgtcctcccaatctgacgccgttggctgtaacttgaaggagacggagctcaccttaggccttcccggcaccaaaactaatggcacaaaacgtggcttctccgacacccttaacacttctcataataaaatgttgcgccccacctccaaggaacaagtggtggggtggccgccggtgagggcaagcaggaaaaatgctatgaagatgagttgcaagttggtgaaggtggcggtggatggagctccttatctaagaaaagtggatcttgaaatgtacgagacttatgagcatttgatgagggaattagagaccatgttttgtggcttagccattcgtaatcatttgatgaatgagaggaaactgatggagtctggaaatgggattgaatacatgcccacctatgaggacaaagatggtgactggatgttggtcggggatgtaccctggaagatgtttgttgaatcatgcaagaggataagacttatgattagctcagaggccgttggtttaggtccgaggtctacttcttcaaaatgtacgggttccacctagctagctagaagaataattaattagtgcgtaataatgataagctgatagctgataattaagcattccttggacaccttcaacgtttacaagctccggttagaagaagagtgaatttggtacagggaaatatccatgcatggtgcttgatgtacatgtccctttagcacctctggttaattagttacttttgttttgactttaaatgaagaactagaacaaatactggtctctatattagctagtgatctaaaaaacaaataaggggaggctggcatgtaatcaatattaggatcatcgttatatcatgagtatgcatgtaatgtatgacttggctttgtgctagctagttattctacccccagttttctagttgttagtaaaaaaattcacctgatcattttatgccccactccagacttcttctctcttctatcct

SEQ ID NO: 28094 - DNA, 1961 bp, Glycine max
  Clone ID: TF_GmC960_1
cccacgcgtccgtacggctgcgagaagacgacagaagggtacggctgcgagaagacgacagaaggggacagctttcttgaactgcatccaaagagttcctttgcatgcatgccatggcactcttactcccaaatcttgttttgcggttcaataaagctgtgggaagatacagatagggtcaacaacggactagcttatctcaaactccagattcttctctaaatcttcctatccaattatatatagggataaaattattgcaaagtattttttttcctttttcttttgtgatttgacttaatttaaatcattttcagatttaaaccatcgacttttcagatatatctctatatgtgatcagaattctcagatgcagtattatgagagaataaacttgtaccaattgggtagatttgtgacgatgatgaggaagaggatatgatgattccccaacaatttggcttctttctggaattaaaccgatcagcaattccaggcttaaacgagaggggaacatatggtggtggttaatttgcacacgaagtgataatgcatcgtataggcatagccgtttgatttgaaaacacttttccttttaagtgttctagttagctagtcctgtctgtgctggagaaaaccaaaattgccatcatcgaaccacgcactcgatcctcttcatctcccaagggattcaatacaataccaggctagaagaaactccactcatcaccatctcaagcaactaattaacaagctagtactctttgagtgtttggcaattggcttagatttcttgtacttggaacaagatggaaagcactgtcacatttgagactgatctcaacctcaaggcaaccgagcttagattggggcttccaggaacagaagaaattgttgaaaaaccacttcctgcaagtgctagaattaccaacaaaaggcctttgtctgaaacctctgaggagtgtgcttcaaagggttctagtgctccacatgtggaaactgaagcagcccctcctgccaaggctaagatagtggggtggccaccaatcagatcctacagaaagaacagccttcaggagaatgatggtgctgggatttatgtgaaagtgagcatggatggagctccttacctcagaaagatagacttgaaggtctatggaggctacacacaactcctcaaagctctagaaaacatgttcaagttgaccataggtgagtattctgaaaaagaaggttataagggatctgactatgcacctacatatgaagacaaagatggtgactggatgttagttggagatgttccatgggacatgtttgtgacttcttgcaaaaggctaagaatcatgaaaggatcagaggcaaggggtttgggttgtgctgtatgagaaaaccaaaccactaaaaattactatgagcagagaattaaaaaaagtgttttgggggtgaagggaaaaacatgctgaaaagcttgtgttctcggatctgaagggttttgacttttgaaatcactctagtgtgtgcttttggcatacctttatatggagttatactctgaagcaggagaagatggaagatacggtgcagtttcgatcttcctcaagtttggcaacttttatggttattattttggcatctgtggttggatgctatgcttatgatgttgtttccactgatcctttttgaagtttcatgtgagaaatcttagagatttcaaatgaaactttgtgtagaggagagatagaaaattaaaggttatatgtaatattgtttaatccaagttttttggttgtgttgatacaagaatacaatgtaatatactaagtgttggtatttgcctgtgttattggatggactcaattaagtatgttattgcatttttcaaataactaggaactttttgttgttttagttttctttttctataaacataataattataattttaataatttctgtgt

SEQ ID NO: 28095 - DNA, 1413 bp, Glycine max
  unsure (1)..(1413): unsure at all n locations
  Clone ID: TF_GmC870_2
agaatacatccatatcttacaatccacagtctttgttgtttagagacaataatcaagatggggaagttcaggcagatgctaggagcaatattccttatgccaataacattgatagccaaatgggaatgccactgaatccagattcactctcaaccaaaggcacattgaggttggggaaggatttgtctaataatttctcttcagaaggcatgcttggtaattatgaaattaacagagatgcccagcaggaaccttcgtcttcaatggtttcacagacatttggtgtacctgatatggccttcaattcaattgattccacaatagatgatagtaacttcttgaatagtggtccatgggctccaccaccagcaccaccactgccacctctgccacctctgccaccagcacagtttcagcggatgaggacatataccaaggtatataaacgtggagctgtgggaagatccatagacataacacggtattcaggttatgaggagcttaaacaggatctagctcgtaggtttggcatagagggacagctggaggatcggcaaaggataggttggaaacttgtctatgtggatcatgagagtgatgttctactattgggagatgacccttgggaggagtttgtgaactgtgttcgctgtattaaaatactttctcctcaagaagtgcaacagatgagcttggacggagattttggcaatggtggccttccaaatcaagcctgtagcagctctgacggtggggatacttaaaatggagttcagtaatacactaactattcttccgtattgttaactcagattatttctgggagatgcattattgtcctagttccgaaaggcggttattatgccactggggacttgaaagcgatcttttgcagtttgaaaggagaatttttgtctctgttctggacgtgctaattttaagagccaaatgaaggtggagaagcgagctgctcctagtgctacaaattcaattaagttactataaactggtactgaatcgaatgtttggagcacccggacaaaactagacgtgtttcaagccatagatttgttgttgttgtaatgttgaaaagaattgttcttggcatggtcagaaatatttaattctatgtattgtagaaagaaaggtttaatattgagcggtgattttgaatgtataaagtcataggcagctagattttgcggaagctttcacgatcttccatccttggaggcaccttagtaatttttagcctagaggactgtgaagtagagaaacttcaaatgttgtaaggtcatgtagacactgttgcattgtttgcttgaagcataagtactaaaaatggtggagaattaattgactgtaaaaaaaaaaaaaacaaaaaaaaaaaaaaaaaacaaaatnnnnnnnnnn

SEQ ID NO: 28096 - DNA, 954 bp, Glycine max
  Clone ID: TF_GmC31466_1
gacccacgcgtccgctcacaacaatgggcaaacccgctagttcttcttcctcctctattagcagcaccaccaaccgtcacctcctcctttcaaccgcatcttctctcactcaagaacttcccactgatcttaggcttggactcggcatttccgccactcaacattttgcctcttctatttcaagggggcaatggcaacaatcacaccacccttttgtgaacatttattcacaagttcctgctgaagtgaatgattgcagcaacgatcatagcagcttctttgtgaaggtgtacatggaagggattccaatcggaaggaagctcaatatactagctcatggaggctactatgagttagtcaggactcttgaacacatgtttgacactaccattctttggggaacagaaatgaatggagtgcaaccagagagatgccatgtgctaacttatgaagatgaagaaggggatttggtcatggttggagatgtcccttgggagatgttcttatcgacggtgaagaggttgaagatcacaagggtagacacattcgggtgttaagtgaagaacatgacactgcctcttccttcaccggtgattttagattttgtcctctagagtgagactctaatgaggtcgctgatcagaaaatttagaaaaatcttagtgaagtatatgcacagataggtgatgtatatgcatagctcactctgctctttctttcaagataatggaaaaagaatagtgttgtatattaattcttacccattctgggctaccggatttattttctttctagaactcaacttctaactgttagaatttctcttttccaacttattttcctcaattttaagactgacgcagagtgaggaacgaggaatggaaagaaaaattattattatgttgagagcaaatgaaaatatgcattatgccaaaaaaaaaaaaaaaaactcgt

SEQ ID NO: 28097 - DNA, 1617 bp, Glycine max
  Clone ID: TF_GmC6795_1
acgcgagaagacgacagaagggggacgggagagaatctagaagaagaaggagaaagtataggaataataaaagtacaatcaatttaaagcaaaaacttcaattcaccaaccgctcaaaccagaccagtcttgtgggcccatcatctttaagatcctttcctttcccctttctctctgacaccttctctctctctctcgtttacttctacattccagcctaacctgagcgtttatcatactcttcttcttccctcaaaactattcaattcccttcaaattcttccaccaccccttttccttattcttcctcaattctcccaaaaatcatatttttaccgttctgattggtttttcagcttgtgggtcgatgtcaactgtgtcgaaagatgacaacttggtgctgtcttcggaggactcttcgtgcccagaagagtctgagcttgaattgggtcttggcttgagcctctcttctggcccttcatcaaagtctcatcaccaccatgttcatgctcctacaactctttatgctagaatttacactgctaaggattttccttcttccgcagcagcagcatcatcatcaccttcctcttcttcctcttcgtctcccaacatcactgccggcaccaagagagctgctgctgattctcttgttgccaataaccgtcccagtcaagtagttggatggcctccacttcgaacatatagagtgaatagcttcaatagccatgcaaaatcaactgaagtattcaactctgtggctgagaagagtaagataaataatactgtggtcaggaagactaatgacaatgacaatgataataacataaatgccaaagaaaaaagacacctcaggagttccctgttcgtcaaggtaaatatggacgggataccaattggaaggaaggttgatttgagtgcccatagttcctatgaaaccttagcacaaacattggaggatatgtttaatgaatcaactacagtcaccacttgcaaaggatcaaatggtgaggattatggcattattatcggaggagaaagacattcaaaattgttggatggatcttccaagtttgtgctcacttatgaagacaaggaaggagattggatgcttgttggggatgttccctgggggatgttccttagctcggtgaggaggctaagaatcatgaggacatctgaggctaatggacttgcaccaagattggaagaaaacatcaaacagagatgcaagcccatatagatactgttttcatggctaaggacacgaagaacctgtcaaatagatgaagagaaaaaacagaacagaaaagtaaaggaatattgcaagtatatgaagttttgagatttgaatgataaaatctcgcacttttgtttaattaattcagtttgtttgtttgtttaatttggtatatttgtcgctgcctctctattcatctcacttggagggtgcaggcatcatagattttcatgcaatactactaatcatacaagtcagcctgcttgttagtgttgtaaatgtgggatgtttgctaactatctcagctataaagtattgtttgaactttatttccctgctacagtaattcaaatttcctttgaatgaatacctatttt

SEQ ID NO: 28098 - DNA, 589 bp, Glycine max
  Clone ID: TF_uC-gmroLIB3259P148e08a1
tccgcacccacgttattagacacacaggggccatatcatacctatccctcattatcacacgtgctatggaggcagagcgtgacactgtacaagaagatcaacttagaagaaaccgagttacgactcagcctcccactcaggggaaacgatacgctcaaaaacactagcagcactggaaagaaggtcttttcggatactgccgtggatatgaagcataacctttcctgaacctcatacaatgcttattgcgacctgactaaagagaagaacacgactgctggtggaccttctgataacgacccatgaaagcctcctgcaaaggcacacgctgcaggttggccaccactgaggcctttcagaaagaacattgttcataggagtcacagcaatgatggcgaataatccgccacaagtagtatctgcaatgctaacactggagcacctatcgagaacgtgagcatgcatggtgctccctatatacgcaaggtggattggaagacgtacaagagctaccaagagtagatggatgcgctggctcatatgctcagttgattcaccattgacaagtgtggatcccattgcatgaaag

SEQ ID NO: 28099 - DNA, 459 bp, Glycine max
  Clone ID: TF_GmC382908_1
attaagctcaaattctcctctaaaccttctttatatgcttcagtgaatgacccagtggtggagcagaatcttctgtactagtattggctcctaaatttttccataccccttggagctagcccgattgcctcagagcctttcattatccttagtttcttacatgactcagtgaacattttccaagggacatcacccacaagcatccagtctccttccttatcttcatatgtaagaacatattcagagccatcaacaagatccctgaatgcactctcacttaatccatctttcccaggaagtgcacgagaattgcattgaccaatggtaaagcagctgaacattttctcaagagctgaagaaagttcaatatagttgctgtaggttttcagatcaacctttctgagatatggagcaccatccatgctgaccttaacgtaaagacaacctactcctgatttc

SEQ ID NO: 28100 - DNA, 409 bp, Glycine max
  Clone ID: TF_LIB4280-048-Q1-N1-E10
aaacacaaaaaaaacccttcaaccaaaaaataaactgggggaacaaaaaaaaaacccccccccacagaaaagttttaaagttttggaaagttttaacacaacaatttggaaaaaaagcttactaaattaaaaccccccggacaacataaaacggccccataaaaaacaataaaagggtttgggccgcttaaaaaaaaattttatccagccccaaaggccttaagttctcgcttccaaaaccccatgttaaaaaaaaaacacgggaaccgccaagggtctgctctaacattttaaaacaccccggggagctaaaccaaggggataaaaacttttaaagacccccaacctttggcagggtaaaaaaaacatcccccagggaacatcccccacaagcttccaatcgcccttt

SEQ ID NO: 28101 - DNA, 1320 bp, Glycine max
  Clone ID: TF_GmC573_6
aagtaaggtgcacctgccatgctaacttaaggaaggtagctcttgtaaacatttagatctatcttccttaagtaaggtgcacctgccatgctaacttaaggaagatagatctaaatgtttacaagagctacccagaacttctcaaggccttgggaaatatgttcaagtgcacatttggtgaatattcagaaagggaagggtacaatggatctgaatatgctccaacttatgaagacaaggatggggattggatgctggttggagatgttccatggaacatgtttgtgtcatcctgcaagagactgagaattatgaaagcatcagaagcaaaggggttgggttgtttttgaccaaaataaaaaaacaaagcaggaccatcatgcatgcccatatccaaaacatggagcaaagcaattttcagtgacgtcatccaagagaatttcttctgtttggaatatgcaagagctaggcacttggcctctgtgaaatggttatatttagcttattaaaaagagagatgcacatacacgattttattttccctttatttgtttatttcaaaagctaggtgactttttagacctgcttaattaagtatactattccaaattctcaatgcctaaaccagaattgaaaactgtaatgatgaaatgagaagaaaataaaaagcaaaaatgctattttaattgtatagactatatatagagaggataaacatatatatgaaaaactactttcatttgtcaggtcagtcaaaggttcaaacgttcggggagtggggtcttttttttaggctgtgtttcagtgtttcggtggttggcccaaatgaaaaaatggtttttctggacgtgaacccggggaggtttttcagtcttcacttttcaggtggccaataacaggacgaaataataatatggatgatgatgatgatggaaaatggaaattggaaaatcaagggagggactgaagccaaaataggcttatggaatttggagtttttgtttagctgttttgaatgcctttttacagtccgtcttctttttctttcgacccaatcaaaattttatatgcgctgaagcgcgaactcatgaacaaacagaaagaagaagataggaaacgcaaggaggaggacaaggccaaaaaggcagctgacatgcagaaggctaacgataacacatctgcacctgctgatgaagatgatatggacccaactcaataccttgagaagaggcataaagtatcttgcagttcataaggcagaggggaataacctatatcatgacaaatactatgtcactatgtctattgatcaatacatca

SEQ ID NO: 28102 - DNA, 2297 bp, Glycine max
  Clone ID: TF_GmC183_1
aattcggctcgagccactcgtcatttctatttctctctccccaaaagcttttgctttctctctgcttatggaaggcccttaaactttcgctctctctgcttcactttctcgcttttgcattttcttgtgaaaaaaaaaaatcctcagaacaaaaataggtcttcttcttctctgatctaccaaagcttcaaattctccttagtttggtttgtctgtgagtttggagtgtaatgtcgccgccgacgctggtaacggaggaggaggggcggagcaccgtggcgtccgattcttcgcaatccttggactgtttctctcagaatggtgctggattgaaagaacggaattacttagggttgtctgattgctcatcagtggatagctgtgcctctactgtgccaagcttgtgtgatgagaaaaaggagaacatgaatttgaaggctacagagttgaggcttggtcttcccggattccaatcgcctgaaagggaaccggatcttttctctttaagctcaccaaagcttgatgagaagccactcttccctttgcttcctactaaagacgggatttgctcgtcggggcagaaagctgttgtttctggcaacaaaagaggttttgctgataccatggatgggttttctcaggggaagtttgctggtaatacagggatgaacgcggtgctatcacctagaccttctggagctcaaccttctgctatgaaagaaacaccaagcaaattgtcagaacgtccgttgctcaactaataatggaaccggtcataaccatacaggtgcttctatcagtggcagcgcacccggcttctaaggcacaggttgttggttggccctccatattagatcatttaggaaaaactcaatggctaccaccacaaacaagaacaatgatgaagtagatggaaaaaccaggtgctggcgcactctttgtgaaggtcagcatggatggtgctccgtatcttaggaaggtaagatctaagaaattatacaaacataccaggaactgtcttctgcccttgagaaaatgttcctaagctgtttcactctaggtcaatgtggttcccggagctccaagggaagagaaatgttgagtgaagagcaagctgaaggatcttctgcatggttctgaatatgttactcacttatgaagataaagatggtgactggatgcttgtaatgggatatgttcattgacacatgcaaaagactgaaaatcatgaagggttctgatgccattggcttatcgtccatggcaagggatataaacatgaacaggtgctatttggtattgtatcctgaagagggctggaaagagaattaatgatttaaatgactgaatgccgtgagaagatgttgaactgcaattgatcctgtaatttaagtttacacaaatattaatatatgttatttttttgaatgttagtaatatattatgtcaatactataatagccaaggtatctctaatgactctgagccttttaaactataatcaatgtggcacggtttgcttaagtagattttcttgcctgtgctcccagggccatggaaaagtctaaaagcaggatttagggtatcctggatttcctcttttgtctaatcaagtgtttattgttggatcctccggaatgggaaaagcaaaggatgatgactgactgaaatcctggcattggtggtttaacgcccttccacctttatttgttttcaagtccctcaagagtttgtcatggtcctgtgttaatttgttaccactgtaatatcatatgaaagctacaatgaaatattagtatttgtggagtctgtaatcattataggaatccgtttgttttggaagaattgaacatctgttacagccgccaccatacggttctaacactatatttgtgatttgcgtcaaaaaaaaaaaaaaaaaaaaaaaaaaaaaaaaaaaaaaaaaaaaaaaaaaaaaaaaaaaaaaaaaaaaaaaaaaaaaaaaaaaaaaaaaaaaacccaaaaaaaaaaaaaaaaacccaaaaaaaaaaaaaaaaaaaaaaaaaaagggggggccccttttaaaaaaaacaaattttaccccccggggttggaaaaaaaaatttttttttttggggccccaaaaaaaaaattcgggggcgggtttttaaaaccggggggggggaaaaaccccggggttccccaaataaaatcctttgaaaaaaaccccctttttccaagggggggaaaaaaaaaaaaggcccccccaatttcccctttaaaaaattttccccccctttaggggaaatgggcccccc

SEQ ID NO: 28103 - DNA, 2130 bp, Glycine max
  Clone ID: TF_GmC1825_1
cccacgcgtccggctattccttcctcgttatggagtcgcgagtgctgtcacgcgccggaaccttgtcctccctccctcacctccgcaagccgccgcgggaggccgtctccagcgcctccctcgtcgccgtgaaggccggaattcccgggtcgacccacgcgtccaaacaaaccaggacgcatgacaaacaaaccaagcagcattatgatagaaaagggacacaaagtgaaagagaagggagctatagaaataaggagaaaaactttcaaagaggtgaaagcaaaagagttcttcttttccttttttatatatacttgggtgctaagctgtgtgagttcattgacaagcctgaaatggcaactatgctgacaaaggagcatggtctgaacctcaaggagaccgagctttgcctcggtttgcctggtgggggaggcggcggcggcggcggtggtgaggtggaaactccaagggccactgggaagagagggttctctgagactgttgatctgaaacttaatcttcattccaaggaagatctgaatgagaatctgaagaatgtctcaaaggagaagaccctccttaaggatcctgccaagccaccggctaaagctcaagtggttggttggacaccagtgaaagtcatacaggaagaacatgatggcagtacaaaaggttagcactgaggatgtggcagagaagacaacaagcagcactgctaattctggggcatttgtcaaaggtttccatggatggagcaccttacctgcgcaaggtggacctcacaaatgtacaaaagctacaaaagagttatctgatgccttggcgcaaaatgttcagctccttcaccatgggtaactatggggcccaaggaatgatagacttcatgaatgagagcaagttgatggatcttcttaacagctctgagtatgtgccaagctatgaagataaggatggtgactggatgctcgtgggtgatgtcccatgggagatgtttgttgagtcatgcaagcgtctgcgaataatgaagggatcagaagcgattgggcttgcgccaagagcaatggaaaaatgcaaaagcagaagctgaagcgggcctaatacaatgttcaatgaaatcccgtaccaaagtggacctatatatatatatatatatatgaagcacttcagcgagactatggagcggagtgttgttagcttgaatgtgtctggtgttttttgttttgttcgtatatagattcaacttttaattttaaggagccgatcgatggggcatttgtaatggacaagaagcaataaacttaacctatatagtctggcttgtttattatgtgatccttccatgctgtcatgattgttgtgtgctaaaataccttgaattttaattcatactttagttcagctgtaggacatgcagaagttgaaggactttctcgacttacgactgtggttcctgggacagatgagtcaattagcaagttggtgcagcaactctataagctagtagagctacatgaggttcgtgatatcacccacttgccatttgctgagcgagaattgatgctaataaagattgctgtaaatgctgctgcacggcgtgatgtccttgatattgctagcattttccgggctaaagccgttgatgtatctggtcacacaataactctggagcttactggagatttggacaagatggttgcattgcagagattgttagaaccatatggcatttgtgaggtggcacgaactgggcgaattgctctagtccgtgagtcaggtgtggactccaagtacttgcgtggatactcttatcctttgtaatcacttcacctgggtcgaagaaccatcaaaatcttaggattttagagcttgtactttctcttaaactttgcctacggattcttgccttctgaactataatgttaataagtccttctgtgattaatataggcttgggatgacatctgagattaaaaaaaaaggttttcctctcctcaactttgcttcattttttggtggaattacagtttactattttgtgtagggacaaattttttgcttgtcaaaatatttatgtttcttacttggatgttgtctgttcctcaaaaaaagggggggggggggggggagggt

SEQ ID NO: 28104 - DNA, 1278 bp, Glycine max
  Clone ID: TF_GmC573_8
ccacgcgtccgcaaaaccctagttgttctacactctcgttccgtctttctccaacaatggaagttccttcggaagcgccgccgtctaccggcacctggagaaaccatgagcaaaaatgcgctgaagcggtaactcaagacaaactggcgcgtcggctgcgagaagacgacagaaggggacaccacaacttgcatctcatttctcatttctcacattattattcacatctccatctagatctctctctctctctctcccaagaaattcatcaacagacttgtgattaatttgcaattgttcaagtgatctatcaagaaattgataattcaatgggaaagtacgaaaaagagcttaatctcgaggctacagagttgagattggggttgcctggaagcgatgagcctgggaaacgttctattgttagaagcaataagagatcttcaacagaagcaagcgaggaagagtgcataagcaagggcaacatgaattctaatggttctgatatcacaagtgatgaccaagacaaccttgtgccacctgcaaaagcacaagtagtgggatggccaccggttcgatcatataggaagaatactctacaacaaaagaaagaggaacagggtgaagggtctgggatgtacgtgaaagttagcatggcaggtgcaccttacttaaggaagatagatctaaatgtttacaagagctacccagaacttctcaaggccttgggaaatatgttcaagtgcacatttggtgaatattcagaaagggaagggtacaatggatctgaatatgctccaacttatgaagacaaggatggggattggatgctggttggagatgttccatggaacatgtttgtgtcatcctgcaagagactgagaattatgaaagcatcagaagcaaaggggttgggttgtttttgaccaaaataacaaaacaaagcaggaccatcatgcatgcccatatccaaaacatggagcaaagcaattttcagtgacgtcatccaagagaatttcttctgtttggaatatgcaagagctaggcacttggcctctgtgaaatggttatatttagcttattaaaaagagagatgcacatacacgattttattttccctttatttgtttatttcaaaagctaggtgactttttagacctgcttaattaagtatactattccaaattctcaatgcctaaaccagaattgaaaactgtaatgatgaaatgagaagaaaataaaaagcaaaaatgctattttaaaaaaaaaaactaagggcgg

SEQ ID NO: 28105 - DNA, 1219 bp, Glycine max
  Clone ID: TF_GmC22_3
tacggctgcgagaagacgacagaaggggacacctctttctccttctccccagttctcaaaccttacctagtattttcgtttctgaacccaattaattaagcacacaaggaccataacatacctatacctcaatatcacaagtcttatggaggcagagcgagacaagtacaagatgatcaactttgaagaaaccgagttacgactcggcctcccactcagtggaaacgagacgctcaaaaccacttgcagcactgggaagagggttttttcggatactgccgtggatttgaagcttaacctttcctcaacctcaaacagtgcttcttctgacctgactaaagagaagaacatcactgctgctgcacctcctgctaacgacccagcaaagccacctgcaaaggcacaagtggtggggtggccaccagtgaggtctttcagaaagaacattgttcaaaggagtaacaacaatgagggcgaaaaagccgccacaagtagtagcaacaatgtgaacacgggagcagctttcgtgaaggtgagcatggatggtgctccttatttacgcaaggtggatttgaagttgtacaagagctaccaagagttgttggatgcgctggctaaaatgttcagttcattcaccattgacaagtgtggatcccaaggcatgaaagacttcatgaacgagagcaaattgattgatcttctcaacggctctgattacgtaccaacctatgaagacaaagatgctgactggatgctcgttggtgacgtaccgtgggaaatgttcgtggaatcatgcaagcgcctgcgtataatgaaaggatctgaggcaatcgggctagcaccaagagcagtggaaaagtgcaagaacagaagctagagtcaaatttgtaaattccactttcgacaacaatctgctctatctgttgctcttgggcgtccacggaaagcattaatgctaatttctcgagcaaggggtagtctaatataggagccaagttgttacataatgtgtcggtaccatttcttagaaataattttcttgtatatgtattgtgtattttatatatgtgagaaaatatataatttggaaattagggacaagaaataatgaagtatgttttatatatgtgagcccgtttttgtttctaagtacaaaacgttacgttgtctatcgttggtgtgcttgtctaataagaataatgtctacgtttatagctgt

SEQ ID NO: 28106 - DNA, 1083 bp, Glycine max
  Clone ID: TF_GmC2301_7
gtggtttcgtcgcccaccctcatggcaaatcaaaaccaaagagagtgtgctgaatgtctgacttggctttgctttttgcttatcactctctctctctctttctttcttttttgttttaaagtagcttctgttgtgtgcatatataaggagcctaaggtggcggcttttcttttcagtcttgatcagtttcattcattggaagatatgggaacattagaacaaattgatgctcctcaaacccagtcatcatcatcttcttcttcttccatcgatagcaacaacaacccttctaggactaggactccaccatcctcttccccttcatcaagtctatgcagaaacagaactgatttgagcactgacctcagacttggtcttagcatctctccttcttctcaatctgaatcacccttcaattcaacacgaagggaagaaagttttgactggccaccaattaagtctatattgagaagcacccttgtggggaaacaaagctatctgaaccaaagaccctctttgtttgtcaaagtctatatggaaggaatccccatcggaagaaaattgaatctgatggcacattatggctatgatggactagtgaaaactcttggccatatgtttaggacgaacattctctgtcctaactctcaaccacttaattctgggaattttcacgtgctaacttatgaggatcaagaaggggactggatgatggttggagatgtgccgtgggagatgttcttgaacagtgtgaggaggctgaagatcacaagagctgaccgatgctagttaatttaatgatgtatacaatctctctcacaacacaagctcctcctgatcaattttcattgttcataaatttttgctgtagatctagttattaattagtgggtgggtgaaaccccttgaaatatttcaccaaaaagaatggatcccgtgattatattatctaatagatttatacacccaaaaaaaatatatagatgtataacttcttacccaattttcatttcagtgcatagctgcactgtttcttattctctctgtttgatgatggagttgtttaattttcctttgttttgg

SEQ ID NO: 28107 - DNA, 549 bp, Glycine max
  Clone ID: TF_LIB4391-021-R1-N1-H2
accaacccttaatatattacattgtttttttgtttcaacccaaccaaaaaacttggattaaacaatattacatataacctttaattttttatttttcctttacacaaagttttttttgaaatttttaaaatttttcacatgaaacttcaaaagggatcaggggaaacaactttttaagcttagcatccaaccccagatgccaaaataataaccttaaaagttgccaaatttggggaaaatcgaaactgccccgaattttccattttttcctggttaaaagaataactccatataagggtttgccaaaagcccaccctaaagggttttcaaaagtcaaaaccttttaaatccgaaaacacaagtttttaagcatgtttttcctttcacccccaaaacactttttttaattctttgctcaaagaaatttttaggggttgggttttttaatacagaaaaacccaaaccccttgcctttgatcctttaatgatttttagccttttgaaagaagtcacaaacatgtcccatggaacatttccaactaacatcca

SEQ ID NO: 28108 - DNA, 468 bp, Glycine max
  Clone ID: TF_GmC26770_2
actagtatggagtgtttagccatttgaacaaaaatacccccacgcgtccgtacggctgaaagaagaacacagaagggcaagaatggtgatgaagaaaaccatttggtggggtggccaccagttaaatcatggaggaggaaagaactccatcagcagcatcctgcgagaggccgaattaggaacgataggattcaagctaatgaaaatcaaagtagaggaccaaactctttatatgtcaaggttaacatggaaggggtagccataggaaggaaaatcaatttgaggcttttcaattcttatcagacactcacaagcagcttgatcagcatgtttgctaaataccaaaaatttgaggaagttggagaaagttacacgctcacctttcaaaacgaacaggatgaatggctgcaagtaggacatgttccatggcaatcctttataggtactgtgcggcgtttagtgatactg

SEQ ID NO: 28109 - DNA, 691 bp, Glycine max
  Clone ID: TF_GmC613_2
ggctcgagggtttacaagtcagggtcctttggaagatccttggacatcactaaattcaccagctaccctgagctacgcagcgagcttgctcgtatgtttggccttgaaggtgagttggaggaccctgtgagatcaggctggcagcttgtattcgttgaccaagagaatgacgttctgctccttggtgatggcccgtggccggaatttgtaaatagtgtagggtatatcaagatactttcccctcaggaagtgcagcagatgggcaacaatgaacttgagcttcttaactcggtccccattcagaggctctctaacggtgtctgtgaggacccaagaaatttaagcactgggataacaactgtggggtctttaaactactgaatgatatgacaatcaaatactatgaatctcttctctcttgtattattgctcctacttctccaccctttgtcaaatggtgggaagtactgcctagttgtagtttataggctacttattaagccttttttttttgtcttcctgttcttgctgcctaggaccattcttaagataaacaatgtaaacatatggcatcttggcaatgtgctatctacaatatattaattatttagtgtgtgtttggctagaaggttacaaacgtatgtttgcagaagtatcatcacccttacttttaatttatttttatacattg

SEQ ID NO: 28110 - DNA, 2310 bp, Glycine max
  Clone ID: TF_GmC435_1
tgatttctgtcttggatttggtctcttagtacgtggcattgttacgcgaggttcttgtggcaggtgcttcttctttcgcatatcaaaaggttcgacgaattgttttgttttattccagaacctgaagcttgtttataaaaaaaagacgagggaatgagcacaatggcaaattgcatacaacatgtggcaaagaagccacaagtcatcagaggagagaaagctggagcttaggcttggtccacctggtgaagagtctctcaatgaaagcatcagaaaaagcaacagagaaagaaatgaatcacaattcactcttggttgcttctcaactcaaaatttttttacttctgacaagcaaggtccaggtgggactacgttgccctctgcatggccttccacatcctatcatcaccaacaccaggctaaagctaaagcttcatcatttcttcagctccaatcaagtccacaaaacatgatagtgatgggaaaggatgtgtcacaattctcttgtgtagagaagaaggtattctcaccctcttgtgcaaatccagcggtgtccaaaagaacttcttcaggtccagcagtgggttggcctccaattcgttccttcaggaagaacattgcaagtggaagcacttctaagttgccttctgggtcccaccagcaacatcaaaatgttgttccatacaaggttgctagccaaaaacctactgacaaatctggtaaaggcttgtttgtgaagatcaatatggatggtgtccccattgggagaaaagtggacatcaatgcttatgacagctatgaaaaactttcctctgctgttgatgagctctttaggggcctccttgcagagatgaagttatctcatattggctcttcccaatgctgttctggtcaaagagattcctgtgctggtggaattcaaaacaaggaacaggaagagaaatccaataagggtttattggttggaagtggggaatatactcttgtttatgaggataatgaaggagacaggatgcttgttggagatgtgccgtggcacatgtttgtatcgacggtgaagaggctgagggtgttgaagagttctgatcttcctgcttttacacttggtagtaagcaagactagttacaccacttgacttgacaatgagaaatgaaggatgaagcagcagcttgaggtcttcttccatgctaaaaattgatgactaagagtgtttttatttgacattttggttcctttgaacattgaagattaggcaatgaaatgttcagtctataagtaatgtttgtatgaatgaatgtatcttgttttctttagtgaagttttgaattgtttctgcattttaaaaatagggtaaggaaaactttacggatgtgtgcactcatgattttgccattaacttatgttggcgtgcgttctgatcgacgccatgtttggaaaaatggtgtgagactccaaaatcaagtttggaggtatagaatatgattttaggtaataataataataatatttggttgttcaattctgctggtggggttcacaacaagcaggaggaagagaaagcaattacggggttattggatggaagtggagagtttactcttgtttatgaggataatgaaggagacaggatgcttgttggggatgtgccatggcacatgtttgtatcaacagtgaagaggctacgagtgttgaagagttctgagctttctgcttttacccttggcagtaagcaggacaagataccacttgactcagcaatgaaatgaacagcggtttgaggtttttgttcacctgctgaaactcgaagactcatctaatttgaagttttggttcttttgtctgatgaaaagatcatggaatgaagctagttgcgtacattacaactaagtaatgtgatgaatgtgttttttttttaatgaagatttgaaatgtttatgggttgtataaatagggaagggaaacttcacggatgtgtgtacttatgatttactgttgagtaaccgttaacttgttttggtttgtattttgtttttttttttttttgctaaatgaagatttgaaatgtttttgggttttgtataaataaagaagggaaacttcacggtatgtgagtacttatgatttactgttgagtagtttctcccttgttttggtttgtattttgaaatcccttttataaagatttgcttctagggtcttaataattttcacatcgtcatggcaaagagcgaaattggggaccctgtaaaaatatggctttacttgctggaatatttttctcccaaaatcttgtgattttaaacttttta

SEQ ID NO: 28111 - DNA, 1302 bp, Glycine max
  Clone ID: TF_GmC1199_2
gagaagacgacagaaggggtccccacaaggctcgagcgtgcctgcccctatacctcaccccacttactattattattgtacaacacaaccaggtccctgaatgctttttagagagagaaagagtaataataataaagtggaagaaaaagaattaggagagtgaaacaagaagaagaagaagaagaagaagaagaagaagaattgagaagatggtgtttgaggaaactgagctgaggctgggactgggactatgtctccctggaaatggaaccacggcaacaactgaagctgctgctgcggaattaggagtgaggaagagagggttctctgagactgaaactgatgaaacagccaccgttgatttgatgcttaacctctcacccaaggaagctgctgctgctgatggtgcagatccacgtgagaagccaaagacttcgccgaaggagaagacccttctgcttcccgatcccgccaagcctcctgccaaggcgcaagtggtgggatggccacccgtgaggtctttccggaagaacatgttcgcagcccaaaagagcagcggcggagaggaaagcgaaaagagcagccctaatgcaagctttgtcaaagttagcatggatggagcaccttacctccgcaaagttgacttgaagatgtacaagagttacccagagctctctgatgccttgggcaaaatgtttagctccttcaccattggaaattgtgaatcccaaggcttcaaggatttcatgaatgagagcaagttgatggatcttttgaacagctccgactatgtcccgacctatgaagacagggatggcgactggatgcttgtcggtgatgtgccatgggagatgtttgttgaatcatgcaagcgtttacgtatcatgaaaggaaaggaagctattggactggcaccaagagccgtggagaaatgcaagaacaggagctagactagtagttaccagtccaaaatctgctccatcatcattagcggtgcctagttgacttagtaactgaagcaaggttaagctgcagcagacacagagggagagagcagggtgttaaaaaatatagttaagtaaatctgtgtatcattatggtttgttatataatatatatttcaaacaaagttgtgagatgtcgtaagtataaattatgaacacaaacgataatgactctaaattatgttgcaagactttcttatttctttacttgtgtgcttgcataataataagtttattaatttgcttgtcaaaaaaaaaaaaaaaaaagcggccggttttttttttttttttaaaaaca

SEQ ID NO: 28112 - DNA, 1137 bp, Glycine max
  Clone ID: TF_GmC870_3
aattcggctcgagaaaggtgttccgccagaaatttcatcttcaatggtttcacagacatttgaagtccctgatatgagcttcaattcaattgattctacaatagatggtagtggcttcttgaataggggtccatgggatctgccaccaccacctccaccacaacaacaacaggttcaacggattagaacatacaccaaggtatataaacgtggagctgtgggaaggtccatagacataacacgatattcaggttacgaggaccttaaacaggatctggctcttaggtttggtattgagggacagctggaggatctacaaaggattggttggaaacttgtatatgtagatcacgagaatgatgttttacttgtgggagatgacccttgggaggagtttgttaactgtgtccgctgcattaaaatactttctcctcaagaagttcaacaaatgagcttggatggagattttggcaatggtggccttccatatccagcaggcagcagctctgatggtgggaatgcttaaatggcatccaggaatctgctaattattcttccatgttagtaacttacatcgtttttaggacatattcatcagtgttgtccaaaaggttgtggggtcggtcggcagatgattttgtcctgctgcagcaggctgggtaatatttgcggttataacttattaggagaaatttgtctctgccatgtacaggcgaatttgaagagccaaaagaagaaaaaggtggaaaaatttgctgccctcaatctacgacttacatttaaggttgttaacctggtgatgaatgagatacttggaccacacgcacatggcacatcccaacaaagatgtgttaagccatatgcatgtgatgacgttgaaaagttgagcagaagttctcttggcagcgtttgaaatatgtattaaatgcagcgtactgtagaaagaaaggctgaaatatcacggcatagttcagtgtataaaagtaggtttcttgtgcggtctttaaaaggagttattgacatctgaattgaaaggtggctttttggttttttgtaaaacactaggcagctagatatgtattgtatggccaactatatattgaagcatcaaatacagaatgcattgttttgctgccc

SEQ ID NO: 28113 - DNA, 2197 bp, Glycine max
  Clone ID: TF_GmC570_2
ggctcgagctcaggaagtatcccaccccaacaaagttttcaatcacccaataagaatgcattgttgatgacatccttaccacaagactcacagtttcagcaacaaatagaccagcaagctagtctcttacagaggcagcagcagcagcagacacagttgcaatcatctccgttgcagttattgcaacaaagcttgtcacagagggcatcacagcaaccacaaatgactcaaatgtgtcagcaaaacagctcagagcaacaaccacagttgcagatgctacaaaaattgcagcaacagcagcagcagcagcaacaacaacaacagcaacaactcctttccacttctagcccacttttgcagtctcagcttctacagcagcaaaatactcatcaacaaaaccagcaatttccacagctgcctctatcacagggtcatcagcctcaacagcttggaaacaatgctttctcaatggagaagcttctcaatggaaacaactactctacttcatctctgatgcaaacacagcagctttctgtgaaccaaccccataatacacagaaatcactgactaatactagagctccctctactcttacagatggagatgccccatcatgctcaacttcaccatctactaataattgccagatatctccaaatctgatgaaaagaaatcaacatgtaccggcaacattaggaggaccttcagtacttgaacccaccaatcatctgatgcagggacttcatagcaagtctgagatgcagatcaaacatgaattacctagtgtaagaggaactgatcagctgaagttcaaagggacagttgctgatcagatggaagcttcttctggaacatcttactgtattgatcctaataatatccaccagaacttcccacttcccaacttctgcatggatggggatgtccaatcaaacccaagaaacaatcttccatttgcctctaatcttgatggattaacacctgatacttttctctcaagagggtatgattctcaaaaggatcttcaaaacttgctgtctaattatggtggtgctccaagagacattgaaactgagctgtccactgctgctcttagtccacagccgtttggggtgccaggcattccttttaagcctggatgctcaagtgatattgccatcaatgatcctggggttttgaataatggcttgtgggctaatcagactcaacgaatgcgaacatatactaaggttcaaaaatgtggctctgttggaagatgtattgatgtcacccgttacaaggggtatgatgaactccggcatgatttggctcggatgtttgggattgaagggcagctagaagatcctcaaaggactgagtggaaactagtatatgtcgatcatgaaaatgacattcttcttgttggtgatgacccttgggaagaatttgtaagctgtgtccagagcataaagatattgtcatctgctgaggtacagaaaatgagcttggatggggatttaggtcatgttccagtccccaatcaagcttgtagtggaacagataacggcaatgcatggaggggacagtatgaggataactcggcagcctcatttaatcgataaagatgtcattttggagcagtcaacttgtatattttgagacatggaggactaacttaacccttaaaatttcttgttggtgcttctatatatcactagtggaaaggagacatattcattgcaacttgtaagagatgcagttgatggggtagtgtagaagagggttgatacatggctgcatccggttcaatgtcaacacgtttttaatggtagagaagttagatccctagatgtaccaaaaccagattcctttactaaaatgatgcagattctatcttgggatctgcttttcttgtggctgctattgcatgctcaggaatcttttttctttcattttggcaaggtacagccatataggtcagctggtgtataatatatatgattgttattataaagaaaacgctttacttacaattctgtaaatcttgtggttgttaaaatagttaggtaaccaagtagtgacagtaagaatcaacagtacatgccaattctagcttttgtacaagtgcccacgatgttctcatggtggaaactatggagaagtttattatggatgaaagaaaattcagttctttttcaccattttgcagttttgggt

SEQ ID NO: 28114 - DNA, 936 bp, Glycine max
  Clone ID: TF_GmC11115_2
gacaaaagaaaagagttagtcatagcagcaaacagggaggaaaaggcacgtacacgaccaccgtttagctgtgtttgaagttcgaacgttgaaattaattgagctgcgcctgcgcgtgtcactgtttgagagcacacaaacaatgtcctccgaatcacacgccgttgattgtaacttgaaggagacggagctcaccttaggccttcccggcaccaaaactactgccacaaaacgtggcttctctgatacccttcctccttctcaaaataaaatcttgcgccccacctccaaattcccaacacccaacagggaacaactggtggggtggccgccggtgagggcaagcaggaagaatgctatgaagagctgttgcaagttggtgaaggtggcggtggatggagctccttatctaagaaaagtggatcttgacatgtacgatagttatgagcatttgatgagggaattagagacaatgttttgtggcttagccattcgtaatcatttgatgaatgagaggaaactgatggatcctggaaatgggattgaatacatgcccacctatgaggacaaagatggtgactggatgttggtcggggatgtaccctggaaaatgtttgttgaatcatgcaagaggataagacttatgattagctcagaggccgttggtttaggtccgaggtctacttcttcaaaatgtacgggttccacttagctagctagaagtgtgtaataatcataataagctgatagataagcattccgtggataccatcaacatgtaaaagctccggttagaacttagaagagtgaatttagtttaaggaaatatccatggtgcttgatgtacatgtccctttagcacctctggttaagtagttactttaaatgaagaactagaacaaagactggtctctatattaactagtgatctaaaaa

SEQ ID NO: 28115 - DNA, 1020 bp, Glycine max
  Clone ID: TF_GmC573_12
aagatcatcacatttaggtgattattattggagatgagataaaatggaatcatgcttctcaccactgttacttttcagggataactgaaggtgatcatcattttagatattattataagaagttcatcaaataattgatcagaaatattcgatggggagctttgaaactgagctgaatcttaaggccacagagttgaggttgggattacccggctgtgatgaaactcatgacaaaagttcatccagtagtggatctgttgttagaagcaacaagagatcttcaccagaacccagtgtggaagagtccaggtgcaactctaatggttcttcagattctaccaccacaagtgatcatgatgaagacagtgtccaacctgcaaaggtacaagtagtggggtggccaccaattagatcttttaggaagaacagtctgcaacaacagaagaaggtggagcagcagggtgatggaagtggaacgtatttgaaagtgagcatggctggtgcaccttacttgaggaagatagatctgaaggtttacaatagctacccagaactcctcatggccttgcaaaatttgttcaagtgcacatttggtgaatattcagagagggaaggttacaatggatctgaatacgctcctacttatgaagacaaggatggtgactggatgctggttggagatgttccatggaacatgtttgtatcctcctgcaagaggctgaaaataatcaaaggatcagaagcaaaggggttgggttgtttgtgaccaacaaaacttgcaaaagcaaatcaaatcaaaatagtcacatgaggtcttcaaagacaaataccctttgtgttgtgcaagcaaatacatggtgtttatgagaactcatatatatatatatatatatatatatatatatatatatatatattaggaaaatagatggatattatctatgtatacattatttttgctttattaatttcagcagaggcggctttgaggtctgctttctaaattatatgtaatcctct

SEQ ID NO: 28116 - DNA, 1327 bp, Glycine max
  Clone ID: TF_GmC573_4
ctctttacctaattatatatatatatacacatctttctctctttctcagaaatcagaattgagcaagcgattggatttggataactgaaggtgatcatcattttagatattattataagaagttcatcaaataattgatcagaaatattcgatggggagctttgaaactgagctgaatcttaaggccacagagttgaggttgggattacccggctgtgatgaaactcatgacaaaagttcatccagtagtggatctgttgttagaagcaacaagagatcttcaccagaacccagtgtggaagagtccaggtgcaactctaatggttcttcagattctaccaccacaagtgatcatgatgaagacagtgtccaacctgcaaaggtacaagtagtggggtggccaccaattagatcttttaggaagaacagtctgcaacaacagaagaaggtggagcagcagggtgatggaagtggaacgtatttgaaagtgagcatggctggtgcaccttacttgaggaagatagatctgaaggtttacaatagctacccagaactcctcatggccttgcaaaatttgttcaagtgcacatttggtgaatattcagagagggaaggttacaatggatctgaatacgctcctacttatgaagacaaggatggtgactggatgctggttggagatgttccatggaacatgtttgtatcctcctgcaagaggctgaaaataatcaaaggatcagaagcaaaggggttgggttgtttgtgaccaacaaaacttgcaaaagcaaatcaaatcaaaatagtcacatgaggtcttcaaagacaaataccctttgtgttgtgcaagcaaatacatggtgtttatgagaactcatatatatatatatatatatatatatattaggaaaatagatggatattatctatgtatacattatttttgctttattaatttcagcagaggcggctttgaggtctgctttctaaattatatgtaatcctctaaaaaagaaagagaaagaaaatataagaaaagctaatgctatttcaattgtacagatcaaaaatataataataataataatctcactttgtcttaaaaaaagataggaaacgcatggaggaggacaaggccaaaaaagcagctgacatgcagaaggctaacgataacacatctgcacctgctgatgaagatgatatggacccaactcaataccttgagaataggctaaagtatattgcaggtcataaggcagaggggaataacctctatcctgacaaattctatgtcactatgtcttttgatcaatacatcaaggaatatgga

SEQ ID NO: 28117 - DNA, 713 bp, Glycine max
  Clone ID: TF_GmC183_5
gcatggatggggctccctatctgaggaaggtagatctaccaaattatacaacgtaccgggaactgtcttctgcacttgagaaaatgttcagctgtttcactctaggtcaatgtggttcccatggagctccaggaagagaaatgttgagtgagagcaagctgaaggacctcctgcacggttcggaatatgtactcacttatgaagataaagatggtgactggatgcttgttggagatgtaccatgggatatgttcatcgacacatgcaaacgactgaaaatcatgaagggttctgatgctattggcttagctcccagggccatggaaaaatccaggagcaggtgctagttggtattggaactgttgacttcgttttgtttactaaggtgaagttgctggagatattatgagggtgtggaaagagaaattatgatataaatgactgaatgctgggttttgatggttaactgctattcaagatgttgtctatgattacaagtcccagaatagttcctggtcttttgcttgtgttacatttgtttctactataataccctatgaagctaccttgaatattagtaattgtggagtctgtaatctttataggaacctgtttgtttggataagttgaatgtatgttgcaatcagtgtattattgttctcagtgttttgctaaaaaaaaaaaaaaaaaaagcggccgctctagaggatcca

SEQ ID NO: 28118 - DNA, 1088 bp, Glycine max
  Clone ID: TF_GmC573_9
acctctaactatttatattcacatatttctctccttctcagaaatcagaattgagcaagcgggcgggagtggaatttgaaggttatcatcatcatttatagatattattattattataagaagttcatcagaaatattcaatggggagctttgaaactgaactgatgaatcttaaggccacagagttgaggttgggactgcccggctgtgatgaaactaatgagaaaagttcatccagtagtggatctgttgttagaagcaacaagagatcttcaccagaacccagtgtggaagagtccaggtgcaactctaatggttcttcagattctaccaccacaagtgatcatgatcaagacagtgcccaacctgaaaaggtacaagtagtggggtggccaccaattagatcttttaggaagaacagtctgcaacaacagaagaaggtggagcagctgcagggtgatggaggtggaatgtacgtgaaagtgagcatggctggtgcaccttacttgaggaagatagatctcaaggtttacaatagctacccagaactcctcgcagccttgcaaagtttgttcacgtgcacatttggtgaatattcagagagggaaggttacaatggatctgaatacgctccaacttatgaagacaaggatggtgactggatgcttgttggagatgttccatggaacatgtttgtatcctcctgcaagaggctgaagataatcaaaggatcagaagcaaagggtttgggttgtttgtgaccaacaaaacttacaaaagcaaaagcaagatagtcatgagatcttcagagacaaataccctttgtgttgtgcaagcaagtacatggtgttttatgagaactcatatatagtttattataggaaaatagatgaatatatatatacacgttattttttctttattaatttcaacagaggcggctttgaggtctgctttctaaattatatgtaatattcctctcaaaaagaaagagaaagaaaatataagaaaagttaatgctatttcaattgtacagatcgtgaatataattataactaataataacaataataatatcattttgtcct

SEQ ID NO: 28119 - DNA, 1058 bp, Glycine max
  Clone ID: TF_GmC166_2
gtggttttggtaaagagaagagccattagtttctatcttcctcttcttcatccagttgaaaagaatcaaagcagaatccatcggaagaactcaatggcttctcagcctctaaagaatgatactgatgcagaagccaagtctggatgcctttatgttaaagtcagcatggaaggcgccccatacttgaggaaagtggatctgaatagttttaccacttacaaggacctctctttggcacttgaaaagatgtttagttgttttacactcagtcaatgtggctcttatggggtttctagtcgagaaaatttaagtgaaagtagattgatggatctccttcatggttcagaatatgttcttacctatgaagacaaggacggagattggatgctagttggtgatgttccgtgggagatgttcactgagtcttgcaagaggctgaggataatgaagagttttgaagcaattgggctagcacctagagccatggaaaagtgcaaaagtcgtaactagtgccaatgctgtatgcttttgtcttctaatccggaaagatggaagatcacatttaagcatataataccttgtttcttacctataattctatatacgagattggggtgtcctaaactttagtgggaaagatatattgatgacagcatattagttttgttgtagtagcggtctatatcattgatgtagacgtttaaggtttaaggttttaggttttaggttgttctcccacacttcaattactgccatcatggcttaccgtagtttgtaaattttgcatttctgtaagcgagcattttgtttgtcatggcaagccaagaaaagaaatatcatactttctttatgtgtccaaataaaaaaaaaatataaaaaaaaaaaattattaaaaaaatttaataatataaaataaaaattataataataaaatatcccctattaaaataataataataatatattttatttattaattatataattttggggggcccccctttaaagtatcctaattatttttcccgtccctgcacctgtttattttttttttttgg

SEQ ID NO: 28120 - DNA, 664 bp, Glycine max
  Clone ID: TF_uC-gmflLIB3275P149e01a1
gttctaggtttctttctcatcatatatgtgatatagattttttgtcctgaaaatctcaacaatcctctacgaaataataacgatgtttttgaaagtgaaacagacaatacagtatatattgattcagatatgcaaggtcgaaaagtagtgttcaaacagaagtactaaacatgtggatatgtaatagtcttcttaaccgtaggacctgagagaaaaatacatgttaaaattctctcagtattcaagggagccaattgatggtagtcctgaaacaatttcatgagaatctgcaccagtgctattcagcctctgtcctggacttggaccaagggattccagggcttgttctcccattttatggatatcttcaggtgaaagtattttgatataccatacattattgacaaatgatctacaaaaaggttatgcaggaaatccacgcaccaaaaagaaacaaacaaatgtcagcaaaacttagccaagtaaaatgaacaagtatagcatgtttacttatttgaaggtttggagatagaatgccaaatgtatttattagatcacaagttgatttaacaagactttatattgtaagttgaagttgaacttactcccacggatcgtctccaaggagaagaacatcgttctccctgtcgacgaatacaagctg

SEQ ID NO: 28121 - DNA, 1081 bp, Glycine max
  Clone ID: TF_GmC166_4
attcaggtcaatgtggctcttatggggtttctagtcgagaaaatttaagtgaaagtagattgatggatctccttcatggttcagaatatgttcttacctatgaagacaaggacggagattggatgctagttggtgatgttccgtgggagatgttcactgagtcttgcaagaggctgaggataatgaagagttttgaagcaattgggctaggtaggtccaacgttcgttttaattaatctgttatactctgctttccttcgtttatatagttgtagaattgagaaaacaggaaactcatcaatcaaactggaaaacagaatcctggtttggtaaacacaattgtactccatagttaatgctttgactttagtttcatgtttctttaattttattagttagttatttataatgtttttttagggcgagttatatataacattaaattgatatattgtcttaaaaaaaatagattaatatggtcttgttgcatatattattggtcttgatgatgatgtttggttcagatccaaataaatatctccatgataatttgaagttgggaaaggggtaaagataaaacggtctccatttacacccttgtccagaattgctaccatagaatttggtctctatatttcttgttttttttttttcttttttgaaagctttattatgacactcatctaaatttgtgatcattgcagcacctagagccatggaaaagtgcaaaagtcgtaactagtgccaatgctgtatgcttttgtcttctaatccggaaagatggaagatcacatttaagcatataataccttgtttcttacctataattctatatacgagattggggtgtcctaaactttagtgggaaagatatattgatgacagcatattagttttgttgtagtagcggtctatatcattgatgtagacgtttaaggtttaaggttttaggttttaggttgttctcccacacttcaattactgccatcatggcttaccgtagtttgtaaattttgcatttctgtaagcgagcattttgtttgtcatggcaagccaagaaaagaaatatcatactttcttt

SEQ ID NO: 28122 - DNA, 1944 bp, Glycine max
  Clone ID: TF_GmC590_1
gcgtgagatgactcccacacatcaccaaaatagttttctctaaccaaccatacagtactcctcactagctataccctggttaatccatggagaaagaagctgttggccttgaaatcactactgagctaaggttgggccttcccggtggggaattacctgacaagaacgagaagataaagaagagggtgttctccgagattcaagctcatgatgatgatgaaaacagttcctccgaacaagaccgcaaaatccaaaccaagaatcaagtggtggggtggcctccggtgtgttcgtaccgcaagaagaacaccgtcaatgaaaccaaaatgtacgtcaaagttagcatggacggggctcctttcttgcgtaaaattgatatagctatgcacaagggatattcggagctggtcttggccttggagaagttcttcggttgctatggaattcgcgaagcgttgaaggatgcggagaatgctgaacacgttcccatatacgaggacaaagatggtgactggatgctcgttggagatgtcccttgggagatgtttattgagtcatgcaagaggttgaggattatgaagagatcagatgcaaagggcttcgatctgcagccaaagaagggtctttaaaaggatttatagaacgagtgacaatctgtttgatatcaaaaagatctttgaagtgattcatagatcactgggcacacttaacctctcttttttttccattcactttctctctctctatatatataaagccctttctattccatattcctaacaattcaattcattcatccttcactactacaccaaattaatagaaattaaagatatatcattccacaacacaaattaaagttagtgagacgtacccttattatggccaaagaaggtcttggacttgaaatcactgagctaaggttgggtctacctgatgcggagcatcaagtaagtgtagtcaataagaaaaatgagaagaagagggcattctcggaaattgatgatggtgttggagatgaaaatagctcctccggcggaggcgaccggaaaatggagacgaataagagtcaagtggtggggtggcctccggtgtgctcttaccggaagaagaacagcatgaacgaaggtgcttcaaagatgtacgtgaaggttagcatggacggtgctcctttcttgcgtaaaattgatttgggtctgcataagggctactcagatttagctttggctttggacaagctctttggttgctatggaatggtggaggcgttgaaaaatgcagacaattctgaacacgttcccatttatgaggacaaagatggtgattggatgcttgttggagatgtcccttgggaaatgtttatggagtcatgcaagaggctgaggattatgaagaaatcagatgcgaagggcttcggtttgcaaccaaaaggatctttaaagggattcatagaaagcgcggcaaagtgaaagattatgttaggcttctaattaatgtcgtgcacattttgcgatcatcaatccaagtttatgtgttatcgttttcttatatttgaggaaaaacatgcatttttagtttgatatatgaattatcagacttttgtttatgtcaagttattaatgaatgacatataggaccctatataaataatagggaaaactcgtcgttttagattaattaatgctttgccataaatgtttgtttatttgcattcaattgcagtacaagttattgtatcagtatactgttttattactgatatttcaatttgttaattacttcacctaaactctcctttttttccttttcctttttaaatagttgatatagtaaaccgccatatcaagttattcacgtaaaaagagactaaagtaaagaatttaaataataatgagaaaaatacaagtatgttttattttatttcttataatatatagcattgct

SEQ ID NO: 28123 - DNA, 750 bp, Glycine max
  Clone ID: TF_GmC1129_2
tttttgtaggactactattttttccaattagtaagtggatgctgtctactgtctaggactattactattactctaattttatacggtgatggatgtggtgtaaagaattttgacaggttcacaagtcagggtcctttggcaggtcactggacatttccaagttcagcagctatgatgagctgattagtgagcttgctcgcatgtttggccttgaaggccaactagaggaccctaagactcagagatcaggctggcagcttgtatttgttgaccgggagaatgatgttcttcttcttggtgatgatccttggcaggagtttgtgaacaatgtgtggtacataaaaatactatctccactagaagtgcaacaaatgggcaaagttcttagtccttctacttctgccccaggtgacaaactttctactcctgtcaactcctgtgataattatgtgagtcaacaagagttgagaagttcgagaaacggcatggcatcaatggggtcttttcactactaggacactctcccagtcccatgtaaggtatattagttgaaaaattatggtggcagaattttatgttacaagtttcttatgtatggattggcccagcattcttatacacattaatggttgagatgtagtgatttagcaaggtctaaatagatcaacagcaaatgactgtaaattataataggtgaccctgtttctgtaatggttagttgcttatagcagttattaattattatctctt

SEQ ID NO: 28124 - DNA, 459 bp, Glycine max
  Clone ID: TF_jC-gmXLIB3563P059be05d1
ctctgaataaacaaattgcaatccattgttattgaacaatatactgccacaatacctcatagtgcagttgtttgcaaatatacaagcacggcatagcgttaatacatctaagacgacgtttaatcctaattacgcagatagggtgcaatatgaaagccatgcgtacttgacctatacaaaagtatgattaatctgtcaaacgcacgttgcttgaattcttaagtgtactataacgtcaacatactcttggatagatgatcgacatattgtgtagaatcttaactagaagagtaatattatgtaagaatgtgacatgctttatatgaatcccttgaagatcgatgctggagcgaacggctacccttgacaaaggacctgttcataatactgagcctctagcataactccataaacatgtcccaagggacatttgcaacgggcatccaatcaccatttttg

SEQ ID NO: 28125 - DNA, 523 bp, Glycine max
  Clone ID: TF_jC-gmro02910066g04a1
ggctcgagccacattggatggatatgatcaacttgtagatgaattggagaagatgtttgacataaagggacagcttcaacacaggaataagtgggaaactgtcttcactgatgatgaaggggatatgatgcttgttggtgatgatccatggcctgaattctgcaatatggtgaaaagaatcttcatttgttcaagccaggatgtgcacaaattgagctcagggagcaaactacctatctcttctatgggagagattgtaataagcttaaacacaaccgagacctgaaacttttacattcttgttcttactattttgatggatttttttcttttatttttctgatgcttttattgtgcttattcaaggtaagaatgttagtttgtttttggctaggcaagtttcatgctagttgtgaaacactggctaattgtagctcaatttagagattctagatactaattaggttccaaagactaaattaaatattttaatacattagttttgagaggtgaaaaacaaaca

SEQ ID NO: 28126 - DNA, 591 bp, Glycine max
  Clone ID: TF_GmC590_2
aaaatgtacgtcaaagttagcatggacggggctcctttaccggtccggattcccgggtctacccacgcgtccgattcggagctggtcttggccttggagaagttcttcggttgctatggaattcgcgaagcgttgaaggatgcggagaatgctgaacacgttcccatatacgaggacaaagatggtgactggatgctcgttggagatgtcccttgggagatgtttattgagtcatgcaagaggttgaggattatgaagagatcagatgcaaagggcttcgatctgcaaccaaaagggtctttaaaaggatttatagaaggcgtaacaaaatgaaaaatatagatgaagcaaaaaagattggcttctaatcaatgtcgtacacgttttgaagacatccaatttcatgttgtcgttttattatatttgaggaagaagaaacattttatagtatggtgcatgaatcagatttctgtctatgttaagacctaagaatgaaggaaatatacagaagtcagtttaattaaatatagggaaacctcatcgttttagtaaatggtttgtcatatttgttgatatgctgcacatttcagc

SEQ ID NO: 28127 - DNA, 1121 bp, Glycine max
  Clone ID: TF_GmC613_1
gagcagtccggcaagcgacttgccatcgagcctcgcaatgccactgcatcgtcgccatttgctcttcctgaaggcgccagagaagggcggccacagacacccaacgctcaaaatggcagtgcattgccacccttcccgggtcgggagtggacaatagaaggaagcaatgatccacaaattcaccgttggtttgagttcccatatagagccctcatcacttctaatgcataatgggatgtcaagtcttaagggagttagcagcaacagtgactcacccacaataccttttcaatcatctaattacctgaacaccacagtacctgattcttcattgaatcctggaatgacacacaatattggtgaatcgggcttcctgcaaactccagaaaatggggggcaaggaaacccaactaacaaaacctttgtgaaggtttacaagtcagggtcctttggaagatccttggacatcactaaattcaccagctaccctgagctacgcagtgagcttgctcgtatgtttggcctggaaggtgagttggaggaccctgtgagatcaggctggcagcttgtattcgttgaccaagagaatgacgttcttctccttggtgatggcccgtggccggaatttgtaaatagtgtagggtgcatcaagatactttcccctcaggaagtgcagcaaatgggcaacaatggccttgagcttcttaactctgtccccattcagaggctctctaacggcgtctgtgacgactacgcaggccgtgaggacccaagaaatttaagcactgggataacaattgtggggtctttaaactactgaatgatgtgacaatcaatactatgaatctcttctctctcttgtattattactcctacttctccactctttgtcaatggtgggatgtactgcctagttgtagtttataggctacttataagccttttgttttttttgtctgttttcctgttttttgctgcctaggaccattcataagataaacaatgtaaaccatatggcatcttgtcaatgtgctatctacaatatattgattacttaatctgtgtttggctaggagttcaatgcccgaagactgaagagcaaacggacaaaagtgaactga

SEQ ID NO: 28128 - DNA, 1422 bp, Glycine max
  Clone ID: TF_GmC519_2
gaccaacatctgctgcttctgttttctgggatgctggtcttcaacaggctgacatggcacaaaaaaatgttttggcagaaagcaaacggaatgacagtactggtacatggcatcatatgcaaactgacatgaatagtaaaagcaacagcggcaatgctatgttaaggaatcagacagaaggaagttggctatcttctccgcattctagttgtccgtctcatttgtttcaggacgcaacagatgatagcaagagtgtctcagcctggcctgtttcaaagcctcactcatccagattgaacaatgatcacgtgcttgaccaagttgacaaggagagcaaagttgagactgctacaagttatcggttgtttggaattgatcttattgatcattctaggaactctccttcagtagagaaggcatctgcacaagcaggaaatgcacccaaagttactactgaaggctgcaccagtaccttgacccgaactgatgctggccatctgtcggatgtaccaatggcttcttccaaggagaggaaacaagaacagcagcaagtatcaccaaaagagactcagagcaagcaaatttgtagaagtcgaaccaaggttcaaatgcaaggtgttgcagtgggtcgtgctgtcgatttgaccatgttggatggatatgatcaacttataaatgaattggaggagatgtttgacataaaggcacaacttcaacaccggaataagtgggaaattgtcttcactgacgatgaaggtgacatgatgcttgttggagatgatccatggcctgaattctgtaatatggtgagaagaatcttcatttgttccagccaggatgtgaagaagatgagttgtggaagcaaactgccgatctcctcagtggaagacgggactgtaataagctcagacacaaccgaaacctgaaacttttgacattctttcctgtggttttgcgtttgtttgtcagcagcacccaaatgctgatccttcttgttgcttcaaattgtttgtgggaaggaagttggtctatttgggctggggtaagtttcatgttatcagatgtgagacactagctaattgtaacttaatttgtagagacaccaccaccaggcattaattgtgctagaaaaaaaaagacctaaacagatttctttaataaattagtaagtgggaagatggcaaatttaggcttagtatatgtgaatattcatgtcaagttggaagaagaatgttgggggttttgatgttttgaaagacttgccttttttggttaaggggcttattcattggtgctttgtatgcatataatgtgcactttgttattaccctctaaaaattctaatattggtgagtcaatgtctgttgctgtcatcagtgaatgtaaattatggcattaaattgcttcaattgtaatgttcag

SEQ ID NO: 28129 - DNA, 1702 bp, Glycine max
  unsure (1)..(1702): unsure at all n locations
  Clone ID: TF_GmC630_3
cacaccacaaccttcttcttcttcttcttcaacttctggttcaaaacctcaacagtttgttgaattgcgcgttgaaatacgactcaatattctttcgcgagctctgttctcacttcaaaggttaggttcttcgacagtttctttgtttccactccgtcgcttgctgagaaggcgtgagcgagagttgtagaattacgcaacgagtgtcgcggatgagagatctgtggtgaggtctctggaccatgaaaaggtgttacaaacttctcagacacatctgaaagatattcaagcaaaatctcatagtggttctgctagaagttgcactaaagttcacaagaaggggattgcgctcggtaggtcagtggacctcacaaaattcagtgattatggggaattaattgctgaattagatcaactattcgaatttggaggtttattaacttctccacaaaaggattggcttattgtctacactgataatgagggagatatgatgcttgttggtgatgatccgtggcagtaaggatatctaacaatgacatatgtgattattctgtaatggtaaaaaaaaatcttgacaatgacaattcgtttgcataattctatttttaaatcagggaatttgttgcaatggttcgcaaaatttatatctaccccaaagaggagattcagaaaatgagcccgggtaccttgagttcaaagaatgaagagaatcaatctgctagtgaaggtgccacagacacacaagaaatcaagtgtcagctcaataattcagcttcagatacctgataatttgtagatttgatttccatagcttccagattccggactggagtggaaagtaggtgactgtcataaagccatccagttggagaatatgacctgatgaagaaaattctaattctgaatctgactgctttatcaagtgactgcttgtgtttggaatctgaatatggatggcatgaatgagtatccatccaattttggaccgtgtcgtggaattagtagtagtagtagtagtatatatatatgccttccctgttatacactcctaatatagtcgtatgttattgtgccttgtgcaaggtgatagggggtgtatcggccttgcatttttcaacattcctaccttgtacatagttttactcgcatccttagtacccaaactcgttaatgtaattaagtgtcatatacaagggcggtttatctgattttaaatatgattgtctcttattttagtggggtaatttgtgccagtatgcctaatcattgtggatattaaaatattagtatgcgtttgggtagtagatgtattattaaattttgcctctaagtcttggcatgtgccttgcagccttggtgtttgcgaatgagtccattaccgccatatcttgtcccagggttttcgaaccagcggcgtagttgaagtcatgtaacgagtgaagaaagtggacacttggggtctctggaaaaccgatggtttgaaaattccttggtgaaatgtatttgtggtttatcgttgcgatgacactgctagttgtggtgtagtcatctctctctgggatatgtgtagcgtggttacgtgatagaacttcattctttgaaagcaccatcgttgaatgtccaataatggtttttgaaaaataaataaattgattgtacttttctgctagagaaaaaaaannnaaannnnnnnnaaaag

SEQ ID NO: 28130 - DNA, 1075 bp, Glycine max
  Clone ID: TF_GmC1600_1
gagaaggcccttcaattcaatgtctaaagatgacaactctcacgcgttcgtttcgcctcgtgaagaccttcgaagggggagacaagagcagagaagccgcttcaatgtctaaagatgacaactcttcttctcaggattcttcatctgaccttgaattttctctctccctatgcccccgctaattcctccttcacttctcttcccattaccgctcccagtcaagttgttggatggcctccccttggagcatatagaatgaacagctataatagccatgcaaaatcaccagccacagaagtattcaattctacacttgacaaaagagcaagcaatagtgctggggttaggaagagtgcagatggtggcagtgatagtagcaacattatttccaaagaaaaaggaaacctcaggacttccctgtttgtgaaagtaaaaatggacgggataccaatcggaaggaaggttgatttgggtgctcacgattcttatgaaaccttagctcaaaccttggaggatatgtttgatgaatcaactacagtcctcactcacaaagtaggatcaaatggagaagatcatggtactgaagttggaacagatgggcattcaaaattgctggatggttcttctgactttgtgctcacttatgaagacaaggaaggagactgggtgcttgttggagatgttccttggtgttactttgcagctccaagattggaagaaaagaacagaagatcgaatacaagctcatatagataatgtttgcacctttacatgttaggatacacaaaacttatgatctaaaatgtacaacatgagttgaaggaatataaatgtgagaaaaaacagaaagagggaagttaattaatactgtgagtaacggatttttatttttaaatgatcaaacctcgcttttttgtttctggattcaattcaaatggtgtttgtttaatttctcttggtatatcacttgaaaggcacaggccccataaattttcatgtaatgtttgtcatataagggattgctgtttgttaataatgtaaatgtaaatatgagatgtatgctagctttcttact

SEQ ID NO: 28131 - DNA, 936 bp, Glycine max
  Clone ID: TF_GmC1199_3
tccaccacctcctcctccaaagaagaaaccatactactatcactccccaccacctcctcaccctatacctcacccccacccactattattattgtactacaacacaatcaagtccctgaatgctttttagagagagaaagagtcataataaagtgaaagaaaaagaaaaaggagagtagtgaaacaagaagaaaggagaagaagatggtgtttgaggaaactgagctgaggcttggactgagactaggactgcctggaaatggagccgcgccaacaactgaagctgctgcggaattaggagtgaggaagagagggttctctgaaactgaaaccgatgaaacaacctccgttgatttgatgcttaacctctctcccaaggaagcttctgctgctgctactactgatggagcagatccacgtgagaatccaaagacttcgccgaaggagaagaatcttcctcttctcgatcccgcaaagcctcctgccaaggcgcaagtggtgggatggccacctgtaaggtctttccggaagaacatgtttgcagcccaaaagagcagcggcggagaggaaagcgagaagaacagccctaatgcaagctttgtcaaagttagcatggatggagcaccttacctccgcaaagttgacttgaagatgtacaagagttaccctgagctctctgatgccttgggcaaaatgtttagctccttcaccattggaaattgtgaatcccaaggcttcaaggatttcatgaatgagagcaagttgatggatcttctgaacagctccgactatgtcccgacctatgaagacagggatggcgactggatgcttgtcggtgatgtgccatgggagatgtttgttgaatcatgcaagcgtttacgtatcatgaaaggaaaggaagcttttggactggcaccaagaaccggggaaaaatgc

SEQ ID NO: 28132 - DNA, 937 bp, Glycine max
  Clone ID: TF_GmC630_8
tcaagagagcttatgtcaaaacaagtgtcagcaaaaacttgtgaggctgtgaaaccaaaagatggtgactgtaagctatttggcttctcacttatcagtggccctactttaccagagccttctttatcacaaagaaatgtgagtgaggctgctgatcagatgcatcttacagcacaccaacaaagaacatctgaaaatgatgaaaagttagaccactcgaagggatcaagacctgtagatgatatagttgttgatgaccaggacagaccattacggacttctcagctgcatactaaagatgttcaagctaaacctctcagtggttctgctaggagttgcactaaagtaagatccttcactatttgattgaaaaatgagagctagaagtttactgggaaaattaaccacatggtatttgttttaggttcacaagaagggcattgcacttggtagatcagtggaccttacaaagtacagtggctatgatgaattagttgctgaattggatcagctgtttgaatttgggggtgaattattgtcaactaaaaaagattggcttatcgtctttactgataatgagggtgatatgatgcttgtaggcgatgatccatggcagtaaggatctgtattttaattatacatccttggttaactttctatttaaatatcttacttttccttgagaatgggacataatttatataattctatattttcaattcagggaattctgtgccatggttcgcaaaatttatatctaccctaaagaggagatccagaaaatgagcccaggtaccttgagctcgaaaaatgaagagaatcattcgtgacggctagtgaaggtgcagatcaaaagatgttaaatgtcagccgcatcaaaagttcaattcagaaaatggtcttgacgcctaatgattagtagattgattttcgtagc

SEQ ID NO: 28133 - DNA, 1881 bp, Glycine max
  Clone ID: TF_GmC1105_1
gcgaagttcggtggagattttgtctcacccgcgaacctgaatacaaaggcttgggggcaaagctagttcaggccttgaattcgcactctcttcacacactccccatggacttcacccaagacttgcactgtctcctatctgagcaacgccgcaagctcgccgccgcagaggccatggaattggacctcgacttcgccttccgcctccagttaaaggaagccctcgcggcctccctcgccgcccagccctcctcctcctccgccgccgccgccgcgatcatcgaacaacccgtcgtcgtcatccacgatgacgacgtcaacgccatgacgctgcagcgcgaggagctggcgcgtatggagcgcgagatgaaggaccgggagcagagcgaggcggagacgcttaaaatgagagaggaactctgccgtcggatccacgacgagaaggtggcgagggagatttccgcgattcccgagaaggactggcagcagtggggagacaacttcgagaaaccattcggagagggctcgtcgtcttcgtcgctgagtagagaggaaggcgtggttagggtttacttcaagggtttggtgagcgaggaaaacgtgaggggacggaaggtcgtgttgtctgggattggggttgcgatttgcgaccttagcgataatttgatattcgaggtttctaagtcgctcattggaaatggcactagcaaggtcgctgcggagattaaggctttgatcgaggctttcaatgccgccattgctttggacttgaagcgcgtcgtttattgctgcgattattatccccttttccaattcgtgagtggaaaatggcctgcaaaacagcggaagattgctattttggttgatcaagtgaatctgcttcaaaggaagttttcatactgcaatccaaggtttgtggccagacatgatgtcaagtttgcatttaagcttgcaagagatgcaattgaatctcagtccacaagacttgcagaatctgggagtaggagtttgaatgaaacttgtgtcatatgtttggaggaaactgatgttggtcagattttttcagttgatggctgtcaacaccgctattgcttctcatgcatgaaacagcatgtggaggtgaagttgcttcatggaatggtgccaaagtgccctcatcaggggtgcaagtatgagctcctagttgacagctgccagaagttcttgactcaaaagttaaccgagaccatgcagcaacgaaaattggaagcttcaattcctgttgctgaaaaaatttattgtccttatcctacgtgctctgcattaatgtcaaaaactgaggtcttagagtactccaaagatatcactggtcaatctgaacaatctgaacccaagatatgcctaaaatgtcgtggccttttctgttttaactgcaaggtcccttggcatagtggtatgacatgtaatacttacaaaaggatgaatcctattcctcctgcagaagatttgaagctgaagtttctggcatcaaggagcctatggcaacagtgtctgaagtgtaaccatatgattgaacttgctgaaggttgctatcacatgacttgcagatgcggttacgaattttgctataactgtggagcagagtggaaggacaaaaaagcaacatgtgcttgccctctttgggccgaggagaatatttggttagatgatcatgaggaagagttggaagaagaagaagaagatgatgatgatgattatgatgattataggtctgattatcctgatgattattattattaagtatctggccgcttgaccaggttgacggttttacaactagtaaatattcatattcatatatctatatatatgtaagcaaaatgtgattgtcttttaatttcaa

SEQ ID NO: 28134 - DNA, 619 bp, Glycine max
  Clone ID: TF_LIB4390-059-R1-K1-G3
gatcgaggaaaacaatatcagagaagctgagtgtcctaactgtaggaggcttttctgtgcgcagtgtagggtgccctggcacgataatatgccctgcgaggactttcagaagctgaacgcggacgagagggataaggaggatatcatgctgatgaacctcgccaatcaaatgcagtggaagaggtgcccccggtgtaggttctacgtcgccaaatcggatggatgcatgtacatgaaatgcaggggaaagacgcagaagcagctgcttttgctgatccactatcgaaaggtagccagtgtttactaaatacccactggtgtggaaacgccttctgttacaactgtggagctcccaacttaaccagctcccatagttgcagctattgttttcgttaatgatattatggaaccaaaagaggatttgaacaaattacttcatgcaaactacctaaactcatcccaaacaccccacacctagtgactttatttatgcattaacattattcagtatagcttataactatttagccttttcaagtatgagaacaatttcaaaatctgtttgcagtatatgactttatgaatgcataataatggctatgtatctttagccgcaaaa

SEQ ID NO: 28135 - DNA, 5516 bp, Glycine max
  Clone ID: TF_GmC23542_1
atgaagaaatcctcctaccctaatcccacccctcgccgccacgattttcaccgtccgccaccacccacccacggctgcggttgggctccccgccccgcctaccaccgcccctaccaccaatggaggccccgattccacccccacgccgcccgcatcgaccgccctccggagccctatttcagggtggagctccgcctcggcagcagccccctccaccgcgacgatgtcgaggccctgagcgacgaatgccactcccggtacgacaccttcactttctaccccgtcgacgacgtcgccgccgttctcagttaccggagctgggagcaggcgcgagacgccgtcgtttggttctgggaggcgcggctcgccgagaagcacgattccactcggacgctggattccaacgtcgtcgtagtcaaggacgatgtggattgtcgccttcgaccggtgttcgcgaggcacgtgaaagggttgacggaagggaaggagctgaagcggttgatggaggagagtggacggtggtcgagagaaatttctcggtttttgaattcgcggagtaagcccttgctacgtggggtgcgcatcgagttggtggagtaatgaaaagggttagtaggtgagaagaatcttgttgacaggaatttaaaggggtttgagcctgcgatgcagtgtttattgaagtatttggagggtggtgttgacgtggagggtgtgactgtctttaggtttgatggaggttttgattggaagcggattcattgttcgatcaatcatgagtgtgagagacttgaggatggacccagttgcccaatttgcttgtgcgaggttgaggatggataccggcttgaaggctgtggccatttgttctgccggatgtgtttggttgagcaatttgaatctgctattaaaaaccaaggcactttcccggtatgttgtactcacagggactgtggagatcccatcctgcttacagatttgagatctcttttatttggtgataagttggaggatcttttcagggcttctttgggagcttttgtggcaacaagtgggggaacttacaggttttgcccttctcctgactgcccctcaatttatcgagttgcagatcctgggtctgctgccgagccatttgtttgtagggcttgttattcagagacttgtaccaggtgccacttagagtatcatccttacctttcatgtgagagatacaaagaattcaaggaagatccggattcatctctgatagaatggtgcagagggaaagagtccaggaagaaagcattggatgttatgaaggccaatcaatcaaatgctgttctacattttcatcctcacgtgagtttgattccaggatagcattcatgacagatcattgtttattgcagcactacatgagtgataataatttatccggggtctcgtgcatcataattgatgaggctcatgagaggagcttaaatacagatttactgttgactttgttaaagagtttactttgtaggagggttgaaatgagacttatcattatgtctgctacagctgatgcaaagcagctgtctgattacttttttgcttgtggaatttttcgtgtgcttgggagaagctttccagtggatatcaaatatgttccttctgactatgcaggagattctggttctgctgttgttgcctcatatgtttctgatgttgtcagaatggcaactgaggttcacaaaactgagaaagagggaactattcttgcctttttgacctctcagatagaagtagaatgggcctgtgaaaagtttcaagctccctctgcagtagctttgcccttgcatggaaaactttcttctgatgagcaattccgtgtttttcagaactacactggaaagagaaaagtgatattttcaacaaatcttgcagagacatcacttacgattcctggtgttaggtatgtgatagattctgggctggttaaagacagcagatttgatcctggtagtgggatgaatgtacttaaggtttgctggatcagccagagctctgctgatcaacgggctggtcgtgctgggaggactgagcctggtgtgtgctatagactgtacacggaagctgattatcagtctatggacctaaatcaagagccggagattcggagagttcatcttggtgtagcagttctgaggatccttgctttaggagtgaaggatgtgcaaggttttgattttgtggatgctccaagtcctagctccatagatatggcaatcagaaatctaattcaattaggagccattgaactgaacaatgatgttcatgatttaacttctgaaggttggtgcttggtaagaatgggaattgaacctaggctgggtaaacttattcttggttgtttcaaacatggtttgggtagggaaggtatcatccttgctgctgtgatggccaatgctagtagcatcttttgcagagttggcaatgaatttgataaacaaagatctgattgtcttaaagtgcaattttgccattgtgatggtgacctctttactcttctctccgtgtacaaggaatgggaagctttgcctcgagaaaggaagaacaaatggtgttgggaaaacagtatcaatgccaaatccatgaggaggtgccaagacacaattttggagttagaaacttgccttgagcgtgaacatgacgttgttactccgagttactggcgttgggacccttgtatgccctctaatcatgataagaatttgaaaagggtaatactgttctcacttgctgagaatgtagccatgtactccggctgcaatcaacttggttatgaagtggcacaaactgggcaacatgttcaactacatccatcttgttcattgcttgtatttgctcagaaaccaagttgggtagtttttggtgagcttctttccatttccaatcaatatttggtctgtgtgagtgcatttgattttcaatcattatacgacctttgccctgctcccctgtttgatgtatccaaaatggaagagcggaagttgctaatgaagacactgtctggtcttggctgtattcttctcaagagattttgtggaaaagccaactgcaatttgcttgctcttgtttcacgtataaggaaagcttgtatggatgaacgcatcttcatcgaagtgaatgttgacaataatgaaatccacttatatgcctcttcaaatgatatggatatagcccttgggttggttaacgatgttctagaatatgagagaaagtggttacgcactgaatgtatggataagtttttgtatcatggttctggtttctctccacctgtagctttgtttgggtctggtgctgagataaaacatttggaacttgagaaacgttccttgagtgttgatgtgtgtcatccaaacataaatgaaattgatgacaaggagctcttgatgttttttgagaagaatacctctggttgcatctgtgctgtgcacaaattcacaggcaatacgagggatgaagatagggataagtggggcaggataacatttatgtccccagatattgtcagaagagctgctgagctagatggacgggagttttgtggctcatccttaaaagttgttccttcacagttgggaggggataaaacattttcgttccctgctgttaaagcaagaatttcttggcctcgtaggcttagcaggggatttgccatagttaaatgtgatataaaggacgttgattatatcttgagagatttctataaccttgcagtaggagggaggtatgttcgatgtgaagttggcaaaaagagtatggacagtgttgttataaatgggcttgacaaagagctttcggaagctgaaatatcagatgtgctaagaactgctacaactagaaggattttggattttttcttggtgagaggggaagcagttggaaatccaccatgcagtgctttggaagaggcactcctaaaagaaatttacccctttttgcccaaaaggaaccctcacattagtccttgccgagttcaggtgtttgcacctgagcccaaggatgctttcatgagagctttaatcacttttgatggaagattacatttagaggcagcaaaagctttggagcaaattgaaggaaaggtgttacctggatgtctttcatggcaaaagataaagtgccagcagttgtttcatagctcccttacatttcctactccagtgtatcgtgtgattaaggaacaactggatgaagtacttgcaagcttcaggaatttgaaaggtcttgaatgcaacctggacaggacatttaatggttctcaccgagtgaagataacagcgaacgccacaaggacagtggcagaagttagaagacctctggaagaactattgagagggaaaaccattgagcatgacagcctcacccctgtagttctccaactcatgttgtccagagatggctttagtcttaaaaactcattgcagcaagagactggaacttatattctttttgacaggcacaacttgaatttacgggtgtttggttccccaaacatggttgctttggctcaggagaaggtgatacagtccctcctttctctccatgaagaaaagcagttagaaattcatctgagagggagggatctacctcctgatttaatgaagcaaatgattaagaattttgggccagatctccatggattgaaagagagggtacctggggtagatcttacactgaacatacgtcgccacataatcattcttcatggtagcaaggagttgaaaccgagagtagaggaaatagtttttgagattgctcgttcaagccatcatttggttgagagatttggcaatggacccagttgcccaatttgcttgtgcgaggttgaggatggataccggcttgaaggctgtggccatttgttctgccggatgtgtttggttgagcaatttgaatctgctattaaaaaccaaggcactttcccggtatgttgtactcacagggactgtggagatcccatcctgcttacagatttgagatctcttttatttggtgataagttggaggatcttttcagggcttctttgggagcttttgtggcaacaagtgggggaacttacaggttttgcccttctcctgactgcccctcaatttatcgagttgcagatcctgggtctgctggcgagccatttgtttgtagggcttgttattcagagacttgtaccaggtgccacttagagtatcatccttacctttcatgtgagagatacaaagaattcaaggaagatccggattcatctctgatagaatggtgcagagggaaagaacaagttaagtgctgctcggcatgtggatatgtaattgagaaggtagatgggtgcaaccacgttgaatgcaagtgcggaaagcatgtctgctgggttgtgacttttctgctatgcaagctctacattatgtgttcaaaagcagttcaatacggttgtatttatccattaaatgagccggaagagagaattgattacaagtcgattagcacgaactag

SEQ ID NO: 28136 - DNA, 1145 bp, Glycine max
  unsure (1)..(1145): unsure at all n locations
  Clone ID: TF_GmC136999_1
tccagcccttcgtcccctcgccgcagcctcctccgcccccccaaccccccgtcccctcaccacaacaatttgggcccaccaaaccacccgaacttgcaatactgtgtcgccaacaagcccgaaccggctcaaatgcttgcagacctttgcccagatacatgtaaaggaaggcactgttagtaatcttaaatgtcctgaagcaaaatgtgcaattatgattccttctggccttttaaaacaattgctggatgacacagattatgagcgctgggaatccatgatgttggaaaaaacacttgcatcaatgtctgatgttgtttattgtccaaggtgtgaaacaccctgcatagaggatgaagaccagcatgctcaatgcccaaaatgttactttagcttttgtaccctttgcagggaacgacgccatgttggcatagcatgcatgagtctagatatgaagcttcagattttgcaggtatggtatttgaatccataatcagacaaatggtttagttgtcaacttgtcatagatcacaggcatgatttttatttttttttggtgaatacagaggcatgtattcttataaacaaaaaaaaaaaaataacatttggattgtgagggcctaagggaagaggaagagtgtaaaagggtcaatacgaataggatgtaaaagtgcctatgaatacatatgcctatgtaattgaaacacatcctattcgtattgacatttggattttggaagaggaagagtgtaaaagggtttaattttacggctgtaatcggagtaagtctgagtcaatctttttttaaaaaaaatattctcttcctcaaatgttacaacaatatttttttttgcgaaaaaatattactactttactgtggttgtttggaaatgctcaatatctgacttatcacaagcgcacccactcttcctctattgtaagttatcatgttttatctgattgatttttattaccttatctggttcactcataattcaatttccaatttaattggttatgaattaagaatttgttgattccatctttggttcgattcttagaatattgctgggacccatgtacaaagaaaggcactcgtatcgtacatctatcnngccaactctatnntannnntcaannnnnng

SEQ ID NO: 28137 - DNA, 1630 bp, Glycine max
  Clone ID: TF_GmC23542_3
aaatggacccagttgcccattttgcttgtgcgaggttagggatggataccggcttgaaggctgtggtcatttgttctgccggttgtgtctggttgagcaatttgaatctgctattaataaccaaggcactttcccagtatgttgtactcacagggactgtggagatcccatcctgcttacagatttgagatctcttttatttggtgataagttggaggatcttttcagggcttctttgggagcttttgtggcaacgagtgggggagcttacaggttttgccctcctcctgactgcccctcaatttatcgagttgcagatcccgagtctgctggcgagccatttgtttgtggggcttgttattcagagacttgtaccaggtgccacttagagtatcatccttacctttcatgtgagagatatcaagaattcaaggaagatccggactcatctctgaaagaatggtgcagagggaaagaacaagttaagtgctgctcggcatgtgggtatgtaattgagaaggtagatgggtgcaaccacgttgagtgcaagtgcggaaagcatgtctgctgggtttgtttagagttctttagtactagtaatgactgttatgaccatttaagaactatacacttaaccatcatataaattgccatttgcgtaccatttttccgagacttgtaattaagcctagcggtatataataatactgtacatggaagtagcaaattgtacagctttcttaaactaatgtatatatatcacagcagttctgcttcttacttgtatatctaattctaatataagttgcacggtgtatataggttgtgacttttctgctatgcaagctctacattatgtgttcaaaagcagttcaatacggttgtatttatccattaaatgagccggaagagagaattgattacaagtcgattagcacgaactaggttacagttatatttgtgtctaaataaatataaagcaaaaaattgtatatgcagatcgtcttctgtgtctcaaaacggttccaaattccaatcacagcagagtggctattcacagatagtatctgcaagcaagagcagtggtaactccaattcccaacgaaagaaccaaggccagaacccatgcaacaccagtagtttcttcatcatggccatctccctctggttgttgacgcagcaaaagggattgttgcaagcggaaaacttgaagctcaagcaaacgcacctgttggcgatatgcaaacaagtgcatggcctcttccaacaaaaccatagaaagaccctccttttcatttttcagaactgcagccttcttttctgcctctctggcccgtgtctgagatgctcgcagtgccttcagaagctccattttatccttttcatcatgtccactgtcaatcctgtaagcaccagactgtttgctatgttgctcttcttctctgttatagagcctattcatggacaatatgacactcttatctggacccataaaaaacttggaaggtggaggaagatcacagttctgcatcaggtcaaaccctgaaggcttgttgtgagaaactgtgaaacccataatctcatttcttcttctttgagtttgaccaatcttcttttgttggccacccat

SEQ ID NO: 28138 - DNA, 1539 bp, Glycine max
  Clone ID: TF_GmC43002_1
aattcggctcgaggctacccagaacaagatccgcagggtttttgctttcactgattctgagttgttgcacgaccagataacatttgggaaaaaattggagatgcctcttttgacggcactgagagaaaggattctggaacttgccaacaattttgaagattttgttttaaaccttataccctctactgatcttgagcagccactgcatttggccaaagtagctattggacttgtcactttccctgtaaatggtgagatattgcttaagaactgttctatttgctgtgatgacaagccagtgccaattatgattaccttgaaatgtttgcacacattctgttcacattgcttgagggcctatgctgatggtaaagtacaatcttgtcaattccctataagatgccctcaaccaagatgcaagtattgcatgtctgtaactgagtgcaggtcttttcttccattcatctcctttggatcactggagaaagccctttccgaagaaaatattgaccattcagatagaatttattgtccatttccaaattgctctgttctccttgatcctcatgaatgttcatcagcaagggccagttcatctagtcagtctgacaactcttgtatcgagtgtcctgtttgtcggaggtttatctgtgtggactgtaaggttccttggcattcttctatgagttgtttagaataccagaacctgccagagaaggagagggatgtttctgacattaccttgcatcgtcttgctcagaataaaaggtggaagcgctgtcagcagtgtcgtagaatgattgagcttactcaaggctgttaccacatgacatgctggtgtggttatgagttttgctattcatgtggtgcggaataccgagaagggcaacagacatgccagtgtgcatattgggatgaagataactctgaagactcagtggcgcactctcttcaagaatcagaacaatgggcatgggagacattcaattctctctccatgatcgtggacgcatactcagaccaagaacgatcgcagcttgcacttattcaaaggttcctagctgggggtttcagtctcagtgaccataatccttaccaatctcctcctcgctgtacagactcctatgtagaccccatgaaggatctacatcaacttccatggctagagagatttgtgtctgtgataagtgacaactactatgatgattacattcaatgaatgaaactgtgatagatcatagactacctaataagttcatcaactttcaatctcaactaaattttgaaaggaggatgcagaaagagtttgtgactctgtccacttttcatcaagaggtgaagcaacatttacatcatgaaattccttgtttgttccccgcttggatatatttaaccaaaggtggaggatctgttcatgattattctctctaaggaaagaaaaaaagaaaaagtgatatttgggagtgaaaacattttacttgtggttgggaagaatacaattttaggcaattaaaagaattccggatttttaattttgcc

SEQ ID NO: 28139 - DNA, 2903 bp, Glycine max
  Clone ID: TF_GmC1406_1
ggctcgagtccgtctctctctcttactctctctctttctctgtgttcgtgagtggagtggcgtatgtgtagctgcgctctctatcgccggcgctctcgtcggaatttccgttattgatttttccgatcaccggattcgatccaatccctaatccctaatcccgcgattccatcaattgaaaaaattgaatagccattgaaccgtttcgtttcgggggtagcggagatggacgtttacgcgagcagcgacgaagattaccattacgactccgaccacgaggactccgtcgaggcctacgaaaacgacgagaattacgccttgctctcttccaagggcaccactactaaggtgattacaaaggaatcactgctagctgcacagaaggaggatttgcgcagagtgatggacatgctatcggtgagagagcaacatgctcggacgctgcttatttttcatcgttgggatgtggagaatctgtttgaagtgttagtagacaaggggaaatcatttctctttgctgaagctggtgttagtgtggatgaacatcgcaactctgactcacctgttcctcctgcattcatgtgctacatctgtatggaggaagttcctagtagcaaaacaacgagaatggactgcggtgattaattttgcaacattagttggatagagcactttattgtcaagataaatgagggtcaaagtaagcgcattagatgcatggaacacaagtgcaattccatatgtgatgatgcccttgtaagaactctactcagtagagagcaccctcatatggcagagaaatatgaacgctttctgcttgaatcttacattgaagacaataagagagttaaatggtgccccagcacacctcattgtgggaatgcaatacgggtcgaggatgatgaactgtgtgaggtagaatgttcatgtggtgtacaattttgttttagttgtttgtcagaagcacactccccttgttcatgtctgatgtgggagctttgggctaagaagtgccgagatgaatcagaaacagttaattggataactgttcatacaaaaccatgtccaaagtgtcacaaaccagtggagaagaatggtggttgtaacttggttagctgtatctgtggccaagcattttgttggttgtgtggtggagctactggccgagagcatacttggtcaagtatagctggtcatagctgtggtcgatacaaagagcaagaaaaaacagctgaacgtgcaaagagggatctatatcgttatatgcattatcataaccgatataaagctcacacagactcctttaagattgaaagtaaactgaaagagactatacaagggaagattgccatttcagaagaaaaagattctacactcagagattatagctgggtaaataatggactctccagacttttcagatctaggcgagtcctatcatattcatatgcatttgcattttatatgtttggagatgagctttttaaggatgaaatgacagatgctcaacgggaaataaaacagaacttatttgaggatcaacagcaacagcttgaggcaaatgttgaaaagctctctaaaattttggaggagccttttgaaaccttttcagatgataaggttgttgagataaggatgcagatactcaacctttcaacaattattgacaaactttgtcaaaaaatgtatgaatgcattgagaatgatctattgggttctctcaatcttggcattcatagtattgctccatacaagtcaaagggcatcgagagggcatcagaactttcagttggctggaataatggagtcaataatactggtaaatgtcttttagggggtttgtttgaataattagctttaccaaaactcttttgcgtcagcattgccaacataaattgtctttgctctcataatgaattaacaggaaatctttttagacttccaaccttacttgctttctcttatctttcttttatccagatgtctcttgtagaattaaaactgtttccaaagtttcttattcttattctatctatatttctgtttgaaatcctagtgctttttaaaaaaaccttagcatttatttgctctcatttttatgtaaattgctagcgcttgggaaattttaatggggcttttattcctattttatggttttatttgactttgtggatgctcatctgaaattgttactgagtgaaaaggattattgtatatatgctgcaagcgtaggtgtaacagaagaacttgatcgaccatctggatcagggagttcagacgataatggatgttcttctcgtaaacgtgctagaaaagagggtcttggaggtggtggtttttttgatctaaacttgccagcagagtttgtagacagaaattgactttgaaggacaccttattatacgtacaggcgtacaggtctaacaacataaaattgctttgctttgctgcctttggaaggaaggaattaatctttttggatttcataccccatttgctttctcatatctttcttttagccagccatgtctctgctgagataaaagatatgtttccaaggtttcttattcctatgccatctacctttctgtttgaaatcctagcgctgtatatagatagccttggggcatttatttgctagtagttttatgtaaatggctaccttgaggacaactaggatgcttttattcctattttatggagttataggtggaggtaacttcactgatttttcttctctcatgtttacactattttaacttgtttaagttacaattttcaagcgtctagggtgcttttattcctatcttttgaagaaaaatcagtgaagttacctccaccctcttccataacttgcttcaaaatggataaagcaattgtctcggcttcttgaagggttaggc

SEQ ID NO: 28140 - DNA, 3781 bp, Glycine max
  unsure (1)..(3781): unsure at all n locations
  Clone ID: TF_GmC6405_2
tttttntttttttttttttncagggcnaattgtttggaagttccatttactcaaagaatcgaacataactaatccaagcaactgaatgaatattaattcatcacaactcctatctaattccctcattcaatctttactttaattccgtataaataaaactaaacaaataggaaagcgactattgacagacaactaaacagaaatgaaaaatgatgattagctcgattcaattttcactacggcagtggcagaagttcagtatggtgaattttgaatacgtacttttccatctgcttttcatcctttatacaagagaaatgtagtataatatgacgcagccataaagagcactcaatcattaatacagaagatagttacggagcctgtacacctggtgtctttcttgcctaaagttgcagttcagcttcttcaatcatcaaaaggtgaataacgtgatcatttaaacttcagagccagagggctctgtggacaacgatgagtctgtgccataattccaaaggctcttcaactcacctcttatacatcccaatatgactgtgacacctagtgtgcatggaacaagaattcggctcgagctcttggaacttttctattattttttctctctccattctccattctccattctcctctttgcttactacccttccatattccatatattttcataatttttctttcaattccccaaaacacattaataaaaggaaatcaaatcaaagcaaagacaacacgcattcttttcttccccaatttccaatccccaattcttctgccctagattttgtccctttttttattgcactccacccacccaccgtgcatcggtcgctggttcctgaatttcccttgtggttaggtttcctcgatggagtcagaggatgatatgcacgacgccaacgacatcgagtccctcgacgacgatttctacagtggcgagaccgaggacgctcctttggactactacagcgacgacgacgccgacgattacttcgacgacgccgagaggatcgagtctcgccgccctgagcaaaattttaccatattgaaggaatccgatatccgactaagacaggaagatgacgtcgctagagtagcaacggttctttccatatcaagggtttctgcaagcttactactccgtcaccacaattggagcgtcagtagagtgcatgatacatggtttgctgatgaagaacgagttcgaaaagcagttggcttgttggagaagccaattgtccagcatcctaatgctagagagcttacttgcggtatctgttttgaaaattatcctcgtgctaggattgaaatggcttcctgtgggcatccctatcgtatctcatgctgggaaggctatatcagcacatccattaatgatggtccgggatgtttgatgctgagtcctgatccactgtggtgctgccactggccgctcgagccgattcggctcgaggtcggatgaagataagcagaaatatgcacgttacctacttagatcttatattgaagacaataagaagtccaagtggtgtcctgctccaggttgtgaatatgcagttacttttgatgctggtagtactggaaattatgatgtctcttgcctctgttcatatggcttttgttggaattgcactgaggaggctcatcgcccagtggactgtggcactgtggcaaagtggattttgaagaacagtgcagagtctgaaaacatgaactggatacttgctaactcaaagccatgtcccaagtgtaagcgaccaattgaaaaaaatcatgggtgcatgcacatgacatgcactccaccctgtaaatttgaattttgctggctatgcgttggtgcatggtcagaccatggtgaaagaactggtggtttttatgcttgcaatcgttatgaagcagctaaacaagaaggagtgtatgatgatactgaaagaagaagggaaatggcaaagaattcgctggagagatacacacattattatgagcgagctttttcttgtctaatcaaggcaaaaagctcttgcagatctacagcagatgcaaactgttcatattgagaagcttagtgacatacagtgtcagcctgagtcacagcttaagttcataactgaagccggctacaaaaattgagtgtagaagagtgctgaaatggacatatgcatatgggttttatttgccggagcatgagcatgcaaaaaagcagttctttgagtacttacaaggtgaagcagaatctggtctggagagacttcatcaatgtgcggaaaaggaactacagccgttcctaagtgctgatgatccatctagagaattcaatgactttcgtacaaagctagctggattgactagtgtgactagaaactactttgagaatttagtaagggcattagagaatggtctatctgatgtgggaagtaatggagctgccttcagcaaagcaacgagctcaaaaaatgctgctggtagcagtaagggtagagctggaagaggaaagggaacttttcgaactagcttgtccagcaaattgaatgatgatagtcattggtattgtgagcattgtacctatgcaaatgtcaaatctgcctccacatgccagatgtgctatcaacaacgtcgatgaaaacttggttctccatttgaagcacttgtctcctgcccaaggcctctgcaccaaaagctgagatggagacattcctgtatgtttatatatatttatgcactatgcagtctccaattttgtgatgctaaatacaacaggatgaaaggagtaaggcatggaagaaaggttgctctccatgcgctcctattcaatacaaaacccaatttgatgtatatagtgttctatctctttatgtatgaggttttctgctacaggcatttgtaactcaatatcataacacaacagatgttggagaatggagatgaacacaaatgtgcttgtttgtgacaactctttcagttggtctcttggcagcttccaagagggttagtcgtgtataataagctcaggatttgattacattctaaaaaatgataaggggctgcaataaatattatactttatcacttgatatatcatcaaacagatgccaaggatatcttggccagtccatgaatatgattcctgtcgagtagcagcccagaaaattgcaaatgccacacagaataacaatactgccagggagaaaatagagatctccccaaatagaggtaagctcactgtcttctgaccacaattttggcattttcttaaagtgaggcttacaatacaattgtgcataccctcaataccaccaatgcagaaaagtacaatcagcacccagacaaaccaagttgacatgaagaagaacaatagcacaagaaaggtagacgctgctatgacaaatatgacagcaccctttgaatcaatgttaacaatttccttgtccaaatcatctttttctgtttcagcattagaagattccttggggcacaatttgttatagcgttcatcagacttctctggggtagtcagatcggaccatagtgaagcacatacaatagttccaacagacatcaaccacaaaaatgcaactgagaagtccacaagtggccgaggcggagcatataacaaaatttccactttgcttccagatgtgaaagacttgttgagagattgtcctgctgactttgctatcatgactactggaattgaaatatttgcttcactgctattggagcaaaccatctcaaagagatcttgtgagtcgttactcgagcc

SEQ ID NO: 28141 - DNA, 1361 bp, Glycine max
  Clone ID: TF_GmC215703_1
tcgtggtaatccaatcagaatatgggttcagagattccggtttcataagcaagttggagaaagtggtcaggggagagtgagaagtagtcactgaaccatcaacgtcggaaaccgaatccgaaaccaaaaacggttccaaatgttgaaccccgaaccgccgccgccgccgccgccgatgatggttccgccggcgacgccgatgaaccgcgaaacgacgtcgctaaggaagaagaacagactccgaactcgaactcgaattccacctttcgacgtggactcctccttcttcaccacgccgatctccttgcaaggcaccacaaaatcaaacgcgatctccgtggagcaatacgacggcgtttccgcttccgcttccagccccgtccacgtcatcaacctctctgataccgaggacgacgacgaagtccgaatcctcaacttcactcccataaacacgtccttcggaaaacgcagcaagaaatcatcatccaaaggagagtgctccaactccgcatcgttcgtctgcgaaatctgcaccgaaacgaaaaccgccagagactccttctcgatcatcggatgccaccacgtgtactgcaactcctgcgtggcgcagtacgtcgaatcgaagctcgaagagaacatcgttagcatcccctgccccgtgcccggatgcaggggactactggaggctgatgattgccgtgaaattctcgcgcctcgcgtcttcgatcggtggggaaaagccttatgcgaggctgtgattgctgctgaagaaaaattctattgtccctttgcggattgttctgttatgttgattagagggatcgaggaaaacaatatcagagaagctgagtgtcctaactgtaggaggcttttctgtgcgcagtgtagggtgccctggcacgataatatgccctgcgaggactttcagaagctgaacgcggacgagagggataaggaggatatcatgctgatgaacctcgccaatcaaatgcagtggaagaggtgcccccggtgtaggttctacgtccccaaatcggatggatgcatgtacatgaaatgcaggtgtggaaacgccttctgttacaactgtggagctcccaacttaaccagctcccatagttgcagctattgttttcgttaatgatattatggaaccaaaagaggatttgaacaaattacttcatgcaaactacctaaactcatcccaaacaccccacacctagtgactttatttatgcattaacattattcagtatagcttataactatttagccttttcaagtatgagaacaatttcaaaatctgtttgcagtatatgactttatgaatgcataataatggctatgtatctttagccgca

SEQ ID NO: 28142 - DNA, 801 bp, Glycine max
  Clone ID: TF_LIB4203-002-R1-K1-F3
gctgatctggatcaataaagaagagatgatcttccagattccatggaagcacgctgctaagcacggctgggacatcaacaaggatgcctgtctgttccggagctgggccattcacacaggccgatacaaagcaggagaaaaagagccagatcccaagacatggaaggcaaacttccgttgtgccatgaactccctgccagacatcgaggaagtgaaggatcagagtaggaacaagggcagctctgctgtgcgggtgtaccggatgctgccacccctcaccaggaaccagaggaaagagagaaagtccaagtccagccgagacactaagagcaaaaccaagaggaagctgtgtggagatgttagcccggacactttctctgatggactcagcagctctaccctacctgatgaccacagcagttacaccactcagggctacctgggtcaggacttggatatggaaagggacataactccagcactgtcaccgtgtgtcgtcagcagcagtctctctgagtggcatatgcagatggacattataccagatagcaccactgatctgtataacctacaggtgtcacccatgccttccacctccgaagccgcaacagacgaggatgaggaagggaagatagccgaagaccttatgaagctctttgaacagtctgagtggcagccgacacacatcgatggcaagggatacttgctcaatgagccagggacccagctctcttctgtctatggagacttcagctgcaaagaggaaccagagattgacagccctcgaggggacattgggat

SEQ ID NO: 28143 - DNA, 579 bp, Glycine max
  Clone ID: TF_LIB4167-057-R1-K1-E4
cccgcgtccgctgagttcaaggttaacaccaaataacacatatagtgcagattcataagctttcaaccatggaggatccaaatcaagctcaagaagggtcttctcagaagaaaatgggaagagggaagattgaaatcaaacggatcgagaacaccaccaataggcaagtcaccttctgcaagcgccgcaacggtttgctgaagaaagcttatgaattatcagttctgtgtgatgcggaagttgcccttgttgtcttctcaacccgtggccgtttgtatgagtatgccaacaacagtgttagggccaccattgaaaggtacaagaaggcaaatgctgctgcttcaaacgcagaatccgtatctgaagctaacacacagttttaccagcaagagtcatccaaattgagaagacaaattcgagatattcagaatctaaacaggcacatccttggtgaagcacttggttctctgagtctcaaggaactaaagaacctcgagggtagatttggagaaaggattaagcagagttagatctagaaaggaaattgtgctgcaaaaccacaataattatctgggagct

SEQ ID NO: 28144 - DNA, 882 bp, Glycine max
  Clone ID: TF_GmC1907_2
tggaatcaaaggactgggggttgctttcgcttctgcattctcgatcgccaaggaatcttctgccttccatcgtaacaagaaaatggtgagaaggaagataccgatcaagaagatcgacgacgtaactgcgaggcaggtgacattctcaaagaggaagagtggtcttttcaagaaggcacgtgagctctctcttctctgtgatgctgagatagcactcatagtcttttcacctggtggcaagctcttcgactatggtagttcaagtatgcagaaggtaattgaaaggcatattttacggtcagagcttaaccttgaaaaattagaccagtcgtgtcctacggagcaggtgagatgtaattatgctgatttgaacaaggaatttgcagacaggactcgtgaaatgagacaactgaatggagaagaactgcaaggattgaccctaagggaacttcagaaattagaagaacgacttgactcatccttgaaccgtgtttataaagcgaaggttgaaaattttataaaagagatcggtattcttaaggaaaagggaaaaaaactcatggaagataacatgctgataaaacagatgataaaattaccgaggaatgaaatatgttcggtccagagacatgagcatgaacaaggccagctctttgacacctccctcacgttggggctaccttttcctgctggctcaaagtagagtttctgagcaatgaggggaccatgatgctgcgttttaattagtgtgaaaactgaaaaggaagagtgaatcaccaaggataaaatggttcacgtatgttcaagtataatagattctagtaattcatgtttgttattagtgggaccgtaatggatatggtttagctatgatattatttc

SEQ ID NO: 28145 - DNA, 1201 bp, Glycine max
  Clone ID: TF_GmC1907_1
tactcgagccgaatcggctcgagtacggctgcgagaaacgacagaaggggagattaagattgggaatgggagtgggagaaagataaatgtggcatattcatgtcttcccctcaccattctttctttggagtcaaggactggggggttaggtttgtacttaattacgcttcttaatttcttctttatcgatcacccatgatctacctggctagctagctagggttgcttctgctgcattctcgaccgccaatcaaggattcttctgcgcttccatcttaacaagaaaatggtgagaaggaagataccgatcaagaagatcgacaacgtaactgcgaggcaggtgacattctcaaagaggaagagtggtcttttcaagaaggcacgcgagctctctcttctctgtgattctgagatagcactcatagtcttttcacctggtggcaagctcttcgactatgctagttcaagtatgcagaaggtaattgaaaggcatattttatggtcagagctgaaccttgaaaaattagaccaatcatgtcctacggagcagcttagatgtaattatgctgatttaaacaaggaatttggagacaggattcgtgaaatgagacaactgaatggagaagaactgcaaggattggccctaagggagcttcagaaattagaagaacgactggtctcatccttgaaccgagtttataaagcgaaggttgaaaattttacaagagagatcgatattcttaagcaaaagggaaacaaactcatggaagataacaggctgatgaagcagaggataaaaccgaggaatgaaatatgttcggtccagagacacgagcatgaacaaggccggtcctttgacacctccctcacgttggggctatcttttcctgctggctcaaagtacagagtttctgagcaatgaggggaccatgatactgcgttttagttagtgtgaaaaggaagagtgaatcaccaaggataaaatggttcacgtatatatatggtgggtcatctctaagtttagaacaatgacattctacgattgccccaactgaatatttattttctagtaattcgtgtttgttaattagtagaaccttcttaatggatatggtttaggtatgatattatctccatatttgtgaggaaaatgattttagttttccttcggaaaaaaaaaaaaaaaaaaaaaaacgaccaa

SEQ ID NO: 28146 - DNA, 694 bp, Glycine max
  Clone ID: TF_GmC940_2
agcacctgaagcacatcctcttctggatgctaaagaggaaactaacatgctaaaacaagaaatccaaacattgcaaaagggtatcaggcatttgtttggaggaggaataagactatgccaattgatgaattacaagtgctagagaagaatctcgaaacttggatatatcatattcgttcaatgaaaatgaacatcatgttacaagaaattcaagctttgaaagataaggagggaacacttaaagcggcaaataaatatctccatgataagattgtggagaatactgcaatttctaactttgctcaatttgctactgatacttcgaattcgtacccgctaatcatacaagatgaggtttttcaactctattaaatgagttgtttctacaatgctttgtttacatgctttaataagggaaagaatgacgactgggctatgcttcataacattaaaaagtgaagtatatatgaagcatgaacattgtgcctatcttacttaccaaatggtgtgcaagctttgcaataatttgtaacattaatattgtggcaacctaatatttttatagataagtttttaatgtaaaagacagaaaagtgtggtttctgactattaatttttctctgtcatgatcagtaatgtaatatgtttgtataatgttttctcttcgtggaaatcacaattatttaagcagaat

SEQ ID NO: 28147 - DNA, 681 bp, Glycine max
  unsure (1)..(681): unsure at all n locations
  Clone ID: TF_jC-gmXLIB3563P005ca07a2
ctttctctgtcttctgttttcctttttctcgagaaaattgtgttagggtttctgtgattgagcctgcaaacacttccttgagggcacaaaagattccattgtttgcttctttcagattaatttttttgtcagttcagatcttcaagaagaagaatccagagaagctatatatacatcatcgttgttctttgccaagacaaagaagaaaaatggtgagggggaaaactcagatgaagcgcatagaaaatgagacgagtaggcaagtaacgttctccaagagaaggaacgggttgctcaagaaggcctttgagctttcggtgctgtgtgatgctgaagtcgcactcatcatcttctctaccagagggaggctttatgagttctccagttcaagatgctccagtataaacaaaacagttgaacgctatcaaaggaagatcgaggacctgggtgtcagcaacaaaggaatccatgaaaatacacagcatctgaaggaagttgatatgagcatggcaaagaagatcgagcatctagaagattcaagaagaaagcttttgggagatgaattggataaatgcagtattgacgagttacaacagctagagaaccagctcgaacgcagcctggacaaaattagggcaacanagaatcaattgttcaggaagcgaatcgagaagctaaaag

SEQ ID NO: 28148 - DNA, 689 bp, Glycine max
  Clone ID: TF_LIB4390-047-R1-K1-F9
gtgagtatttaaaattaaacatgggaagaggaagggttgttctggaaagaatagagaacaagatcaaccgtcaagtaacattctcaaaacgcagaagtgggttgctgaagaaggcctttgagctttctgtgctatgtgatgctgaagttggccttatcatcttttctagccgtggcaagctttttcagtacagcagcactgatattaccaaaatcattgagaggtatcgccaatgtcgttacagcaagtcacactggtgattcattggaacacgattcacaggcattttcaaggagaagaccttgagccacttagctttaaagatttgcagagcctggagaagcaactagacataacgctcgcactaactcgacagcaccaaacgaagaaactcatggcacgagcggatgaattacgcgaaaaggtaagttgttaaatgctaattaacttgtttgattttactccgtgtgaagtttttctgtgaatttctctctatgtttatgttttttcttgtttacaactcggggctgcagaagttattggctatttgtttttttttttttaaaaaagttattgtttatcttattatagagagaaaattgatatactttttaaagaagtggggctagacgtccaagtctctatcatccattataaaattggtctctttcataattagattttaacat

SEQ ID NO: 28149 - DNA, 4097 bp, Glycine max
  Clone ID: TF_GmC109_1
aagaaaatttgaagaaactgaaagaggtgaataggaatcttcgtaaggagattaggtatacagatctttcttcacttcgatcgatctccttgagaatgggagattgtatgaacgatctaggcatagaagatctcaagctccttgaggaagaaatggacaaggctgccaaggttgttcgtgagtgtaagggatatcaagtgtgctaatatactggttgatgtaagtgggcaagtcaagcttgcagattttgggttggcaaaggcaacgaaatttaatgatgttaaatcaagcaaaggctctccatactggatggcccttgaggtttttaacttaaagaaccaaggtggttatgggctagcagttgatatatggagcttagggtgtacagttttggagatgttgacaaggcagcctccttattctgagttggaaggagtgctgcctcctatagcacaaaagcacgtgattcaactcatactttctcacgaaagaaacttcagggctgatgagctaatggagttctacaaaatttgaaactctaagaaattcttgcatataattgaggattcccctgttttccctgttatatgacagtaagaggtaatagccttctcagaatattgtgaaaacaaatttgtcattgaaccagttgaagttattttttctgatggtaactcaaacatataccctgatttatctgtctacaatatggaagtttctctatcttacattaaaaaaaaaaatgaatcacagcttcttatcaatcataatgcattctttttatttaaccctcattggctgaaaaggaaattttttattaaatgaaaattatatttcaggaatatggtaaaataaattaaccctttgaaaaaaatcagtaaaattttgcaggtataataaataaaaaagaaaaattttattatctggaggtccacagctgattggttattagatagtgcggtccctgatgagtcttgtgactagatatgtgaaatggagaataagaagacggtctgcatttccaccaggagagagctaaggtcatatacttagagctgagctgttcgttctttttgtcaagcaatagttattagagcaacggtttcgagtatttatagtcacaggcactctcccttgacatgtgtaaatagagctagccaagaaagggaagtgtgcacctaacaaaggaagcagcctttattgtattaattgcttgcactttctcttcaattagagcaacaatgaacattcacgttcgatcaattggagcattttcgtagtttataattatgctgattcaggaaagaaaaagtatatactttacgttggattatttcctattactaagcttggtggtagttagtttggcttgatggccctagaaatagaatcagctcgaacagctacacatacgccatttgcatttatttgatacttctaccacttctacatatgtttagctgttgcctatttacataatcaaattgtattataaaaagttaaaaacggttcagctataaatcaaaaagaactgttggagggcctttttgttgttccaaggggcgggctggatgccccaaatgaatattggtggaataaagacaagttctgtagaaattgagcgtgtctgtgataggcccgccgaaggcattttggagacagctgcaatcagtgttgctcctgcaaatggaggcccgcaacaactggttatatttgcagttttaaagaaaggatccaattccaatgcagaaactgccccctggctcccggttgcacttgtactcactcaatccgagaccaaaacggcgccatgcctaccgtcagtgtggggcgggatcgcctgtttgcggctctaggaaagacttacacgcaagaggaattcgaagacttgtgcttcagtttcgggatcgagcttgacgacgttacgacggagaaggcaattgtgagaaaagagaagcatttggatgaagaagaagctgatgaggacgaagaagttatctacaaaatcgaagttcctgccaacagatatgacctcctgtgccttgaagggcttgctcaagccctccgagttttctgtgagttccaggagattcccacttacagactgtccaagatcagtaaggatgcaatgctgaaaatgcacgtgaagccagagacttctctgattcgtccatatgttgtatgtgctgtattaagaggtataacttttgataaagcaagatacaacagctttatcgatctccaagacaagcttcaccaaaacatatgtcgccgaagaacccttgttgccattggaacccatgatctggatacattggaggggcctttcacctatgaggctttgtcttctggaatggcaaattttaacctcctcaagttccataatttttatactattacagctgagattgcattcctaaattcttaagagttaacccaagcaagggttatacttatgccaggcttttggaccatttatttgtaaaacaagaattattaactcccctaagtcctgtttcacataggatatatagtagaattgtgtgagagctgtcatgcagctctaacattgctacggcaactggctggattgagcaattatttttaattttttattcagacaaatcgtgagatgaagaactcagtaatagaatggagtaagataccggtagagttctgtggttttgaagatatttattgtgttggacaatcagatgtacctgtgattctttcagatacacatgctataatcttttacaaaataaagcttcttggtgctttttgctttgtccatctatatgtaatagacaacattaacattcctgatccctgctcctttgttgaacttaaaatcgaaagtttcctataaagattatctgtatcatttggtagggaatcaagatgctcaactgcttgagtgactatatgggagtcaaaacacttcgccgtattaaggactaaactgatgttgcgaaggcttatggatctgatgctctctaggttgagtcagtagttgataataaggcccctaagattttccctgcttcctccgttctactttctttggatcatctcagtgaacgtatcggtaagtaggttgctttaattggtttcacagaggtcttgacatttatactctgctctaaaaaggaaaactttgccatgcttaaccgcaaagatgataaatctaaagcagctattattggaaaccctaggtcttcagactttgaggctgtgcggactagtcttatgcctggcattttgaaaactgttgctcacaacaaggatcatccaaagcccataaagatttttgaggtcggtgatatagcagttttgcatgaacaaagagatgttggtgcaaaaaatcttcgccaacttgctgctctgtactgtggtgctaatgctggatttgagataattcatggcttggtcgacagagtaatggaaaagaatggggttccctttgtttcacctggtgataaatcaggttattatattgagcggtcagatgagcctgagtttcttgctggtagacaagctagaatcatttacaaaggaaagcatattggcacttttggcattgttcatcctgaggtattaaacaactttgacattcccgatccctgctcctttgttgaacttaacatcgaaagtttcctataaagatctgtatcagttggtaaccccatttgtcccattcgcccttttgaatatatttattcatcaaactggggaatcaagatgttcaactgcttgagtgactatataggaatcaaaacacttcgtggaacttagaactacactagctcgggaccggaatgttactaatatgccctaaattagagtgtttagttaattatatacctgtatcattttcctaagtttctctccgttgttaaatgtttagaacatcataagctacgaattggttagtagggataatctcgaccataaattatagttatttttttaaaacagttgattttggccttaaaaccaagacagcaaggatatttattcgtttgaaaattttgtcaatacaaaagtgagtcaccagccgtgtctacttctgcggtaggattaaaatgccttttgtt

SEQ ID NO: 28150 - DNA, 1123 bp, Glycine max
  Clone ID: TF_GmC1414_1
ggtgggacaaagagagaaaaccgaatagaacagagagagagagagagagagataatagtagaaggtcggagatagtaaagagagaaatccgaatagaaaaagaagctagctagggtttcggcgcgaagaagaatggggaagaagaaggtggagataaagcgaatcgagaacaaaagcactcggcagataacattctccaagaggcgcaatggattgatgaagaaagctcgcgagctatccattctctgcgatgcgaaggtggcgctgctcatcttctccagcaccggaaagctctacgagctctgcaacggtgacagtttggccgaggtcgtgcagcaatattgggatcatttaggagcgagcggtactgacacaaagtcgcaggaactatgctttgaaattgcagatatctggtctggttcagcgttttctcaaatgatcaaaaggcacttcggtgtttctgaacttgagcatctgagtgtgtctgaccttatggaactagagaaactgactcatgctgctctttcgcgaatcagatcagcaaagatgcgattgatgatggaatctgtagtgaatcttaagaaaaagattgaggcactagaaaaaactaatgacgtcaataacgtggtgacacggtctattgactgtgatcaaacagatggggtgacgcataatctgttcccaggtctctaatggagctgaaagccactactctgggtctaacttgcacactcaacccttgaatttccaagtgtgtgtttaatacatgcatagggaaccatgccatggtctagctacttgccttttattatttctattttggttgaaacatggagcatcttgaagataatgtagcctggggaactttgcttcagctactactttgtgcctaattaatttataataagtgacattagatgccatatggtattataagtctcataatgctaaaatttgggaacggttcacggtgaaagtaatggaaacaatcatgtggagggctccctggtttgtaaatgcagctgaaagccaccactatggatataacttgcacgaattttccaattgtgtgcttaatacatgcatagggaactatgccatggctgggctacttgccttctgt

SEQ ID NO: 28151 - DNA, 1029 bp, Glycine max
  Clone ID: TF_GmC1834_3
ctgttttggaccatggacttggtttttaccaaatcaagaaaaggatgaggtttcaatttttctattaccataaaacaattttgtttcttaatatggtgaggctgggggaatcaattggggataggtggatgaataaggaaagcttggtctgattagtctatactatatgccttgctattcccctttttctgagtttctctctgcacttcttgctagctaccctctcttttggggtatttcttttcattctccaaaaactcttcaattttccttcccttttctgtgctattctctcctcactggtcaaaaggtttgtgggattttgctaatttggtgcaaatctgattcctttgacaaatccctcttgatctcctggcttattgaaaactactacaattccgagttgctttttttccctagttgcttttctgggccttgaaatcttgcttggagaaggctcaattttggtggaaacctctaccacaagaaagcatagtttttttgggttaatcatacttgaggtgtttagagatggtgagaggaaagactcagatgaggcgcatagagaacgccacaagcaggcaagtcaccttctcaaagcggcgtaatgggttgctgaagaaggcctttgaactttctgttctttgtgatgctgaggttgctctcatcattttctctccaagaggaaagctttatgaatttgcaagctccagcatgcaggacacaattgaacgctaccgcaggcataacaggagtgctcaaacagtgaacagatctgatgaacaaaatatgcagcatttgaagcaagaaacagcaaacttgatgaagaagattgagcttcttgaggcttcaaaacggaagctcttgggagaaggtttggggtcatgctccttagaagaactgaacagatagaacaacaattggaaaggagtgtaagcaatgttcctgcaagaaagaatcaagtttacaaggaacaattggatcaactaaaagagaaggaaagagctctatatgctgaaaatgctaggc

SEQ ID NO: 28152 - DNA, 564 bp, Glycine max
  Clone ID: TF_GmC59564_1
tgcccatctttcccctaatgctggtggtgggttcagttttttggtgaggaaggataataaagaaggaagctttttttgtgtgagagaaggaagaggagaaaagaaggcatggggagagggaagattgagattaagaagattgagaatttgaacagcagacaagttaccttctccaagaggagaaatgggttgttgaagaaggccaaagagttgtctgttctctgtgatgcagaggttgctgtcatcatattctccagcactggcaagctttatgagttctcaaacacaagcatggagcataccctttcgaggtacagtaaaggcgcagaatcagattctgcagagcaacctattgatgtgcccccaacagatgttatggctgtggagcctgatactaaccttttgatggaggaaataacaaagcttcgatcagcatacttaaggatgatgggtaaggagcttgatggattgagccttaaagaactgcaacaactagaaaatcaactaagtgaagggatgcaatctgtcaaagacaagaaggaacaagtacttgtggaacagctt

SEQ ID NO: 28153 - DNA, 620 bp, Glycine max
  unsure (1)..(620): unsure at all n locations
  Clone ID: TF_GmC182_5
ctttcctctctctctctctctctctctagggttccgagttggaagttgaaagtgttgaactatctctagctagcttttcacaaatttggttgcacttgcaactgaggcaggaaagaggggcacgagaggaggaagaggaaagagaagaaaaaccaagaaaagtggagaaagggataggtgttgtacagaaatagaaattaaaattgagtgaaaattaaagagaagaaggagtgatagggagatatgggtaggggaagagtggagttgaagaggatagagaacaagataaacaggcaagttacgtttgcaaagaggagaaatgggcttctcaagaaagcctatgagctatctgttctctgtgatgctgaggttgccctcatcatcttctccaaccgtggcaagctttatgagttctgtagcagctctagcatgctcaaaacacttgaaaggtaccagaaatgcagttatggtgctgtggaagttaccaaacctgccaaagagctcgagagcagctatcgtgaatacttgaagctgaaagcaagatttgaatcacttcaaaggactcaaagaaaccttctaggggaagacctgggcccactgaataccanagaacttgagca

SEQ ID NO: 28154 - DNA, 1508 bp, Glycine max
  unsure (1)..(1508): unsure at all n locations
  Clone ID: TF_GmC7654_3
aattcggctcgagctcgagccgaatcggctcgagtacggctgcgaagacgacagaaggggaaaccaaactcttgagaaaacgctgattagtgattcttcctctgaatgattcagaatgaagaaccgttgttatggttagttgtgtgacctaacatggagaacgaggaagccaaagaacacaaacggatctgccaagggaaatagatgataatgtaggttatgaatatgcagaatcttaaagggcagagatataatttgaactgacccatcatacctttttcatgcggacaccctttaaactcatctccagttggttttccagattttgtagttctttaatacccaaacccgtaagttcttcccccattaattgcctgcttttgcctgcagaaaaaaaactgaaatcccgggtcgacccacgcgtccggttttaccctactgatgacagtgtcgcaatagtaattttacctagtacgagaggaaccgttgattcgcacaattggtcatcgcgcttggttgaaaagccagtggcgcgaagctaccgtgcgttggattatgactgaacgcctctaagtcagaatccgggctagaagcgacgcgtgcgcccgccgtccgtttgccgaccagcagtagggggcctcggccccccaaaggcacgtgccgttggtgaccctcgtgaggcggattagccctacgagacgccttgaagcgcaattcccatcgagcggcgggtagcacgggtttccaaaaccctaatttatcgaaaggtagggttttgcagagcctcctcctccgttaccagtttcttcttctttatcctctctcctttcttcttccattcctctaacctaagatgggcaagtcaagcaagaaatcagctatcaaggttgacgctgctccagctgtggttccgccatccaagtctgccaagaagggaggcaagcgacaagctcaagatgaaattgagaagcaagtgagtgccaaaaaacagaagatagaggaggttgctcagaagcaaaagaaggaggccaaggtgcaaaagaaggaggccaaggtgcaaaagaagaaggaaagtagttcagatgattcttcggaatctgaagaggagaaacctgcacccaaacctgtactttcaaaaaaggtacctgctaagaatggtgctgccctgccaaagaaagacaagccagtctccagttcttctgaagatgactcctctgacgaggatgaagtgaatgcaaagaagccacacaaagtggttgctgagaaacaaaagaatggagcaaccgtgtaaaagaagcatatcgtataccactctaagaaggaaagtagttcagatgattcttcttcagactctgaagatgagaaacctgtagcanaagctgccgtaccttcaaaaaagacacctgctaaaagcagcaatataagtacccccaccaagaaagcaagccagctagcagctccagttcttctgattcatctgaagatgactcttctgatgaggatgaact

SEQ ID NO: 28155 - DNA, 377 bp, Glycine max
  Clone ID: TF_jC-gmX3050018F05sg15D17b1
cccttattgcagccagaagacgacagaaggggggaggggaactggagggcctaagccccaaaaacccccagaaacaggagcaacagcacgaaagcgcactaaaacacacaagaccacggaagaaccaactgacgcatgaaacaataccagagccacataaaaaggaaaaggccctacaagaacaaaacaacactctcgccaagaagacaaaggagaaagagaaggcactagcccaacaggcacaaccggagcgaattggtgatgaaggggatcagacttcctcagcccaagaaccccaaccaccggtgacaacaaacattagaacccccacacaaaccagaggagaaggagataaccaaagaaccccaactccaacc

SEQ ID NO: 28156 - DNA, 774 bp, Glycine max
  Clone ID: TF_GmC1905_2
gctcaggcggcgggcgggttgatgaaaaccctgtggaatttttgcattccaggacatccttggcgaaggtcttagctctctgagtctaaaggaattaaagaaccttgagagtagactggagaaaggtttaagcagagttagatccagaaagcatgaaactttgtttgcggatatcgagttcatgcaaaagcgggaaatagagctgcaaaaccataataattttctgagagctaagatagctgaaaacgagagagcacaacaacggcaacaggatatgataccgggaactgagtgcgagtcaaccatacctaattcacaatcatatgaccgcaatttcttccctgttaatctcatagattccaataataatcaatattcacgtcaagaccagactgctcttcaacttgtctgatcataagctggaaagcgattttaaattatgcatggcacaacctttctatggtttcgtctatttgaatagctagctagttacctttcaagtgttgagggagctagcccatacatcgccctatatatgtttcgtgaagaacgagtgcccttagaaattcctctgctagagttattccaacggagaacaagagaaaagctagagtcaatatttaatttgtaccaatacatcatatgatattgtttatgtatctttcaatatatatagtttctattcagtcctggcatattgtatttttatgtttggttgaccatactataatattataaatgcttatttcgaaaaaaaaaaaaaaaaaaaacacc

SEQ ID NO: 28157 - DNA, 947 bp, Glycine max
  Clone ID: TF_700889004_FLI
gttttctgttttggaccatggacttggtttttaccaaatcaagaaaaggatgagcttttttgggccttcaaatcttgcttggagaaggctcaattttggtggaaacctctcacacaagaaagcatagtttcttttgggttcattctacttggtgtttagagatggtgagaggaaagactcagctgaggcgcatagagaacgccacaagcaggcaagtcaccttttcaaagcggcgtaatgggttgctgaagaaggcctttgaactttctgttctttgtgatgctgaggttgctctcatcattttctctccaagaggaaagctttatgaatttgcaagctcaagcatgcaggacacaattgaacgataccgcaggcataacaggagtgctcaaacagtgaacagatctgatgaacaaaatatgcagcatttgaagcaagaaacagcaaacttgatgaagaagattgagcttcttgaagcttcaaaacggaagctcttgggagaaggtttggggtcatgctctttagaagaactgcaacagatagaacaacagttggaaaggagtgtaagcagtgttcgtgcaagaaagaatcaggtttacaaggaacaaattgatcaactaaaagagaaggaaagagccctatatgctgaaaatgctaggctgtgtgagcagtatggtggtatccagccacagccagcaacaaaggatccgaaagaaattcaaccctatgcagaaagcagtccaagttcagaagtggagactgaattgttcattggactactcaggtctagctattgaacataatttaatccttgcctatgcaaatatcaaataagaagcccaactgcaatgtataaatatcacatgtttcctaatactgagatgaataatattatcgcttgtattatataaagaactttctagccttatgattagggtttaattatt

SEQ ID NO: 28158 - DNA, 1433 bp, Glycine max
  Clone ID: TF_GmC1834_1
attttgtttcttaatatggtgaggctgggggaatcaattggggataggtggatgaataaggaaagcttggtctgattagtctatactatatgccttgctattccactttttctgagtttttctctgcactcctttgctagctaccctctcttttgggcttttttgggccttcaaatcttgcttggagaaggctcaattttggtggaaacctctcacacaagaaagcatagtttcttttgggttcattctacttggtgtttagagatggtgagaggaaagactcagctgaggcgcatagagaacgccacaagcaggcaagtcaccttttcaaagcggcgtaatgggttgctgaagaaggcctttgaactttctgttctttgtgatgctgaggttgctctcatcattttctctccaagaggaaagctttatgaatttgcaagctcaagcatgcaggacacaattgaacgataccgcaggcataacaggagtgctcaaacagtgaacagatctgatgaacaaaatatgcagcatttgaagcaagaaacagcaaacttgatgaagaagattgagcttcttgaagcttcaaaacggaagctcttgggagaaggtttggggtcatgctctttagaagaactgcaacagatagaacaacagttggaaaggagtgtaagcagtgttcgtgcaagaaagaatcaggtttacaaggaacaaattgatcaactaaaagagaaggaaagagccctatatgctgaaaatgctaggctgtgtgagcagtatggtggtatccagccacagccagcaacaaaggatccgaaagaaattcaaccctatgcagaaagcagtccaagttcagaagtggagactgaattgttcattggactactcaggtctagctattgaacataatttaatccttgcctatgcaaatatcaaataagaagcccaactgcaatgtataaatatcacatgtttcctaatactgagatgaataatattatcgcttgtattatataaagaactttctagccttatgattagggtttaattattgatatgtttgcctttcctcatttctgaagcccttttcatatataatagcatgcacaaaagggatctaattcaattagttgaacatggtatgtgagtgatataaatcttttgataccgtcttcgatttccatcattttatgattaagcagcaaaggatcggaaagggattcgaccctatgcagaaagcagtccaagttctgaagtggaggctgaattgttcattgggctacccaggtctatctagttagagatattttaatccttgcctagtatcaaataacaagcccccctgcaatgtataaatatcacatgtttcttaatactgtgggatgaataagtattatcgcgctatactatataaagaactttccaattctatgatt

SEQ ID NO: 28159 - DNA, 1625 bp, Glycine max
  Clone ID: TF_GmC182_2
ggaagacttaggcccactgaatatcaaagaacttgagcatcttgaacggcaattggattcatctctaaagcaagtgaggtccacaaaggtaataatggataatttatacataaaaaatgtgttaagtttttggcaaattaatatatacattaagcttattaatgtagttcttgatcagtagttgcagcagcctagcgtaatttctctatttgatttaagcatctttccgtttttccgtacaatttgtttttgccaatactatggccgatgcaacattagaataggatttatcattcattaaagattttggatatttttatatgtgaagaaaatgtactgttaaggagtcatatgtaacatattcttctttttgtaatgaaaaaaaataatgcatgtggtaaatatatgatttattgtgtttgtatcctttaatttttcactactgtgtaattttcttaagaaaagcttattgtgactccttttggttacttggcactgtctgaaaaaccaatttgcagacacaattcatgctggaccagttatctgatcttcaaaccaaggagcagatgttagtagaagcaaacagatccttgacagtgaaggtaattttattccattatcctcgatgttcttcccctacctatcaagatcgattttgtaacacaaatatatatccagcttagataatttgatattctttttagttttaatcagtttgggagtgtactgtactaccctgcatctgtattttggcctatcagattggatacctgcaagttaaaattttcttcaaaatagtcctaacattgttttaaggtggtgaaacaaaaataaataaaaaccttaaggtggaaatattattctgcatattgtcgatataaataatcaatcttagtcattttacattaaggtcctctgctgatgacatgattcatgtctaactacttgttgtcaataggggaaataccaaagaactgagcatcttgggcaattggattcatcaaagcaagtgaggtaaagacacaattcatgctggacagttatctgatcttcaatctaaggagcagatgttagtagaagcaaacagatccttgacagtgaagctggaagaaatcaattcaagaaaccactacaggcaatcatgggaagctggtgatcaaagtatgccatatggtggtggtggtccagagaattctcactctcatcagggcttcttccaaccattggaatgcaaccctacactacatattggtcctgattacaggtacaatgctgtagcttcagatcagataactgccacaactcaacctcaacaagtgagtggctttattccagggtggatgctttgaactaattaggctcagtgcattcaggtggagacataaaaaagcaaacaccttacaaaagggcaaaagccaaaaatgcatcttggtgttggcaaggtgtaaatgcaaccctgcttctacagttattttggtgtataagaaactgatgttgtgacttgttcaaacttttgagactttttagccatagacatatatggcaatttataacattaggtatcttttaaaggatccctttttattattaaaatatccgagcgaccggtttcaatttttctatac

SEQ ID NO: 28160 - DNA, 1137 bp, Glycine max
  unsure (1)..(1137): unsure at all n locations
  Clone ID: TF_GmC132_1
ccacgcgtncgcccacgcgtccgtacggctgcgagaagacgacagaaggggatagcgcagtttcatttctttggattagaaatttttcccaaagctgatcgagaagccagccaggccaggagttgaagaatgggaagggggaagatcgaaatcaaaagaatcgagaacacaacaaatcggcaagtgaccttctgcaagagaagaaatgggcttctgaagaaagcttatgagctgtcagtgctgtgtgatgctgaagtttccctcatcgtcttctccagccgtggccgtctctatgagtattccaacaacaacataagatcaaccatagagaggtacaaaaaagcctgttctgatcactcaagcgcgagcactaccacagaaatcaatgctcagtattatcaacaagaatctgctaagctgcgacagcaaatacagatgctgcaaaattctaacaggcacctgatgggtgatgccttgagcacactgactgtgaaggaacttaagcagttggagaatagacttgaaagaggaatcactagaatcagatctaagaaacatgagatgctattggctgaaattgaatactttcagaaaagggagattgagctggaaaatgaaaatctttgcctccgaactaagataactgacgttgagaggattcagcaagtaaacatggtttctggaccagaactgaatgtcattcaggcattagcttcccgtaacttcttcaatccaaacatgttggacggtggaactgtttaccctcagacagataagaagattcttcatcttgggtgatcaataatatgatcttcgctatagcctatagctatctatccaattagccggaggctaaatgcattattattactactcttttgattgctcattaactagaccaaatgatctatatacattacatatgaattatggattatggatacttatgtttaatgattgtatgatatcataacaatatgttagaaataataattaaaaaatagagttgtgttagaaaaaaaaaaaaaaactggagtgtgtaaatctttgcctccgaaaaaaaaaaactgacgtggagaggattcagcaatgtaaacatgggttctggccctgaactgaatgcccgttcacgcatta

SEQ ID NO: 28161 - DNA, 982 bp, Glycine max
  Clone ID: TF_GmC132_2
cgatcattttcctatacttcgttttttatgagtctgatctttttgttctcagacttatgcatcttcttgtgctaaaacaaaaggagttgaagaatgggaagggggaagatcgaaatcaaaagaatcgagaacacaacaaatcggcaagtgaccttctgcaagagaagaaatgggcttctgaagaaagcttatgagctgtcagtgctgtgtgatgctgaagtttccctcatcgtcttctccagccgtggccgtctctatgagtattccaacaacaacataagatcaaccatagagaggtacaaaaaagcctgttcggatcattcaagtgcgagcactaccacagaaatcaatgctcagtattatcaacaagaatctgctaagctgcgacagcaaatacagatgctgcaaaattctaacaggcacctgatgggtgatgccttgagcacactgactgtgaaggaacttaagcagttggagaatagacttgaaagaggaatcactagaatcagatctaagaaacatgagatgctattggctgaaattgaatactttcagaaaagggagattgagctggaaaatgaaaatctttgcctccggactaagataactgacgttgagaggattcagcaagtaaacatggtttctggaccagaactgaatgtcattcaggcattagcttcccgtaacttcttcaatccaaacatgttggacggtggaactgtttaccctcagacagataagaagattcttcatcttgggtgatcaataatatgatcttcgctatagcctataactatctatccaattagccggaggctaaatgcattattattactactcttttgattgctcattaactagaccaaatgatctatatacattacatatgaattatggattatggatacttatgtttaatgattgtatgatatcataacaatatgttagaaaaaaaaaaaaaaaaaaaaaaaaaaaagcggcc

SEQ ID NO: 28162 - DNA, 832 bp, Glycine max
  unsure (1)..(832): unsure at all n locations
  Clone ID: TF_LIB5068-015-A1-XP1-H9
tcgggggatcgagaacacaacgaataggcaagttaccttctgcaaacgccgtaacggattgctgaagaaggcttatgaattgtctgttctgtgtgatgctgaggttgctcttgttgtcttctcaagccgtggacgcctctatgagtatgccaacaacagtgttagagggactatcgaaaggtacaagaaagcatgtgctgcttccacaaatgcagaatctgtctctgaagctaatacacagttctatcagcaggaagcgtccaaattaaaaagacaaatcagagacattcagaatctaaataggcacatccttggcgaaggtcttagctctctgagtctaaaggaattaaagaaccttgagagtagactggagaaaggtttaagcagagttagatccagaaagcatgaaactttgtttgcggatatcgagttcatgcaaaagcgggaaatagagctgcaaaaccataataattttctgagagctaagatagctgaaaacgagagagcacaacaacggcaacaggatatgataccgggaactgagtgcgagtcaaccatacctaattcacaatcatatgaccgcaatttcttccctgttaatctcatagattccaataataatcaatattcacgtcaagaccagactgctcttcaacttgtgtaactgatcataagctggaaagcgattttaaattatgcatggcacaacctttctatggtttcgtctatttgaatagctagctagttacctttcaagtgttgagggagctagcccatacatcgcccctatatatgttcgtgaaagacgagtngccttagaaattcctctgct

SEQ ID NO: 28163 - DNA, 270 bp, Glycine max
  Clone ID: TF_uC-gmflminsoy115h02b1
cctcagggaagaggatttgggacggggggcttgtgaacctaaacggcgatttttgacagactccagattgtagattgacagcttgcaaactgggcctaggccacatgaagggagaggatattaactccgttaactacaaggagctgatggccttggaggatgccttagagactgggctagtcagcgaccgagataaacagggggctgtctactggatgagcatgagacacgacaagatcttggaggaggagaacatggaacttactttta

SEQ ID NO: 28164 - DNA, 900 bp, Glycine max
  unsure (1)..(900): unsure at all n locations
  Clone ID: TF_GmC157106_1
ggctcgagcttcctctctagctagggtttccttctttatacaaaacacaacctaacaagtaacaaccttctttatatgtacttattccttaaccctcctgttaccttcttttgctttcgcgttcgttttctctttctcggtcttgctttgctcagaattgctagttacgtgggagaattaagcaccaagaagatgggaaggggtagggttcagctgaagcggatcgagaacaaaacaagccagcaagtgacgtttttcaagcgtagatcgggacttctcaagaaagccagcgaaatctctgtgctatgtgatgctcaagttgctttgattatattttctaccaaaggcaaactttttgagtattcctctgaacgcagcatggaagacctccttgaacgttacgagagatgtagccatacagcacttgctggagctaacaatgtcgaatcaccgggattttggtctttcgaacatatcaagctcaccgctaaagttgaagtcttggagaggaacataatgaatttctttggaaatgatctggatcccttgagtttgaaagagcttcacagtttggagcagcagattgagacatctctgaagcgcatccgaactagaaagaatcaagttatgaatcaatccgtctcagacctgcataaaaaggcaaggacattacaagtgcaaaacagatggctaggaaagatgaaggagaaagcgaagacagtgactgaaggtccacacaacggcccagaaactctaggctttgattcatccacactcaacttatcttctccacagctaccaccaccaccatcaccacanagactggttccttctctaactctcagtgagacaatgcaagggaggaacaccagttggaagaaacgggtgaaggctcaaaca

SEQ ID NO: 28165 - DNA, 1107 bp, Glycine max
  Clone ID: TF_GmC734_1
ctcgagccgaatcggcctagaaaatgaaaagatactcatgttatatatgcgaattcgtcacataacaacacacccccacttactcttctcatttcattcttcttccttcttttgtcttcccttagcttagtttgaagatcatggggagaggaagggttcagctgaagcagatcgagaacaaaatcagccgccaagtgacgttttccaaaaggagaactgggctgcgaaagaaagctaatgaaatctctgtgctctgtgatgctcaagtggcactgattgtgttcaatgctaaagggaagctttttgagtattcttctgaatccagcatggaaaacgtcctggaacgatatgagagacatactcatatagggaaacttgttggagatggtgatgaatcacagggaaactggtccttacaatgcttcaagctcaccggcaaagttgaagtcttagagaggaacttgaggaactttgtgggagaagatctggatcccttaaacttgagagagcttcagagtctagagcatcagcttgagacagctataaagcgcatccgaactagaaagaaccaagttatgaatgaatccatctcagatctgcagaaaaaggcaaggcaattgcaagagcaaaatggcatccttacaaagaagattaaggagaaagggaaggaagtggttgaacgtccacactgcggaccagaaaccttaggtctaacttgtcctccagagctacaacgacagcaaagagtatttccttctttaacactctgtgagactttacaagcagggcatctggaggaagttgttgaagcacgaacggttcctactgccagcactcacatcccaccatggatgctgcatccatttacaagataaatctgcatgtgacacgttatgtttgtgacacatgtgatgaatgttagaagcataagttatatatctctatatgtcaaaaacttaatgttatatagctaagtgttaagtttgataactgctcatccttgtaagtactacatggtgcaagagtgcaagtgattcttgcatgcaaatgtcaactacatttattatgaatcaatattaataatagaaacatgtagttatttttgac

SEQ ID NO: 28166 - DNA, 1137 bp, Glycine max
  Clone ID: TF_GmC528_1
ctctttctctctcttctgttttcctttttctcgagaaaattgtgttagggtttctgtgattgagcctgcaaacacttccttgagggcacaaaagattccattgtttgcttctttcagattaatttttttgtcagatcttcaagaagaagaatccagagaagctatatatacatcatcgttgttctttgccaagacaaagaagaaaaatggtgagggggaaaactcagatgaagcgcatagaaaatgagacgagtaggcaagtaacgttctccaagagaaggaacgggttgctcaagaaggcctttgagctttcggtgctgtgtgatgctgaagtcgcactcatcatcttctctaccagagggaggctttatgagttctccagttcaagaggtgcctaagaaacttttaattcgttgtctattggagatgctccagtataaacaaaacagttgaacgctatcaaaggaagatcgaggacctgggtgtcagcaacaaaggaatccatgaaaatacacagcatctgaaggaagttgatatgagcatggcaaagaagatcgagcatctagaagattcaagaagaaagcttttgggagatgaattggataaatgcagtattgacgagttacaacagctagagaaccagctcgaacgcagcctggacaaaattagggcaacaaagaatcaattgttcaggaagcgaatcgagaagctaaaagaagaggaaaagtgcttactcgaagtaaataaacgcttacgtgagcagtaccggattgaacgacaacgttgtttgagtgatcaggatgtcgaattcgccacaaaaaaggagggagaagaggtggagacggagttattcataggaagacctgagagaagaatgccgttaaagttgaaacctacaacatatagtgctcatgcatacatagcgtaatctaaagattaaaaattactaatgcccatacaaacgctgctagcttccttgcagactgttatattcatgtcttattaagatatgtaattcttgttgtaccccaaatcacaacggcggttgtgaacgcctacttaaataatttatgtacaacagtcattatttcaaaactgttcgttagagtactatatatatcagtttggaattttttt

SEQ ID NO: 28167 - DNA, 1827 bp, Glycine max
  Clone ID: TF_GmC176_1
atcaagtgaaacaatcgttgttggcgatgtgaagtatttctatttaattgagaatgggtacacataaaatgtactaaaattaagcaaattggaactacctagttactggggcattagatgcgagatctaggaactgcgttgtaatcaatgctgtggttactttctagttctacttgttgtgtttgctttacaaaaggggtgataacatattcttaatatctttcattactcgagccgatccatcataggcataccatacctactaaaactcagcgacagatcatatcatatcatgtgataagctagcttatatatacacacaaacaagagggtagaagggaaaactcttgcagaaaatagcttgaaaaaaatatatattctataaacaattatgctttttccatctggtattctgaaaaagcaagtttaatttatttgtggaaagagatataaagcaagtattaaacacatgggtaggggaaaggtggagctgaagaggattgagaacaagataaaccgtcaagtgacatttgcaaagaggaggaatggtttgctcaaaaaggcttatgaactctctgtcctctgtgatgctgaggttgccctcattatcttctccaaccgtggcaagctgtatgagttctgcagtggccatagcatggccaagacacttgaacggtatcacagatgcagttatggagccttggaagtccagcaccaacctgaaatagagacacagaggcgctaccaagagtacctgaagctaaaatccagagttgaggcactacagcaaacacaaagaaacctccttggggaagaattggagcacttagacgttaacgaccttgagcagcttgaacgtcagctggactcttccttgaagcaaatcaggtctaacaagacacagcagatgcttgatcaactctctgatttgcatagaaaggaagagatgctactggaaactaacaatatcctgagaaacaagttggaggaaatcaatgtagccctacaaccaacatgggaagctagggagcaaaatgctccctacaattgccaccctccccaaacagagggatattatgagacagcaacagcacattgcagcagtacattgagaattggctatgattcttcaggattaaatgaagcaggaggagctgcaggagcctcagcccaaaatgctagtgaattcatgcatggatggatgaactaaatttatttccaatttagtacttaaattcatgatcatcagaaaaatgatgcttttgtagagatcttggcctacaagaacaggctctaataataggtgtcatgcagcataaaatatacttatgctattcttaatattccaataagacatgttttgaagaattttataattagcatcttcccaaactcaatccatcctcattgatccaaatggggttgtttgatacttaatgacatgtgtatgctcctaaaaaaaaaaaaaaaaaaaaaaaaaaaaaaaaaaaaaaaaaaaaaaaaaaaaaagcaagaacaggctgtaaaaataggtgtaatgcagcataaaatatacttatgcgattcttactattccaataagacatgtttttcctgtttataacttgttggattgggtgattattaaatgaatggattgaattgtccttttggggagtattctaaataaaaaaaaaaaaaaaaaagaaaaaaaaaaaaaacgggggaaagtggtaagccggtcacagtctcccaaaaaatccaacccgaattaatagggttgaaccccgggggggccttaggggggggcaacctcccttaaatgggggggccctcaaggcccctttt

SEQ ID NO: 28168 - DNA, 531 bp, Glycine max
  Clone ID: TF_LIB4127-088-Q1-N1-F3
gaagaagaaagatccgtaaattaacattctctccctcccttcgctataatagcaagcttttcaagcatatttctggggtttggtcccttttccttgtttggggttttcttgggaaaaaagaagtaattaggtataataatagtataactaaagcaaaaaaaaagacagtaatatgggaaggggtagggttcagctgaagaggatagagaacaagatcaatcggcaggtaactttctccaaaaggagagctgggttactcaagaaagcacacgagatctctgtgctctgtgacgctgaggtcgctttgattgtcttctcccacaaaggaaagctctttgaatatgccaccgattcttgcatggagaagatactggaacgctatgaaaggtatgcctatgcagagagacaacttgttgcaaatgattccgagtcacagggaaattggaccattgagtatactagactcaaggcaaagattgaccttttgcagagaaaccataggcactatatgggagaagatttaggttcaat

SEQ ID NO: 28169 - DNA, 1021 bp, Glycine max
  Clone ID: TF_GmC1602_1
cttccgttggctttgtcacagtccactgtgcccccaagaaagttccttaacctcaaaccccttatggcaagttgctaacttctcttacttttatctttgaagccaccctcttctaacttctccatttcacaaggaagaagatcagagaacatttagaacaaaaaagagagtttgagaaatggggaggggtaagattgagatcaagaggatagagaactcaagcaacaggcaagttacatactcaaagagaaagaatgggatcctaaagaaggccaaggaaatcactgttctatgtgatgctcaagtttcgcttatcatctttgctgcatctggaaagatgcatgactacatcagcccttctaccacgttgattgacatattggagaggtaccacaagacctcagggaagaggctttgggacgccaagcatgagaacctaaacggcgaaattgagagactcaagaaagagaatgacagcatgcaaattgagctcaggcacttgaagggtgatgatatcaactctcttaactacaaggagctgatggccttagaggatgccttagaaactggtctagtcagtgtccgcgagaaacagatggatgtatacaggatgctcaggagaaacgacaagatcttggaggaggagaacagggaacttaattttctctggcaacaacgtttggcagaggaaggtgcgagagaagtggacaatgggtttgatcaaagcgtaagagattacaattcccatatgccatttgcctttcgtgtgcagcctatgcagccaaatcttcaagaaaggatctaatatataactcttgaattcaaaaacttcatcttggtgctgtcaaaatcgtatgtgtcacaactcttttaagtatatgttggtatctggttgtaagtaataaactaagcaactgacctttggctttaattgtgaagttacaacatcttgtgtctccaaccttattgggtaatcatatgacatcttagtgtgtttgtctgagtataaaaaaaaaaaaaa

SEQ ID NO: 28170 - DNA, 1371 bp, Glycine max
  Clone ID: TF_GmC182_4
gaaaatcctgaggataaaaaggaaacttagaaaagagagtacatatacaatacaagacaacttcacacacacaacactttcctctctctctctctctctctctagggttccaagtttgaacttgaaagtgttgaactttctctagctttttcacaaatttggttgcacttgcaactgaggcaggaaagagggatcaccagggggcacgagaggaggaagaggaaagagaagaaaaaacaagaaaagtggagaaaggggtaggtgttgtacagaaatagaaattaaaaaattgagtgaaaaattaaaagggaaatttttttagaagaagagtgatagggatatggggaggggaagagtggagttgaagaggatagagaacaagataaacaggcaagtcacttttgcaaagaggagaaatgggcttctcaagaaagcctatgagctatctgttctctgtgatgctgaggttgccctcatcatcttctccaaccgaggcaagctttatgagttctgtagcagctctagcatgctcaaaacacttgaaaggtaccagaaatgcagctatggtgctgtggaagttagcaaacctgccaaagagctcgagagcagctaccgtgaatacttgaagctgaaagcaagatttgaatcacttcaaaggacccaaagaaaccttttaggggaagacttaggcccactgaatatcaaagaacttgagcatcttgaacggcaattggattcatctctaaagcaagtgaggtccacaaagacacaattcatgctggaccagttatctgatcttcaaaccaaggagcagatgttagtagaagcaaacagatccttgacagtgaagctggaagaaatcaattcaagaaaccactacaggcaatcatgggaagctggtgatcaaagtatgccatatggtggtggtggtccagagaattctcactctcattctcactctcagggcttcttccaaccattggaatgcaaccctacactacatattggtcctgattacaggtacaatgctgtagcttcagatcagataactgccacaactcaacctcaacaagtgagtggctttattccagggtggatgctttgaactaattaggctcagtgcattcaggtggagacataaaaaagcaaacaccttacaaaagggcaaaagccaaaaatgcatcttggtgttggcaaggtgtaaatgcaaccctgcttctacagttattttggtgtataagaaactgatgttgtgacttgttcaaacttttgaacttttagccatagacatatatggcaatttataacattaggtatcttttaaaggatccctttttattattaaatatctgaacgaccgatttcaatttt

SEQ ID NO: 28171 - DNA, 1123 bp, Glycine max
  Clone ID: TF_GmC4870_6
gggggaaaagcgtagtcatcagtttgccgatagaagtagaaaatggaatcttgatcgtattatctttgttgctcatccattactccttctgcagtagaataatatataaagagagaagagtgcaatctagaaccacatagttattttactgtgtgagtgagagagagaaaattaacatgggaagaggaagggttgttctggagagaatagagaacaagatcaaccgtcaagtaacattctcaaaacgcagaagtgggttgctgaagaaggcctttgagctttctgtgctatgtgacgctgaagttgcccttatcatcttttctagccgtggcaagctttttcagtacagcagcactgatattaacaaaatcattgagaggtatcgccaatgtcgttacagcaagtcgcagactgacgattcattggaacacgattcacagagttcataccatgaattcttgaaattaagagcgaaatatgaatcacttgagctgacacaaaggcattttcagggagaagaacttgagccacttagctttaaagatttgcagagccttgagaaacaactagacataacgctcgcactaactcgacagcatcaaacgaagaaactcttggcacgagcagatgaattacgcgaaaaggttcacaagttggaggatcttaacaaacaattagagtccaaggaaaaagatgaattctcaagcctcatccttgacaataacaattacattcaagtgcatgctacacaaggtgatcaatttgagtctgggacaacactaaacacatgtaggtttcaacgccaagattcaaaggaaaaagcaattgataccaagacagacggtagtcaaagcagtcacaacaaaaacaaaggatggctattgtgaatattcatttaatttacatgttgaaaaaaaatatctatcaataactcaggggtgcccatgtattggtataattcacaaaatagtttatataaagtattatttctactaaacacacacattgttcctaaaataagatattgtactttatgcaacagtaaagaggaaaaattatgtatttcaactatcattgtataaattgtcattagaagatgttctgaaatattgatattttagct

SEQ ID NO: 28172 - DNA, 1248 bp, Glycine max
  Clone ID: TF_GmC791_1
gaattaaagggagggtaccagctgtcaaatagtgctttccacacactttcaccaatttataaattatttgcagttacactccaagtctactttttctttggcagcttagccttcctattttggaaaccctcttcactgctctcccaccttttttgtgtgtatgtgtatgagcttctcttctactctattcactgcactcttattaataaatatcagtgcttggaaagcagaagagaagatccatagctaagatagatctcgagatgggtcgtggcaagattgagataaagttgattgagaaccccaccaacaggcaagtcacctactccaagcgaaggaatggtatcttcaagaaagctcatgaactcagtgttctctgtgatgccaaggtttcactcatcatgttctctaaaaacaacaagatgcatgaatacattagccctggcctcacgacaaaaaagatcattgatcagtatcagaagactttgggggatattgatctgtggcattctcactatgagaaaatgcttgaaaacttgaagaagctgaaagatattaacaataagctcaggagacagatcaggcataggataggtgagggcttggacatggacgacatgagcttccagcaactgcgcactcttgaagaagatatggtttcatccatagggaaaatacgcgaacgaaagtttcacgtgatcaaaactcggactgatacctgtaggaaaaaggttaaaagcctgaagcagatgaatggaaatctgctgcttgaacttaaggaaaagtgtgtgatccatccacaatttcttttgcacgatgaaggagacgaggaatcagcagcagcagcagcagcagcagcagttgcactggccaacggtgcctccaccctgtatgcattctgtcatcagcaccattctcatctgaaccttttctcccaccattctaatggagaagagcaaccctttaaaactgatcatgaccttcgccttgcttgatccagtgcaacaattaactagcaataatgtaaattaactagctagccagcactaagcacttgttatttatgctttaatttgtattaattggacctgttaaacccaactttgcttgcaacctctctagtttctatccaggtagagaattagctaagcttatatagtgtttggcaagagcgtgctatgaaaaacagaaagactgtactttatttgttattataagtttacattgagtgattatgttatgattcac

SEQ ID NO: 28173 - DNA, 2718 bp, Glycine max
  Clone ID: TF_GmC1762_1
ggctcgaggcctcccatttgcggcaatgcaaatgcacctcctctttccctcattaattgaaatcgctgccccagatcgtgcaagtgaagattcggctagctgaagcattgaaggacgtagctgctatggctcgaggaaagatccagatcaagaggatagagaacaccaccaaccgccaggtcacttattctaaacgacggaatggccttttcaagaaggccaacgagctcaccgttctatgcgatgccaaggtttctattattatgttctccagcactgggaaactccacgagtacatcagcccctccacctcaacaaagcagttcttcgatcagtaccagatgactctaggagtcgatctctggaactctcattacgagaatatgcaagagaacttgaagaaactcaaagatgtgaataggaatcttcgtaaggagattaggcagaggatgggagattgtctgaacgatctgggcatggaagatctcaagctccttgaggaagaaatggacaaggccgccaaggttgttcgtgagcgtaggctcgaggcctcccatttgcggcaatgcaaatggacctcgtctttacctcataaattgagagggcttcggaaggaaatgagagttttgttccgttctaagcatggggaaggaaggagatctatgggacgattcagtactcatcaatgccttcgaccaagctatttctacttacaacaaaatgcatagcagcggcaaacacaaagacgccgcctcggttcaagaggaggcgaagacactgatcggagaaaatggctccaattttgacactacaaggggtgctgatacgaatattccagctactgatgcgcttgattcaggtgagactggtaatttgtcgaagttggaagaaaatcatgacacagagtcacaggtggatcatctggattcaacaaggggtcaagacatccagaatgcacagaacggcaatgcatatgctaatgctgtaaatggttgtaaataaaagcgctgactctgcttgacccttaactagaaaagggtgggaattttggaaatgcgtgtgctgattctatctttggatttccctatttgtattctctgattttctctactgttgcaccaaaatctatttatcaagattattcagcgactgcataccaagtttatgatccaaatgctgtctgtacatgttgcccgtgttacagtcaatgtctgccggctccatgcacgtcagttcctggttggtttttgggtggaaaatctgtaagcaatctgtgtagcaatctttctttggaaattgatcaaaaaatgtatttgccctgtgaagaaggtacaatccactaactggccatgggaactccggagaactaacctgtgcatactataagaaaaaaagagtaaagatcttaaattaattaaaggaaaactagtatgtgttgtgtctgtagcgaatatttggtttgcggtgtctatcttttgctcaattgatgatccccttcttttttttcattactggatgtaacatataatgtttgcattgagaacacgaatgagtcgaagttttaaatggaactatatgtttttaataaaatactcaaaattagatctactacaatacttgttatattctgggtagattttcattcgatctatctgtgatgacgtatttggtaaatctgtgttctattgaatttgctcaatttagcatatttatcattaatgaattcttttgcttataaagaatattagaaattagatgtagatgctggaggaatgatccagatcacgaatttggagaacaacaccaaccactatgtctcattttctaagacatagaatgcctttttataaaaggcctacgatctccttgttctttgaggtgacaatgtttctattattatgttgcccaacaaaggaaaactccgcaagtaatgcagcccttctttttcaaaaaaagacattgctaacaaaggatatttaaatgctgttgaacatgattaaaatgtttatattagtataaggtgataacaaatcagattgacacccagaggaaaaagtttaataacgagaaagaagtgcacaacaggctcctgcatgacttggcgtgaaaagcagaagcacgttacacatcggattgtcacccaaaggaaaaagtttaataacgagaaagaagtgcacaacagactcctgcgtgacttggatgcaagagcagaagatccacgttttgcattgatagataatggaggggagtacgagtctgtgatcggattctcaaatttaggtccacgcatgttcgcattgagcctacagccaagccatcctagtgcccaaagcggagcagcaggctctgatcttaccacttaccctttacttttctagtacgcaagcttaagcagctcgatctcttcatcaatcagaaataccacattcactcaaatttcaataagaatatgacttgtgatcgatatcttaagttatgcacccgtacgtgcagtttgtacttaaccacaaaacaatctcacgaatcttctcttctcggtcgatcgcatatatgcatgtgtgaattattcagttgcaactgatgaactgttatctctgtatgttttttagcctaatcatatacctgaaacatgacgttgcatgtgtttccttttattgagaatgctttagcatgcatgattataaattatagagcgtttcataggtctttattttaact

SEQ ID NO: 28174 - DNA, 1244 bp, Glycine max
  Clone ID: TF_GmC1499_2
accattgtgaggatgtgacaccatctgtcgtggctgcatacggctgcgagaagacgacagaaggggacgcagcgagcgagccacgaaaatattcatcacacagggttttggtttattattccaatttttggttttcccttttgttggatattagagtgtgtaagaaagagaagagagagaaatgggaaggggaagagtggagttgaagagaattgagaacaagatcaacaggcaagtgacctttgcaaaacgaaggaacgggcttttgaagaaagcttacgagctttccgttctttgtgatgccgaggttgctctcatcatcttctccaatagaggaaaactgtacgagttctgcagcagttcaagcatgctcaaaacgctagagaggtaccagaaatgtaactatggtgcgcctgaggctaatgtgtcaacacaggaagccttggagttaagcagtcaacaagagtacttgaggctgaaagcacgttatgaagctctacaacgttctcaaaggaaccttatgggagaagatcttggccctctaagcagcaaagagcttgaatcacttgaaaggcagctagattcgtctttgaagcaaatcagatcaataaggacccaattcatgctggatcagctttctgatctacaacgtaaggaacactttctaggtgagtcaaacagagatctcagacaaaggttggaagagtttcaaataaatccactccaactgaatcccagtgctgaagatatggggtatggacgccatccaggtcagccccaaggccatgctctctttcaaccattggagtgtgagccaaccttgcaaattggatatcatcctgatccagtatcagtggtgacagaaggcccaagcatgaataattacatggcaggatggttaccatgaaagagtgtcaaatgtggagcataattaaagatcctgccgtttaatttcaaatttatttgaagttaaggaaaacggaaatttgtaatagcacgtaatggacttacactagactctaccttctaattaagctaggaacaatataagcagtgattttgtgtgtgagctttcataaacagtacctagctagcctcttccttgtttcaataatcacttcttccttttcctaattaataaaactatcgtatgcaccctttgcctttacattaccttgtattacctaccaatgacctcacatgtttgcttttgtcactctataaaattagtgtttaattttctc

SEQ ID NO: 28175 - DNA, 1235 bp, Glycine max
  Clone ID: TF_GmC951_1
ggcgagtacggctgcgagaagacgacagaagggggatgcataaaccacgatggatgaaaggtggtttttccactttataaatacccaattcttcagccactttgcttttattttctgatatatctccttcctgttctgctaagtggcaaagaaagaaagaaagaaaatttcaagggctgaaacatctatctttaactgtattctccctttgtttcctcaccagttgattcaggttgcaaacatggcttttccagacccatccatgtcagtttctccacagaggaagatgggaagggggaagattgagatcaagaggattgagaacactaccaatcgccaagtcacattctgcaagcgcaggaacggcttgctcaagaaagcatatgaattatctgtgctttgtgatgcagaggttgctctaattgtcttctctagccgtggacgcctctatgaatatgctaataacagtgtcaaagcaaccatcgagaggtacaaaaaagcaagttcagattcgtctggcgctggatctgcttctgaggctaatgctcagttttaccagcaagaagcagataaacttcgtcaacaaattagtaacctgcagaataacaacaggcaaatgatgggtgattctttgggctctctgactgccaaggatctcaaaaatctggagactaaattagaaaaaggaattagtaggattcgttcaaaaaagaacgagctgctatttgctgaaattgagtacatgcaaaagagggagatagacttgcacaacaacaaccagcttcttcgagcaaagatagctgaaagtgagaggaaccaccataacatggctgtgttgcctggaggctcaaactatgactctatgcagtcttctcagcaacaatttgactctcgtggctacttccaagtcactggattacaacccaataatcagtatgcacggcaagatcagatgtcccttcaattagtatgatgtgtttagtattgagatttgagatgttctgctacttgtagtttgccttctagtatgatagcagatgaatgctaagggtaatgtaagtagaaccatttgtaggggatttaagcatatatcccctcagtactatatatatgtaatggctttgtagactttcttaagactatcctgtatctattgtgaaacgctctgagatgttagtatttgtgtcctaattaatagtatgaagaagaaacctagcttggcatgtttttccccc

SEQ ID NO: 28176 - DNA, 2719 bp, Glycine max
  Clone ID: TF_GmC1905_1
ttttaaccttcaacagaaagaactgtatgatcaggcagtgtctccaattgtgtatgaagtgcttgagggctataactgcactatttttgcgtatggacagaccgggacagggaagacatacacaatggaaggaggagcaagaaagaagaatggcgaatttccgagtgatgctggtgtcatcccaagagctgtgaaacagatttttgatatattggaagctcagaatgctgagtataacatgaaagtaacatttctagagctttacaatgaggaaataacagatcttttggcccctgaggaaacttcgaaatttatagatgataagtctaggaaatttgcaggccgttgagtgaagatgaaacgaggctgcacacgccggttgtgatttcgtgtaacgaagatagaagagaggttttagctgttcagaatatcgccaacaaacagatcgatagaaccttcgcatttgacaaggttttatccagcttcagatacctgaaaagagaagagcgagatggcgtcggtggtgaagaacgaactcaaatccgtcagagaaaagggtttcggcgctttcctcagagagctcaaggatggaggctacctgagatgccttccggatggaaatctctttgttagaggaactatcgataggtacaagaaagcatgtgctgcctcaccaaatgcagaatctggctcgagctttttcatctccgttcgaaaaccccgatttccacttcgaattcgttcacgctgtcaaactccacaacaacatcaaggagcacttgagtgcccaggggaatcacctttgccgatctcgtcacgccgaatcctcatcgaaccaacgctcttctcaattttggtgcctatagggacgtgaggttgaactatcttggaaactgaggacgaagtgaatgcgatagaggcacaacaaacagagttggaggagaataggatgttgcaggaagaaactcaggtttgacaacgccatggttactcttcaatcagccaagtgcttgattttggcctcggttcaactcattggtaatcttagcaaagatatatacttcgttttgatccttgcaagagagagagagagagagatttcatccatacacttgttgttgttaaatctaagtatttgcttgcagcaaagttccgtaacagtggtaagggaggaggaaggaatgagggaaaagttattagaaaattcggctcgaggaaatggcgtgtggaagaacgtactcagagaaaagggggtcgacgctttcctcgagctcaaggatgaaatctacctgagaatgccttccggatggaaatctcttgcaaaccaagatccacaatattggggcaacacttgttggctgcggaagacgacagaagtggatattttgcaacattttcacctcacttgaatgcataacaccaaagtacgttcagtattgttctccgtacataaaccttagatggaatatcgtaacgaagctatacgcgaagagtattcacagaaaggaacaggaatatgggaaaataggggtcaagcggatcaaacacaccaacgaattgtcaagtaaccttcgtgcaaaccgccgtaacgggttgctcaagaaaggcttatgaattgtctgttctgtgtgatgctgaggttgctcttgttgtcttctcaagccgtggacgactctatgagtatgccaacaacagtgttagaggaacgatcgataggtacaagaaagcatgtgctgcctccacaaatccagaatctgtgctctgaagctaatacacagttttatcagcaggaagcgtcctaaattaaaacgacaaatcagagacattcagaatctaaacaggcacatccttggtgaagctcttagctctctgagtctgaaggaattaaagaacctggagagtagactggagaaaggtttaagcagagttagatccagaaagcatgaaactttgtttgccgatatcgagttcatgcaaaagcgggaaatagagctgcaaaaccataataattttctgagagctaagatagctgaacacgagaaagcacaacaacggcaacaggatatgataccgggaaatgtgtgcgagtcaaccatacctccacaatcatatgaccgcaatttcttccctgttaatctcatagattccaataatcaatattcaaatcaagaccagactgctcttcaacttgtctgataaacgatttgaaattatgccgcagcctttcaagtggtgtgggatcccttacatcgtcctatgtttcgtgaaggagagtgcccttagaaactcctctgctaaagttcttacaacggagaacaagagaaaaactaatcagcatttgtaccaatacatcatttgatattgtttatgtatctttcaatatatatagtttctattcagtcctggcatattgtatttttatgttataaatgcttatttcaatatgaacactatatctatcgaggagtaaaagttaactgggcgtccgcattattcatcaaagttggacaacaaagaggaggggattaaaatcagtgggttacttttgattctcaagcatttgagcaataacacaactattgtatttgattgtgttgcaagtcttacgatgggtaaaataaaaataaaaaatcaaagtgaattagtttgagtactatggaattgtttgcaggataattttcgtgaaattaattcaaaaatagcttccaagtaaaaaaaa

SEQ ID NO: 28177 - DNA, 1395 bp, Glycine max
  Clone ID: TF_GmC130282_1
gcagcgctcatcctctctctctttccttcattggtggctttcaacccaaagctgaaatcatctaaacatggcaaaccaaaccgaaccaaaaaccaacattcctaatatcaacgccttcccccaataaggaaagtaaaaatcaacaagtacatccttactcagctctctctttcaacaacatcccaccacacactaacaccaactccaactccaactccaagtcttcccctaactaacaccactaacaacaatcactaaaaaaagaaagaaaatttaccctgatcgcaggatctccgaacaaagctttgatttcacaaaagctaaatttagataaacacctgcatattaaatttttctgctctatacatgcatcacatgtccctcacactaaacaaaagaaaaacaccaccaccctttgcttttgcttttctataagtagtcaacggctcagccttaatttctttgctttttttaggttaaggtacatggtgagggagaagattcagattaagaagatcgacaacgccacggcgaggcaggtcacgttctccaagcgtcgcagagggctcttcaagaaagctgaggagctttcggttatgtgtgatgctgatgttgccctcataatcttctcttccactgggaagctctttgagtactcaagctcaagcatgaaggaaatacttgaaaggcatcatttgcactcaaagaacctagcaaggatggaacaaccatctctcgagttgcagctagttgaaaacagcaattgctctagattgagcaaggaagtggctgaaaagagccatcaactaaggcagctgagaggagaggatcttcaaggcttaaacatagaagaattgcaacaattggagaggtctcttgaaactggattgggccgtgtaatagaaaagaagggtgagaagattatgagtgagatcactgatctccaaagaaaggggatgctattgatggaagagaacgagcgactcaaacgtcacgtggcgggcataattaatggtcaaaggcatggtggtgccgaatctgagaactttgttatggatgaaggtcagtcttcggagtctgtcacgtacgtttgcaattccactggactcccccaagactatgaaagctcagatacttcgctcaaattggggctaccatactccggctgatgagaaagtgtgtgaggagataaaattaactcaagcaaaagtgcacaagattatggtctaaatttcattaatgattatgtctctagtatgtccccgtggtgtgtataggtagtataaatattagtaaatagtaaggacttatgttatggggtactctaatgtcattcagaattaattgttttttaaaaagaaagcaattcgagttatgtttttaattggaaaaaaa

SEQ ID NO: 28178 - DNA, 1398 bp, Glycine max
  Clone ID: TF_GmC1362_1
gatttcggctcggctaaagataggtcaaatccaacgctttcttcaacatacatatctcaattatgtagcattagcatacccttttttattctttcttctatttctctgcagtgctcaagccttcctagctcccttccttggctcaaaagattttcccttgattttgccaatttggtgcatatctgcttcgttttgctttctgtgtcttcaagtcttacttggaagggtcagatttgctgcaaatctctccatttccccatcatcagaaggtttaatttcttggtttactctatagctacttgaaagaagtcaaaaaaagagataatggtgaggggaaagactcagatgaagcgtatagagaatgccacaagcaggcaagtaactttctcaaagcggcgaaatgggttgctgaagaaggcctttgagctatcagttctgtgtgatgctgaggttgctctaatcatcttctctccaagagggaagctctatgaatttgctagctccagcatacaggagtcaattgaacgataccgcaggcataccaagcatgttaatccaactacattcagatcagttgaacaaaatatgcagcatctgaagcaggaggcagaaaacatgatgaagaagattgaccttcttgaagctgcaaaacggaagttcttgggggaaggtttgggggcttgctccattgaggaactgcaacggatagaacaacagttggagaggagtttaagtaatgttagagcaagaaaggtttttaaggaacaaattgaacaactaaaagaaaaggaaaaagccctactagatgaaaatgccaagctcactgaaaatgccaggctctctgagaagcatgacatccatctacagccagcaacaaagaatcagaatgtgaatcaaccccaatgcaatgcagaaagtagttcaagttcagatgtggagaccgaattgttcattggacttcctgatacaagagcaagacacatctctcatcacgtctagtagaagattacttattccctggctatggaaaataaaataagggtaagcctaactgtatcatcaatgtatatgtatcctgatgctctagtaaagataataatagaataattttaaatcctcttacagtatcttcctaataatccttctaattattaatgaaatgaagaaaatattaaattttttctctgttttccaagtgttaaatgtttttacattttcatctaatattttctttatgaagtataagaaaattattgggaggatgttataggaggatataaattattctaaatagtagtggtaattggtgggagtgatttgttttgcttgattatatcctcaaacccatggtctaatgacccgttgtattgatacttatactttagactcagcagtatg

SEQ ID NO: 28179 - DNA, 1114 bp, Glycine max
  Clone ID: TF_GmC1499_5
ggagaagatcttggtcctttaagcagcaaagagctcgagtctcttgaaaggcagctagattcgtccttgaagcaaataagatcaaccagggtactcaagtttccaacttttcttttccaatttccatatgaaattgtagatctaggaacatattaagagcccaatcttgaaatatccctatgtctatatggtcaagcccattttgagagagttatttaagtcatgctctgagtaatgtaagaaatggaaatacaagtattggggcacattattaccattaaaattgaaagggtaaagtaactaacaaggaaattgctgttttttaatttctctattgattaatgaagagaaactcttggttacataattctaaatatagatatatcaatctcaaaatgtgtaatttctaagtacaaatgtagtatatgtatttaattttgttaagtttgtttccttaatttacagacccagttcatgttggatcagctctctgatcttcaacgtaaggtatgtatgaaaacaattttagtttcctttgccaccgtttaccatctcatgccatacctccgtttgttctccaattgatacatgtcactggtgtaggaacacttgctaagtgaggctaacaggtctctcagacaaagggtaagttagaaacttagaattcatcaacctatatatgtaaatatacatcatcccacaaagtatatagcatataattaatacattttaaaatagaattaggaatcatgcaagaccaaaacattgctataagatacaactgatattgtgatatcgaaaattgatgggtataaatgactttatctgatttgtagcagttggaagggtatcaaataaatccactccaactgaatcccggagttgaagagatgggatatggcaggcatccagctcaaactcatggtgaagccctctttcaacaaatggagtgtgagccaacgttacaaattgggtatcagcctgatccagtatcagtggtgacagcaggcccaagcatgagcaattacatggcaggatggttaccatagtttgcgtttcctgcataagatccactgcaccagcacatttgccgttccaattttatttgaaaacg

SEQ ID NO: 28180 - DNA, 728 bp, Glycine max
  Clone ID: TF_GmC4870_4
ggaagaggaagggttgttctggaaagaatagagaacaagatcaaccgtcaagtaacattctcaaaacgcagaagtgggttgctgaagaaggcctttgagctttctgtgctatgtgatgctgaagttggccttatcatcttttctagccgtggcaagctttttcagtacagcagcactgatattaccaaaatcattgagaggtatggccaatgtcgttacagcaagtcacacactggtgattcattggaacacgattcacagagcgcataccatgaattcttgaaattaagagcgaaatatgaatctcttgagcggacacaaaggcattttcaaggagaagaccttgagccacttagctttaaagatttgcagagcctggagaagcaactagacataacgctcgcactaactcgacagcaccaaacgaagaaactcatggcacgagcggatgaattacgcgaaaaggtaagttgttaaatgctaattaacttgtttgattttactccgtgtgaagtttttctgtgaatttctctctattgttatgttttttcttgtttacaactcggggctgcagaagttattggctatttgttttttttttttttaaaaaaagttattgtttatcttattatagagagaaaattgatatactttttaaagaagtggggctagacgtccaagtctctatcatccattataatttggtctctttcataattagattttaa

SEQ ID NO: 28181 - DNA, 1169 bp, Glycine max
  Clone ID: TF_GmC175_1
cccacgcgtccaattcggctcgagcaactactactactataggtacttactactttgcctagctcctctttctctctcttcccttttgcactgaacttcactctctcttctatatcaagggttgatcacataacctcaatatatttctaataataattgatatagtttgagttattgtttcgagacacacagaaagagagagagagagagaatgggtagagggagagttgagttgaagaggatagagaacaaaatcaaccgccaagtaactttctcaaaaagaaggaacggtttgctcaagaaagcttatgaactctcagttctctgtgatgctgaggttgccctcatcattttctcaagccgtggaaagctctatgaatttggaagtgttgggactaccaatactattgagcgataccaacgtagctcttttactcctcaagacgaacacgttgaatgtgaaactcagagctggtaccaagaagtttcaaagctaaaggcaaagtatgagtctcttcaaaggacccagaggcatttgcttggggaagatcttggaccattgaacataaaggagctgcagaatattgagaaacagcttgaaggggctttagcacaagcaagacaaaggaagacacaaatcatgattgaacaaatggaagagcttcgcagaagggagcgccatcttggagacatgaataagcaacttagactcaagcttgaagcagagggatttaatcttaaagctacggaaagcttgttgagctttacttcagctgctggaaacagtggctttcactttcagcagcctcctcaaaccaatcctattgattaccagcagccagaaccctttttgcaaatagggtaccatcaatatgttcaatctgaggcatctaatgttccaaagagcatggcttgtgagactaacttcatgcagggatggatcctttgatcaatcttattaattgaattaagtatatgatgatttaccttattgtctatatcctttttagattttttgtgttttggctgttgttaaatgtacctttgtcaccagaaaagttgcaaacttgtttagctctttctgtaattggatacaagtactacagacaatggttttactatatgttaaagcaatgctattgtttttaactttgatgctttgaacctat

SEQ ID NO: 28182 - DNA, 1191 bp, Glycine max
  Clone ID: TF_GmC1805_1
ggagtatcaaatatatagcaagacatagcaagacaagatatgggagggagaaaagaaaagggtggtgaatgtgaaaatagagggagcatgtggaatggttgtggtcactattatatatgttgtctcttacgctttgcatgtgactttctttctttctttatatcctttatatattaagtatatgctgcaatatatttaattaaagagagaagtaacatcaaggtgcagagagaggaattgaagcatgggaagagggaaggtggttctggagagaatacagaacaagatcaatcgccaagtaaccttctcaaagcgcagaaatggtttgctcaagaaagctttcgagctatctgttctatgcgatgctgaaatcgctctcgtcatcttctccagccgtggcaagctttttcagtatagtagcactgacattaacagaatcattgagaagtatcgtcaatgctgcttcaacatgtctcagactggcgatgtagctgaacatcaatcggagcagtgcttataccaggagcttttggtattaagagtcaagcatgagtcactccagcggactcaaaggaatcttctgggagaagaactagagccacttagcatgaaagaattgcatagtttagagaaacaactggatagaacgcttgcacaagctcggaagcacctgacacagaagctggtatcacgaattgacgaattacatggaaaggtgcatagcctggagcaggctaacaagcatttggaatctcaggaaagaggtaaatgtacccagatttgtgaaggttctcctaatggccatattttgcaagataaacaagtcaatcagtttgaatatggaacagcaggttcgtttcggcttcagcaagagcaaactactgcttccaaaggaaaagaaatagagacgatcgaggactggttgaggccaaagcagtcataatattaatatattgcaactttgaatgttcatagagttaaaatatattgttcgtggtcgtgtgtgtatccatcaaatatatagttccaagcctcaaaattctagctatatagtacgttaagcgtccattgatgtagctttgattaatttagtgtatgtttgatacaagatatttaatttagagaattaatagttttatttttatcgatttcctaaaaagcttttacaaatgaagctttaaagaggttacg

SEQ ID NO: 28183 - DNA, 933 bp, Glycine max
  Clone ID: TF_GmC1110_1
tacggctgcgagagacgacagaagggggcatttaagaaacacaaaagatagaaagaaaataaagagaaggagaaggggagaagagagaaaggttgtattgagagatatggggaggggtaagattgagatcaaaaggattgagaactcaagcaacaggcaagttacctactcaaagaggaagaatgggatccttaagaaggcaaaggaaattagtgttctatgtgatgctcaagtttcccttatcatctttggtgtctctgggaagatgcatgagtacatcagcccctccactacgttgattgacgtcctggacagataccaaagagcctctgggaagaccctgtgggatgctaagcatgagaacctcagcaatgaaattgatagaatcaagaaagagaatgacagcatgcaaattgagctcaggcacttgaaaggagaggacatcacgtcactgaattacaaggaactgatggctctagaggatgcccttgaaaatggcctcagtggagtccgtgagaaaaagatggaagtgcacaggatgttcaagagaaatgacaagattttggaggagcaaaataaggaactcaatttccttctgcaacaacatttggcactagaaggtgtgggaaacatgcatggacaatggatttaacgagattaaaagggtattcaattcgcatatgcaacgcgcagctagcctaaaacagccaaatctaaaagaaagaatatagattaatggctggtcttgtcaaattagttctgctcaaagccttaagttatatgaacttctatcatttctgatttcggccgtatttgttaaagctcggtagtgtatctctaaaacttgttatacgattattgaattctgattacgaaactatcaattaatgtgcatgtatgctgccaatttgagttatatatacatgcatggag

SEQ ID NO: 28184 - DNA, 1240 bp, Glycine max
  Clone ID: TF_GmC138_1
attcggctcgagcccagatagttttctcaccatttccgtattttacttcacctttagtgggtagtggttacatgatatcagcacactttcactcactgtgctttcccgtgacacgcatctatacttgtccagaagaagtaagatccatgaactaacattcccacacgctcgcttcaccatatttgccacccttttaacctcacttcttagggttattttgctcccttttccttgtttgggaattgggtttggtttggtttttcttggttgtaaaaggaaacaaagaaagaactaagatgggaagaggtagggtacagctgaagaggatagagaacaagatcaatcgccaggtaactttctccaaaaggagaggtgggttgctcaagaaagctcatgaaatatctgtactctgtgatgctgaggtagctttgattatcttctctcacaaaggaaagctctttgagtatgctactgattcatgcatggagaagatactggaacgccatgaaaggtatgcctatgcagagaggcagctagtagcaaatgattctgagacacaggaaaactggaccattgaatacactagactgaaggcaaaaattgaccttttacagagaaaccacaggcactatatgggagaagatttggcttcaatgagcctcaaagagcttcagagtttggagcagcagttggttactggtatcaaaaacatccgcacaaggaggaatgatctcatgtccgagtccatttctgagcttcagaaaaaggagaaaaggatacaagaggagaataacacccttgcaaagaagatcaaggagaaagagcaggctgtagcacagcaagctgcacaatgggagcagccaaactacagggttgatacatctttcatgccacagcagcaaccccttcccaccagtttgaacatatgtggcaataattactgccaggaagctgcaccagaactaggaaggaacggtctagacctgaccctggaaccactctattcttgcaaccttggatgcttctgaaaagttgtttcttctgagttggattatattatataagtgctggcatatatgaactactataagtagtctgtttgaatgttttatatgtattttggtctatggcttttccctctactttgaagacattattttgaattgcttctgttgtaaacaaattgaatttgaaatctaattgtgtatttttgaaatatgttaattatacggttttcctt

SEQ ID NO: 28185 - DNA, 833 bp, Glycine max
  Clone ID: TF_GmC1362_2
gaggcagcaaacatgatgaagaagattggccttcttgaagctgcaaaacggaagttcttgggggaagggttgggggcttgctccattgaggaactgcaatggatagaacaacagttggagaggagtttaagtaatgttagaacaagaaagatccaggttttcaaggaacaaatcgagcaactaaaagaaaaggaaaaagtcctacttgatgaaaatgtcaagctcactgaaaatggcaggctctctgagaagcatggaatcaatctacaaacagaaacaaagaaacagaatgtgaatcaaccccaatacaatgcaggtagtccaagttcagatgtggagaccgaattgatcattggacttccggatacaagaacaaggcgcatcgttcatcaggtttagtagaagattatttattccctggctatggaaaataaaataagggtaaaaataatgatagaataattccaaatcctcttacaatatcttcctgataatccttctaattattaataaaatgaagaaggtattaatttttttctctgtttccaaagtgttaaaatgtttttacaattttcctttaaaactttctttatgaagtattaagaagagtattgggaggatgcatgttataggaggatatattattataaatggcagtggtaattatgggaatgatttgttttgcttgataatatcctcaaaacctatggtctaatgacccgttgtattgatacttatactttagactcagcagttgtatagttgccctcctggggtttgataaatggatgactttccttgagtcttgagccggccccgctggcttttcttcg

SEQ ID NO: 28186 - DNA, 1612 bp, Glycine max
  Clone ID: TF_GmC182_1
tacgagagcgagacgacataaggagggaggaacacaagtgttgttgttgttgttgatgatgtttgctttgttctctttctctctcctcaaattttttcctctctctctagggttccaagagtgtcttgaactactccagaaccctctcttgtttttcacaaatttgggtttagtagagtactgacccagaaaagaaggttcaacaggtacctaagagaggggatagaaagaaaaaaatagaaactgtacgtataaaagaagaaagaaacaaagatataaggaaaaagggaaaatattttgaataaggaagatataaggcaatatataaaaatattagtatttgataataattaggtgtagaaatattatggggaggggaagagtggagctcaaaaggatagagaacaagataaacaggcaggtaacgtttgcaaagaggagaaatgggcttctcaagaaagcctatgagctttctgttctctgtgatgctgaggttgccctcatcatcttctctacccgcggcaagctttatgaattctgtagcaccaacagcatgctcaaaacacttgaaaggtaccaaaagtgcagctatggtgcagttgaagtcagcaaacctggcaaagagcttgagagcagctaccgtgagtacttgaagctgaaagcaagatttgaatctcttcaaaggacccaaaggaaccttcttggtgaagacttgggcccactaaataccaaagatcttgagcagcttgagcggcaactggattcatctctcaagcaagtgaggtccacaaagactcagttcatgctggaccagttagctgatcttcagaataaggagcatatgctggtagaagcaaacagatctttgaccatgaagctggaagaaatcaattcaagaaaccagtataggcaaacatgggaagctggtgagcaaagtatgtcatatggtacacaaaatgctcactcccaaggctttttccagcctttggagtgcaaccccacattgcagataggttctgactacaggtacaaccctgaagcctcagagcagcagctagctgccacaactcaagctcaacaagtcaatggatttattcctggatggatgctttgacctaagctctcagtattttagatggctacataaataaaattagcaaacacctaagaccaaagtcaaaatgcctcttgctgttggaaatgtgtaaatgctgcttgttctttagttatttatttgttttggcataaaaacagcagtgactgacttaaaactattaaaactttagccatagtcataggatgtggcatgaaggttatagtattttgaatatctttggaggacaagttttatctgactgaatgacctgttaatgtcatttttcttttgcaatcactttctctttctaatctggctgcattaagagttgtttttaaacttcttgcattcattagtggagcattgtacaatgatatatatgacaatattgtaaagtatactgaggctatggaaatgccacttgaatttattttcaagggtgaactacgaagagaaaaccttgataagattatagatatattaggaagacagtcttaacccccaccccacccccac

SEQ ID NO: 28187 - DNA, 859 bp, Glycine max
  Clone ID: TF_GmC1905_11
ctccctagtagttgaggcacttcatgcattcatacaagatgaatcagagcacaagtgattgctattggtgtctttagtaatatggtgctatccaattggcaaacctcatgagtagtagaagcagcagtcaagagggaaagaaccatggcatatgccttctctcatcagtggagggcctgctctagccaaggcctaggtaattatgaacttggcaaagctagttggagttggagctagaaggatcgttggattgttgcactgcccaattcaattatttttatcagcaggaagcgtccaaatttaaaagacaaatcacagacattcagaatctaaacaggcacatccttggtgaagctcttagctctcttagtctaaaggaattaaagaacctggagagtagactggagaaaggtttaagcagagttagatccagaaagcatggaactttgtttgccgatatcgagttcatgcaaaagcggccgttttcttggtgggtagtccaagacagagctgtcatgttggttgcagaaagaggaagaagaagaagctaatatgaagtatgagagtagaacccagcaaagaatgtgattgatattcatcctttaaactgaagaacaaaaatagagaggatttcatatggatacaaccaatgcaattcactcaatattagatgtatacatgaattatatttgttaggttatcccatgtattgatgtcctttttctttaacgaatattatcttttaaaagatagtatctggaaaggaaaattgtcaagcaaatagttagttgatttgttacagtatgttatcgctgttatgtttggtttgtacgttctgttattgctgttaagtttgaat

SEQ ID NO: 28188 - DNA, 383 bp, Glycine max
  Clone ID: TF_LIB3028-045-Q1-B1-E5
aaacgctggagaggtaccagaaatgcaactatggagcgcctgaggacaatgtggcaacaaaggaagccttggagttaagcagtcaacaagaatacttgaggctgaaagcacgttatgaagctctacaacgttctcaaaggaaccttatgggagaagatcttggccctctaagcagcaaagagcttgaatcacttgaaaggcagctagattcgtctttgaagcaaatcagatcaataaggacccaattcatgctggatcagctttctgatctacaacgtaaggtatgaggtcaattatcctttttctttaattaatttgtcaatgtttaactgctattcttcttcttccgcatatttcccttgctcaccggttcaattatgcat

SEQ ID NO: 28189 - DNA, 1093 bp, Glycine max
  Clone ID: TF_GmC1499_3
gacgcagcgagcgagccacgaaaatattcatcacacagggttttggtttattattccaatttttggttttcccttttgttggatattagagtgtgtaagaaagagaagagagagaaatgggaaggggaagagtggagttgaagagaattgagaacaagatcaacaggcaagtgacctttgcaaaacgaaggaacgggcttttgaagaaagcttacgagctttccgttctttgtgatgccgaggttgctctcatcatcttctccaatagaggaaaactgtacgagttctgcagcagttcaagcatgctcaaaacgctagagaggtaccagaaatgtaactatggtgcgcctgaggctaatgtgtctacacgggaagccttggagttaagcagtcaacaggagtacttgaagctgaaggcacgttatgaggccctacaacggtcccagaggaaccttatgggagaagatcttggtcctttaagcagcaaagagctcgagtctcttgaaaggcagctagattcgtccttgaagcaaataagatcaaccaggacccagttcatgttggatcagctctctgatcttcaacgtaaggaacacttgctaagtgaggctaacaggtctctcagacaaaggttggaagggtatcaaataaatccactccaactgaatcccggagttgaagagatgggatatggcaggcatccagctcaaactcatggtgaagccctctttcaacaaatggagtgtgagccaacgttacaaattgggtatcagcctgatccagtatcagtggtgacagcaggcccaagcatgagcaattacatggcaggatggttaccatagtttgcgtttcctgcataagatccactgcaccagcacatttgccgttccaattttatttgaaaacgaaaaaaaaaccaccaaaaaagaaggaagaaaatggctttggatgtaatgaagctgtaagtgtctagtctaccgtgtatgaagtaggaacaaagttaagcagtgttgtttgtgtgtgctctttcataaaactgcacttctttgcttcggttactgtttcttcccttttaataagggtattgataggc

SEQ ID NO: 28190 - DNA, 1069 bp, Glycine max
  Clone ID: TF_GmC791_2
gaagatccatagctaataagctaggttcagtagttagtgagtgatcgatatctggagatgggtcgaggcaagattgagataaagttgattgagaaccccaccaacaggcaagtcacttactccaagcgaaggaatggtatcttcaagaaagctcatgaactcagtgttctctgtgatgccaaggtttcacttatcatgttctctaaaaacaacaagatgcatgaatacattagccctggcctcacgacaaaaaggatcattgatcagtatcagaagactttgggggatattgatctgtggcgttctcactatgagaaaatgcttgaaaacttgaagaagctgatagatattaacaacaagctcagaagacagatcaggcataggataggtgagggtttggacatggacgacatgagcttccagcaactgcgcactcttgaagaggatttggtttcttccatagggaaaatacgagaacgaaagttccacgtgatcaaaacacggactgatacctgcaggaaaaaggttaaaagcctggagcagatgaatagagatctgctgtttgaacttgaaaagtgtgcgatccatccacaatttattttgcacgatgaaggagacgaggaatcagcagttgcactggccaacggcgcctccaccctgtatgcgttctgtcatcagcaccattctcatctgaaccttccctcccaccattctcacggagaagaaccctttaaaactgatgaccttcgccttgcttaattgagtgcaacaattaactagcaatgtaaattaactagctagcaagcaagcactaagcacttgttaattatgctttgtattatcctatattggacctgttaaacttaaacgcaacgttgcttccaacctctctagtctctatccagatcgagaattagctgaagcttatatatattatgtagtatttggcaagagtgtggtatgaaaaacagaaagactgtattttatttgttattataagtttacattgagtggttatgtaatattaattgcttggtacgttgcttcagtatgatcatactacttagat

SEQ ID NO: 28191 - DNA, 660 bp, Glycine max
  unsure (1)..(660): unsure at all n locations
  Clone ID: TF_LIB4165-007-Q1-K1-B5
ccagcgtccgattaatatcagtgcttggaaagaaaaggaagcaaaagaaaagagaagatccatagctaataagctaggttcagtagttagtgagtgatcgatatctggagatgggtcgaggcaagattgagataaagttgattgagaaccccaccaacaggcaagtcacttactccaagcgaaggaatggtatcttcaagaaagctcatgaactcagtgttctctgtgatgccaaggtttcacttatcatgttctctaaaaacaacaagatgcatgaatacattagccctggcctcacgacaaaaaggatcattgatcagtatcagaagactttgggggatattgatctgtggcgttctcactatgagaaaatgcttgaaaacttgaagaagctgatagatattaacaacaagctcagaagacagatcagaaagctcattggtggagttgtcttgtgtgaattggaaaggcataggataggtgagggtttggacatggacgacatgagcttccagcaactgcgcactcttgaagaggatntggtttcttccatagggaaaatacgagaacgaaagttccacgtgatncaaaacacgactgatacctgcaggaanaaggttaaaagcctgnagcagatgaatagagatctgctgtttgaac

SEQ ID NO: 28192 - DNA, 578 bp, Glycine max
  Clone ID: TF_LIB4127-114-Q6-K1-G8
caaaaataattaattataaaaatcaacaacataatcatacatgcatgataattctatgattgattaacattataaacgttggtgcttaaatcattctcctcttttacaaaaaataaaaataaaacaagagagaagttcacgtgtttgctaacaaaacatacactttttttttgggtaaataacagaacatacactacattattaatatctttagtgcactgcactgatatgccagaatgtagaacaaattcgactatagtttattttgtggtaaagtgaatgaagactcaccccaatttgagggaagtatctgagctttcaaagtcttgggggggtccagtggaattgcaaacgtacgtaacagactctgaagactgaccttcatccataacaaagttctcagattcggcaccaccatgcctttggccattaattatgcccgccacgtgacgtttaagtcgctcgttctcttccatcaatagcatcccctttctttggagatcagggatctcactcataatcttctcacccttcttttttattacacggcccaatccagtttcaaagagaccttccaa

SEQ ID NO: 28193 - DNA, 697 bp, Glycine max
  Clone ID: TF_700738341_FLI
atgcaggacacaattgaacgctaccgcaggcataacaggagtgctcaaacagtgaacagatctgatgaacaaaatatgcagcatttgaagcaagaaacagcaaacttgatgaagaagattgagcttcttgaggcttcaaaacggttcaagatcttgcttttcaatccatcttcgcaacttgtttatattcactgttagatttatctcacaaagaataaaaataaaaaatatattctgtgtactattcatccctcaggaagctcttgggagaaggtttggggtcatgctccttagaagaactgcaacagatagaacaacaattggaaaggagtgtaagcaatgttcgtgcaagaaagaatcaagtttacaaggaacaaattgatcaactaaaagagaaggaaagagctctatatgctgaaaatgctaggctgtgtgagcagtatggtatccagccacagccagcaacaaaggatccgaaagaaattcaaccctatgcagaaagcagtccaagttcagaagtggagactgaattgttcattggactacccaggtctatctagttgaagataatttaatccttgcctagtatgaaataagaagcccaactgcaatgtataaatatcacatgtttcctaatactttgagatgaataatattatcgcttatattatataaagaactttccaattttatgatt

SEQ ID NO: 28194 - DNA, 1151 bp, Glycine max
  Clone ID: TF_GmC1499_1
cggctgcgagaagacgacagaaggggctacatatatatattatagagattttatacattctaaattttgtgagtgtggacatactctgagcgtgagaaagagaaggggaagaaagagagagagtgatgggaaggggaagagtggagttgaagagaattgagaacaagatcaacaggcaagtgacctttgcaaaacgaaggaacgggcttttgaagaaagcttatgagctttccgttctttgtgatgccgaggttgctctcatcatcttctccaatagaggaaagcagtacgagttttgcagcggttcaagcatgctcaaaacgctggagaggtaccagaaatgcaactatggagcgcctgaggacaatgtggcaacaaaggaagccttggagttaagcagtcaacaagaatacttgaggctgaaagcacgttatgaagctctacaacgttctcaaaggaaccttatgggagaagatcttggccctctaagcagcaaagagcttgaatcacttgaaaggcagctagattcgtctttgaagcaaatcagatcaataaggacccaattcatgctggatcagctttcctgatctacaacgtaaggaacactttctaggtgagtcaaacagagatctcagacaaaggttggaagagtttcaaataaatccactccaactgaatcccagtgctgaagatatgagggtatggacgccatacagatatcatcctgatccagtatcagtggtgacagaaggcccaagcatgaataattacatggcaggatggttaccatgaaagagtgtcaaatgtggagcataattaaagatcctgccgtttaatttcaaatttatttgaagttaaggaaaacggaaatttgtaatagcacgtaatggacttacactagactctaccttctaattaagctaggaacaatataagcagtgattttgtgtgtgagctttcataaacagtacctagctagcctcttccttgttccaataatcacttcttccttttcctaattaataaaactatcgtatgcaccctttgccaccctttgccttttaaaaaaaaaaaaataaaaaaaaaaaaaaaaaaaaaataaaaaaaaaaaaaaaaaaaaaaaaaaaaaaaaagtaaaaaaaaaaaaaaaa

SEQ ID NO: 28195 - DNA, 748 bp, Glycine max
  Clone ID: TF_GmC138_2
ggtggcacacatctatacttgtgcagaagaagaaagatcctgaactaacattcccacacgctcgcttcaccatatttgccacccttttaaccctcacttcttgggtttattttgctccttttttttttccttgtttggggtttgcatttttcctggttgaaaaagggaagaacttgaactaattggttaagttacctatctatctatctatctagggtataatattttatatcagttattaaaggaaagaaagaaagaaacgaagatgggaaggggtaaggtacagctgaagaggatagagaacaagatcaatcgccaggtaactttctccaaaaggagaagtgggttgctcaagaaagctcatgagatctctgtactctgtgatgctgaggtagctttgattgtcttctctcacaaaggaaagctctttgagtatgctactgattcatgcatggagaagatactggaacgccacgaaaggtatgcctatgcagagaggcagctagtagcaaatgattctgaaacacagggaaactggaccattgaatacactagactgaaggcaaagattgaccttttacagagaaaccacaggcactatatgggagaagatttggcttcaatgagcctcaaagagcttcagagtttggagcagcagttggatactgctatcaaaaacatccgcacaaggaggaatgatctcatgtacgcttccatttctgagcttcaaaaaaggagaaaatgatac

SEQ ID NO: 28196 - DNA, 1057 bp, Glycine max
  Clone ID: TF_GmC297_2
cccacgcgtccgatgtaatacatgctaaaaaaagccttgacttcatagtccttaccctaatattcctctttcctcttcttcttcttctttctttcttccgccactgccgcagagcgtagaaggaaatcaaacagcagagagagggtaaagcatacgtgggttaaatccatgcgcatgagtcggaagaatttgtgttagcggtgaggagatatattgagaattaatatttgatagtgtatatatggggaggggaagagtggagtttaaaaggatcgagaacaagatcaataggcaagtgacgttctcaaagagaaggtctggtttgctgaagaaagcgcgcgagatctctgtgctgtgcgatgctgatgtggcttttatcgcattctacaccaaaggcaagcttttggactactccaaccaaccttgttctgaaagaattcttgaaccgtgtgagagggattcctatgccgagagggaacttgttggagatgatcaaccaccaaatgaaaactgggttatagaacatgaaaagctcaggctagggtggaggtactacagcagaaatcaaaggaatttgatgggagaagatctggacagattaaatcttacaggacttcagaggtgggagcaccaacttgattccgctctcaaacacattagatcacgaaagaaccaagccatgaatgaatctatttctgagcttcagaaaaaggataggacactccgtgaacacaacagcttgctctccaagaagataaaggaaaaagagaaggagctgaccccacaagagcaagaaggactgcaaaataacatggatgtgagctctgtccttgtaactcaaccactggagtccctgactattgggttagtatctttttgtgatgtataactgaaatgctccaaactctattcttaagagtgtgtgtgagtatattcatgaattgttaccgtgtatgtgcatatgcatgatttcattttaaccttccatcttgtgctactttgtgtatataccacctcaagttggatgcatgaaaccaatgaataggatgaatgctga

SEQ ID NO: 28197 - DNA, 963 bp, Glycine max
  Clone ID: TF_GmC1414_3
cgccaaggtgttggaacaacttagtggccaaaccccagtgttttccaaagcaaggtacactgttcgttcctttgggattagaagaaatccgaatagaaaaagaagctagctagggtttcggcgcgaagaagaatggggaagaagaaggtggagataaagcgaatcgagaacaaaagcactcggcagataacattctccaagaggcgcaatggattgatgaagaaagctcgcgagctatccattctctgcgatgcgaaggtggcgctgctcatcttctccagcaccggaaagctctacgagctctgcaacggtgacagtttggccgaggtcgtgcagcaatattgggatcatttaggagcgagcggtactgacacaaagtcgcaggaactatgctttgaaattgcagatatctggtctggttcagcgttttctcaaatgatcaaaaggcacttcggtgtttctgaacttgagcatctgagtgtgactgaccttatggaactagagaaactggttcatgctgctctttcgcgaatcagatcagcaaagatgcgattgatgatggaatctgtagagaatcttaagaaaaaggaacatatcttgagaaatgaaaatgagcttttggagaaacagattgaggcacagaaaaaagctgatgacgtcaataacgtggtgacacggtttattgactatgatcaaacagatcgggtgacgcataatctgctccctggtttgtaaatgcagctgaaagccaccactatggatataacttgcacgaattttccaattgtgtgcttaatacatgcatagggaactatgccatggtttagctacttgccttctgttatttctattctggttgaaacatggaccatctagagaagctcttaaacataatgttgccgtggggaagtttgcttcagctactagtctgtgcctaattaaattagtgacatattatatacc

SEQ ID NO: 28198 - DNA, 837 bp, Glycine max
  Clone ID: TF_GM459L07rgnA2.C1.o17.ma
atgggaagaggaagagtggagttgaagagaattgagaacaagatcaacaggcaagtgacctttgcaaaacgaaggaacgggcttttgaagaaagcttacgagctttccgttctttgtgatgccgaggttgctctcatcatcttctccaatagaggaaaactgtacgagttctgcagcagttcaagcatgctcaaaacgctagagaggtaccagaaatgtaactatggtgcgcctgaggctaatgtgtctacacgggaagccttggtaatggagttaagcagtcaacaggagtacttgaagctgaaggcacgttatgagtccctacaacggtcccagaggaaccttatgggagaagatcttggccctttaagcagcaaagagctggagtctcttgaaaggcagctagattcgtccttgaagcaaataagatcaacaaggacccagttcatgctggatcagctctctgatcttcaacgcaaggagcacttgctaagtgaggctaacaggtctctcagacaaaggttggaagggtatcaaataaatccactccaactgaatcccggagttgaagagatgggatatggcaggaatccagctcaaactcatggtgaagccctctttcaacaaatggagtgtgagccaacgttacaaattggtggtgacagcaggcccaagcatgagcaattacatggcaggatggctaccatatctaccgtgtatgaagtaggaacaaagttaagcagtgttgtttgtgtgtgctctttcataaaactgcacttctttgcttcggttactgtttcttcccttttaataagggtattgatagacaaattataa

SEQ ID NO: 28199 - DNA, 1036 bp, Glycine max
  Clone ID: TF_GmC1762_2
tggaagcattgaaggacgtagctgctatggctcgaggaaagatccagatcaagaggatagagaacaccaccaaccgccaggtcacttattctaaacgacggaatggccttttcaagaaggccaacgagctcaccgttctatgcgatgccaaggtttctattattatgttctccagcactgggaaactccacgagtacatcagcccctccacctcaacaaagcagttcttcgatcagtaccagatgactctaggagtcgatctctggaactctcattacgagaatatgcaagagaacttgaagaaactgaaagatgtgaataggaatcttcgtaaggagattaggcagaggatgggagattgtctgaacgatctgggcatggaagatctcaagctccttgaggaagaaatggacaaggccgccaaggttgttcgtgagcgtaagtataaggtgataacaaatcagattgacacccagaggaaaaagtttaataacgagaaagaagtgcacaacagactcctgcatgacttggatgcaaaagcagaagatccacgttttgcattgatagataatggaggggagtacgagtctgtgatcggattctcaaatttaggtccacgcatgttcgcattgagcctacagccaagccatcctagtgcccaaagcggagcagcaggctctgatcttaccacttaccctttacttttttagtacgcaagcttaagcagctcgatctcttcatcaatcagaaataccacattcactcaaatttcaataagaatatgacttgtgatcgatatcttaagttatgcacccgtacgtgcagtttgtacttaaccacaaaacaatctcacgaatcttctcttctcggtcgatcgcatatatgcatgtgtgaattattcagttgcaactactgttatctgtattttctttttgcctaatcatataccataaacatgaagttgtgcttccttttattgagaatgctttagcatgcatgattatttatagagcgtttcatatataagtctatttta

SEQ ID NO: 28200 - DNA, 575 bp, Glycine max
  Clone ID: TF_GmC951_2
aaaaaaggacaaaggaaagtaaataaaatataaagatggcagatgatgaatatagtttctgatgcataaaccacgatggatgaaagttgattcaggttgcaaacatggcttttccagacccatccatgtcagtttctccacagaggaagatgggaagggggaagattgagatcaagaggattgagaacactaccaatcgccaagtcacattctgcaagcgcaggaacggcttgctcaagaaagcatatgaattatctgtgctttgtgatgcagaggttgctctcattgttttctctagccgtggacgcctctatgaatatgctaataacagtgtcaaagcaaccatcgagaggtacaaaaaagcaagttcagattcgtctggcgctggatctgcttctgaggctaatgctcagttttaccagcaagaagcagataaacttcgtcaacaaattagtaacctgcagaataacaacaggcaaatgatgggtgattctttgggctctctgactgccaaggatctcaaaaatctggagactaaattagaaaaaggaattagtagggattcggttcaaaaa

SEQ ID NO: 28201 - DNA, 1356 bp, Glycine max
  Clone ID: TF_GmC1468_1
cggctgcgagaagacgacagaaggggagattaaaagcaagggtagaagttttgcaacgttctcaaaggaacctactcggggaagatcttgcccaaatgaatacaaatgagctagagcagcttgagaatcaactggaggcagcactgaggaatattaggtcaacaaagactcaattcatgcttgaccagctttctgatcttcaccaccgggaaacattgcttattgaaactaataacgtgttaaggagtaagttggaagaaactgatcactcacaagttcaagtaagtctagctttggaagctggagggcctagcatccaatacaccaactttccacctcaatcagaggggttcttcgagccagtgggagtgaaccccaccttgcaaattgggtacaaccagactggtcctgatgatacaaacgtaggagcttcatccttaagtatgcatggattcgcctctgggtggatgctttgatgatattgaatttacatatgttccataaagaacagaaaagaaaactagtcatggatgtgttgaacacttccataatatatatgttttcgtttccttttgttgtgcatcatttatcaatgtttgaataaataaaaattgcgagtagtattatcataaaaatttatgaacctaaaacgttgtatatttgtattgaagttaaaactttaagccatccaatgagtcactgaacttggtttatcatatctacaccaatttgcttgctattagaagccaatctgagctcttggaagataaattgtgatataacattgatcgccattatatattcgggtttcttttccacgggcctaagtagtttggttcacacatggggcctccatcttaaaggcccagtttatatatcaatctttaagcctttgtcgatagtcgttgccgctgctttgagtgttatattcctcggtgatgcattatattttggaagcgttgttggagcagtgatactctcatttgggttttatgctgtcttatgggggaaagcaaaagaagaagaattgactgtagtggactttgatgatatacgtcctccttcaaatactaagagtcctttgttgcagagctacaaagtgaaagatgaagataaccaaaatatttaactatattgtaattttatttgaaattccaaaaaaaaacaaagcattgtgacattttctatttctgattagagtgagaatctaatgcatatcaaacatcttgatccttaaaaaaaaaaaaaaaaaaacttgagaatcaactggaggcagcactgaggaatattaggtcaacaaagactcaattcatgcttgaccagctttctgatcttcatcaccgggtagatgtgtgt

SEQ ID NO: 28202 - DNA, 1210 bp, Glycine max
  Clone ID: TF_GmC176_2
cgcatccatcataggcataccatacctactaaaactccgcgacagatcatatcatatcatatcatttcatgcgataagctagcttatatatacacacacaaataagagggcagaagggaaaaatttgcttgaaaaaatttctaatctattctattctatatacaattatgtcttttccatctggtattctgaaaaggctagtttaatttatttgtggaaagagatataaagcaagcaattaataaaaacatgggtaggggaaaggtggagctgaagaggattgagaacaagataaaccgtcaagtgacatttgcaaagaggaggaatggtttgctcaaaaaggcttatgaactctctgtcctctgtgatgctgaggttgcccttattatcttctccaaccgtggcaagctgtatgagttctgcagcggccatagcatggccaagacacttgaacggtatcacagatgcagttatggagccttggaagtccagcaccaacctgaaatagagacacagaggcgctaccaagagtacctgaagctaaaatccagagttgaggcactacagcaaacacaaagaaacctccttggggaagaattggagcacttagacgttaaggaccttgagcagcttgaacgtcagctggactcttccctgaagcaaatcaggtcaaacaagacacaacaaatgctcgatcaactcgctgatttgcatagaaaggaagagatgctactggagactaacaatatcctgaggaacaagttggaggaaatcaatgtagcccttcaaccaacatgggaaactagggagcaaaatgctccatacaattaccacccttcccaatcagagggatattatgagacagcacattgcaacagtacattgcgaattggctatgattcttcagggttaaatgaagcaggaggagctgcaggaacctcagcccaaaatgctagtgaattcatgaatggatggatgaactaaatttatttccaatttagtttaatttatgattatcagaaaaaaatgatgcttttgtagagatcttggcctacaagaacaggctgtaataataggtgtcatgcagcataaaatatacttatgctattcttaatattccaataagacatgtttttcatgtttataactagatggattgggtgattattaaatgaatggattgaatagtcactccaattagtattctaag

SEQ ID NO: 28203 - DNA, 461 bp, Glycine max
  Clone ID: TF_jC-gmXLIB3564P107dc10b1
gaggagagggcgcccacgcatccgtacggctgcgagaagacgacagaagggcacagaatcaatgctcagtattatcaacaagaatctgtttctgaacagaaatacagatgctgcaaatctaacaggcacctgatggttcgtggtgagcagggtgactgagaaggaactgaagcagcaggagaatagactccaaagaggaggcgctagaggcagatctaagatcatgagatgctatgggctgaaattgaatactttcagaaaagggagattgagctggaaaatgaaaatctttgcctccggactaagataactgacgttgagaggattcagcaagtaaacatgggttctggaccagaactgaatgtcattcaggcattagcttcccgtaacttcttcaatccaaacatgttggacgggggaactgtttaccctcagacagataagaagattcttcatcttgg

SEQ ID NO: 28204 - DNA, 947 bp, Glycine max
  Clone ID: TF_GmC4870_8
atagttattttactgtgtgagagagaaaattaaacatgggaagaggaagggttgttctggaaagaatagagaacaagatcaaccgtcaagtaacattctcaaaacgcagaagtgggttgctgaagaaggcctttgagctttctgtgctatgtgatgctgaagttggccttatcatcttttctagccgtggcaagctttttcagtacagcagcactgatattaccaaaatcattgagaggtatcgccaatgtcgttacagcaagtcacacactggtgattcattggaacacgattcacagagcgcataccatgaattcttgaaattaagagcgaaatatgaatctcttgagcggacacaaaggcattttcaaggagaagaccttgagccacttagctttaaagatttgcagagcctggagaagcaactagacataacgctcgcactaactcgacagcaccaaacgaagaaactcatggcacgagcggatgaattacgcgaaaaggaaaaagatgaattctcgagtctcatccttgacaataacaattacattcaaatgcatgctacacaagttgatcaatttgagtctgagacagcactaaacacatgtaggtttcaacatcaagaagttgtttctaaggaaaaagcaattgataccaggacagagcatagtcaaagcagtcacaacaaaaacaatggatggctgtaatgaatattcatttaatttacatgctaaaaaaatacctatcacaataactaatgggataatgcccattattggtattcacacaaatagtttatataaagtaaatgttatttctactaaacacacattattcctaataagaaattatgtattttatgcatcagaaaaggggatgaattgtgtatttcatctatcattgtataagttgtcattttaaaaaaatttcttaaatattgatatttt

SEQ ID NO: 28205 - DNA, 1052 bp, Glycine max
  unsure (1)..(1052): unsure at all n locations
  Clone ID: TF_GmC698293_1
tgagctattagaaggatacagatttatgagattttacactaaggaaaggatatattttgtgagacaacattgagatttgtcatattgcaaaatgattagtagattaatatacacatataatcagcactgctgctttggcaatccaataaatagttctgtatccacatctaaactctggctacttgaacagtggggttctgcttctgcttgtgtgtgtctaggccattgctgctgggatgacttttctgccctctgccacattgcacttaatttggcattctctttgagcaagttactctcctgggatcgtagttgatcaatctgttccgtatatagttgagtttttctctgcctgactctttgcaaacttatctgcagctgctcctcaattcctttgagttcatcataagaacaagaactcacgctttgtcccagaagctcccttttagaatgttctagaagctcaatcttctttgccaagcttgcggagtctaacttcagttgctggatataatagttgacaaaatcttactgccaggaacatctttggtatgttcacggtatcgttccaaaatctttgtcatgtcagaacttgagaactcatagagccttccgttctgtgagaagactatcacagccacttctgcatcacaaagaacggataactcgtaagctttctttagaagaccacttcgacgctttgaaaacgccacttgacggcttgttgtatcctcaatcttcttcagttgaacctttcccctcgccatctccaaaaattagcaagagacgtcttcaagaagagtttccctttaatttgtgttctttctaaagcaaatatcttcaggttgaagtaatgaaagaagagaaagtgtagggagtggtagaaagaagtggcaaatattccagaaaccctaatcacaaaaacaataaaaatgctaataaatatcatttgaaacattatcaacacacggttacgtgtcaagtatcaaactatgactgtctgnattgtcactacgtccaaaaagctgtaaaccacaagccatgcactgaca

SEQ ID NO: 28206 - DNA, 1331 bp, Glycine max
  Clone ID: TF_GmC134_1
tttctgtacggctgcgagaagacgacagaaggggtctctctctctctctttctctctcatgctttaattctccaacacgagaagttaaattttagagtgagttgggtaattgttggagggtctattttttctgtccataaatacctgtctgctaggccaacccacttccatattttgcatcctttgtacctcagttccaggttaacaccaaacaacacatatagtgcagattcataagcttccaaccatggaggatccaaatcaagctccagaagggtcttctcagaagaaaatgggaagagggaagattgaaatcaaacggatcgagaacaccaccaataggcaagtcaccttctgcaagcgccgcaacggtttgctgaaaaaagcttatgaattatcagttctgtgtgatgctgaagttgcccttgttgtcttctcaacccgtggccgtttgtatgagtatgccaacaacagtgttagggccactattgagaggtacaagaaggcaaatgctgctgcttcaaacgcagaatccgtatctgaagctaacacacagttttaccagcaagagtcatccaaattgagaagacaaattcgagatattcagaatctaaacaggcacatccttggtgaagcacttggttctctgagtctcaaggaactaaagaacctcgagggtagattggagaaaggattaagcagagttagatctagaaagcatgaaacattgtttgctgatgtggagttcatgcaaaagcgggaaattgagctgcaaaaccacaacaattatctgcgagctaagatagctgaacatgagagagctcaacaacagcaatcaaatatgaatatgtcaggaacactgtgcgagtcccttccttcacaatcatacgacaggaattttttccctgtaaatctcatagcttctgatgatcaacaacaatactctcgtcaagaccacactgctctccaacttgtctgatatgctggaagttaaagctactggaagttcatggctctagctagctatttgaatagttacgtgtattgtctatatagtgctgagcaaataatattgccatacaggcatatatatatatatgcctgcgttaatttcctgaatcagttgcgtctttagaattgacgttaattggctagctaaaggtcattattaaactgtgaactaaatgaaccattttggactcatatttcatacgatatatataatgttaatgtatcttttaataagaactagctagtttctgtgtatttgtatttgtctgcatgcatctgttatggcctactgctataaaatggttgttgaaggatgaact

SEQ ID NO: 28207 - DNA, 1124 bp, Glycine max
  Clone ID: TF_GmC134_2
cccgggccgacccacgcgtccgcccacgcgtccgtacggctgcgagaagacgacagaaggggaagctcaagaagggtcttctcagaagaaaatgggaagagggaagattgaaatcaaacggatcgagaacaccaccaataggcaagtcaccttctgcaagcgccgcaacggtttgctgaagaaagcttatgaattatcagttctgtgtgatgcggaagttgcccttgttgtcttctcaacccgtggccgtttgtatgagtatgccaacaacagtgttagggccaccattgaaaggtacaagaaggcaaatgctgctgcttcaaacgcagaatccgtatctgaagctaacacacagttttaccagcaagagtcatccaaattgagaagacaaattcgagatattcagaatctaaacaggcacatccttggtgaagcacttggttctctgagtctcaaggaactaaagaacctcgagggtagattggagaaaggattaagcagagttagatctagaaagcatgaaacattgtttgctgatgtcgagttcatgcaaaagcgggaaattgagctgcaaaaccacaataattatctgcgagctaagatagctgaacatgagagagctcaacaacagcaatcaaatatgatgtcaggaacactgtgcgagtcccttccttcacaatcatacgacaggaattttttccctgtaaatctcatagcttctgatgatcaacaacaatattctagtcaagaccacactgctctccaacttgtctgatgatatgctggaaattagagctactggaagttctgccacagtcattatatatatatatatatcggttgatgtagctctagctatttgaatagttacgtgtagcacctatatagtgcagagcaaataatgccacacatgcatgcctgcgtttcctgaatcagtttgtgcctttagaattgacgttaatttgctaaaggtcattattagactgcgaacttataaatgatccattttggactcatatttcatacgatatatataatgttaatgtatcttttaataagagctagtttctaacccataaaaaaaaaaaaaaaaaaaaaaaaaaaaaagcggccgctctagagga

SEQ ID NO: 28208 - DNA, 1092 bp, Glycine max
  Clone ID: TF_GmC940_1
gagataaaactcggagagaaagggtactagtacgtacctgcaggctgcagcaacctcgaagctagttcaaactagtgggaggttgtgtgcatagaagcacaaacaaattacagaaaaagtcatcatcatactcagaattaatacaaattaagcattgatcttgaattaatggctcgcggaaaggttcagctgaagcgaattgagaaccctgtgcacaggcaagttaccttctgcaagcgccgagctgggcttcttaagaaggctaaggagctctctgtgctgtgcgatgctgaaattggccttttcattttctccgcccatggaaagctctatgaactagccaccaaaggaaccatgcaagggctcattgagaggtacatgaagttcacacgaggggctcagcctgaagcagcagcacctgaagcacatcctcttctggttgctaaagaggaaactaacgcgctaaaacaagaaatccaaacattgcaaaagggtatcagttatttgtttgaaggaggaaataagactatggcaattgatgaattacaactgctagagaagaatctcgaaacttggatatatcatattcgttcaatgaagatgaacattatgttacaagaaattcaagctttgaaagataaggagggaacacttaaagcggcaaataaatatctccatgacaagattgtggagaatactgcgatttctaactttgctgaatttgctactgatacttcttacccactaattgtacaagatgggggttttcaactctattaaatgggttgtttctacaatgttttgtttacatgctttaataaaggaaataatggcgactgggctgtgtttcataacattaaatagtgaagtatgaagcatgaacgttgcacaagcctaatttgcaataatttgtaacattaatattgtgttattctaatatttttatagataagtttgtaatgtaaaagtcagaaaagtgtgatttctgaccattaaattttcttttgtcattaaccaataatgtaaaatattgtgtgagtaacaatgactcaatgatgaggatattatgtattgtatttaatatgtttgtat

SEQ ID NO: 28209 - DNA, 1212 bp, Glycine max
  Clone ID: TF_GmC694_1
cttacgcgtgggcggacgcgtgggtgaacataacttcttcactttgtttcctcaccagcttgcaaaaacatggcttttccaaaccaatccatgtcatcagagtctccccagagaaagatgggaagagggaagattgagatcaagaggattgagaacaccaccagtcgacaagttaccttctgcaagcgcagaaatggcttgctcaagaaggcatatgagttatctgtgctttgtgatgcagaggttgctctaattgtcttttcaaaccgtggccgcctctatgaatatgctaataacagcgtcaaagcttcaattgagaggtacaagaaagcaagttcagattcatctagtggtggacgatctgcttctgaggctaatgctcagttttatcagcaagaagcagccaaactgcgtgtgcagatcagcaatctgcagaatcacaataggcaaatgatgcgagagggtttgagcaccatgaatggcaaggatctcaaaaacctagagactaaattagaaaaaggaatcagcagaattcgttccaagaagaatgagaggctatttgcagaaattgagcacatgaagaagagggagatacacttgaacaatgacaatcagcttcttagagcaaagatagcagcaggtgagaggagtcaccataatgttaacgggttgtctggaagcataagctatgaatcgatgcaatctcagtttgactcccgcggcttcttccaagtaactggattacaacctaataataatcagtatgccggacaagacaacatgtcccttcaatttgtttgaagagtttaagcttaagaaggagaaagacttagatttcctattgtttgtatttgacatctagaatgatatataggaatgctaaagcctatgaagtatgcagaattcaatggagggaattcatttaagtattcccctcagtactatgttatggactatttagtatgcatacaggtactctgagtacagagattgcaccctgccatattttgtcaacttttgtttactttccctatttctcctgtaagataggcttctatatatgtctattaatttcatacttcacttactatgaattcaaggtcctactcatacatgcaactgttcttgagtatgattttttctcgggggatcattgttattggtgcaaagtattcccatcttttttagtatgattaatttaagatttaaaaa

SEQ ID NO: 28210 - DNA, 1270 bp, Glycine max
  Clone ID: TF_GmC1013_2
tcgtagggcgctttgtctgttataatcaacgcgctcctcacgagtgaatttctggttcggaaggatctgattgttagggtttggtatggggagaggtaagatcgtgataaggaggatcgacaattccacgagcaggcaagtgacgttctcgaagcgaaggaacggtttgctgaagaaggcgaaggagcttgcgatcttgtgcgatgctgaagtcggagttatgatcttctccagcaccggaaaactctacgatttcgccagctccagcatgaaatcagtaatggaccgatacagcaaatcaaaagaagaaccttgtcaacttgggagttcagcctctgaaattaagttttggcaaagggaggcagcaatgttaaggcaacaattacacaatttgcaagaaagtcaccgcaggaaaatgatgggggaagaactgtcaggcttgacagtcaaagaattacaaaatttggagaaccaattagaaattagccttcatggtgtccgaatgaaaaaggatcaacttttaatgggtgaaatacaagagctaaatcgaaagggaaacctcatacaccaagaaaatgtggaactgtataagaaggtctatggaacacaagatgataacgaaacaaacagagattctgttctcacaaatggtctaggcataggagaggatttgcaagtgcctgtgaatctccagctaagccagccacagcaacaacactacaaggaaccttcaggaactacaaaattgggattgcaattgcattgatccatttacaggatgtgtgtttcacaattgctatcaagaaaaatggactcagatttaaacctcaatgtcttcgtataaatgtggcatatagaccacagactaattggcttaaagattttaatttgaaattattagaaaaagtaaaagcaaccctagcatgtatgtaagaaacaatgaagcatcttatgagaaactaagactcaaatcaaggaagaaattcttcaacccgcactacttgattattcactcatcgatctgtttttctttctcttttcgtcaattttgcctttcgaaatttgtgctatcgatgttgaatgctgtttgtgttgtgtttgttcatacccgcgcattattacttcgtttccgaagatattagacacaacctttgcacttgatgattgcatataatatttgaaaatccattcctatagtgaattacctgaaccgattaacgaaagcacttggttaggttagggacccttctgtcgtcttctcgcagccgta

SEQ ID NO: 28211 - DNA, 1212 bp, Glycine max
  Clone ID: TF_GmC4870_1
gggggaaaagcgtagtcatcagtttgccgatagaagtagaaaatggaatcttgatcgtattatctttgttgctcatccattactccttctgcagtagaataatatataaagagagaagagtgcaatctagaaccacatagttattttactgtgtgagagagagagagaaaattaaacatgggaagaggaagggttgttctggaaagaatagagaacaagatcaaccgtcaagtaacattctcaaaacgcagaagtgggttgctgaagaaggcctttgagctttctgtgctatgtgatgctgaagttggccttatcatcttttctagccgtggcaagctttttcagtacagcagcactgatattaccaaaatcattgagaggtatcgccaatgtcgttacagcaagtcacacactggtgattcattggaacacgattcacagagcgcataccatgaattcttgaaattaagagcgaaatatgaatctcttgagcggacacaaaggcattttcaaggagaagaccttgagccacttagctttaaagatttgcagagcctggagaagcaactagacataacgctcgcactaactcgacagcaccaaacgaagaaactcatggcacgagcggatgaattacgcgaaaaggtgcataagttggaggatcttaacaaacaattggagtccaaggttttctctttaaataaccatgaaaaagatgaattctcgagtctcatccttgacaataacaattacattcaaatgcatgctacacaagttgatcaatttgagtctgagacagcactaaacacatggtttcaacatcaagaagttgtttctaaggaaaaagcaattgataccaggacagagcatagtcaaagcagtcacaacaaaaacaatggatggctgtaatgaatattcatttaatttacatgctaaaaaaatacctatcacaataactaatgggataatgcccattattggtattcacacaaatagtttatataaagtaaatgttatttctactaaacacacattattcctaataagaaattatgtattttatgcatcagaaaaggggatgaattgtgtatttcatctatcattgtataagttgtcattttaaaaaaatttcttaaatattgatattttacctattggcgtcatcattgtaatcagtttctagtagtagagagaaataattttatcctaaaa

SEQ ID NO: 28212 - DNA, 668 bp, Glycine max
  Clone ID: TF_uC-gmflLIB3275P070a02a1
ctccatatgcaacatatatagctcaataatcgtaatgatatgcagcatacacgttatataatattgatagtttcgtaattagatcgaattcaataatcgtatagcaagttttagagctacgtacactaccgagctttaagaaatacgaattcaataattcttttagatttggctgttttaggctagctgcgcgttgcatatgcgaattgaatccccttttgatctcgtcaaatccattgttcatgcatgtttccaattccttctactgccaaatgctgttgcagaaggaaactgagttccttattttgctcctccaaaatcttgccatttctcttgaacatcctgtgcacttccatctttttctcacggactccactgaggccattttcaagggcatcctctagtgccatcagttccttgtaattgagtgacgtgatgtcctcccctttcaagtgcctgagctcaatttgcatgctgtcattctctttcttgagtctatcaatttcattgctgaggttctcatgcttagcatcccagagggtcttcccagaagctcttttgtatctgtccagaacgtcaatcaacgtggtgtaggggctgatgtattcatgcatcttcccggagacaccaaagatgataagggaaacttgagcatcacatagaacact

SEQ ID NO: 28213 - DNA, 1825 bp, Glycine max
  Clone ID: TF_GmC87_1
gaattcggcccgaagtttcatgaaatggcttaataagcttttcagaggtgggcccaatagaggaaggggtggtcgccacctgcatgagccagcagaggaaagcagagtttggggtgctccatctagagcgttggatgatcgtgctagagctcagaaggagaaagaggatctaggccatgcaatggcactttcttcagccgaagatttaaagagaccaaacgctcatcaaggatataactggggagaagacactggtgatgattactcgaaggcacctcgtgatacccttaactcatctgcacaccctccatttgcccctacaccattttatccccacgaatatagaagaatatgtggtggctgcaaccaagagataatgtatggaaattgtttgggctgcatggatacttattttcacccaaattgttttcgctgtcactcttgtggttaccccattacagagcgtgagttttccttgtcagggaagcatccatatcacaagtcatgttttaaagagttgaatcatccaaaatgtgaagtttgcttccaatttattcctataaatgctgctggtttgattgagtataggtgccaccccttttggtcccaaattattgtccatctcatgaatatgataatacagctcgctgctgtagttgtgaaagattggagcctttgaacataaaatactatagactagaagatggacggagtttgtgtttagagtgcatggaatctgctataatggataccggtgattgccagcccctttaccattctatcagagattactatgaaggaatgcagatgagaatagatcaacaaattcccatgcttctagttgagagagaagcacttaatgaagctattgtaggggagaaaaatggttttcatcacttttaccagaaacaagaggcttatgcctttcagaagagcagactgtcaccagtatacatagaagaccaagaattggaggccatcgactaatcgggatgcgaactcaacctcaaaaactgactagaaaatgtgaagttacagcaattcttgttctatatggtcttcctaggtaactagtggacaatggaaactttgctttttgtccccttcgaattacagctgattgattcccttttgaatataattgtgagttcagatatttttccaatacccataagacacagtaccaatgacagactataatgttactttcttctcattgatgatgttcaaacttcattataggagttctcatattttaatgggatgcaggttactcacaggtgctatacttgcccatgagttgatgcatgcatggctacgccttaatggttatcgcaaccttaatcctgaagtagaggaaggcatttgtcaggttctttcgtatatgtggcttgagtcagaagtaatgcctagctttcaaaacatgccatcaacatccacaagtgctgcctcttcctactcctcctcaaagaagggtgcaaagtctcatgttgaaaataaattgggtgaatttttcaagaatcagattgccaatgattcttccccagcttatggtggtggctttagagctgctaatgaagctgttaatagatatggtttgcgtagaacacttgaccatattcattggactggttttttcccagtgtaataagtatggatagaagtgctttgttttcattttctttggttctacaagtggatggaccaggaccaattcaaagtaaagacagaagcttggacaacttctgatatttgggtcctacgaggaagtccaagtctaatttgaccaaaaaataaataaatgcatgacaagttcgtattcaaa

SEQ ID NO: 28214 - DNA, 409 bp, Glycine max
  unsure (1)..(409): unsure at all n locations
  Clone ID: TF_LIB3242-630-P2-J2-F5
aattcggctcgatggcactttggtaaggtgagagaataggaaaaagggaaatatggcatttgcaggaacaactcanaagtgcaaccaaggtatatgatccctttgtgtgagctttaaatagaggggaagagcagaacaaatgaagaagagaggagataaggatcatataccttggttgcactttggtaaggtgagagaataggaaaaagggaaatatggcatttgcaggaacaactcanaagtgcatggcttgtgacaaaacagtttatctggttgataagttgacagcagataaccgagtgtaccataaggcttgcttcagatgccaccactgcataggaacactcatgcttatcatctataactcttttgagggggtgctntactgcatgccacactgcgaccaact

SEQ ID NO: 28215 - DNA, 515 bp, Glycine max
  Clone ID: TF_GmC7454_3
caaagtctaaatttggagtctcctcccagatatggaaacgaaaatatgtatcaaccaccaattcagtatttccccttggggtccaggatttgtgctggctgctatactgagattggttttggacgatatctaaattgcttgaatgcattctggcatcctgaatgcttccgctgccgtgcttgcaacctaccaatctctgattacgagttctccacatctgggaattacccttaccataaatcatgctataaggaaagctaccatccaaaatgtgatgtctgcaagcacttcattccaacaaatcctgctggtcttattgaatatagggcacatccattctggatccagaaatattgccctactcatgaacatgatggtactccacgctgttgcagctgtgagcgaatggagtcacaagaggcaggatatattgctcttaaggatggccggaagctctgcttagagtgtctagattcttctatcatggatactaatgaatgccaaccccttcatgc

SEQ ID NO: 28216 - DNA, 382 bp, Glycine max
  Clone ID: TF_uC-gmflLIB3275P088g01b1
accacgcgatagctcacgcgtccgactgttatgcctcagtctcctgctcaatcttcattgacctgtaatttcccttgatgacaaaccaagactaacacacacagaacatagcttgtgttggagaggtgagaagacacagaaagaatggcaactgcaggaacaacacagaattgtaaggcctgtgacaaagccgtatatctggtagatacgttgaccgcggataaccgagttttacacaaagcatgcttcagatgccatcactgtcaaggaacactcaagctgagcaactacgactcatttgaggtagtgctatatatgtagccacactttgaccaactgggcaaaagaacagggagcctagacaaaagctttgaaggaacac

SEQ ID NO: 28217 - DNA, 871 bp, Glycine max
  unsure (1)..(871): unsure at all n locations
  Clone ID: TF_GmC5988_8
atctattcctgcacctctctacacacaaatacacaaatgttggacatatttaatgagagcgtgagagcgtgagaggtgagacaaaggattgccaacctgaatgtgaataattttgcatgaaatgggttggtttaccaagttgcttaagggctctgatcataaaattttacgaggacaataccatggcaaatatggagaggacagaatttgggataatcatcatagttcaatggatgatttgactgatattgagaaagaagacattgaccgtgcaattgcactttctctgtcagaggaggatcataaagggaaaaaagttgttgatgaggaactttgtaaaattgatgatgatgaggaggatgaacatcttgttaaagttcatctagatgaagatgaacgtcttgctaaaattcagcaagaagaagaagaacgtcttgctaaaattcaacaagaagatgagcatcttgctaaaattcaacaagaagaagaagaacgtcttgctaaaattcaacaagaagatgaatgtcttgctaaaattcaacaagaggatgaacgtcttgctaaagctcaacttgaggaagacgagcaacttgctagggcaattcaagaaagcttgaaaattggttctcctcctcaatatgacaatggttcttcaattctatcttttcctcaccttttcccccctggatacagaatctgtgctggatgcaagactgagattggccaaggaagatttttaagttgcatgggaggtgtctggcatccagaatgcttctgctgccatgcatgccatcttccaatcactgattatgagttttgcatgtgtaggaatgggacttaccatgngtggtgctgtggggagaagggtggg

SEQ ID NO: 28218 - DNA, 2485 bp, Glycine max
  Clone ID: TF_GmC7403_1
ggggactttgtttcttcatacacagagagaaagtctggttttatgaaatggtttggtaagattttcaacattggatccagtagaggaaggggtggtggtcgtcatctgcagcagcctgttgaggaaaacatggtttggcctgctcctgctagatccttggatgaccgtgctagatctcggaaggaggaagaggatctagatcacgcaattgcactttctttaggcgaaaattttaagagaccaactggatatagatggcgaacaggaactgatgaagattatgcaaaggctcttcaggatcgcaggttctcatctgcacatcctccatatgcccctgtacctttttatccccggggatatggtgtgccattgcataacagaacatgtggagggtgcaaccaagagatactctatggcaattgtttaggagttggccatagttattttcatccagactgctttcggtgtcactcttgtcgttaccccattactgagcgtgagttttctttgtcagggaagcatccatatcacaagtcctgttttaaggaattgacacaccctaaatgtgaagtttgccatcaatatataccaataaatgctgctggtttgattgaatatagatgccacccctattggaaccaaaagtattgcccatctcatgaatatgataatacagctcggtgctgtagttgtgaaagattagagtcgcggggtgaaagatactatagattggaagatggaaggattttgtgttttgagtgcatggaatctgctataacagacactggtgaatgtcaacccctttatcattccatcagagactattatgaaggaatgaacatgaaaattgatcaacaagtaccaatgcttctcgttgggagagaagcacttaatgaagccattgttggggagaagaatggcttccatcactcaccagaaacaaggggcttatgcctttcagaagagcaaactgtcacaagtgtatatagatggccaagaattggaggccatcgattaataagcatgagatctcaagctcaaaggctgcctagaaaatgtgaagttacagctattcttgttctctatggtcttccaaggttactcacaggtgctatacttgcacatgagttgatgcatgcttggttacgcctcaaaggttaccaaaaccttagtcttgaagtagaggaaggtatttgtcaagttctttcttacatgtggcttgatgcagaagtcatgtcatgtgctagaaccacgccctcaacatcatcatcagcttcttcctcctcttactctaactcatcaaagaaaggtgtgaaatctcttgttgaaaataaattgggtggcgttgggtggtggcatttgggtgcggcgatggtgttgggcggaggttttggggagagacaattaaggcttttgcttggaagatgaaggataaaatgggggatatttgccattttggtagtgcaccaaataaaaatggggtgtataaagcaattgcccataggttccttttttcttcttgttagttagggcactttttgcatggagttaggcatcctgtatcctcctattatgtttgaaattattttattacccttaatgaattaacatcaccttccccaacccactcgtgaaggcttctcccttcctccttcgtctcgaaaccgtgcatcctcgttcctgtgctcctttgtcattgaaggtcagcttcttcctttctagtgtggttgaggttggtttctggtggggttggggttgggttctggtgaaggtgagtttcggtgagggtgggtttcggggtggatgaggtcacattccataatgacctttccataagcaaaaaaccctactaaaatgagttttccataagcaaaaaaaccttatggaatgacctttctgaaagctaaaaaaacttccaaaatggttgttctagaagtactttagcttaagactattccggaagcaaatttgttaatccaaaacatcctttctagaaatgtattttatatattctggaaaacgggttccagaaatcagtatcgggcttacgaaaagcccattttgaaagctacaactacaatctgaagtagcatttccaaaagttattttgcatcttttggaaaggtcattttggaaagtacgattttggtttatggaaggaccattccagaagaaaaaattgcaatccagaatagcctttttggaagtacattttgtaccttttggaatgattgttccagataacactatttttgtttacgaaaaaggttttcataagattttccttttggaataaccatttcgaaagaaaatttattcccttatagaaagcctattctggaaacaggtccacaatgagaatgtaaatacattaaaaggtacatgcaaagtggagagttggagaatgagaaggacttctacgacgtcaagttggacttgctttgtacctccgatggctgtgggaagaagagttggagaagaagag

SEQ ID NO: 28219 - DNA, 712 bp, Glycine max
  unsure (1)..(712): unsure at all n locations
  Clone ID: TF_LIB4390-036-R1-K1-B7
tggggtttatagttcttctcgctcagagagaaagtccggtttcatgaaatggcttagtaagcttttcagaggtgggtccaatagaggaaggggctgtcgtcacctgcatgagccagcagaggaaagcatagttcggggtgctccatctagagctttggatgatcgtggtagagctcagaaggagaaagaggatttaggccttgttttggcactttcttcagccgaagatttaaagagaccaaacggatataattggggagaagacactggtgatgattactcaaaggcacctcacgatacccttaactcatctgcacaccctccatttgcccctacaccattttatccccatccccacaaatatagaagagtatgtggtggctgcaaccaagagataatgtatggaaattgtttgggctgcatggatacttattttcacccaaattgttttcgctgtcactcttgtggttaccccattaccgagcgcgagggaagcatccatatcacaagtcctgttttaaagagctgactcatcctanatgtgaagtttgcttccaatttattcctataaatgctgctggtttgattgagtataggtgccaccccttttggtcgcanaagtattgtccatctcatgagtatgataatacagctcgctgctgtagntgtgaaagatgggagcctctngacataaatactatagactagaaga

SEQ ID NO: 28220 - DNA, 2093 bp, Glycine max
  Clone ID: TF_GmC7454_1
ggcctttgaggtctcagggctccgaaaggaagaggaagaaggaggaggaccgcacccccctccagcctccagcttttattttcgttgattgttccttcctccttcctttctctttaatcccgaacaaacgctgcctcctcgtttcttctattttgactttcaaatcgcgtgcaattctaatttcctcacctcaccttatcatgtctgcgattttctatgatcatctgtcttccctatcctatttgttgtttcacttctcccctttgacattaaaaatcactaacaacaaccaaataattattttacactaaggaaaattgttctagttgggtgctatcttgtaattggttatatatgatatctaactccactaactacaccctaattcttcaattgcgtctcgagccctgcctcatctgtaccaagtacaaattttaattgttaaacatctttgtttgagagtaagcatggatagtgctttaaggacagcgactgtatcagatatgtcgcctgtttatagagatgggtttaaagcaggtctagaagcagtgcgtaaatatggtctacaaaggacccttcttcatatcaggttggcagggacttttccatgctaggaacagaggccccccctttaacagatttgaactcattctttctagatataacacttggcctgttactagtagcgaaaccgaggccaaggtgtgtaaatattatagcttcacaattagaagaagatgaactacttgtaaagagctatagcgcaaagtctatcttgattactttcaccccagtttttaatgtatcacaatgtatctaccaccaattcagtatttccccatggggtcctggatttgggctctctgctatactgagattggttatggacgatatctgaattgcttgaatgcattctggcatcctgaatgcttccgctgccgtgcttgcaacctaccaatctctgattacgagttttccacatctgggaattacccttatcataaatcatgctataaggaaagctaccatccaaaatgtgatgtctgcaagcacttcggcacatccattctggatccagaaatattgccctactcacgaacatgatggtactacacgctgttgcagctgcgagcgaatggagtcccaagaggcaggatatattgttcttaagtatggccggaagctctgcttagagtgtcttgattctgctatcatggatactaatgaatgccaaccccttcatgctgatatacaaagattttatgaaagcctaaatatgaaactggaccaacaaattccacttctattggttgaaagacaagcactgaatgaagcaagagaaggagagaagaatggccactatcacatgccggaaaccagagggctctgcctctcagaggagctcagcactttctcgagacgacctagacttgggacaacaatggacatgagagcacagccatacagaccgactacacgctgcgatgtgactgcaattctcattttatatggtcttccaaggttacttactggatcaatcctagctcatgagatgatgcatgcatggctgcggcttaaaggttatcggactctaagtcaagatgttgaagaaggtatctgtcaggttttgtctcatatgtggttggagtctgaactttcttctgcatcaggcagcaactttgtatcagcctcatcctcgtctgcatcacatacatctagaaaaggtaaaagacctcagtttgagaggaagcttggggagttcttcaaacaccagattgaatcagacatttcccctgtttatggaggtgggtttagggcaggtcaaaaagcagtgagtaaatatggtctacaaaggacccttcatcatatcaggatgacagggacttttccatattaagtacaaagataccccttttaacagattgtttctcattatttctagatataaagcctggcctgttattattagaaaccgaggccaaggtgcttaggcataagcttccacgaattgttgattttttgtacttgtaattattgataccgttcattcacattttttcttttgatttatcagactgctactttttggcatt

SEQ ID NO: 28221 - DNA, 389 bp, Glycine max
  Clone ID: TF_uC-gmroLIB3258P128b11b1
gctttctgctacttaatcatcacagacctggaatttcccttggtgacaaaccaagactaacacacacagaacataacttgtgttgttgaggtgagaagattaccatagaatggcctttgcaggaacaacacagacttgtatggcctgtgacaaaaccgattatctggttgatcagttgacccccgataaccgagctttccacaaagcttgcttgagacgccattattgcataggaaccctgaggctgagcaactacaactgttttgacggagttctttattgtaagccacactctgaccaactgttcaaaagagcagggagtccttgacaaaagctgtcaaggagcaccaagaattgccaagccacataaaaatctgtaagagaaacct

SEQ ID NO: 28222 - DNA, 1211 bp, Glycine max
  Clone ID: TF_GmC1586_1
aattcggctcgagctgaggtgcaataaggttatgagtgctgttttctcttcttgaacttctctttaatcctcagatcctggattaaaggaaaaacataaacatcagccagaaaattcctgagccttgttttacatctttcttcaggaaggaaaagaagaagcaaaatgtcattcacaggaactacagataaatgcaaggcttgtgataagactgtttatgtggttgacatgttaactcttgaaggtataccttaccataaaaactgcttcagatgcagtcactgcaagggatacctaacgatgaacacctactcctcaatggatggtgtcctctattgcaagccacactttgaacagcttttcaaggaatctggcaatttcagcaagaactttcaaacagcaaagtcttctgataaacaaaatgagacgaataaggcccccaacagactgtcatccatgttcagtggaactctagacaaatgctcagtttgttcaaaacagtctatcctctggaaaagatgacactggaaggggaatgctatcacaagaattgctttaggtgtgctcatgcaggttgccacctcacacattcctcttatgctgccctggatggtgtcctctactgtaggcaccatttccaacagcttttcatggagaaagggaactatcatcatgtactccaatctgctaaccacaagaagaatgtcactcctgaacctgctgaacctgcagctgaaggagatgaagagccaccaaagccagaagaatctgattctgaggaacacacagaagaaaagcctcaaaatgaagcataggacatgagctgcttcctccctttctttcaggatcctactatatataaaaaggtgtcttttgttagagtgttgttggcacactcttttgtctggttgaattccactgtctaacatttctttttacaaattagtttaattgtaagctaatttgagaggtttattatgtatttaaacaaagagttgttaaatacaatatattttttacccttttgttggaggtttttctcctgcagtgatatgatatcatatcactactgtgtaataacataagggacacagtctcatattgttcaccaatttgtctgccgatttgcacttcaacccaatatataatatatattagtattttagtttaaaaaaaaaaaacaaaacaaaaaaaaaaaaaacccacccaaa

SEQ ID NO: 28223 - DNA, 1346 bp, Glycine max
  unsure (1)..(1346): unsure at all n locations
  Clone ID: TF_GmC102_1
acaggtgtttgaaggaccaacattcaagattctggaacggtgcagctgttgttgctttctgttcctctgttgccgtttgcctgatgcagacttagttttatgtcatttgtctcaacttgctcttcttcttctctttcaccctccaaattttctcacctctctctttattcaacttcctcttcgtttttttttcctttccttaaccgtcacactatttccccctcttcttcttcaccttttcagtttaaagcttcagattctcaacagatccacaatttttcagtccaatagcttccagatcacaaccgatccaccattcaccactatctcttaagcaaactcaatgttactgacaggcaaatctaccaagaaaagtggtctctgaagtcgatccagtgccttgtgaatttggaattggtggtgaatttatgatctaaaagccatagcaatgtcttttatcggtacccagcaaaagtgcaaggcttgtgagaaaacggtttatcccgttgatcagctttctgctgatggtactgcttatcacaaagcttgcttcagatgctctcactgcaaaggaacattaaagctgagtaactattcctcaatggaaggtgttctttactgtaagcctcactatgagcagctcttcaaggagagtggctccttcagcaagaacttccagtcacctgcaaagctagctgataagacaactcctgagctgacaaggtctcctagtaaagctgcgagcatgttttctggcacacaagaaaagtgtgccacatgtggcaaaactgcttatccattagagaaggtaacagtggaagggcaggcctatcacaaatcatgtttcaagtgttcacatggtggatgtcccataacgccatcgaattatgcagcccttgagggcattttgtattgcaagcaccacttctcccagctttttaaggagaaagggagctataatcatcttactaagtctgcatcagtcaaacgggcagccgcagccacagcagcagcaacaacagctgcctctgttccagaatcttgaatgttggttccttcaattgccttttctttttcaaatacattttggtttgtgaagcaagtgtttgtatgtgtggcctttttggtttttgattgttctctcgtgactttgatcatttctgatatttttacttacacatgcgtggcgtgcaaatcttgtgtggtttattcatataatggacatttagtaaagacgagactaatgagagcgtgatttgcaagatatatcattccaggttgatgacaatgccgcccctccccttctcgaccgtgtgctctcctttattttattgtccttatcttnc

SEQ ID NO: 28224 - DNA, 860 bp, Glycine max
  Clone ID: TF_GmC102_4
agcaggtgtttgaaggaaccaacattcaagattctggaacagaggcagctgttgttgctgctgctgtggctgcggctgcccgtttgactgatgcagacttagtaagatgaatttagatctaaaagccatagcaatgtcttttatcggtacccagcaaaagtgcaaggcttgtgagaaaacggtttatcccgttgatcagctttctgctgatggtactgcttatcacaaagcttgcttcagatgctctcactgcaaaggaacattaaagctgagtaactattcctcaatggaaggtgttctttactgtaagcctcactatgagcagctcttcaaggagagtggctccttcagcaagaacttccagtcacctgcaaagctagctgataagacaactcctgagctgacaaggtctcctagtaaagctgcgagcatgttttctggcacacaagaaaagtgtgccacatgtggcaaaactgcttatccattagagaaggtaacagtggaagggcaggcctatcacaaatcatgtttcaagtgttcacatggtggatgtcccataacgccatcgaattatgcagcccttgagggcattttgtattgcaagcaccacttctcccagctttttaaggagaaagggagctataatcatcttaataagtctgcatcagtcaaacgggcagccgcagccacagcagcagcaacaacagctgcctctgttccagaatcttgaatgttggttccttcaattgccttttctttttcaaatacattttggtttgtgaagcaggtgtttgtatgtgtggcctttttggtttttgattgttctctcgtgactttgatcatttctgatatttttactt

SEQ ID NO: 28225 - DNA, 1439 bp, Glycine max
  Clone ID: TF_GmC5796_1
attattttatattattttttgtctatagtaagtttgaaaattaggtactacatcatatgcatgatcagcatttgtaactgctcctctgaatttgtctgagtctgagctgttgattctcccaacacaactaaaaaaaagaagaaaaacttagagtggtagttgtaggaaagcaagaacagtgaagtgttctcctaattcagtgagtgaggttctgaattcttcaacttgagatgatggcatcatttgcagggactactcagaagtgcaaagcatgtgagaagactgtgtatttggtggatcagctcactgctgacaacaagatctatcacaaatcatgtttcagatgctaccactgcaagggtacccttaagttgagtaactattgttcctttgagggtgtgttatactgtaagcctcattttgatcaactctttaagaagactggcagcttggacaaaagttttgaaggtattccaagaactgctagacttgaaagatctactgatcaggtccaaaccaatagcaaggtttcaaatttgtttgctggaactcaggaaaaatgtgttgcttgcaagaaaacagtttacccaattgaaaaggtagctgttgatggaacatcttaccataaggcttgtttcaggtgcactcatggggggtgtgtaattagcccctcaaattacgttgcccatgaacatcgtctttattgtaggcaccatcacactcagttgttcaagcagaaaggtaacttcagccaacttgacaagcaagaaaatgatgaaggggtgactgagaacacaataactgagtaatagcatgcatgcaactttcaagttactttggcaatacaagttcagttggtgactcattttaaggcatcaaatgcccttgtctcaatccacattaaattctgtttactgtgtatgtgaaaagttttgtgagacaaattttggggttgataattgagaagaattagtagatagtttggcttaattatacggctgaccagtctgcatttttctttgaagcttaatgaagtttgtatttttcattattgtgataaaatctggttttctctgtgtatttactgttgcttttggttattcgcataatatttcaaaaaaagctaaaaaaaaaaaaaattttacaatttgccaattgcaaattcttgatgtcagcactctacatgctgctctgccacattccactgctgttagaatcatctcaaattctcgtttgtatacacgtaaatcacttatctattagtaggattttaatgtatttcaaatatttgtataagtagaaatttctttctgtcatctgggttttggttcaattatgtatgtggtttaacattcatagctgcatgaccaccaagttctcaaatactgtaaatagctgccaaaaaatatatccaacatcaaagattacaaaaataaatt

SEQ ID NO: 28226 - DNA, 1167 bp, Glycine max
  Clone ID: TF_GmC1184_2
ctgcttttgtctcctgcctcccacatttcaccaccccctttatccttatctcctctcttcattgttctgctcttccccttaacaaacaataactctatttaaagcacacacaaagggatcatatatcttggttgcaccttggtaaggtgagaaaatatggcatttgcaggaacaactcagaagtgcatggcttgtgacaaaacagtttatctggttgataagttgaccgcagataaccgagtgtaccataaggcttgcttcagatgccaccactgcaaaggaacactcaagctcagcaactataactcttttgaaggagttctttactgcaggccacactttgaccaactgttcaaaagaactggtagtcttgacaaaagcttcgaagggacaccaaaaattgctaaaccagaaaaaaccggggaagagaaacctgcagcaaccaaagtctcaagtatgtttggtggaactagagataaatgtgcgggttgtcagaaaacagtgtatcccactgaaaaggttaccgtgaatggaactccttatcacaagagttgtttcaaatgcactcatggagggtgtgttattagtccctccaactacattgcacacgaaggcaaactctactgcaagcaccaccacatccaactgatcaaggagaagggcaatttaagccaacttgaaggtgaccatgagaagagtacagaggaagagaaaatcaacggtgaagtggttgcagctgagacatgaaatgaaggctcgagcttgagttatgacaaatgaatattctcttcctcaagttccatatttctgtatcatgtgtttgtgctatatctcctgctttatcattatggagtccataatgctcttgaaaaatatggtaatcccttttttttttgtggtcggggacttggggtgtgtgaaaatccgtcattttgttttctgttgctgtgaggttgtggatactaaaaatgagacttaatggcatgcgattctgaatgtgattcagaagccagtgctactgaatttgtatgaactctcttttgtattcatattgatacatatacatacatcttaatccccgaaaaaaaaaaaaaaaaaaaaaaaaaaaaaaaaaaaaaaaaaaagctaaaaacaataaaaaaaaggggctgcccttcaccatttggc

SEQ ID NO: 28227 - DNA, 816 bp, Glycine max
  unsure (1)..(816): unsure at all n locations
  Clone ID: TF_GmC102_3
cgctaagcctcggagattcggtttcgagtaaaatctcttcatttttctctctttgttacattttcattatggtgaccaagatatgatctgttatcaatatatattcaatgacatacacagtcccgagtgctaaacctgagtttaaagcttcagatcacaacagatccaccattcacctcaccactttctcttcacaaggcaaatctaacaagaaaaagtagtctctgaagccgatccagtgtcttgtgaatttggaattggtagtgaatttagatctaaaaagccatagcaatgtcttttatcggtacccagcaaaagtgcaaggcttgtgagaaaacggtttatccagttgatcagctttctgctgatggcactgcttatcacaaagcttgcttcagatgttctcactgcaaaggaacattaaagctgagcaactattcctcaatggaaggtgttctttattgtaagcctcactttgagcagctcttcaaggagagtgggtccttcagcaagaacttccagtcacctgcaaagctagcagataagacaacacatgagctgacaaggtctcctagtaaagctgcgagcatgttttctggcacccaagaaaagtgtgccacatgtggcaaaactgcttatccattggagaaggtaacagtggaagggcaggcctatcacanatcatgtttcaagtgttcacatggntggatgtcccataacgccgtcgaattacgcagcccttgagggcattntgtattgcagcaccacttctnccagctttttaggagaaaggagctatatcatcttactagtctg

SEQ ID NO: 28228 - DNA, 768 bp, Glycine max
  Clone ID: TF_GmC102_5
catttccccacgcgtccggtcccgagggctaaacctgagttgtgtctcaagttgctcttcttctttttttcttttctttcaccctcaaaatttctcactctctttatcttcaccttttcagtttaaagcttcagatcacaacagatccaccattcacctcaccactttctcttcacaaggcaaatctaacaagaaaaagtagtctctgaagccgatccagtgtcttgtgaatttggaattggtagtgaatttagatctaaaaagccatagcaatgtcttttatcggtacccagcaaaagtgcaaggcttgtgagaaaacggtttatccagttgatcagctttctgctgatggcactgcttatcacaaagcttgcttcagatgttctcactgcaaaggaacattaaagctgagcaactattcctcaatggaaggtgttctttattgtaagcctcactttgagcagctcttcaaggagagtgggtccttcagcaagaacttccagtcacctgcaaagctagcagataagacaacacatgagctgacaaggtctcctagtaaagctgcgagcatgttttctggcacccaagaaaagtgtgccacatgtggcaaaactgcttatccattggagaaggtaacagtggaagggcaggcctatcacaaatcatgtttcaagtgttcacatgggtggatgtcccataacgccgtcgaattacgcagcccttgagggcattttgtattgcaggaacacttctccagctttttaggag

SEQ ID NO: 28229 - DNA, 557 bp, Glycine max
  Clone ID: TF_21600799
cctcgtgccgaattcggcacgaggcaaccattcccttctggttcattctttgaaaaaggtggaatgccttactgtcaatcttgcttccaaggaactttcagttcaaaatgcgctggatgtggaaatatggcgtctggtcaattgatcaacgctttaggtcaaaaatggcactcacaatgcttttgttgtagttattgtagaagaccattcaatggccttccttattttgaaaaagatggaaaaccatattgcgaacaacattatcacacttctgctggttccatttgtgcaggttgtagaactgcaatcgttggtagatgtgttgatgcattaggtcaaaaatggcaccctgaacactttgtgtgttcttattgtatgaacccactctctggcggtggttacactgaacaacatggtagcccttattgtcaagaatgctttgctaatctattttaaaattgataaattttggaatcgcttcagtaaggaaatattgttttattacagaattgtatcttaaataaattagtgtttcaaaccgaaaaaaaaaaaaaaaa

SEQ ID NO: 28230 - DNA, 377 bp, Glycine max
  Clone ID: TF_LIB3107-008-D2_FLI
tacggctgcgagaagacgacagaagggtacggctgcgagaagacgacagaagggtacgcctgcgagaagacgacagaagggggttgcactttggtaaggtgagagaataggaaaaagggaaatatggcatttgcaggaacaactcagaagtgcatggcttgtgacaaaacagtttatctggttgataagttgacagcagataaccgagtgtaccataaggcttgcttcagatgccaccactgcaaaggaacactcaagcttagcaactataactcttttgagggggttctttactgcaggccacacttcgaccaactgttcaaaagaactggtagtcttgacaaaagcttcgaagggacaccaaaaattgctaaacc

SEQ ID NO: 28231 - DNA, 976 bp, Glycine max
  unsure (1)..(976): unsure at all n locations
  Clone ID: TF_GmC102_2
caatcaatttaatatattcatatccttccacctgagttcttagtcctgaatgtccttgtctgtctcagtgtctctcttcacaacctcaccgatctgccatttcacactcataacaactttgtacaatttgactcgatatgttgaagtttctctgcagctaaattgaccaatagtttggtgcacttagatctaaaagctagaaagatgtcttttattggcactcaacaaaagtgcgaggcttgtgacaaaacagtgtaccccgttgatcagctttctgctgatggcactgcttatcacaaagcatgcttcaagtgctctcattgcaaaggaaccttgaagctcagcaactattcctccatggaaggtgttctatactgtaagcctcattatgagcaactcttcaaggagacaggatctttcaagaagaacttccagtcacctgctaagcaagctgtcaaaacaactcctgagctgacaaggtctcctagtaaagctgctagcatgttttctgggacccaagaaaagtgtgctacatgtggcaaaactgcttatcctttggagaaggtaacagtggaaggtcaggcctatcacaaatcttgtttcaaatgttcacatggcagctgtcccataactccatccaactatgcagccctggagggcgttttgtattgcaagcaccatttttcccagctttttaaggagaaagggagctataatcatcttattaaatctgcatcaatcaaacgggaagcaaactctgttccacaagcttgagtcatggtgttgtcttttgttgttattatcatctttggaataagtgtttgtgtttttttcattttgattctacttaccatgacaagtttccttcttgttcactttatatgtgggtgtcgctagtgtgcaatttacagtgtgtgatgtatttgaccaatgcacattcagtaataatagtgtgatttgcaagatgtcgcgtnta

SEQ ID NO: 28232 - DNA, 1432 bp, Glycine max
  Clone ID: TF_GmC1061_2
gcttgtgttagtgaggttagaagataaagaaagaatggcatttgcaggaacaacccagaagtgtatggcctgcgacaaaacggtttatctggttgataagttgaccgcggataaccgagtgttccacaaagcttgcttcagatgccatcactgcaaaggaaccctcaaggtctctctccctcttttacaattcttgttgattatatagtctctatctagttcaggcttctagctttggatctggtgtctgtaatttggttattagaaggcatgtgaatgtgctggatagcgtgtttggaaagaattgggtcgcagatcgccaccttctctccatgtctaaggatcaaaatacatggaagttacttcaagttgcttctgatgaatgtggtttatcacgtttgcactgtgtttccaaacacacagggaaacagaataatgactaacatcaatcttagaagcatttcctttaagtagtaattcagagttctttttctttatatataattttaagcactttcttcttaagaacatattatgtctctgtctcaaaactttccatgatttcatgataatactgataaatgatataggaaattaggaacctcttttcccttttggtgtattaaaggcttgttagcacattgcaattttcattaaatgatgttttctgactaattaatgtatctatctgcagctgagcaactacaactcttttgagggagttctttactgcaagccacattttgaccaactgttcaaaagaactgggagccttgacaaaagctttgaagggacaccaaaaattgccaagccagagaaaaatttggaagagaaacctgcagcagccaaagtctcaagtatgtttggtggatcaagggaaaaatgtgctggttgtcagaaaacggtgtatcccactgagaaggttactgtgaatggaactccttaccataagagttgttttaaatgctgccatggagggtgtgttatcagtccttccaattacatagcacacgagggaaaactctactgcaaacaccaccatgtccaattgatcaaggagaagggcaatttaacccaacttgaaggtgacaatgagaagagtgcgactaatgggaaaatcaatggtgaagaagtttccgcagagacatgaaggagtcgagtctcagaattttgctttctcaagtttcatatttgtgcaccatatatttctactctctcttgcttttaccattactttgcagtccgggaagctctttacccgtgacaaatatggtattctattttttgttagacaaagtgtgcggatcttcaccatatgtttttggttgttgtgagcgtttgattcaaaatgtgtgatttagaagtacatgttactgcacttcttaacactctcatggacttccaattgatattatatacaatcgttacaccc

SEQ ID NO: 28233 - DNA, 1026 bp, Glycine max
  unsure (1)..(1026): unsure at all n locations
  Clone ID: TF_GmC1586_2
aattcggctcgaggttcaattcccttttgtctgaggtgtgtgcattcttgtttaactcctctttgttcctcagacatcccagaagggaaccaaaaataaaaaataaaaaaataaacacaatcaataaaggggagaaaacaaacatgtcattcacaggaactcttgataaatgcacagcatgtgacaagactgtctatgtggttgacttgttaactcttgaaggaattccttaccataaaaactgcttcaagtgcagtcactgcaagggatgtcttacgatgtgcacatactcctcaatggatggaattctttattgcaagacacattttgaacagcttttcaaggaatctggcaatttcagcaagaacttcgcaaagtcttctgagaagcaaaatgagttgaatagaacccccagcaagctatcttccatgttcagtggaacccaggacaaatgctcagtttgcacaaaaacagtatatcctctggaaaagatgacacttgaaggggaatgcttccacaagacttgctttaggtgtgctcatgcagggtgccctctcacacattcaaactatgctgcccttgatggtgttctctactgcagggtccactttgcacaacttttcatggagaaagggaactacaaccatgtgctccaagctgctgcacacaggaggactggttcctctacacctccactactagaggagccatcacaagagccagcaccaccagcatctcatgaggaccaaacagaagaagagacacctcttgaatgagactggaagttgacatgaattgtttcaattccctccatccccttctttcagaatattgagcaaggtctttggtttaagttcagtacagtgaaaatatttgtaacaatatctttttgagtttcattgtaaactaacaacttgagaggtttgtttattatgtattcaaaatttttaaacnnnnnnnnnnnnnnnnnnnnnnnnnnnnnnnnnnnnnnnnnnnnnnnnnnnnnnnnnnnnnnnnnnnnnnnnn

SEQ ID NO: 28234 - DNA, 484 bp, Glycine max
  Clone ID: TF_LIB5119-034-A1-PF1-B9
tacagtattcttgtgttcgcagcgtttgttttgtcccggagcggtgttttttactcttgtgacgtctactcttgtaagccctctctcaacttcttgtcattcgcgcgatgccgaacccgaagtgcgaagcttgcggcaagactgcctatccccttgaaagtgttactgcccttgagaagaccttccataaaggttgtttcaagtgcaccacttgcaagacgactttgaatttgaagaacttcaagggctacgaaggccagatctattgcatccctcacaccccgaccccgaaggccacagctgtcactgacagcgtgctgatcaaggccgcagttaacgcgcccaagaagaaggctgagggcctcgctattgcgcaccgtggtgcacgtgagctcgcgccggccgccgccgacttcaccgtcaatgacacgaacgtcgaccagtcgaccgagaaccagcccgaccagtcgcacatccagtacga

SEQ ID NO: 28235 - DNA, 803 bp, Glycine max
  Clone ID: TF_GmC102_6
ccacgcgttcaacttgctcttcttcttctctttcaccctccaaattttctcactctctctttatcttcaccttttcagtttaaagcttcagatcacaaccgatccaccattcaccactttctcttcacaagctcaagttactgacaggcaaatctaacaagaaaagtagtctctgaagccgatccagtgccttgtgaatttggaattggtggtgaatttagatctaaaagccatagcaatgtcttttatcggtacccagcaaaagtgcaaggcttgtgagaaaacggtttatcccgttgatcagctttctgctgatggtactgcttatcacaaagcttgcttcagatgctctcactgcaaaggaacattaaagctgagcaactactcctcaatggaaggtgttctttactgtaagcctcactatgagcagctcttcaaggagagtggctccttcagcaagaacttccagtcacctgcaaagctagctgataagacaactcctgagctgacaaggtctcctagtaaagctgcgagcatgttttctggcacacaagaaaagtgtgccacatgtggcaaaactgcttatccattagagaaggtaacagtggaagggcaggcctatcacaaatcatgtttcaagtgttcacatggtggatgtcccataacgccatcgaattatgcagccctttgaggcattttgtattgcaagcaccacttctcccagctttttaaggagaaaggggagctatatcatcttactaagtctgcatcagtcaaacgggcagccgcagccacagcagcag

SEQ ID NO: 28236 - DNA, 522 bp, Glycine max
  Clone ID: TF_GmC5796_4
ttgtcaattgaacatgatcgcgacccaatttccaaatttacccatcacagaattttggagaaagaaaaaaatacaaggaagaaagaaagtcttcaacctctattcaattctccaagtgggattttgagatggcatcatttgcaggcactacccagaagtgcacagcatgtgaaaagaaagtgtattgggtggaacagctcactgctgacaacaaggtgtaccacaaatcttgcttcagatgtcaccactgcaagggcaccctcaagctgagtaattattgttcctttgagggtgtcctatactgtaagcctcatttccatcaactgtttaagatgactggcagcttggacaaaagttttgaaggtgttccaagaagtgttagagtggaaagatctgctgatcaggtccaaaccaacaaggtttcaagattattctctggaacacaagaaaagtgtgttggttgcaagaaaacagtgtacccaattgaaaaggtggctgttgatggtaaatcttaccacaagt

SEQ ID NO: 28237 - DNA, 1248 bp, Glycine max
  Clone ID: TF_GmC1603_1
acggctcgagcacttcgctgaacggttcgagcttagctcaaacctcacctcaataatctttcgtgctagctagcttaatcatattccaattccaacagaaccaaattctgctagctagctagtacgtcaaaggaaataaaataatatggcattcagcgggacccaacagaaatgcaaggcttgcgacaaaactgttcacttggtcgaaggtttatctgtcgatggggctgcttatcacaagaattgcttcagatgcagccattgcaatggccttcttgcgataagcaactactcatccaccgaaggggttttgtactgcaaggtgcactttgagcagcttttcaaggaaactggcgcctaccccaagaaatcccagtcgtctggaaagcctccactcgagctgaatagagcaccaagcaaactttctgccttcttctctgggactcaagagaaatgttcaaaatgcaagaaaaccgtatatccattggaaaagttgaccgtggaaggcgagttttaccataaatcatgctttaggtgtgcacatggaggatgtttcctgaccccttcaacctatgctgctctagatggatatctttactgcaagccccacttctctcagttgttcaaggagaagggtagctacagttatctgtccaagcaagcttcattgaagaaaagtgaaatgcaacaacaagaacaagaggctgtggagaaagctactacaacaacgatgatgatcgctcagagtcagagccagagacgaccaacaacaacaacaaaggaagctgaacaagctgatgatgatcactctgagcaagaacactagattgattgatggaacattaattttgcaaggggaggcttcacttgtgtctttgagtaaaattgatctttctggctacaaatagaacaaccccatttgggacattttgaagttcctgattcattgggttgtgtggctttgtgtcatttgggaagattcccgcaaaagggctattacagtattatgtgttccataatttgcaaacagtcagtgtagacagttaaccgttaagcctttctgttctttggggcatgtacatgactttctcaagccaaagtgcatgcatgcatgctacaatcatttcagatgtatttcattctttgtattcagaaacagatatcagagtagaaaaagaagattttattgtctgaatccatgatggattacaatagcaatctcttttctaaaaaactctccttaattat

SEQ ID NO: 28238 - DNA, 1169 bp, Glycine max
  Clone ID: TF_GmC5988_6
tagctacttggtacctgggcatatccattactttactctattccctttatgatcgtttttttcatgacttattttattctgattcttcagattccgttgtctctgcagattcttaatctctttctggttaaaagtttctagaggatggtcatgctgcagttgaattttgaaacaagggtttgccaacctgaaggtaaataattttgcatgaaatgggttggtttaccaagttgcttaagggctctgattataaaattttacgagggcaataccatggcaaatatggagaggacagaatttgggataatcatcatagttcgatggatgatttgacagatattgagaaagaagacattgaccgtgcaattgcactttctctgtcagaggaggatcataaagggaaaaaagttgttgattacgactctcaatctgaagatgaggaactttgtaaaattgatgatgaggaagatgaacatcttgttaaagttcatctagaagaagaagaacgtcttgctaaaattcaacaagaagaagaagaacgtcttgctaaaattcaacaagaacgcttctcaacaagaagatgaatgtcttgctaaaattcaacaagaggatgaacgtcttgctaaagctcaacttgaggaagacgagcaacttgctagggcaattcaagaaagcttgaaaattggttctcctcctcaatatgacaatggttcttcaattctatcttttcctcaccttttcccccctggatacagaatctgtgctggatgcaagactgagattggccaaggaagatttttaagttgcatgggaggtgtctggcatccagaatgcttctgctgccatgcatgccatcttccaatcactgattatgagttttccatgtctagcaatcgcccttaccataaatcatgctatagggagaagcatcacccaagatgtgatgtttgcaagaactttatcccaactaattcatctggcctcattgagtatagagctcatcctttctggctacaaaaatactgcccatcacatgagcttgatggcacttctcgttgttgtagttgcgaaagaatggagccaagggatacaaaatatcttttgcttgatgatggtcgaaagctatgtttagagtgtctagactcatcaattatggatactcatgaatg

SEQ ID NO: 28239 - DNA, 373 bp, Glycine max
  Clone ID: TF_uC-gmropic020d02b1
ccctctcgtccgcccacgcgttcgtccacgcgttcgcccacgcgttcgaattctcccaacacaattataaaaagaagaaaaacttagagtgatagttgtaggaaagtaaaaacataagtgttctcttaattcagtgaggttctgaattgttcaacttgagatgatggcatcatttgcagggactactcagaagtgcaaagcatgtgagaagactgtgtatttggtggaattgctcactgctgacaacaagatctatcacaaatcatgtttcagatgctaccactgcaagggtacccttaagttgagtaattattgttcctttgagggtgttttatactgtaagcctcattttgatcaactctttaagaagact

SEQ ID NO: 28240 - DNA, 1262 bp, Glycine max
  Clone ID: TF_GmC1061_1
gggaagctctttacccgtgacaaatatggtattcaattttttgttagttgaactgtgtggatcttcaccatctgtttttgggtgttgagagcgtttgattcaaaatgtgtgatttaaaagtacatgctactgcccttcttgaaactctcatgcaccagtttgggcgcgtcctgtgttatccaacggctgcgagaagacgacataattgtatggaaggttgctttagtctccgcaattttctgcttgcttcttcacttttttttttcctctgtctcctcctcaatcttcattgtcctgttctttcccttggtgacaaaccaagactaacacacacagaacatagcttgtgttggtgaggtgagaagataaagaaagaatggcatttgcaggaacaacacagaagtgtatggcctgtgacaaaaccgtttatctggttgataagttgaccgcggataaccgagttttccacaaagcttgcttcagatgccatcactgcaaaggaaccctcaagctgagcaactacaactcttttgagggagttctttattgtaagccacactttgaccaactgttcaaaagaacagggagccttgacaaaagctttgaaggaacaccaaaaattgccaagccagagaaaaatttggaagagaaacctgcagcagccaaagtctcaagtatgtttggaggaacaagggaaaaatgtgctggttgtcagaaaacggtgtatcccactgagaaggttactgtgaatggaactccttaccataagagttgttttaaatgctgccatggagggtgtgttatcagtccttccaattacatagcacacgagggaaaactctactgcaaacaccaccatgtccaattgatcaaggagaagggcaatttaacccaacttgaaggtgacaatgagaagagtgcgactaatgggaaaatcaatggtgaagaagtttccgcagagacatgaaggagtcgagtctcagaattttgctttctcaagtttcatatttgtgcaccatatatttctactctctcttgcttttaccattactttgcagtccgggaagctctttacccgtgacaaatatggtattctattttttgttagacaaagtgtgcggatcttcaccatatgtttttggttgttgtgagcgtttgattcaaaatgtgtgatttagaagtacatgttactgcacttcttaacactctcatggacttccaattgatattatatacaatcgttacacccaaatttcgtttcc

SEQ ID NO: 28241 - DNA, 1378 bp, Glycine max
  Clone ID: TF_GmC1061_3
aaggttgctttagtctccgcaattttctgcttgcttcttcacttttttttttcctctgtctcctcctcaatcttcattgtcctgttctttcccttggtgacaaaccaagactaacacacacagaacatagcttgtgttggtgaggtgagaagataaagaaagaatggcatttgcaggaacaacacagaagtgtatggcctgtgacaaaaccgtttatctggttgataagttgaccgcggataaccgagttttccacaaagcttgcttcagatgccatcactgcaaaggaaccctcaagctgagcaactacaactcttttgagggagttctttattgtaagccacactttgaccaactgttcaaaagaacagggagccttgacaaaagctttgaaggaacaccaaaaattgccaagccagagaaaaatttggaagagaaacctgcagcagccaaagtctcaagtatgtttggaggaacaagggacaaatgtgctggttgtcagaaaacggtttatcccactgagaaggtgactgtgaatggaaccccttaccataagagttgtttcaaatgctgccatggagggtgtgttatcagtccttccaattacatagcacacgagggaaaactctactgcaaacaccaccatgtccaattgatcaaggagaagggcaatttaagccaacttgaaggtgacaatgagaagagtgcaactaatgggaaaatcaatggtgaagaagttgccacggagacatgatgaaagagtcgagtctcagaattgtactttctcaagttccatatttgtgcaccatatgtttctgctgtctctcatgcttttaccattactttgcagtccgggaagctctttacccgtgacaaatatggtattcaattttttgttagttgaactgtgtggatcttcatcatctgtttttggttgttgtgagcgtttgattcagaatgtgtgatttagaagtacatgctactgcacttcttgaaactctcatggacttccaattgatattatgtaaaatcgtctcaatacccaaatttcgtttcctactaaatcaatggtcaagaagtttccgcagagacatgaaggagtcgagtctcagaattttgctttctcaagtttcatatttgtgcaccatatatttctactctctcatgcttttaccattactttgcagtccgggaagctctttacccgtgacaaatatggtattccattttttgttagacaaagtgtgcggatcttcaccatatgtttttggttgttgtgagcgtttcattcaaaatgtgtgatttagaagtacatgttactgcacttcttaacactctcatggacttccaattgatattatatacaatcgttacaccc

SEQ ID NO: 28242 - DNA, 1117 bp, Glycine max
  Clone ID: TF_GmC1184_1
ctgcccacgcgtccggcctccaataatttaggacaaatattggacaaaatgattgtcaacgacagtatatttgttggggtgtctgctttttgtctcctgcctcctacatttcaccaccccctttatccttatctcctctcttcttcatttgttctgctcttcccctctatttaaagctcacacaaagggatcatataccttggttgcactttggtaaggtgagagaataggaaaaagggaaatatggcatttgcaggaacaactcagaagtgcatggcttgtgacaaaacagtttatctggttgataagttgacagcagataaccgagtgtaccataaggcttgcttcagatgccaccactgcaaaggaacactcaagcttagcaactataactcttttgagggggttctttactgcaggccacacttcgaccaactgttcaaaagaactggtagtcttgacaaaagcttcgaagggacaccaaaaattgctaaaccagaaaaaaccggggaagagaaacctgcagcaaccaaagtctcaagtatgtttggtggaactagagataaatgtgccggttgtcaaaaaacagtgtatcccactgaaaaggttactgtgaatggaactccttatcacaagagttgtttcaaatgcactcatggagggtgtgttattagtccctccaactacattgcacacgagggcaaactctactgcaagcaccaccacgtccaactgatcaaggagaagggtaatttaagccaacttgaaggtgaccatgagaagagtgcagagcaagagaaaatcaacggtgaagtagttgcagctgagacatgaaatgaaatgaaatgaaatgcttgagttatcacagatgaatattcccttcctcaagttccatatttctgtatcatgtgtttatgctatctctcctgctttgccaatatggagtccataatgctcttgaaaaatatggtactccctttttttgtggttggggtgtgtgcaaatccatcgttttgttttctgttgttgtgaagttgtggattctaaaaatgagacttaatggcatgcaattctgaatatgtgattcaaaaaaaaaaaaaaaaaaaaatctttaaaa

SEQ ID NO: 28243 - DNA, 2749 bp, Glycine max
  Clone ID: TF_GmC1928_1
gattctgctaatgaaagattctttaacattattttatcatttatactcataaatatcctgctgattggaggggaatcttccttgcgttttcaatttgtcttcagaagaacatcatttagtcttttacatatccttttcgttttttttttcattttctctgatgtatctgaatgttgaggacctgagaaactgggtaacacgtgattcccaaaataagaggtgatatggtctttatattccatgatctgtctgttggtcatgttgcctatttcttgccttgcaaagcttataggaagtacctcaaatccgactggattgaatcccttttggcctccctgtatttgcgtgtgatccaagtactccccttttcactctttgcactcaaaaagctattccaagaatcacataacaaagagagagagagagagagagaaaaagctattactatgtggttgactatgcgtaaaaaagaatcagaattcagaaaaaaaaagtgtacttgaactgggattcatctgattccttaacttgtctctctgctgattcataatctcttttaaggaagaggttttgccaaccccaacctgcagcaaataatattgcatgggttggtttactaagttgcttaagggatccaaccgtaaatcgtcaggaggaagatatcatgggaaatatgaagatgacagaatatcggacaatcttgattgttcagcggatgatttgatggatattgagaaagaagaaattggtcgggcaatagcactctctctttcagaggcagataagaaagggaaaaaagttattgaggacgactctgaatctgaagatgatgaactgtgtccacttagcgacgaggaagctgaatctgttggtgaagttcagcaagatgaagatgaccatcatgctaaaattcaacaggatgaagacaaacatcttgatgaagttcaacttgaggaagatgaacaacttgccagggcaattcaagaaagtttgagcattagttctcctcctcgatctgagactgattctttatttcaaccttttgcacacttatttccacctgtatacagaatctgttctggctgtaatgctgagattggccatggaagatttttgagttgcatgggaggttattggcatccagaatgcttttgttgccatgcttgcaaacttccaatcactgattatgagttttctatgtctggaaatcgtcgttatcataaatcctgctataaggagttgcatcatccaagatgtgatgtttgcaagaactttattccaccaaattcagctggtctcattgagtatagagcacatcctttctggctacaaaaatattgtccatcgcatgagcgtgatggtactcctcgctgttgtagctgtcaaagattggagtcagtggataccaaatatctgttgcttgacgatggtcgaaagctgtgcctggagtgtcttgactcagctatcatggatactcatgaatgccaacctctctatgtcgaaatacaagagttttatgagggtttacatatgaagatagagcagcaagttccgatgcttttggttgagagacaagcactgaacgaggctatggagggagagaagaatggtcatcatcacttacctgaaaccagaggactttgcttgtccgaagagcaaactgttcccactattttaaggagaccaaggataggagcaggataccagctcatagatatgataaccgagccttttaggctggtccgtcgttgtgaagtgacagccatacttgttttgtatggccttcctaggttattgactggatcaatcctggctcacgaaatgatgcacgcatggcttagacttaaaggctatggcaatctgaggccagaagttgaagagggaatttgccaagtcttggctcatatgtggttagaatcagagattattcctggcactggggatgaaggtgcatcatcatcatcatcctcatcatcctcatcgccttcgtcttcttcatcatcaaagaagggtaaacgttccgactttgagaagaaactaggtaagtacttcaaacaccagattgagtcagatagctcagcagcttatggagatggattcagagagggtaaccaggctgtggctaagtatggacttagaagaacccttgaccatatccgattgacaggaagttttccatattgaaaaatggtatttgacccttttagagtgagtaattcactttaaagagcaaagtaagggacctcaactgttgatgagataattaaagagttgtttgttaaactttaacaaatccatgaaccgttgatttttcatcaatggttgaaacttacttttctctgtaaagtaaagattcactttagagaaatcaaatccagaaatatgatacaattttctttcctttacaccaaccaatatatcaactttgtcttttaaattatgtaggattcaaaggttccaaaattatatagttttcacgctactccggactagtaaggaatgaaaaatgctcctgttagtctgcggttgccgaaatctttcttttccttttttttttctttttcttttaggggggtgctgatgaggagtgatgaaatgtgcagtttctgcaagttccagataaatgtaggcagataaatgtaggcacctcagattcgatatgtattacaaaataccttgcaacagttgaaaatgataaaacagttgaagtaattatagtaaaagtttgtatattttgtattttgctgat

SEQ ID NO: 28244 - DNA, 253 bp, Glycine max
  unsure (1)..(253): unsure at all n locations
  Clone ID: TF_700681638H1
tcaagcgcctttgctggcaccagagagaaatgtnttggatgncagcaaccacagtctatccaactgagagggtcactgttaacaacactatgnaccacaagagctgcttcaagtgctgccatggagggtgcaccatcagcccttctaactacattgcgcacgangggaagctgtactgcaagcaccaccacatccagctgatcaaggagaaggggaacttcagccagcttgagaatgaccacggaagacatca

SEQ ID NO: 28245 - DNA, 646 bp, Glycine max
  unsure (1)..(646): unsure at all n locations
  Clone ID: TF_jC-gmst02400027e04a1
ggctcgaggtgaagtgttctcctaattcagtgagtgaggttctgaattcttcaacttgagatgatggcatcatttgcagggactactcagaagtgcaaagcatgtgagaagactgtgtatttggtggatcagctcactgctgacaacaagatctatcacaaatcatgtttcagatgctaccactgcaagggtacccttaagttgagtaactattgttcctttgagggtgtgttatactgtaagcctcattttgatcaactctttaagaagactggcagcttagacaaaagttttgaaggtattccaagaactgctagacttgaaagatctactgatcaggtccaaaccaatagcaaggtttcaaatttgtttgctggaactcaggaaaaatgtgttgcttgcaagaaaacagtttacccaattgaaaaggtagctgttgatggaacatcttaccataaggcttgtttcaggtgcactcatggggngtgtgtaattagcccctcaaattacgttgcccatgaacatcgtctttattgtaggcaccatcacactcagttgttcaagcagaaaggtaacttcagccaacttgacaagcaagaaaatgatggaggggtgactgagaaacacataactgagtaatagcatg

SEQ ID NO: 28246 - DNA, 887 bp, Glycine max
  Clone ID: TF_GmC1463_1
gcgaagctcggaggggggcggaggcaaagagagagagagagaagaccaaaggagggtaaggaaaaacttcagcagaggaattccttgcagaagggtgcaactttactccctctctttctctcttgctctttcttgtcagggtttggtcatataagaagccatggccagttttggaggaaccacacaaaagtgcatggcttgtgccaaaactgtgtatcttgttgataagttaactgcagatagccgtgtctatcataaggcttgcttccgatgccaccattgccgtaatacccttaagcttagcaactactgttcttttgagggggtgctctactgcagacctcactatgatcaactctacaagcgaactggtagcctggacaaaagttttgaaggaatacccaaaattcagaaaccagagaaaccggtcactggtaatgagaatactaaggtcctcgcaaacgtgttcttgggcaccagagacaaatgtgtgtgttgcaacaagacagtgtatcccactgagagggttacggttaatgggacaccctaccacaagggctgcttcaagtgtacctatggaggttgtactgtaagctcatcaaactttatcacacacgagggaaagccctactgcaaacaccatcacattcaacttttcaaagagaaagggaattacagtcagctcgagaatgaatgctagctagcaatgtcgtatactactaccatggataatgcaccattgtcagcaacgcataatatatagtgttgtccttgtaaaatgcatgcattgatgagatagaaagtttgctgtgtgtgtgtgtgcgcattttgattcttgagaatgctttcagcagtttcattttaacaaagaatttttttaagttcat

SEQ ID NO: 28247 - DNA, 394 bp, Glycine max
  Clone ID: TF_LIB3049-029-Q1-E1-G6
gatcatcagaatccacagtttccgttagcgctctccaatacaaaataaccactcactgaatattcggtcgaagatgtccgccgccgaagaagctaaagttcccgccgtcgaaaagccggtggaggaggtgaaggcgccgaagcttgccaaggagaagaaacctaaggctccgaaggaaaagaagccgaaacaggccaaaactgcttctcatcctccatatctccaggtaatttcgcgtaaatttctttcatgaatccacaattattacgtgattgttatttttttgtttgttgatttttttttggttgtcttaatgtttgtagatgattaatgacgctttgattgctctgaacgagaaaggaggatcgagtccatatgcgatagcgaagtacat

SEQ ID NO: 28248 - DNA, 2059 bp, Glycine max
  Clone ID: TF_GmC6822_1
gaaaaacagcattaacacaaataaactagaaaacatttttttttctcgttattctccggttcctcgcaggcaccaattccacatatctgcgtgtaaatactccaacttgtcccaattcacacctttgcctcgcgattctccgatgcgttacacctttgtccaccgattcctctttaattttcttccctttttcccccaattcaactaaattttctgctatctatattcccaggtaagtaaagtcagatttttcttggtggacggacatgcagaagaaggctgcactcaacttccaagctttcctctagaacaaaagcaaagattatactgtcataaaaaggttttgtacttattttaatgggtgctcctaagcagaaatggaccgcagaggaagaagcagcattgaaagctggagtagtcaaacacggggctggaaaatggcgcaccatacttacagacccagagttcagttccattttgcgcatgcgttcaaatgtagatctcaaggacaaatggaggaacataaatgtgacagcaatatggggatcgaggcagaaagcaaagctagctcttaaaaagaacctactaccatccaccaaaattgacaataaccacttggccttgagtactgtagttcaacgtgacaaagaagttgcaaatcccaagcctttggcagtttctagtgggacatctcctaattcaaaggaaaaaatatcgaagctacagaacttccagttggataatcttatattagagtccattatcaagttgaaggagccaaggggttctgaccaggcagcaattgctgcatatatagaggatcaatactgttctacgccgaccctcagaaagttactgtcaacaaaactgaagcacatggtggctagtggaaaattaatgaaggtaattttactgttagttaatcccttaacaaggcacattgttcttggcttattggaacttagtttcccaataatcaacatttttatctgcaaacctttgtaatgaagcatagtcagtctggataaattttagatcatgtatgacagatactttactgacaacattttttatgttatttattgaaggttattgacaaaatatgatttgcgacaagaaagtaattggttatatgtgtgcacagatgtgaatagaaatatgttctcttgtggcagttgaactatgcatatctgggcacgctctttagcaggagtgaaaaaactattttgaattgataaaattttcccatttaataaactaatattactgttaaataaatattgggtatgcaattaaactctatttggtcaatagatcctgagtgtgacatatctaacgagtaatgacaggtaaagcataagtacaggattgcaacaaatttaacaatatctgagaaaagaagatgctcttccctgttactcctggaagggaggcccaaagattctccaaaagcagagaagactggtgtcaacatcctttcaaaatccgaaattgatgcagagctatcgaaaatgaagggtgtgacacctcaagaggctgcggcggcagctgcaaaagcagttgcagaggcagaagctgccattgccgaggctgaggcagcagctagggaggcagatgctgcagaagccgaggcagaggctgcacgagtgtttgcaaaagcagcaatgaaagcactaaaatgcaagacacttcgtatttgatggtgtcagcttctgcgttgctgacatgaggagtatttgagatcataattctgctgctagacttcctgcatgtattcaattactgtacataatttaggcttgtaaatttggaatatgcgggattgatctatgaaacgttttgtcaggagtcattatgagcgtattatttatttatttattttgaccttatttttaagaaagacaatgaggcgagagtacaaagtattagtggaagagtggaatcagtgatctagtgttatgatggaatgtgtgatagacatcctctattagtaaatggaagaatacaatttttattagagttccaatgacaatgctgagtgccactttctcgtgattca

SEQ ID NO: 28249 - DNA, 294 bp, Glycine max
  Clone ID: TF_LIB3055-003-Q1-N1-D4
gtatctttcaatttccatccacgggtatagccttttctatttgggcgttctaatgttcaacggcatgcacaccaatggccaataaaacggcgtagtccaggaggcccttttaccatcctactttgacaggatgtaacggagccttagcaattctcaaggagagaaccggttcgagccattacgcgataaccaatttcatctaaggcaggcccaaggagttgcctccaacctacaaaaagcttgttctcgttcatctcaagaagtctgttgttgctggcaagctcgttaaggtca

SEQ ID NO: 28250 - DNA, 320 bp, Glycine max
  unsure (1)..(320): unsure at all n locations
  Clone ID: TF_LIB3167-016-P1-K1-F5
gaaaaaccggggcgacgcacgcgtccgctctctcagaatttctatctatctcttgttttaatttcaacaacggttactccttttgcggggtgagtttcaatcacgccgtcgtcatntctaccgcatcgcaacccaaggccaagaaaacggcgtcgtccaagaagcccctctcccaccctcccttcgccgtgatgatagcacatgccattgcgagtctgaaagagagaaccgtgtcgagccaatactcgaataccaaatacattgaagggtaacacaacgagttgcctgcaacctacaagaatcttgttctcgttcatctt

SEQ ID NO: 28251 - DNA, 381 bp, Glycine max
  Clone ID: TF_jC-gmst02400046d07a1
ggctcgagcaaacttgaacggatccatcatacacagagcccaatcgtctctcgagccctgattgaccctcagatacatggccacagaagagcccactggcggggagggacccgatcccgagcctgactgagtccatccttccccggacgagaaggaggagaccaaacctagaagccaaggctaagaaaaccaaggagcccaaacccaacaaggctctcagacctggccaccctcccactcaacctatctacgaaaagatcgttaaagatgcaaatacctcgctgaaggagaaaaccggtgcgagccaatacacgattgcaaagttcatccaaggaaagcacatgcatgatacacctgacttaatgaagcaaaaactctacc

SEQ ID NO: 28252 - DNA, 1278 bp, Glycine max
  Clone ID: TF_GmC13_1
ccgcgcgcccacgcggccggcgaagaagtagagaacaaagaaagagagagagaattgaatgtgaatggggaatcagaagcagaagtggacgcaggacgaagaagatgctctcatcgccggcgttgaaaagcacggccccggaaagtggaagaacattctcaaggatccccaattcgcccctttcctcacttcccgttccaacatcgacctcaaggataaatggcgcaatttgagcgtcagcaacggtgctcagggctccaaagaaaaatctagggttcccaagcttaaagccctccctgctcctcctgctcctaccgccactcctcagaacgccgctcctgctctgcaaaacgcagcatctgatgtcactcccccagatgcttctcagaatgaccaagatgccaaaaaccctccaaggtataatgcaatgatttttgaagctctatcagcgctgaaagatagtaatggatctgacatgaatgccatcattaaattcatggagcaaaaaatcttcaggtaaaccaaaattttagaagggcattaagtacaaagttgaggaggcttgttagtcaagggaaacttgaaaaggtacaaaatggttacaaggtgaaaaaggaagcctcctcggggacaaaatcaccttcaccaaaaccaaaggatgtccggccaccacaaccacaacagcaatccccagcttctgtcttaatgactaatgacacaataaaggaagctgcggatactgcagcctacagagttgctgatgctgaaagtaaatcatatctggctgcagaagcagtaaaggaggctgaaaaaaatatcattgctggttgaacatagtgattcaatgttacagctagcaaaagatatatatgaacaatgttcccgtggtgaaattatcctcttggcttaagatggtctaagtaaggtctataaatagattcgtcctgatgttggtttctaaatgtaaaattttgttgatacaatgaaatactattttaacttttatttttgtattttatcagattcccttaaacatttgtattccttaaaattgcatggaaagtcatgtttatagtaatatcatcggtccaccaaatcttgccagattttggatccaaaatgtaagcaatagaaactcatttatgttttttttggcgatgtaatacagatcattcatgtcttgattcttgactctagtctagaactcgatccttcgtatccaatttttttaattaaaagtgaaattttcacgtaaaaaaaaaaaaaaaaaaaaaataa

SEQ ID NO: 28253 - DNA, 407 bp, Glycine max
  unsure (1)..(407): unsure at all n locations
  Clone ID: TF_uC-gmflminsoy035f03b1
ccggggggaccggaccggaaanaccgggacgacccacgcgcccggtttttttctccaacgcaaccaccacacacagagccgaggcctctctcaagccctaacggcccctcaacaccatggccacagaagagcccactggcgcgggggaacccgcgcccgaacctgccaccgccgaacctcccccggaggagaaggaggagaccaaacctgaagccaaggctaagaaaaccaaggagcccaaacctaaaaagggggccagaccgcgcaacccacccactcatccaaactacgaagagacgggaaaagaggcaaccacctcgctgaaggagaaaaccggatcgagccaacacgcgaacgcgaagaacaccgaggagaagcacacgcagcgcccaccgaaccgcaagaag

SEQ ID NO: 28254 - DNA, 402 bp, Glycine max
  Clone ID: TF_LIB3108-006-Q1-K1-H9
cgaggcgatcgcgtcgctgaaggagaggaccggatcgagccagtacgcgatctcgaagttgatggaagacaagcacaaggctcacctcccggccaacttcaagaagctcctcctcgttcagcttcggaaacttaccgccgccggcaaactcaccaaggtcaagaactcttataagatctctgccaagcccgccactgctgtgaagccgaagtccgctgctgccgccccgaaggcgaagccgaagtccgcaactgctgcagctaaggcgaagctaaagccgaaatctgctgcagcgaagctgaagaaggctgctgtgaagccgaaacggaaatcctctgctgtgaagcctaaatctaaggctgcggtcgtgaaatctaaagctgttgcccctaagcctaaagc

SEQ ID NO: 28255 - DNA, 929 bp, Glycine max
  Clone ID: TF_GmC1613_7
tacggctgcgagaagacgacagaagggtaccgctgtgagaagacgacagaaggggatccataccatacctttcactttcctaaagaaaattggaacctgcctctgttgttaaagtttgtatttttttttgagtgggtggattgagagaactgtgcaagctttggaacttcttcaaagtctggtacttcaatggctactgaagaggttaataaacttcaatcacttcctccttaccctgagatgatagtgaaagcacttgaagccctgaatgaggctgatggatcgagtaaatcagcgatatcaaagtacatagaaaccacctacggtgagttgccagatgaaactgttttggggagtcacctgaacaagatgaaagagagtggagagcttgcgttcaaacagaacaattacatgaaagctgatccaaatgccccaccaaagaggggacgtggaaggccaccaaagccaaaggttccattgccaccaggcactgttgtgtcccctccaaggccaaggggtcgtcccccaaaagaccctaatgcccctcctaagtcccctaaggctaaggccacccctgccactggcaggccaagaggaaggcctaagaaggttgctcgctcaccggccgtgccgtctcccaccgccgtctccactggaaggcctagaggcaggcctcccaaagtgaagcctcagttgacagaagtcagtgttgagtcatagaatggtttctttctttctttctaattgatgtcaaatgtagtgatctactcttgtcgaagtgatggtgggtgtggtcttagatattgggtcaatttaatttctttgtaaaattaagtagtggtagcttgcttattatgaggctttgtcttggttattcttgctaattactaccaaagagaacagtgacttgagctaatggtgatttggtg

SEQ ID NO: 28256 - DNA, 908 bp, Glycine max
  Clone ID: TF_GmC101_2
ccggaattcccccccccgtccggcgtccgctttccaatacaataatcactaactgaatattcgatcggagatgtctgccgccgccgaagaagctaacgctcccgccgtcgaaaagccggttgaggaggtgaaggcgccgaaccccgcgaaggagaagaaacctaaggctccgaaggaaaagaagccaaaacaggccaaaacagcttcacatcctccatattttcagatgattaaggaggctttgatcgctttgaacgagaaaggaggatcgagtccttatgcgatagcgaagtacatggaggagaagcacaaggcggtgctccctgcgaatttcaagaagattctaggtctgcaactaaagaaccaagctgcgagagggaaactcgtgaagatcaaggcttcgtacaagttaaccgaagccgcgaagaaggagaacaccgccaaagtgacgaaggccaacgctgagaaaaaggaatcgcgtccaaaacgaagcaaaaccgcaaccgccgctgctccgaagaaaaccgaggcggttaaaagggcagcgaagaaggtagggccgaagaagacgaagaaagtgtcgacgcctgcgaagcccaagcagcccaagtccattaggtctccaaccaagagggcccggaaagcagccgttgctgcggcttgatacttgtcttgtttagttaaaactatgacatatatatgtagatatgaaaaggtgtgggtgtgggtgtatgtgtgtgccttgctgcacaatcttgaagaaagttgtgtagtgtaggatggtagatagtttagtgttctgcaatgttcgctctaataagtgatctaatggagatgagttttactgttttaaatcaaaaaaaaaaaaagttgacggctccctagcggacgcacgcgtgcgtccgcgt

SEQ ID NO: 28257 - DNA, 1024 bp, Glycine max
  Clone ID: TF_GmC101_1
gatctcgagccgctcgagccgctcgagcccctctgtttccgtataacgctctccaatacaaaataaccactcactgaatattcggtcgaagatgtccgccgccgaagaagctaaagttcccgccgtcgaaaagccggtggaggaggtgaaggcgccgaagcttgccaaggagaagaaacctaaggctccgaaggaaaagaagccgaaacaggccaaaactgcttctcatcctccatatctccagatgattaaggacgctttgattgctctgaacgagaaaggaggatcgagtccatatgcgatagcgaagtacatggaggagaagcacaaggcggtgcttcctgcgaatttcaagaagatactaggtctgcaactgaagaaccaagctgcgagagggaaactcgtcaagatcaaggcttcgtacaagttagccgaagccgcgaagaaggtgaaggagagcaccgccaaagcgacgaaggaatcgcgtccgaaacgaaacaaaatcgcaaccgccgttgctccgaagaaaaccgaggcggttaaaaagcccgcgaagaaggtcgggccgaagaaaacgaagaaagtgtcgacgcctgcgaagcccaagcagcccaggtccattaggtctccgaccaagagggcccgtaaagctgccgtcgctgcggcttgatgtttgatgtttttcttgtttagttaaaactctggcatataatatatgtagatatgaaaaggtgtgtgttaaccttgttgcacaatcttgaatatagttgtgtggtttaggatcgtagatagtttagtgttctgcaatgttcgctctaagaagtgatcaattggagatgaattttactgttatcaatctccttctttcaagttgattgtttttttttcactgttggttttatcgtcgaattttctggaacgccgaaagggtttgtgatgccatgcgggtgcggttgaatgtttttaattggccggttgttcttttttatttttggtggtttgtgattgggcttggagcaagaaa

SEQ ID NO: 28258 - DNA, 656 bp, Glycine max
  unsure (1)..(656): unsure at all n locations
  Clone ID: TF_LIB4165-011-R1-K1-A4
gtacgccctcgcaggntaccccggtnccggnaatnntcccgggtcgacccacgcgtccggggaagcacaaggagttgcctgcaacctacaagaagcttgtcctcgttcatctcaagaaatctgttgctgctggcaagcttgttaaggtgaaaaactcctttaagctcgcaccgactaagcctgctccggttaaggccgctgctcccaaaaagccaaccaaagctgccactaagcccgcttccaagcccaaagctgctactcctaagaaaaaggctgttgccaagcccaaggccaaagctgcggccacgactgccaagcccaagtctaagcccgctaaggtcgcggccaagaaggtcgctgctaagccagctaagaagaagacacccgtaaaggccgtgaagaagcccaagagtgtcgtgaagaaacctaagagcgtgaaatcaccagcgaagaagactaaggctaaggctaagaagtgatgatttggattggggtttggttttggtttggcgttatagttttatgcattccgggttcattcgtagtagtataggtgaatatatttttagaagagtattgatgtaaattcctttttctagaaattcaacaagtgttcttgtttgcattgaatacaatttcgttttctttaaaanaaa

SEQ ID NO: 28259 - DNA, 817 bp, Glycine max
  Clone ID: TF_GmC796_5
ggccggaattcccggctcgacccacgcgtccgatttggctcgggatgcaaacaaatctgggaccttaaatcaccaatccaatcccaatcaattcattttcctccaattccaattaagctgagagtgtttttgatctacacgcgatgggtgctccgaagcagaaatggactgcagaagaggaacaagcacttaaagctggagttgtcaagcacggtgttggtaaatggcgcaccatactgaaggatccagagtttagtggtgtcttatacctgcggtcaaatgtggatctcaaggataactggagaaatctgagcgtgatggcaaatggatggagctctagggaaaaatctaggttatcagtcagaagggtgcatcaggtcccgagacaggatgagaactccatggctatcactcctgttgttccaagtgacgaagagattgttgatgttaagcctcttcaagtttctagagatattgtgcatattcctggtccaaagaggtctaatttaagtttggataagcttataatggaagcaatcactagcttgaaggagaatggtggttctaataagacagctattgcagcttttatagaggaccaatattgggcactgccaggcttaaaaagtatgttgtctgcaaaattaaagtttttgacagcaagtggaaaactgatcaaggtaaatcgcaagtatagaattgcacctatagcagcatattctgacagaagaagaaactcatccgtgttatatttggaagggaggcagaaagcctctatgaaaattgacagggatgagaccaacatccttactagatc

SEQ ID NO: 28260 - DNA, 1563 bp, Glycine max
  Clone ID: TF_GmC137_2
gcgtacgtaagctcggaattcggctcgagcttcctctctctctctgtctctctgtctcctccatggccatctccttcagtcccaaacaccctccttacgatgagatgatatacacagcaatcggagctctgaaggagagggatggttcgagcaagcgagccataggaaagtacatagaacaagtctacaaggaccttccacccactcaccctgctttgttgactcaccatctcaaccgattgaaatcctctgccctcctcgtcctcgtcaagaaatcctacaagcttcctggatctcatcatctgcctgcgctccagccccaaaagacccgtggtcgtcctcccaagcccaagccccaccccgtctggcctgctgcagccctcaccgacagccctgctcttctatccgccaaaagaggccccggtcgtcctaaaaagattggtgtcagcccgccaggcccaaggggtcgtccacccgggactgggagatctaagctgcccaagaggcctggccgtccccccaagcccaaatccgtctcggcgatctccagtggtctcaaacgacgtcctggacgcccacccaaagcccaatccaacgtaaacgtcatccccttcgcagccccagttgctcccggcctgcctactgtgcagcccatccttcctactgcttccgtgcccaatggatctcccaggccccgaggaaggcctaaaaagagttttactgctgcgggggctccggcgctatctgccgttgccggtgcagcgcgtggtcgtggccgcggacgtccacgtggggtcttcccggtggttaggcccggccggcctcagaagctcgccgtaggaaggtccaagaatcctgtaagaaggcccgtgggccgccccaagggatcgacagctgctgcaatcacagcacataaggctgctaatgaagatctaaggaagaagcttgaacactttcaatcaaaagtgaaggagtcccttggcacgcttaagccttattttaaccatgaaagcccagtcactgcaattgcggcaattcaagagttggaagtactgtcaactttggaccttaaagcgccattgagggatgagacccagcaacagccaccgccactgccacagacacagacacaggtgtatgaacagcaatatccccagccacagtcacagcagctgccgcaattttttcaaccacatacatcagccccgagctaggcctgaacatgatgaaggacaacttgtacaagtgttattaacaaggcacaagaggtaaaagatctgtaaagcggttaggaagtagtggtactgatttttctgagggtgaaatgactctgtctattttagtttgttgttgtgcaacatttagtttgacccctgaagtgattagcgggtactcatgattctgttgttctttaagtaatatttatttgacttttacagtttactttagtcacattaatgtgtatgtttgtatcagcctcttttgttgtttaatatttttaattaatggttactgcttgctatttctcatttccccttaaaaaaaaaaaaaaaaaaaaaaaag

SEQ ID NO: 28261 - DNA, 867 bp, Glycine max
  Clone ID: TF_GmC1479_1
ctgcatctgcactaaaatatactattttgttgatttgtttttctgtttctgtcaatccggccgaaattctgcagaaaaaatgtcaaaagcaaacgcaaagaacaaatccccctccaccgagctccaccctccttacttcgagatgattgcggatgcgatatcgtccttgaaagaccgcacgggttcgagccagccagcgatagccaagttcatcgaggacaagcacagcaaagtgctccctcccaacttccggaaacttctctccgttcagttgaagaaactcgtcaaatcggagaagctttacaaggtcaaaaactcttacaaactttcttccgccacggacaaagagacccagaagaataccgaaaccgagcccaaacagaaggttgaaaagaagaagaagaagaagaagaaggtgggtgagaagattaagaggctgagccaagtgaagacacccgaaactctgaagaagaaagcacccaccaagaaggacgcggcggcaactaagaagaaatctgcgtcggcggtggaaggttcaggaggagggaaagtgaagtgtttgagtcaggtgaagacccctgaggccttgaagaagaagaagcccaatttgacacccaaaccttccaggcccaacaggaatgctaggaaatgaaaccaccacttgtgtcgtatgtatgttaatgcttttttttttttttaagttctgttgccttgaagtggattattgttatgatcaacttataacagttgacgattgcaatgtggtagtttctgcgattatttattcgatgtgggattttttcctcctaatcatttttttgggtgtgcgtttattttagttttatataacaccggaaaatgttcctg

SEQ ID NO: 28262 - DNA, 2846 bp, Glycine max
  Clone ID: TF_GmC206_1
ccatcctcatctctctccatccctttcgccttaagtcccctacatccaatccaattcccaattttcgaatctaccctttctctctctacgatggagccttcctcgatctctccaccgccagctccgcctgccaccgccgtccccttccccgccgaacccaacgaccaccttccaccacccattcccgaaccaccttctaaccacccaccctacgccgagatgatatacacggcaatcgaggcgctgaaggagaaagacggttctagcaagagggcaatagcgaagtatattgagcaagtgtatacgcagcttccaccgaatcactcagacttgttgactcagcacttgaatcacttgaagagtaggggattgctccaaatggtaaaaaaatcttacgcccttcctagatctgtgcccgtgtctgttcctggacctgcacccacacaagggacatcagcagtgccggctgctgttgttgccatcacgacgactccgaggcccagaggtcggcctcgcaaggcccaaaatccagttcagaactcgcctctgcgtcaggacactgtcaacgtgcaggttcagcagaatgacgcgccggtctgggcagcacaaggtcggacagacaagcccgtgcacagcgagaaggcagtggcccgaagcgaggtcgtcctccgacaaaaagcatcttaagagcgcgcatagcaaaaagaggccagtcctcccggcatcgaggaaaaaagccgggccgtcctcccacagcaaccacaacagatgtttctgcttctgctgggcccaagagacgtccaggccgcccgcccaagaatcagtcgcagcccactctcattccctttgctccggctgtatctgccgcttccgtggatacagagcacgtggcagcatcagctgaaactgcgccggttgatgctgacgcggctctcggaccaagagcccgtggacggccgaagaaatatgctgacgagatgattgctgcgggccgaggcaggggacggggccgtgggcgcggtggcggcggaagaggacgagggagagggcgtggtgaattgcctgcacagcccagaaaaccaggggcaaggcccgtgggtcgtccgaaaaagggttcaacttctgctagtacttctcaaaatgctgcaaatgaagatctcaggaggaagcttgaacactttcaatcaaaagtcaaggaatctcttgcagtgcttaagcctcattttaaccatgaaagtccagtcactgcaattgctgctattcaagagctagaagtactgggaactatggacctcaatgtaccactaagggatgaaacacttccacatcaagtggagctgccaccaccacagccaccagtgcagcagcagcagcagccaccacagcagcagctgcagcagccaccacagcagccaccacaagcaacacctagcaccacaacaactgccgccacagccaccgatatttcagcaaacatatcctccatttcatctgccgcagttccaccatcaccagccttcgctgcagttccagcaacagcagcagcagccgccacagccaccgccacagctattccagcaccaggcacagcctccttcccaccaacagtttcatccttaggaatcaggcccaggctaggaagaattacatggtcctcaatttgataatatgatgctaggaagaattacatggtcttcgatttggttatgaacaatctgaaacaagtgttttaacaaggcacatgaggggtaacatatttgtaaagcgagtaggcagtagcagaactgatttttcgtcaagtgaatcgattgtccatttagtttgttgttgtgcactattctagattgatccctgaagtaatttttagattttagagtactgataattctgttattgaagtaatatttgtttgactttggcagctttagattattagtcatattgttcatgttggtctaacacgttattgaatccgtttcctgttgctttccaatacccacgtctggttgctcggttagaccttccaccattaggatatttcctatctctgtgacagaaaaagaaccattgcctatctcccgttttcaatatagattgcccaggcaaatcctcgggatcccacttatacacatcggtttcatgaatcacgtcgagcttcagcctcttcccacaaatcttccgcttcagatagtacatcaccaactcctcatccgtgggatggaagcgaaaacccggcatcgacgacatcatctggctgaaacaatcagcggaaccagctcccgaagcctcacccattctcgatcgcaagaaaaaaatcaaacaacccttgatcacccaacacaaaaaacggaaacttttttaatcaaaacggaaaacccccaacacgattcgagcctccgagtattcgaaatcgccgatcgaatagagttaaaaaccctaactggggaaatcaaattaggggaaaaaaagaaaccaaaattattggaatcaagaagtggcaaagccgaaatcccacaactacatggtacgaatcgtacctctgggtgagaggattcgaaaggctgagtcgcggaacgaaaaaactagagcgagagagagagtcttgaaaggaaagaaacgcgtgaattgcgcgtgaattgggaaattggcgagggttttcctgcaaaatattacaagcctttagtcagtaatcaaacaagaacatattgaaggctagtcagagttttatttcagattaaagatcccttgccagtatatatgacagatcgatagagatgcacaccatatgctacatatataatatttgcctaaaagtagccagaactttagaactccaaagcattgac

SEQ ID NO: 28263 - DNA, 601 bp, Glycine max
  unsure (1)..(601): unsure at all n locations
  Clone ID: TF_LIB4167-040-R1-K1-G8
ccacgcgtccgccaacttcgatccctccccctccgggcccaccgtccccttcactgtcgaacccagcaatcacgtgacccccgccgacaacaccaacaccaaccaccctccttacgatgagatgatatacacagcaatcggggctctgaaggagaaagatggttcgagcaagcgagccataggaaagtacatggaacaagtgtacaaggaccttccacccacccactctgctttgttgactcaccatctcaaccgattgaaatccgctggtcttctcatcctcgtcaaaaaatcctacaagctccaggcccaaaagccccgcggtcgccccccaaagctcaaatcccagcccaacactgagctcacatggcctgcgctagccctcaacgacaaccctgctcttcaatccgcaaaaagaggcccgggtcgtcccaaaaagattgcaggacccgtaggtgtgagcccgggcccgatggtgccgggcagaaggggtcgtccacctgggaccgggagatctaagctgcccaagaggcctggccgtcctcccaagcccanatcccgtgtcgccgatctccagtgggctcaaacgacggtccgggcc

SEQ ID NO: 28264 - DNA, 858 bp, Glycine max
  Clone ID: TF_GmC333_7
ctcatctttcaatttcaatcaacggttatacccttttctatttgagcatcatcatgtccaccgcagcgcaccaaggccaagaaaacggcgtcgtccaagaagcccctctcccatcctaccttcgccgcggtacttcctaattactctctttcgattcaatttcgaaatcaattgtgtttaattagtttcattgttttgtagatgatagcggaggcgatagcgagtctgaaggagagaaccggttcgagccaatacgcgataaccaaattcatcgaaggcaagcacaaggagttgcctccaacctacaagaagcttgttctcgttcatctcaagaagtctgttgctgctggcaagctcgttaaggtcaaaaactctttcaagctcgcaccgactaagtctgctcctgttaaagccgctgctgctcccaagaagcccaccaaagctgcggctaagcccgccgccaagcccgcttccaagcccaaagctgctgcacctaagaagaaggctgttgccaaacccaaggccaaagctgcggccaccaagcccaaggccaagcccgctaaggccgcgccgaagaaggtcgccgctaagcctgcgaagaagactcccgtaaaggccgtgaagaagcccaagagcgtcgtgaagaaacctaaaagcgtgaaatctccagcgaaaaaggccaaggctaagaagtgagggattggagtgggttttagtttggcgttatagtgtttatgtatttcgggttgaatcgtagtataggtggatatatttttagaagagtattgatgtaaattcctttgctagaaattttaacaagtgttcttcttttgcattgaatacagtttcgttttcttc

SEQ ID NO: 28265 - DNA, 557 bp, Glycine max
  unsure (1)..(557): unsure at all n locations
  Clone ID: TF_LIB4391-008-R1-K1-F5
ctttcaatttcaatcaacggttatacccttttctatttgagcatcatcatgtccaccgcagcgcagcccaaggccaagaaaacggcgtcgtccaagaagcccctctcccatcctaccttcgccgcggtacttcctaattactctctttcgattcaatttcgaaatcaattgtgtttaattagtttcattgttttgtagatgatagcggaggcgatagcgagtctgaaggagagaaccggttcgagccaatacgcgataaccaaattcatcgaaggcaagcacaaggagttgcctccaacctacaagaagcttgttctcgttcatctcaagaagtctgttgctgctggcaagctcgttaaggtcaaaaactctttcaagctcgcaccgactaagtctgctcctgttaaagccgctgctgctcccaagaagcccaccaaagctgcggctaagcccgccgccaagcccgcttccaagcccaaagctgctgcacctaagaagaaggctgntgccaaacccaaggccaaagctgcggccaccaagcccaaggccaagcccgc

SEQ ID NO: 28266 - DNA, 971 bp, Glycine max
  Clone ID: TF_GmC772_1
ctcacgcgtccgacggctggaagacgacagaagggggtgtgtgtgaaaagaagaaactttgtaagctcaatttgtttccaaggttgctctgggaatccgaggttctaaactctgcaactaactttaatggcaactgggcaagtcattaataaacctccttcacttcctccgtaccctgagatgattcgggaggcaattgaagcactgaatgaagagaatggttcgaataaatcatcaatttcgaagtacatcgaatccacctatggtggattgcctcaggcccacaaggttttgctcaatgtgcacctcgcgaaaatgagggaaagtggagtgctagtgttttggaagaacaactacaccaagcgtgacccaaatgcgccgccacggcggggccgtggcaggccacccaagcccaaggagcctctgccaccgggcactgtcttatcaccgcccaggcccaggggccgtccttcgaaggacccaaatgacctgcagaagcctcttaaggcttcggtggtgggtagtggtaggcctcgaggccggcccagaaaaatggcctggcccactggaggccttggtgaagtatcgcaggcctctaaggcgaagcctgtcactagtaatgggaggcctagaggtaggcctcccaaagtgaaggccgtattcactgaaattagtgtttgactataaaggcttatagggcttgcatggaatagggaagtgttgtttctacaaaaagttggactgagtaacggttttgtgtgtttactagattcttctcttatgtgttacacttagctgaaatgctgaattgttgtgtacaatcgtgtagtgtagtgtagtgtagttagttgctgaggctttgttcgtttgtaaattgtaactgtgaaaataggacaatgggtggagctaatggacgcaatctctcaaattcttgatgccggggtgtttggggtaataaataaaaagtggga

SEQ ID NO: 28267 - DNA, 1147 bp, Glycine max
  Clone ID: TF_GmC1641_3
tacggctgcgtgaagggaccagagggcgactgacaccaaaatttgccaattgccatttcaatccccagtttcttcttcaacgtcctcttacgagcagatcccaattctccttcccagtttcaaaccctaattccctcattcccatggcctcagaagagcccactgtcgcggtggaacccgctcccgaacctgccaccgccgagcctcccccggaggagaaggaggagcccaaacctgaagccaaggctaagaaaaccaaggaacccaaacctaaaaaggtttccagaccacgcaaccctcccactcatccttcctacgaggagatgattaaagacgcaattacctcgctgaaggagaaaaccggttcgagccaacacgcgattgcgaagttcatcgaggagaagcacaagcagcttccaccgaacttcaggaagcttcttctctaccatttgaagaaacttgtagccgctggaaaactcgtcaaagtcaaaggctccttcaagctcccacctacccgaccttctgcatcttcttcttcttcgccggcgaagaagaagaagcccgcacctgctaagccccaacccaagcccaagcctaagcctaagcccaagcccgctgctaaagccaaggacactaaggcaactaagtcaaaggcaccagctaagcccaaggcagctgctaagcctaaagccaaagttccagccaagcccaagcccgcccctaaaccaaaggctgctgctgctgctgcttccaagcccaagcctgctgccgccaagcccaaagggactaagccagctgccaagcccaagcccaagcccgctgctaaaacaaaggctgctgctgccaagcccgcggcaaagcccaaagcgaagcccgccaaggcttcaaggacgtcgacacggacttcaccagggaagaaagcagctcctgctgcgaagccggcagcgaagaaagtagcgcctgctaagaaagcgccagtgaagagtgtgaaaccaaagagtgtaaagtctccagcgaaaaaggctacggctaagagagggggtaggaagtgagaatgtggtgggtagagtggttttagggttagttttgtgaagttctttaagctttcagcgaagtaggctacgtctcagatagggctatggaagat

SEQ ID NO: 28268 - DNA, 2567 bp, Glycine max
  unsure (1)..(2567): unsure at all n locations
  Clone ID: TF_GmC206_2
cggtccggattcccgggtccgtctcgagtccgcgtaaatccaatccaattcccaattttcgaatctaccctttatctctctacgatggagccttcctcgatctctccaccgccagctccgcctgccaccgccgtccccttcccggccgaacccaacgaccaccttctcccacccatttccgaaccaccttccaaccatccaccctacgccgagatgatatacacggcaatcgaggcgctgaaggagaaagagggttcaagcaagagggccatagcgaagtatattgagcaagtgtacaaggaacacctcccaccgaatcactccatcttgttgactcagcacttaactctcttgaagagcagcggaatgctccaaatggtcaaaaaatcctatgcgctccctagatctgtgcctcttaccggagctgcacccgcacaagcgcatgatgccgccacctctgctctgcagttgacttccccgaggcctagaggccggcctcgcaaggctcaaattccggtccaaaacttacctcaggacattaatgtgcaggttcagcagaatgccgagcccgtctgggccgcgctcggacttgcagatgagcccgtgcagacagaaggcagcagcaagaagcggggccgtccgaagaagagtgtcactcccggagcaggtccggcaaagagaggacgtcctcccggttctgggaaaaggttgggccgtcctcccaaggagaagtctgtcactgcaacaacaacaacggatgtctctgggcccaagagacgcccgggccgcccgcccaagaatcagtctcagccaactcccattccctttgctccggcggatgcagccgctgccgtgggtacagagtatgtcccacgcgctgaaactgtgccggttgatgctgcggctgctctggggcctagagctcgtggacgaccgaagaaatacgctgatgagatggttgctgcaggccgaggtaggggacgaggccgtggacgtggtggcggcggcggaagaggacgagggagaggacgcggtcaattgcctgcgcagctcagaaaatcaggggcaagacccgtgggtcgtccgaagaaggggtcaacttctgctagtacttctcaaaatgctgctaatgaagatctcaggaggaagcttgaacactttcaatcaaaagtcaaggaatctcttgcagttcttaagcctcattttaaccatgaaagtccagtcactgcaattgctgccattcaagagttagaagtactgggaactatggacctcaatgcaccactaagggatgaaacacttccatcgcaagaggagcagccaccactgcagcagcagcagcagccaccgcagcaacagttcccaccaccacaacagcagccaccacagcaacacctagcaccacaacaactgccgccacagccacaggcaccaatatttcagcaaacatatcctccatttcatctgccgcagttccaccatcaccagccgacgctgcagttccagcagcagccacagccgccacagctattccagcatcaggcacagccaccttcccaccaacagtttcatccttaggaatcaggcccaggctaggaagaattacattgtcctgaatttgataatgatgctaggaagaattacatggtcttcaatttggttatgaacaatctgaaacaagtgttttaacaaggcacatgaggggtaacagatttgtaaagcgagtaggcagtagcagaactgatttttcgttaagtgaattgattgtccatttagtttgttgttgtgcactgttctagattgacccctgaagtaatttttagattttagagtactgataattctgttatttaagtaatatttgtttgactttggcagcttaagattattagtgatattgttcatgttggtctattttgtagtccccttttacccctccgttttttgttgtgttctgggaatttttttcactctatctgatagggattatttgcatatcacgtcancgatcctttcctgtgctttccaatacccacgtctggtgctcggttagaccttccaccattaggatatttcctatctctgtgacagaaaaagaaccattgcctatctcccgttttcaatatagattgcccaggcaaatcctcgggatcccacttatacacatcggtttcatgaatcacgtcgagcttcagcctcttcccacaaatcttccgcttcagatagtacatcaccaactcctcatccgtgggatggaagcgaaaacccggcatcgacgacatcatctggctgaaacaatcagcggaaccagctcccgaagcctcacccattctcgatcgcaagaaaaaaatcaaacaacccttgatcacccaacacaaaaaacggaaacttttttaatcaaaacggaaaacccccaacacgattcgagcctccgagtattcgaaatcgccgatcgaatagagttaaaaaccctaactctgggtgagaggattcgaaaggctgagtcgcggaacgaaaaaactagagcgagagagagagtcttgaaaggaaagaaaccggacgcgtgg

SEQ ID NO: 28269 - DNA, 1338 bp, Glycine max
  Clone ID: TF_GmC796_2
acggctgcgagaagacgacagaagggggttcttttcatgcatgtgttgaatgcacatgctggtctccggtccggttagggcatttctgggaccttaaatcaccaatttctcacccaatcaattccaattaagctgagggtgtttctgatctatatgtgatgggtgctccgaagcagaaatggactgcagaagaggaacaagcacttaaagccggagttgtcaagcatggtgttggtaaatggcgcaccatactgaaggatccagagtttagtagtgtcttgtacctgcggtcaaatgtggatctcaaggataaatggagaaatctgagtgtgatggcaaatggatggagctctagggaaaaatctaggttatcagtcagaagggtgcatcaggtcccgagacaggatgagaactctatggctatcactgctgttgctccaagtgatgaagaaattgttgatgttaagcctcttcaagtttctagagatatggtgcatattcctggtccaaagaggtctaatttaagtttggataaacttataatggaagcgatcacttgcttgaaggagaatggtggttctaataagacagctattgcagctttcatagaggtaaatcgcaagtatagaattgcacctatagcagcatattctgacagaagaagaaactcatccgtgttatatttggaagggaggcagaaagcctctatgaaaattgacagggatgagaccaacatccttactagatctcagatagatttagagttagaaaagataaggtctatgactccacaagaggcagctgcatttgctgctcgagcagttgctgaagcagaagccgccattgcagaagcagaggaggcagcaaaggaagcagaggcagcagaagctgatgcggaggctgcacaagcttttgcagatgctacaacaaaatcagcgaaagggagaaaatccccaaagaggatccatgcttgatggaagtttgaagaattagactcgaggagagatgaacggtggaattgagtaggacagccagccagctaaatatcatttgctggtatagtctatagtttgcaatattggaggctcttgtgactatgcaagtttcacctttattaggatatatttttggatattgaaatatccttcttgtagatagaaccattgtttgaatctttattgtaatttctttatagctgttgttaccttagcgctctgtccatgtacttgttgtttatagaaagtagatgtttagatgaatgggaattcgttcaaaaaaaaaaaaaaaaaaaataaaataaaagcggccgctccacccgacccaagaataagaaagaga

SEQ ID NO: 28270 - DNA, 974 bp, Glycine max
  unsure (1)..(974): unsure at all n locations
  Clone ID: TF_GmC333_5
tttctctctctctcagaatttctatctatctcttgtttcaatttcaacaacggttactcctttttcgttttgagtttcaatcaagccatcatcatgtctaccgcatcgcaacccaaggccaagaaaacggcgtcgtccaagaagcccctctcccaccctcccttcgccgtggtactttcccaaaatactctccttcaaaatcaattctcttagtttatttcttttccaattgtatttaatttgattattctgtagatgatagcagaggcgattgcgagtctgaaagagagaaccggttcgagccaatacgcgataaccaaatacatcgaagggaagcacaaggagttgcctgcaacctacaagaagcttgtcctcgttcatctcaagaaatctgttgctgctggcaagcttgttaaggtgaaaaactcctttaagctcgcaccgactaagcctgctccggttaaggccgctgctcccaaaaagccaaccaaagctgccactaagcccgcttccaagcccaaagctgctactcctaagaaaaaggctgttgccaagcccaaggccaaagctgcggccacgactgccaagcccaagtctaagcccgctaaggtcgcggccaagaaggtcgctgctaagccagctaagaagaagacacccgtaaaggccgtgaagaagcccaagagtgtcgtgaagaaacctaagagcgtgaaatcaccagcgaagaagactaaggctaaggctaagaagtgatgatttggattggggtttggttttggtttggcgttatagttttatgcattccgggttcattcgtagtagtataggtgaatatatttttagaagagtattgatgtaaattcctttttctagaaattcaacaagtgttcttgtttgcattgaatacaatttcgttttctttacgtaaaaaaaaaaaaaaannnnnnnnnaagcggccgctctagaggatccaagct

SEQ ID NO: 28271 - DNA, 1904 bp, Glycine max
  Clone ID: TF_GmC1641_1
ggctgctgctgcctaacaggccgcgctacatcctacagcgaacccgccaaggcttaaaggacgtctcacacggacgttcaccagggcaagaagcagctcctgctgcgaagccggctagcgaagaagtagcgcctgctaagaaagcgccagtgaagagtgtgaaaccaaagagtgtaaagtctccagcgagaaaaggctacggctaagagagggggtaggaagtgagaatgtggtgggtagagtggttttagggttagttccacgcgtccgtacggctgcgagaagacgacagacagggactgacaacaaaatttgccaattgccatttcaatcctcagtttctttcttcaacgtttccatcatacacagatcccaatcctctctcaagccctaatttcccctcatttccatggccacagaagagcccactgtcgcggtggaacccgctcccgaacctgcctccgccgatcctcccccggaggagaaggaggagaccaaacctgaagccaaggctaagaaaaccaaggagcccaaacctaaaaaggtttccagacctcgcaaccctcccactcatccttcctacgaagagatggttaaagatgcaattacctcgctgaaggagaaaaccggttcgagccaatacgcgattgcgaagttcatcgaggagaagcacaagcagcttccaccgaacttcaagaagcttcttctctaccatttgaagaagctcgtcgccgccggaaaactcgtcaaagtcaaaggctcgttcaagctcccacctaccagacctgctgcatcttcttcttcttcttcttcgccggcaaagaagaaaaagcccgcagctgccaagtccaagcctaagcctaagcccaagcccgctgcgaaagccaaggatactaaggcaactaaatcgaaggcaccagctaagcccaagccagctgctaagcctaaagccaaagctccagccaaggccaaacccgctgctaaaccaaaggctgctgctgctgccaagcccaagcctgctgccgccaagcccaaagccgctaaaccagctgccaagcccaagcccgctgctaaaacaaaggctgttcctgccaagcccgcggcaaagcccaaagccaagcccgtcaaggcttcaaggacgtcgacgaggacttcaccagggaagaaagcagctcctgctgctaagccggcggcgaagaaagtagcggtggcagcgaagaaaacgccagtgaagagtgtgaaaccaaagagtgtaaagtctccggccaaaaaggctacggccaagagagggggtaggaagtgagaaagagtggtcggtggggtagggttgttttggggttggttttgtgaagttctttgtcctcttggtgtagttgggggttacagatgatgttcctataatatatgaaatctgattttatgaaacctttgttatttccctttttagttttgatttttttttggttcgacctaggaagtagataaaaacaatgtttctagctatgcctttcagctaaatgagttaatcataaaatgtatcttagagtgtgaggtttctttgcgttatagtacctttgatggatcaatgtagtataagcacctttttcacatgaatggatttgtagtatatgctttctgtgtatttaaatttatgaagtttctctttataattaaatgaggatactaattattgtagctgatatgcctgcatttgcttgattgaccttcttgtatgaattgattagctattggtcgtttgcatctccacttcttccctgccttcagttgattttttttttttcagtgcaatttctggttcgatccgaaaccataattctaattctagttctaataataactctaattctaattctcttacaatttttgtgatctgaacttggatc

SEQ ID NO: 28272 - DNA, 345 bp, Glycine max
  Clone ID: TF_LIB3108-022-Q1-K1-E10
cctctgcagaaatgtcagctgccgagctagcccccgccccagcccctgccaaggtgaccaagcgctaaggcgccaaagaagacctccgctccaaagaagcctgcagcccatcctccctacatcgagatgatcagcgaggcgatttccacgctgaaagagcgtggtgggtcgagccagtatgcaatctccaagtttattgaagacaagcataaggctcacctcaccggaaacttcaagaagctccttctcgtccagctcaggaagtccacagctgccggcaagctgactaaggttaaaaactcttacaaagtggctgtgaaaccagctgctgcaaagaagcctact

SEQ ID NO: 28273 - DNA, 375 bp, Glycine max
  Clone ID: TF_uC-gmroLIB3259P207c02b1
catatactgaggggaggcactcattgagcctatgatatgaaagataaaacggaacaaaataaagggcggacaatgccccatggctgacataatgtcggataacactggatttagacaacactatactcattgatcaaaatcaacagacctaaccactctctctcattaccaattatgcgaatctctctgctgcatggacccaacttcgatccctctctctacggccaccaacatccccttcactgtgcaacctagtaatcacgtgaccctcgtctacaacagcaacaccaacaccaaccaccctccttacgatgagatgatgtacacagcaatcggggctataaaagagaaagatggttccagcaaacgagccat

SEQ ID NO: 28274 - DNA, 1094 bp, Glycine max
  Clone ID: TF_GmC1613_5
tgtatttgtcatccatatcatacccttcactttcctgaaaaaaagaattttgaacctgcctctgttaaagtttgcattttttttgggtgggttgatagtactgtgcaagctttggaacttcttcacaagctgctacttcaatggccactgaagaggttaacaaacctcaatcgcttcctccataccctgagatgatagtgaaagcacttgaagccttgaatgaggctgatggatcgaataaatcagcgatatcaaagtacatagaaaccacctacggtgagttgccagatgaaactgttttggggagtcacctgaacaagatgaaagagagtggagagcttgccttcaaacagaacaattacatgaaagctgatccaaatgccccaccaaagaggggacgtggaaggccaccaaagccaaaggttccattgccaccaggcactgttgtgtcccctccaaggccaaggggtcgtcccccaaaagaccctaatgcccctcctaagtcccctaaggctaaggccacccctgccactggcaggccaagaggaaggcctaagaaggttgctcgctcaccggccgtgccgtctcccaccgccgtctccactggaaggcctagaggcaggcctcccaaagtgaagcctcagttgacagaagttagtgttgagtcatagaatggtttcttagttataatgccaaatttagtgatatgctctgtagtggtggtgggtgtggtcttagattttgtgttgatgtaatctctttgtaaaattatgtagtggtagctaacctattgtgaggctttgtgttggtttttctttctaattattatccaatagaacaatgacttaaactaaaaaaaaaaaaaaaaaactcgaggtttcaaggccttcgagccaatcctcctcctcggctcgcaccgcttcgccggcgtggacatgcgcatcagagtcaagggcggcggtcacacctcccagatctacgccatcaggcagagcatagccaaagccctcggtgcttactaccagaagtacgtatacgaagcagccaaggaagatatcaaagacatcctagacaagtacgaccgacaccttctt

SEQ ID NO: 28275 - DNA, 976 bp, Glycine max
  Clone ID: TF_GmC1613_6
ctctttccattttttaatttatttatcttcctttaaattcaatcctcagatctttgtaagagtcatccatatcatacccttcactttcctggaaaaaaattggaacctgcctctcttaaagtttgtatttttttgagtgggtgggttgattgagagtactgtgcaagctttggaactttgtcccaacctgctacttcaatggctactgaagaggttaacaaacctcaatcacttcctccataccctgagatgatagtgaaagcacttgaagcactgaatgagccaaatggatcgaacaagtcagcaatatcaaagtacatagaaaccacctacggtgagttgccagacgcaaccgttttggggagtcaccttaacaagatgaaagacagtggagagctttctttcaaacagaacaattacatgaaagctgacccaaatgccccaccaaagaggggccgtggaaggccaccaaagccaaaggctccattgccaccaggcactgttgtgtcccctccaaggccaaggggtcgtcccccaaaagaccctaatgcccctcctaagtctcccaaggctaaggccacccctggaagtggcaggccaagaggaaggcctaagaaggttcctcggtctccggccgtcgccgctccgaccgccgtctccagtggcaggcctcgaggtaggcctcccaaggtgaagcctcagttgacagaagtcagtgttgagtcatagaatggcttctttctttctaattgatgtcaaaactcttgtagaagtgatgatgggtgtggtcttagatattgtgttaatgtaattcctttgtaaaattaagtagtggtagcttgcttattatggggctttgtgttggttattcttgctaattactactaccaaagagaacagtgacttgagctaatggtgatttggtttcttgtggtttgttccttagttctaacttataaatccataatgtagaagg

SEQ ID NO: 28276 - DNA, 1075 bp, Glycine max
  Clone ID: TF_GmC1613_8
gtgcaaaagacaacagtgtaccttcaaatatttctgagaagtaacacatccctgccacggcatcgatccgagtgaccttcttcacaatagatcctcagccgcacgatcattgtcttttgggtgattcctagccgtccataatctcgaaaagatgaacaaaggagacatgtaaaagagatctttgtaagagtcatccatatcatacccttcactttcctgggaaaaaattggaacctgcctctgttaaagtttgtatttttctgagtgggtgggttgattgagagtgctgtgcaagctttggaactttttcccaacctgctacttcaatggccactgaagaggttaacaaacctcaatcacttcctccataccctgagatgatagtgaaagcacttgaagcactgaatgagccaaatggatcgaacaagtcagcaatatcaaagtacatagaaaccacctacggtgagttgccagacgcaaccgttttggggagtcaccttaacaagatgaaagacagtggagagctttctttcaaacagaacaattacatgaaagctgacccaaatgccccaccaaagaggggccgtggaaggccaccaaagccaaagactccattgccaccaggcactgttgtgtcccctccaaggccaaggggtcgtcccccaaaagaccctaatgcccctcctaagtctcccaaggctaaggccacccctggaagtggcaggccaagaggaaggcctaagaaggttcctcggtctccggccgtcgccgctccgaccgccgtctccagtggcaggcctcgaggtaggcctcccaaggtgaagcctcagttgacagaagtcagtgttgagtcatagaatgacttctttctttctaattgatgtcaaaagatgtagtgttctactcttgaagaagtgatgatgggtgtgatcttagattttgtgttgatgtaatttctttgtaaaattatgtagtggtagctaacttatcatgaggttctgtgttggtttttcttcctaaattattatcaaagtgaacagtgacttgaactaatgtgcatttagttttcagtgtt

SEQ ID NO: 28277 - DNA, 2085 bp, Glycine max
  Clone ID: TF_GmC333_1
ctcatatttcaatttcaatcaacggttatacccttttctatttgatcatcatcatgtccaccgcagcggaggcggaggccaagaaaacggggtcgggcaagaagcccctctcccatcctaccttcgccgcggtacttcctaattactctctttcgattcaatttcgaaatcaattgtgtttaatttagcggcatcgtgttccggctgatcgggaaagcagaaggcggaaaccttattctctccttctcccgccgcaactcactgtcttccttctctagggtttttagctcccccaatttcttcgctcaacatggttcttcaaaatgatattgatttgctaaatcctccggttgagcttgagaagaggaaacacaagctcaagcgtcttgttcagtcaccaaactctttcttcatggatgttaagtgccagggttgcttcaacataaccactgtctttagccactctcagactgttgttgtatgcggaaactgccagactgtcttgtgtcaaccaaccggtggccgggcaaggctaaccgagggatgctcctttaggaagaagggagactgagtggattgccatctttttttgtttgtgattggagagtttcagtaatgccttcttttgttttggttatgatgatatgttaattttgttaaatttgtaagacttgagtctacaagcttatccaagacattagggattatttacacctttcccacgcgtccgcacggctacgatatgactacacaagttgatcatcatttttttctcatctttcaatttcaatcaacggttatacccttttctatttgagcatcatcatgtccaccgcagcgcagcccaaggccaagaaaacggcgtcgtccaagaagcccctctcccatcctaccttcgccgcgatgatagcggaggcgatagcgagtctgaaggagagaaccggttcgagccaatacgcgataaccaaattcatcgaaggcaagcacaaggagttgccttccaacctacaagaagcttgttctcgttcatctcaagaagtctgttgctgctggcaagctacgtttaaggtcaaaaagctctttcaagcacccgctccgactaagtctgctcctgttaaagccgctgctgctcgcaagaagcccaccaaagctgcggctacgcccgccgccgagcccgcctccaagccccaaagctgctacacctaagaagaaggctgttgctaagcccaaggccaaagctgcggccaccaagcccaaggccaagcccgctaaggtcgcaagccgaagaaggtcgccgctaaagcctgcgaagaagactgcccgtaaaggccgtgaagaagcccaagagcgtcgtgaagaaacctaaaagcgtgaaatctccagcgaaaaaggccaaggctaagaagtgaggggattggagtgggttttagtttgggcgttatagtgtttatgtatttcgggttgaatcgtagtataggtggatatatttttagaagagtattgatgtaaattcctttgctagaaattttaacaagtgttcttcttttgcattgagaaaagaagacaaagactaaggctaagaagtgatgatttggatgggtttggttttgtttgcgttatagttttatgcattccgggttcattcgtagtagtataggtgaataattgggtgttctctttactgccgttccgttcatgtggccatgttagatgcttacttttaaattagagtgcatgggatgggaaacgtatctttctgtttctccagtagatgtttttttctgataaaaaaaaaaaaaaaaaaaaaaaaaaaaaaaaaaaaaaaaaaaaaaaaaaaaaaaaaaaaaaaaaaaaaaaaaaaaaaaaaaaaaatagggggccctccgacccccagtttttttccccttttaggggggggaaatggcggcttggggaaaaaaagggggaaagtggttccttgggagaaatttttttcccttcaaattcccacaaaaaaaaaggcggggaggaaaaaagggaaacgccggggggccttaaggggggggctccccccctttattgggggggccgtctttgccctttttc

SEQ ID NO: 28278 - DNA, 787 bp, Glycine max
  Clone ID: TF_GmC333_10
ctcagaatttctatctatctcttgtttcaatttcaacaacggttactcctttttcgttttgagtttcaatcaagccatcatcatgtctaccgcatcgcaacccaaggccaagaaaacggcgtcgtccaagaagcccctctcccaccctcccttcgccgtgatgatagcagaggcgattgcgagtctgaaagagagaaccggttcgagccaatacgcgataaccaaatacatcgaagggaagcacaaggagttgcctgcaacctacaagaagcttgtcctcgttcatctcaagaaatctgttgctgctggcaagctcgttaaggtcaaaaactcttttaagctcgcaccgactaagtctgctcctgttaaagccgctgctgctcccaagaagcccgcttccaagcccaaagctgctgcacctaagaagaaggctgttgccaaacccaaggccaaagctgcggccaccaagcccaaggccaagcccgctaaggccgcgccgaaaaaggtcggcgctaagcctgcgaagaagactcccgtaaaggccgtgaagaagcccaagagcgtcgtgaagaaacctaaaagcgtgaaatctccagcgaaaaaggccaaggctaagaagtgagggattggagtgggttttagtttggcgttatagggtttatgtatttcgggttggatcgtagtataggtggatatatttttagaagagtattgatgtaaattcctttgctagaaattttaaccagtgttcttcttttgccttgaaaacagtttcgttttcttcgcg

SEQ ID NO: 28279 - DNA, 1204 bp, Glycine max
  Clone ID: TF_GmC333_6
caaggctaaccgagggatgctcctttaggaagaagggagactgagtggattgccatctttttttgtttgtgattggagagtttcagtaatgccttcttttgttttggttatgatgatatgttaattttgttaaatttgtaagacttgagtctacaagcttatccaagacattagggatccacacctctctctctctctcagaatttctatctatctcttgtttcaatttcaacaacggttactcctttttcgttttgagtttcaatcaagccatcatcatgtctaccgcatcgcaacccaaggccaagaaaacggcgtcgtccaagaagcccctctcccaccctcccttcgccgtgatgatagcagaggcgattgcgagtctgaaagagagaaccggttcgagccaatacgcgataaccaaatacatcgaagggaagcacaaggagttgcctgcaacctacaagaagcttgtcctcgttcatctcaagaaatctgttgctgctggcaagcttgttaaggtgaaaaactcctttaagctcgcaccgactaagcctgctccggttaaggccgctgctcccaaaaagccaaccaaagctgccactaagcccgcttccaagcccaaagctgctactcctaagaaaaaggctgttgccaagcccaaggccaaagctgcggccacgactgccaagcccaagtctaagcccgctaaggtcgcggccaagaaggtcgctgctaagccagctaagaagaagacacccgtaaaggccgtgaagaagcccaagagtgtcgtgaagaaacctaagagcgtgaaatcaccagcgaagaagactaaggctaaggctaagaagtgatgatttggattggggtttggttttggtttggcgttatagttttatgcattccgggttcattcgtagtagtataggtgaatatatttttagaagagtattgatgtaaatcctttttctagaaattttatcaagtgttcttgtttacattgaaaaaaaaaaaaaaaaaaaaaaaaaaaaaaaaaaaaaaaaaaaaaaaaaaaaaaaaaaaaaaaaaaaaaaaaaaaaaaaaaaaaaaaaaaacccccaaaaaaaaaaaaaaaaaaaaaaaaaaaaggggccctttttaagggcccaaatttttttccccgggttttgcaacttaaaactttttttttggggcccccaaattaaat

SEQ ID NO: 28280 - DNA, 2203 bp, Glycine max
  Clone ID: TF_GmC137_1
gtttagttaccgacattcccaaaattggatgcatatccgcaacggaggcagagattgagcgtatgatatgagagagaagacggaacaaaatcaagggcggagaatgccccatggctgacatcatgtcggttaacactttattcagacaacactatactcattaatcaaaatcaaatgacctaaccactctctctttttcccaattttcgaatctctctcctccatggacccaacttcgatccctccccctccggccaccaccgtccccttcactgtcgaacccagcaatcacgtgacccccgccgacaacaccaacaccaaccaccctccttacgatgagatgatatacacagcaatcggggctctgaaggagaaagatggttcgagcaagcgagccataggaaagtacatggaacaagtgtacaaggaccttccacccacccactctgctttgttgactcaccatctcaaccgattgaaatccgctggtcttctcatcctcgtcaaaaaatcctacaagctccccggatctgatcctcttcccgtgctccaggcccaaaagccccgcggtcgccccccaaagctcaaatcccagcccaacactgagctcacatggcctgcgctagccctcaacgacaaccctgctcttcaatccgcaaaaagaggcccgggtcgtcccaaaaagattgcaggacccgtaggtgtgagcccgggcccgatggtgccgggcagaaggggtcgtccacctgggaccgggagatctaagctgcccaagaggcctggccgtcctcccaagcccaaatccgtgtcggcgatctccagtgggctcaaacgacgtccgggccgcccacccaaagccgaatccaacgtaaacgtcatccccttcgcagcccctgttgctcccggcctgcccacagtgcagcccatcgttcctactgcttccgtgcccaatggatctcccaggcccagaggaaggcccaaaaagattgttgccggtgcgggggctccggcgctctcttccgttggtggtgcaccacgtggccgcggacggccccgtggggtcttgccgttggtgaggccgggccgccctcagaagctcgccgttggaaggcccaagaatcctgcaagaaggcccgtggcgccccaagggatcgatgcaatcacagcacataaggctgctaatgatgatctaaggaaggaagcttgaacacttccaatcaaaagtgaaggagtctcttggcacgcttaagccttattttaaccatgaaagtccagtcactgcaattgcggcaattcaagagttggaagtactgtcaactttggaccttaaagcaccattgagggatgagacccatcaacagccacagccacagacacaggtgtatgaacagcaatatccccagccacagtcactgcagcagcaattttttcaaccacatacatcagccccgagctaggcctgaacttgatgaaggacaacttgtacaagtgtttttaacaagacacaagagataaaagatctgtaaagcggttaggaagtagtggtactgatttttctgagggtgaagtgactctgtctattttagtttgttgttgtgcaacatttagtttgacccctgaagtaattagcgggtactgttgattctgttgttatttatttgacttttacagtttactttagtcacattaatgtgtatgtttggttcagcctcctttgttgttttatatttttaatggttactgcttgctatttctcatttcccattaatcattattgagtggttgtgtgaaaaaaaaaaaaaaaaaaaaaaaaaaaaaaaaaaaaaaaaaaaaaaaaaaaaaaaaaagaaaaaaaaaaaaaaaaaaaaaaaaaaaaaaaaaaaaaaaaaaaaaaaaaaaaaaaaaaaaaaaggggggggccctttttaaagaaccaattttttttccccggggtgggaaagatttatttttttttttggggccccaaaattaaatttctgggccctttttttaaaaacttggaaggggaaaaacccggggtttccccaatttataccctttggaaaaaatcccctttttcccggggggggaaaaaaaaaaaaggccccccccattccctttttcaaaaattttcccatccttattgggaaatgggccccccccttttggggcctttttagccggggggtgggggggttttccc

SEQ ID NO: 28281 - DNA, 881 bp, Glycine max
  unsure (1)..(881): unsure at all n locations
  Clone ID: TF_GmC875_3
attctttcttctttgtttgtttctgaaaggtctctttctcaatctgaaatcctagccggtgattacattgatttcatggactggccttcaacgtccggttcgcattaatttctaggtcattcccttaaaccctcatgtattgcatccatgattttatggttgtcagactgagatattttttcatgttctaattggacttctttgccttttcattcatcagcaagtcagaaattcacaagtgtctggttttctgaattttgaagtaaatcacctttgaaatttcacatacctcataagttttttgggaaaccattggtattgaactctgttcagcttcctgctattttctgcacatcaggctgcaccttgtagtccaacacatctgctccctaagtttatagcatttagcatgctggcaaggttaatatttgtggtactcaccatagaacaaatcagagtttgtggcatataagatggccttaacctagatttagagcagttaggtagaaacttttcctctccttctaataaaactcggtagttgcttcaaacaagactagatgactgtggatgaagtggatagtagctctgagtggagcagagagcaggataaagcatttgaaaatgcattggcaactcatccggaagatgactcagatcgttgggagaagattgccgctgatgtgccggggaagactatagaagaaatcaaacagcattatgagcctcttggttgaagatattaaccagattgaatccgnnntgcgtgcctcttccatcttataattcttcttcagagggctncaacagccantgccagtgatgaaggagctgggcagaaaaggcagcgtcctgggcattatagcgggtgagtctaatca

SEQ ID NO: 28282 - DNA, 419 bp, Glycine max
  Clone ID: TF_LIB3170-061-Q1-K2-G10
gtaaaccgtgccactccttttttcctcttcttctcgtgcttcagtggaaatcggcgtagctccacgaccgacataagagctcaatggcaccaacaaggaaatctagaagtgtaaataagcggatgtcaagttcaaatgacaattcccctgagaaagatggagttaattcaaataaaagcaagcaacggaagaaaaagttgactgataaattgggatctcagtggagcaaggaggaacttgagcgattttatgaagcatataagaagtatgggaaagattggaagaaggtggctgcttgtgtacgcaatagatccactgaaatggttgaagctctttacagtatgaatcgggcatacctctctctgccagaggggacggcttctgttgttggccttatagcgatgatgacggatcattac

SEQ ID NO: 28283 - DNA, 1982 bp, Glycine max
  Clone ID: TF_GmC5883_1
ccacgcgtccggggagaacgaacctgtttaattcccccaaatcggaagttgatcctgaaaccctaaatagcccttaacgttgtgtctatgtttttgaattatggacgcgaaggatatcctgggattgcccaaaaactcgttcccatctctcgagaagaaatctcgtcctcccaaagagtctcaaagaaaaccagatggcatttcgcgcgaggtgtatgcgcttacgggcggattggcctctctcatgcctgcaattgaagcctctcagttgaagaaaaagcctcttcctctcgaaaaaatcacttggcagtggcttcctttcaccagttctgctcgtaaagataatcttcatctttaccattgggtacgagtcatcaatggtgttcctcctacgggggactattcttttgccaagtataataagtccgttgatgttatcaaatacacagatgaggagtatgacaagtatttgtcagatcctacgtggaccaaagaggagacagatcaactatttgacttgtgtgagagatttgatctccgatttattgtaatagctgataggtttccatcatctcggactgtagaggaattaaaggatagatattatagtgtttcccgggctatattgattgctagggctccatcttctggagatgttgtggcacattctattgttaaggaaacatataatgttgcacaagaaatggagcgaaaaagagcactgtccatggtcctctctcgcagaagctacagagagggctgtccctggtgaaaccatatctccatcaaatgtgcaaattccaatggctgttccagataatgcatctactctagctactcttcggatgctacgtctatatctgaagatatatgcactggagcaaatggtgcaagctgcgaacgcatctgctggacttcggactatcaaacgggttgaacaaactttgcaagatcttggggtcaatttgaagccaagggttccaacgaaagctgtttgtgcagagcatcttgaattaagaaaagaaatactaactttggcttaatctccagaagcaggtgcaatataaagaggctgaaggttcctcttttcgtgatgggtcatatggtgaaacacctggaacaccaaaggaccgaacatttgttccagattcaacgaatttcggagtggaaagggttggcaaaaaggaccaaaagcgcaaggcacctggagctccatcagctcataaaagacctagaaaactaaaggcctcagatctttagtttctcaggtggcaaccgggaaaggtgtttcaattcacagaattctttcaatcaaactgaaatttggtttacttcggtctgcaattttagattaatgccactcttgttattcgatgtaaaaagaaaagtgagatccctgagatgagtgagatctgccatcttaaccatgccctgagaagctggactttatttcttgtgctgttaatgctttgtagaattgtagggagaccaggtacaaaaaaggcatcttatttgaatatgcatgtatataagtttggacatgggaattccagatgcctttgacagcttatgtcgggatgtagaaattgggtgcggatggaacaagtgtcctgcttcataaatgtttctaatcgttcacacacccaatgaaaaaaaaaatgtttttattcctgctaaggatttgtagaattgtagggattccaggtacaaaagaggcatcttattggaatatgcatgtatataagtttgacatgggaatttcggatgactttgatagcttatgaagataattttattgtcattgtaagaaaatcgtggaatagcccaggagcataaggaagaagccaggagtaactgattgaacttatcaccttcccatatctataactattaataatgggaatcatccaatttggtgtacatatttcaatggataattttatcattaaacccctttttaaattttttttttttttcctttg

SEQ ID NO: 28284 - DNA, 1275 bp, Glycine max
  unsure (1)..(1275): unsure at all n locations
  Clone ID: TF_GmC600_1
ggataattaaagtgaagaaagaattaaagtagcaacaaatactcttccctacacttggcagaaaaaaaatggttcaacaagaaatccgaaggggtccctggacagaacaggaggactacaaattagtgtattttgttaacatgtttggagatcgtagatgggactttatagcaaaggtatcaggtttgaaggtggagggagactgtaaataggtatgaatatttggacatgctaagttatacatgaagcacccctttaaccacctcactttgttgtaggtttgaatagaacaggtaagagttgcaggttacggtgggttaattacctccaccccgatctcaaacgagggaagctcacaccccaagaagaacacctcgtcatggaccttcagtgaaaatgagttattggaggactcacatgagcaaaaagaatgctaatgagaaaaagcatgcatcagcagcatcgcctgtttcttctatgttgtcaatcttcactgtcctcaaacaaccatgttgtggattcacatgcttccaaagaggttggagaagagagttgttatgacacaggtggatatgatgatggcatgatgatgggtttaattggtggtgaaaaggggtactccatggatgatatatggaaagatattatgtcagaagaagagaacaacatttataataataatcttcaacctgtctatgaagggcatagtgaagagggatgcaacttctcttgtccaccaccaccaatgattatgccttctccaccatcatgggatcagtacaacatttcttctcaacccttatgggtgatggatgaagaagaaagtaataagatgttattccctacactaagtgaccaatattttccttactatgaacaagggaacgcatttctaactggctaatcaggagattctttttttcttttgtccttaaaaaaattatcaatattttgttcttatgtgtgtgccatctgtcacaataagaaggcttaagtgttaacctgtacagcatagtatctttgagctttcggcatggtcctccatagtgtgacacagctgtaatcgatctcaaatgtaactgtagtctatgtcaaaatgtgtttgtggttttactttaaagaaaaatccaatggggaaagtggttatgttatgaattatgtaaaatatacatcaagcacttatgcaaattcaagttttaatctaatttgaaaaatgcctagcaattatagcatttcatttttattaaaaaaanaaaaaaaaaaaaaaaagagggc

SEQ ID NO: 28285 - DNA, 2008 bp, Glycine max
  Clone ID: TF_GmC5883_2
tccggaattcccgcgtcgacccacgcgtccggagaaaagtgagagggaaaactggaacaggaagaacgaacctgtttaattcccccaaatccgaagttgatcctgaaaccctaaatagaccttaacgttgtgtctatgattgtgaattatggacgcgaaggatatcctgggattgcccaaaaactcattcccaactctcgagaagaagtctcgtcctcccaaagagtctcaaagaaaaccagatggcatttcacgcgaggtgtatgcgcttacgggtggattggcccctctcatgcctgcaactgaagcctctcagttgaagaaaaagcctcctcctctggaaaagatcacttggcagtggcttcctttcaccagttctgctcgtaaagataatcttcatctttaccattgggtacgagtcgttaatggtgttcctcccacaggggactattcttttgccaagttaacaagtccgttgatgttatcaaatacacagatgaggagtatgacaagtatttgacagatcctatgtggaccaaagaggagacggatcaactatttgacttatgtgagagatttgatctccgatttattgtaatagctgataggtttccatcctctcggactgtagaggaattaaaggatagatattatagtgtttcccgggctatattgattgctagggctccatcttctggggatgttgtggcacattctattgttaaggaaacatataattttgcacaagaaatggagcgaaaaagagcactgtccatggtcctctctcaaacaaggcaacaagaacgaagagatgaagaggttcttgttgaagcaaaaaaatagcggaaaaacgcctacctcccaaggttgctggacagtctcagtttgttgcttctaatgctggtgcagaagctatagagagggctgtccctggtgaaaccgtatctccatcaaatgtgcaacttccaatggttgctccagataatgcatctactctggcttctcttcgcatgcttcgtgtatatttgagaacatatgcacttgaacaaatggtgcaagctgggaatgcatcagctggacttcggactatcaaacgggttgagcaaactttgcaagatcttggggtcaatttgaaaccaatggttccaacgaaagctgtttgtgcagagcatcttgaattaagaaaagaaatactaacacccacgcgtccgcagaaacaggtgcaatataaagaggctgaaggttcctcctttcgtgatgggtcatatggtgaaacacctggcacaccaaagcatttacatcgtggtggggatcaggatcgaacatttattccagattcaatgaatttcggagtggaaagggtaggcaaaaaggaccaaaagcgcaaggcacctggagctccatcagctcataaaagacctagaaaactaaaggcctcagatctttagtttctcaggtggcaaccgggaaaggtgtttcaattcacagaattctttcaatcaaaattatgaatgttgtggaaggtgtggctgtgaactcaacacctgaaaattcggattgtggtatatctagtccaactgaaattcggttcacttcggtctaaaattttaaactaatgccactcttggtattcgatgtaaaaagaaaagtgggatccctgagatgagtgagatctcccatcttaaccatgtcctgagaagctggactttatttcttgtgctgctaaggatttgtagaattgtagggattccaggtacaaaagaggcatcttattggaatatgcatgtatataagtttgacatgggaatttcggatgactttgatagcttatgaagataattttattgtcattgtaagaaaatcgtggaatagcacaggagcataaggaagaagccaggagtaactgattgaacttatcaccttcccatatctataactattaataatgggaatcatccaatttggtgtacatatttcattggataattttatcattaaaccacttttt

SEQ ID NO: 28286 - DNA, 443 bp, Glycine max
  Clone ID: TF_uC-gmroLIB3258087c12a1
gttgacgcagaagaggctggtgaaattgctgcttcctcatgagcctatttctagccttctctgctgcatcatagggacttttggccttttccttgaaatgagtcctccaataaatcataatctcattgccagttctccctggcaagctccttgcaattgctgaccacctgaagtttatggtttaacaatcaaggccttggaatatgtatgctgccattatatggaaacatgcaggttcaagagaatgagaaaataaatcttacctgtttccccaccttgcatgcaactctagacctatgctctcttcttgaggtgttatgtgtcccctcttgaaatcaggcctcaaatgcttcacccatctcaatctgcagctcttcccatatatttcaatcctgttaatggacaacaacgtaatacatactaatcactttgatacgtaatcc

SEQ ID NO: 28287 - DNA, 1005 bp, Glycine max
  Clone ID: TF_GmC54235_1
acgcgcgcgcgaagaccgcagatcgggacgcggcacaaaacctagtcttgtccctggtgaggaaagagcggcatggaagtagcgaaagaccctaactcacaggcggattcagattcggaactggaactctacaccatcccaagctcttcaagatggttcgcgtgggaagaaattcacgaaacggagagagcagcattcaaggaatacttcgacggaagctcgatatcgcgaagcccgaagatatacaaagagtaccgagacttcatcatcaacaagtacagagaagagccctccagaaggctcacattcagcgaggttcgaaagtcgctcgtgggagacgtcacgttccttcacaaggtcttcctcttcttggagcattgggccttgatcaactacggcaccgcagaggatgtggaggaggaccattgcaaggttcgcttcgaagaaggcgcccccagtgggattcgagtcgccgccacgcccaattccttgaagcctatgctgctgcctcgcaatgggaagagtgccgccaatgccactggggcttctctcaaattgccgcctctggcctcttactctgatgtttatggtgatttgattaggcagaaagagggcaactgtgccctctgcgctcacaaatgtggttctggacattaccgatgtacacaggataatttcattatttgtactaattgtttcaaaagcgggaattacggggagaaaaggtccacggaggattttgtattgagtgagtcaagtgaaaatagtggtaagcatgacactgtctggactgaggcagaaactcttctccttctagaatctgttttgaagcatggcgatgattgggaacttgttgctcaaagtgttcaaaccaagaccaaacttgattgtatctcgaatctcattgagctgcccattggggagctcatgttgggccctgctcacagaaatgttaacattaacgatgctaatggcatcgtgaacaatgcaaaacaaagtcaatca

SEQ ID NO: 28288 - DNA, 1592 bp, Glycine max
  unsure (1)..(1592): unsure at all n locations
  Clone ID: TF_GmC794_2
tacggctgcgagaagacgacagaagggcaattatttaaggcctgatttaaaaagaggaacattctcacaagaagaagaaaaccttatcattgaacttcatgcagtattagggaacaggtaattgtaattgtaattttaattcagtctctctcatgattgaattaatgaattctctccctttttcttttctactgtggttaacatttatttttctttttcatttgcttgacatgcatattattatcctgtgctgtctcaggtggtctcaaattgcggcacagttgccggggagaacagacaatgaaataaagaatctgtggaactcttgcttgaagaagaaactgaggcaaaagggaatagaccctgtcacacataaaccactgtctgaggttgagaatggagagaaagcagcagaagtgtctaatgaactgaacctcctgaaatcagagagctccaagtctgattcagcatcctatgagcagagaacatcaatttctccaaaagcctatgcacctgagatggatggttcctgcagctccaagattgaaatcaattttgtaaccaacaacaactgttacaacaaagacttgttcctagacaggtttatgagtagtagccgccaagagagttacaccactagttgccagccctcagatttgatggggaattttccaattcagatgagttatgcaaccaatgatcagtgtctccctaatgattcaaactctagtcattggttcagccaaactggaaggtcttttgatatgaacactgagtttcctttcaatgccgctgtcacttctatcaatcctacacctacaaccaacttgtttcttcctaataattctttttgctacaagccttcacttgctgttccctctgacaatgtttccataccctatggatcccattactgggaagccagtgcctccaacaacagcaatagtagcacagaattgagaagtagcagccccttgaacatcttttcttcttggggattggcagattgtggcacctctactactaaagaggcacaaattcatatgatggagaatcataatacagaagaagctaagtgggatgagtaccttcataaccctatctcaatgctggcttcttctgtacaaaaccaagctcctgagtctctatgcaatgatataaaaacatccatgcatttggtacctgatactttaggggctatgttacctcataaccataccaagcagcaagaacagtctcaaacttctagtttcttttccaaggacatccagaagctcagggcagcctttggacacatgtaaaaggattttagaaagggttccaattcaagggattgctattcttagtacaggtgtgtgaaaccacagattttttgctcttgtatgtaggtctaatacaaaacatttatttacacctttttttttcttttcactttgtttaacatttgagagccaaaaaccatttgtcttttgctttcttcttctcgggtgtggggtagaattgaagaataagggttgctattctgtcttctttctactctttctttctttctttctttgctacacactgtaaccgcaatggntgcattttgc

SEQ ID NO: 28289 - DNA, 618 bp, Glycine max
  Clone ID: TF_GmC27273_1
aggaaaaaaaattgcgaagcctggaaacgaagcgtttagatttagaagaacagaagatgcagcttcgtcgatcttgcttcttctttcatcattttgcatcgcgttagggtttgcagattttcaatttcccttcttttcgctacctttctcgcatagaatctcgcaattcctccgttgttccgtttccgcaactcatcaattcgaaagttattgcttcacaaggaggtagagcatgtaataaaggaaaaaaatggaggtcgaggtgccaatctcgcttgatttgaataatcaacttcagccagagactgtagtttcagttcaaaatggggatcctggtgtttcctcttctgttgcaaatgctgttaacccgcagcagccagctacaaaaaaaccgaccaggcagtgggctgcatggactcgacaagaggaggaaagtttcttcaccgcgttacgacaagttgggaagaattttgagaaaatcacttcccgtgtacaaagtaaaaacaaggatcaggtcaggcattattactaccgacttgtgagacggatgaacaaacttcttggtccaggattatgtttggatgccaaaaactctaaagatactaatgctgcaatgct

SEQ ID NO: 28290 - DNA, 678 bp, Glycine max
  Clone ID: TF_GmC189152_1
ttacggctgcgagaagacgacagaaggggacacacctttcccttcaatttaagaaataaaacactccttgttcttttttccccttatcattaatctttctcttccttttctagttctagctagcaaagtgcaacattacaatccctcttaggctcttagttgagagaagagaagaacctaaattatcattttttatcaatcattcatggcctcaagctctctcagcaaacaaaaggcttctgactcctcttggacgccaaaacagaacaagctgtttgaaaaagcacttgcaaaatatgacaaggatacccctgagcgctggcagaatgtagccaaagcagtaggtggaaaatctgcagatgaagttaagagacactatgaaatcctcttggaggatctcagacacatagagtctggccgtgttcctcttcccaagtacaagtccacaggaagcagcaccaatgttgatgaagaagagaggcttctgaagtatcttaaactgaattgatggaagcaacgtttatgttatcctgagctattggcagcatttatgtggtgttccttgaatctgcagaaatatcctccccgctgtctctctctatcttgtgtgtctctgttctatttcctgccattgtaatttagattgtttcaaattttcaatgaattatcctattttag

SEQ ID NO: 28291 - DNA, 679 bp, Glycine max
  Clone ID: TF_LIB5118-031-A1-PF1-A7
cgggaaatacaaaaaaaagttttaagatactgattctcctatatctatgctcagcttcttggtcctgctctattctgtggttcctgaggagacaaatcattgaaattatgcttcattgtagcaatatttgcaagcctagccaacttgtacctttcacacacatgtacgcttcatacatgcttaagttcttataaaaggagcatgcattgtgcttcctctctgcccatatcatcaagagtactctttcttggactctagtagttctcttaatttccactacatttgaaaccttagaccatatactcttaatatcaatcgagtcaccttatataaccattagatatggcatcaagctcaatgtcagctactggatcatggagtgctaaggacaacaaggcctttgaaagggctttagctgtttatgacaaggacaccccggaccgttggaaagatgttgcccgtgctgttggcgggaaaactcctgatgaagtgaagagccactatgagctcctcctcagagacattagccaaattgaatcaggcaaagtgccatacccaaattacaagaaaagtgcagagcatgatgaagaggagaaaaggatgagaaacctgaagatccagtgaccggccaataggaatcaacaacaaatattaatttgtgattgtcaccatccaacaa

SEQ ID NO: 28292 - DNA, 336 bp, Glycine max
  Clone ID: TF_LIB3242-689-P1-J1-D10
ggatatccatgtctacttcaaagagcgtcagcgggtctagtgaagctgacaatcaactgggacgggggccttggactgtgggagacgatcacttgctataccaatatattgttaaggatgggggaggccgctcgattatgctctctaaacacacacgattgaagagaactgggacaagtagcaggtcatggcggctaaattttctaatgccagcaatgaaacggagcaatttgaccccacaggagcagcttataattcttgaactccactcaaagttgggaaacaggttcttatcttgggcattacattcttgagccacacaggctttatcgctat

SEQ ID NO: 28293 - DNA, 1204 bp, Glycine max
  Clone ID: TF_GmC2603_1
gcgggcttgagagaaaaaatattccatttccagaagtagtactgcactagtactctcttttgtttcgaaaaaaaaaaatggttcaacaggaagtgcgtaaaggtccttggacagaacaggaagacttcaaattggtgtcctttgttggattgtttggggaccgtaggatgggactttatagctaaggtatcagatttgaatagaacaggtaagagttgcagattaagggtgggttaattacctacatcctggcctcaaacgtggaaagatgaccccccaggaagaacgccttgtcttggaacttcactcaaaatggggaaataggtggtcaagaatgtgctcgcaagttaccagggcgcactgacaatgagatcaagaattactggaggactctgatgaggaaaaaggctcaggacaaaaagcgaggagaagctgcatcatcatcatcactcaggagttgattcctcaatatcctcaaacaaccatgcagtggatccacatgcttccaagaaagcaggagaagagagcttttatgacactggaggtcatggtgtgacagcctcaacccaagatcagggtcaaaaaggtgaacaagggttgttctctatggatgatatatggaaggatattgacaatatgtcagaagagaacaacactcttcagccagtttatgaagggaacagtgaagagggttgcaacttctcttgcccaccacaagtgccttctccatcatcatgggaatattcttctgaccctctatgggtgatggatgaggaaagtttgttttgccctttgagtgaaccatatttttcctgctatgcacagggcagcgtttttttaaccggctaatattattcttttttttccaatcaatattttgttcatagcatatcatgtgtgccaccttataattaaagtctaacctgtatagcattgcatccttaaagcttttggaagggttcaccctagctagtgtgacccagctgtaataatttcaggcataactgtagtctatgttccttgtttcagtagtgcttttactttcgaaaaacatccaataggatagcgagttggtatgttctgaatgtaaaatatcaagcactggtttgcatctaagagtttttaattttaattttaatcccatctacacttctaccccaaaaaaaaaaaaaaaaaaaaaaaaaaaaaaaaaaaaaaggacggc

SEQ ID NO: 28294 - DNA, 507 bp, Glycine max
  Clone ID: TF_GmC1001_1
ttaatttgtaacacttaattttcattgattgagtgtgtgttgctacaacaatggcctcaagccagggttggactccgaagcagaacaagagatttgagaatgcccttgccatcttcgacaaggacaccccagataggtggcacacggtggccagggccgtcggaggaaaaacggtggaggaagtgaaaaggcattatgagaagctcgtggaagatgtgaagaagatagaggaaggtcacgtgcccctccccaattaccgaagtgctgcaagaggctacggttacatggatgaagaaaccaggatgaaggctctgagtctgcagtgaagtgtgatttaccaataaataatatatgttggatgcttggcttcgtaccataagatattttattcacttttttgttttttctttccatataatatataggcaaagcatcgttgccttgtgtttctgtttctataaatgtaaagatgaaattgtcccaaagacgggcccactagttaatagt

SEQ ID NO: 28295 - DNA, 461 bp, Glycine max
  Clone ID: TF_LIB3242-279-Q1-J1-C3
ataaattatagggattaaaatatcactttcaaactataaaaattaaagagaattaaaatataaattattgaaactaaaaattttacttttaaactatagggactaaaaaatataaatcatgaaactatagaaaacaaatgagtaatttaacctttatttaattaatatttttctttttattatgaaattcccttttacgcacaaacacacacatataatttagttacacactctcactgtctccatttgctagttttcatcatgtcatcatgattattagaggttctacaattttaattaacttaattaatttcaggtggtccaaaattgcaaagcatcttccaggaagaactgacaatgagattaagaacttctggagaactaggatccagaagcacattaagcaagctgagacttcacaacaacatggtaaattcatcagagaatagtaataatgatca

SEQ ID NO: 28296 - DNA, 1177 bp, Glycine max
  Clone ID: TF_GmC95896_1
ataatagcatctcagttgccaggaaggactgacaatgatatcaagaactattggaacaccaagcttaagaaaaaaatgatgggagtgaaaatgaacccttcagcactgaagaaacctcaccaagttaacctttcatccatgcttcaaaactcaacaccatcatcacccttcacctcattatccttcaaaaacaaccacaacaactcttactactaccaaccccatttgccctttacaggctccgagtccatgacatattcaagtcttctcagtgacaattattccacttttgagagccttcagaattaccaagttagtagtgtctttatggaaacaagttgcagctcttcttcagatggaagctgcaacaacaatcagatcaatcatgtcaaggaagcagaacttggatatgttggtgatggaacttttggtgaccagataataggtcgtctaagttacctcaatagtggggtggaagatcaagataccctaaagttggtgccctccaatgctggtagggttagtggggtgacagatgaagaaactagattatggggagaaagtccattagagtatggtctagaagaaattaaacagctaataagcaatagtagttgcaacaactttatgcttgatgacagcaagactggggaaatggtcatgtactactgatgctgatgctgacttgttaaaatcaagaacatttgaagggcatgggttgaagttagaacagtttcagatttgatttggtggacttggagtgttgtggggggaaaggtagtgttttaattggtccacttactttttttacagtacatgttggaagtttcagttgtattgtatcatttacttggtgcaggtattattaaccccaccataataacataaccatggtggatgtgtccaaaaacaaatgaatcagaaaggaaatgaggaagccttgtaaagtagagcacctctgaatccttcttccaccaggtttagaaagaggattgcagcagcaatccactactattatttaaatactttattatgtaacagttttgcttccaatcatgcacctaaaagcacctttaattttgcttaacgattatggttttattattgtttccccaatgtagatcgtacacgtatctatttcctccatacaaattttatttcacttagttaatttgtc

SEQ ID NO: 28297 - DNA, 576 bp, Glycine max
  Clone ID: TF_LIB5118-020-A1-PF1-E1
atttcctatttgtgtcttggaagccctcactcttccctcttttctttctttcatccccaaatcaaaacctaaattcccaccttcaactttctcccccaaatcgaccaccaccactgtcaagcccattcatttatattttattcgtatatatacatacagagagtgagtgagagagagagagagaagaatggattcggatcaaggcaagcttttcatcggtgggatttcatgggatacgacagaggacaagctcaaggagcatttcggtaactacgacgacgttttgagcacttccgtcatgcgggagaagaacactgggaagccaaggggcttcggtttcgtcgtttttgcggatcctaacattctagatagggttatggaagacaaacatgtcatagatggcagaacgcaagtggtatggggaggcaaccttgctgtgacaaacctgggatgaagaaaggtcaatggacagctggggaagacaaaaaactcataaacttcattctcaccaatggcaagtgctgttggcgtgctttttccatagcttgttgggcttcggcgttgtggcaagagttg

SEQ ID NO: 28298 - DNA, 127 bp, Glycine max
  Clone ID: TF_5263160
atcaattatctaaggcctgatgtgaagagaggcaattttacaccagaggaagaggaaaccataataaggctacacaaggccttaggaaacaagtggtcaaagattgcatcaggtttgcctggtagga

SEQ ID NO: 28299 - DNA, 615 bp, Glycine max
  Clone ID: TF_GmC1227_3
aacactttcgggcgagtgtgtgtgtagcagtttctggttcggtttttggtttcgtttcagcaaaacctctcttcttcttctgattgattccacctcgcgatttttcgattttcgtttgttttcttctttttcggtttctgatctgaactcgattcgattcgctattgccggaaaatgagtcctccggcaagtgtccggtgatgatcgctccctcgagaggttgttgaggttatcgttgttgttcttcgaagtcatggtttcgatctgaggttttggcgctctcgagttcgttttgtagcatcatcatcatcaccataccttgttcagattctgctcactttcaccacaacggctttactatttaccgcgtttcgttttcgtgtcaccgcaaataatgaaaggaggtgttccctgtatccactcctcgtcagggaagatctgaagcagtgctagctgctcacgtcctgtaatggacgcatactcctccggcgaagaagtggttgttaagactagaaaaccatatacaatcactaagcaaagggaacgatggacagaggaggagcataataggtttctagaagctttgaaactacacgggcgagcatggcagcgcat

SEQ ID NO: 28300 - DNA, 666 bp, Glycine max
  Clone ID: TF_GmC40008_1
tgtgcggcgctcgaggcggccgtccgggagtatcaactcttgaacaattccttttgagttattagaccattctctatatagtgatcctcaaacttaaaagtttttttgttgatcattttgtcttgaagaaatggcatctagctcaatgtcatccactggctcatggagtgccaaggacaacaaagcctttgaaagggctctagctgtgtatgacaaggacacgccggaccgttggtacaatgttgctaaggctgttggtggtgggaagactcctgaggaagtcaagaggcactatgaactcctccttagggatgttaggcacattgaatcagggcaagtgccattcccatacaagcaaaatggagggtctcaagaggagaaaaggctgagaaacatgaagctccagtaaccaattggcatcaggaacaaagaattttctgattttcaccatctagcaatttttctataatcccagtgctacgtaataagtagtgctagtgacgtagtaggattagaatatatattattcataagaatcgtatccgatgattccatgttgtattgtcgttgaagcaaccttaaagaatcaacgactctgtctaagttccaatcatattaataaagtttcaattttatgcgtttattttaataaaaaaaaaaggcccc

SEQ ID NO: 28301 - DNA, 436 bp, Glycine max
  Clone ID: TF_GmC119893_2
gaagctctcgagttccacattaccgagaaaagggctaaagttcatctggaattgggtgcagcattttacgactggaattttgatcaggtaggtgaagacgttaagctattgtggacagaagaagaagagaaaaaattcgaggatgcgatacgatcaaaccctccatcacctgagacatatttctgggaccatatctttagggcatttcctacaaagagcagggcagatttagttagttactacttcaatgtctttattttggagcgcagaggataccaaaataggcatactcccgatgacattaacagtgatgacgatgacgatgaagctggaccactgaggaatgttttcggacatcagacaccaaattctggatatcaggcaccgaatccgcgcggttccatcttattaacccccaaaaagtcacaaacaaaaa

SEQ ID NO: 28302 - DNA, 1533 bp, Glycine max
  Clone ID: TF_GmC1476_1
ggctcgagctcgtttcatatgtctcattcttctctggttttgttttttggcaaaatcattcggattaattcaatttctctgtgtaaatactttaacgtttccaattctcaccttcgcccagtgatttgtagtcagcttttttcttgttcaaagatgcactagtagaagagggaattaccaagtttccaagctttcctttagagtagaagcaaagaggtaaagtgtcataaaaagctgtaggcttccttcaatgggtgctcctaagcagaaatggactgcggaagaagaagcggcactgaaagctggtgtactcaagcatggggcaggaaaatggcgcaccatacttacagatcctgagttcagtgccattttgcatatgcgttcgaatgtagatcttaaggataaatggaggaatataaacgtgacagcgatatggggatcccggcagaaggcaaagcttgctcttaaaaggaacctgccagcccccaaaattgacaataaccatatggccttgagtacctagttcgacatgatgagttcttgatactaaacccatagcagtttctggtggaccattgcaatcccccaatttgaaagaacaaatatcaaggttggtggataatcatatattagaggccattgtcaatatgaaggagcagaagggttctgacaaggttgccattgcttctttcatagagcttctttcatagaggaaaaatatcggtttccaccaaatctcagtaaactactgccagccaaactgaagcatatggtggcaagtggcaaaataatcaaggaaaagcataagtacaggattgcgccaagttcaacagtgattgacatcagaagtacttcttcaagagaagcccaaagagacagcagaagtacataagaatgatgatgtcagcatgattttaaaatcccaattttatgcagagatttcgaaagtgaagggcttgacagctcaagaggcagctgctgcagctgcaaaagcagttgcagaggcagaggctgcaattgcacaggctgaggcagcagctagggaggctgaggctgcagaagctgaggctgaggctgctcaagtgtttgcaaaagcagcaatgaaggcgctaaaatgcaaaatgcttcatatttgatggtgtggacttactcatgttcatcatcagcagagttggcttgagatgatagttctgctgctgtgcttcctgccagtttttttcgtaactgtacataattttcggcttgtaaatctggaatatgcaggatgattcatgaaatattctgtcaggaatcaataacagcttttttttttttcaattcatttttattttaaccttttcttataaaggaagacaatgaggggaaagctacaaagcagtaacggaagagtggaaatagcgatgtttttttgtaatggaatgattgacatccgcgtagagtaaatgaaggaaacaatttttagtggtgttcaaatagcaatatggattgtcattgacatgcagatcatatattcaaggatgcttgttctaagac

SEQ ID NO: 28303 - DNA, 376 bp, Glycine max
  Clone ID: TF_LIB3242-435-P1-K1-C6
cgaaaacactcgcttattatatatatcatccccacctaggttcttccgtttttgaagctggggtttataccctttgaggtttgaaaggaaatccaagcaaaggtagaaagaatgaggaagcctagttgtgatatcaaaaaattgaacaaaggagcttggtccaaacaagaagaccagaaactcgtcgattatatcaagaaacatggggaagtttgttggcgtacactcccccaggctgtaagaatatatgaatttttttttatcaataaatattaatttgttaggttttgctaagaatatcaattaaaatatttgaatctttgacatttgaaatctccttttatttttttctaaatattatataaagcttatatct

SEQ ID NO: 28304 - DNA, 355 bp, Glycine max
  Clone ID: TF_jC-gmro02910037f03a1
ggctcgagggatgagtgaggtgaatgaatgagaacaaaagcgtcctcatcgatatcgtgaataactaaagactctggcgctctgaaggttcgctacgtgaccgtatatgggacattattgctcacgtattacgtttgaaggtggcggaagaaagtaagctgggcatttgaaagaaagaagtaatgaaactaatgcttattcgtgcatcaggctacaaaaaatagattgatggaagaagcagctagcctctaaccacctccttttgtggtacgtccgaatagaacaggtgagagttgcagattacggtgggtgaattacctacatcctggcctcaaacgtggaaagatgacccccc

SEQ ID NO: 28305 - DNA, 453 bp, Glycine max
  Clone ID: TF_jC-gmXLIB3563P034be05a2
ggagtgtggactttatatgggtactctatcagtttgttgcttgtgctatttgtactttgttcatgtgctgtgcgtctgctgttgttcgactgagcagagctttgcctatagattaatgggactatcaccttgttgtgacctgattggtctgatgatcggaccttggacagctgccgaggatgaaattctttctacttatctcatgaacaatggcggtcatggtagctggcgtcctcttccaaggatggccggtcttgttcgttccggctcgagtcgcaggcttaggtggtcgactatctgacaccagctttaaccgtagtccctttactcttgcaggaatgatatactatgcatacagctccatggtctcctaggtaatgcgtgggctgcagtcgcctctcacttaccagggagatcagacggtgagatctagacctctggaacatcctcttg

SEQ ID NO: 28306 - DNA, 932 bp, Glycine max
  Clone ID: TF_GmC739326_1
tcttggcacatatagaaagatcacagcccagccacaaggcacagacactagactgagagatcagacaacaataaaacccaactgactctgtcatccgttaatgttaaaccccacctagctgcatcgtgtccccatggcatgccttgcatgcctcgcttggctcgctcggcggggacttagatccttcttccttctccctcaccgacacctcagagcaggcttacgcccttcttcctccatgaagatcaattacctaggtcaaattcgtccatgtatatctagccccttatgaggtgtgaaacatatttcttctcttacctttatttgtttgatgtgagattttgtcattctccgagactgctcaagcaatacatacgccagcaagagggccaataaggatttgatctcaacctttgttcttcctccatgttactgtagcctctcatgctgcttcctcctgttgcagctacatttctacaattagctataggcacgtgaccgacttcacactgaagcaagtaatcaaccaccatcgcactgggacacttatcttcctcttccgtcttcccgcccgcggcccggccctagttctccctcacaccgggggtgcccctgtcgtgcatggccttcgctttctctttcttttcgacctgctttcttctcccagctgaccttgacctctgtggctccctcctccggttgctaatccgttgccgataatggtaatgagcacccaatgttatctcgtccgcttcaaatcatcaacgagcatctcatagtgccttttcacttcctccacagtcttacctcccaccgccctggccaagttctgccaccgatcgggggtatccctgtcgtagatggccaaagcattctcaaactttttgttctgctttgttgtccaagctgagcttgaggccattgagacaacc

SEQ ID NO: 28307 - DNA, 466 bp, Glycine max
  Clone ID: TF_LIB3242-144-Q1-J1-B10
cacctcctttccctctacaaataatgttgatgaggagtaacaggtgtcctttcagtttgaacagctgtggattctcaaacaattaaggagatcagggatggctccttctaggaaatctagaagtgtaaataagaggttttctactgttcgtgaggctgcatctagtaaagacaaaattacagagaatgctagcaaaaataggctgaagaagagaaaattggctgacatgttagggccacaatggaataaggaggagcttgagcatttctatgaagcttaccgtaaatatgggaaagattggaagaaggttgctcttgcagtgcataatagatctgtggaaatggtagaggccctgtacactatgaatagggcatatttatctcttccagagggtactgcttctgttgttggactgatagcaatgatgacagatcattatagtgttctgggaggaagtgacagtggt

SEQ ID NO: 28308 - DNA, 496 bp, Glycine max
  Clone ID: TF_LIB3242-142-Q1-J1-C2
acatttggccagataaataacatcaaatagtggtttctgggctatctggagttgttttctttggaaatgttggatgtctaagagatgattgaagttaattgggaattgagataagtaaagtcagatttttcttggtgaacggacatgcagaagtagtctgcactcaacttccaagctctccactagaacaaaagcaaagattatactgtcataaaacgtttgcagacttattttgatgggtgctcctaagcagaaatggactgcagaggaagaagcagcgttgaaagctggagtagtcaaacatggggctggaaaatggcgcaccatacttacagacccagagttcagttctattttgcgcatgcggtcaaatgtagatctcaaggacaaatggaggaacataaatgtgacagcaatatggggatctaggcagaaggcaaagcttgctcttaaaaaaaacctactaccatcccccaaaattgaccataaccacatg

SEQ ID NO: 28309 - DNA, 378 bp, Glycine max
  Clone ID: TF_LIB3242-179-Q1-J1-B9
aattcggctcgagacggctgcgagaagacgacagaagggatatgagagaacttttacaaaattagtttatgtctaaattaatggtagcttatgaagaagtttatgggatgtttcgtgcttattttcttctccaattagtgttaagttcttactagatgaaaatggtggacaaatttttaatacattgaattgctttcttattcttttcctgctaggtggtcaagtattgcaaagcacttaccaaagcgaactgataacgaaatcaagaactattggaactcatatctgagaaagcagtttgaaaagaatgccggggattcctcaagtccaaaaccaattatttctgacagtttcccatgatcaaaattccatgacatg

SEQ ID NO: 28310 - DNA, 278 bp, Glycine max
  Clone ID: TF_LIB3028-053-Q1-B1-G10
gggttcacgaatggaagcggatccacgaggaagagagtttacagaggtggaccctctcggatggacatgctacccataagaaggagaagctctacgtatacgagatcgagagtcgtggacctcgtaactggtccctcatcatcaggtccatcccgggccgctctggcaactcctgtaggctttactggtgcacgcagctgtccccttcaggctcgcgcactcggccttcaaccactaatccgacgacaccactatcccggccccatgcccccttcggc

SEQ ID NO: 28311 - DNA, 406 bp, Glycine max
  Clone ID: TF_GmC126456_1
tacggctgcgaagacgacagaagggacaagtcaatttctaatataatgtagaagcttcattgttgagttttgagtcattaaatttacaaataaatgaattgtgtgtataaaatggaaaaaaaataatcattaaggatctgtttgtttgctttaatttgataacattagatgtttttgatgaagtttgtgaagtgtgtaaatgggtgcagatgggctgctatagcttcctaccttccacaaaggacagacaatgacataaagaactattggaatacccatttgaagaagaagctgaagaagatgcaaagtgggggtgatgatgatgataataatggtgacaaattaaactcttgttattcacaaaataagggtcaatgggaaagaagactttaaacagattttcaca

SEQ ID NO: 28312 - DNA, 476 bp, Glycine max
  Clone ID: TF_LIB3242-051-Q1-J1-E9
cggctcgagccttgagtctgatcactacacactactcttcagccttttcatatcaccctttgctaccaaaccaattcagtctctttgcttgttctacctgagtttgaaacgtaaccttagaaccatttcacacaacactttctgttccttaattcctgaaagaaaatggcatcttgttcaatctcagcctcaggctcatggagtgttaaggacaacaaggcctttgaaaaggctctagctgtttatgacaaggacacccctgaccgttggtacaatgttgctcatgctgttggcggcaaaactccagaggaagtgaagaagcactacgaactccttgttcaggatgttaagcatattgagtcaggacgtgttccattcccaaattacaagataactacttcagagtcaactgatcaggaggaaaaaaggctgaggaattggaattggaacctccatgaccccccaacccccatccc

SEQ ID NO: 28313 - DNA, 733 bp, Glycine max
  Clone ID: TF_GmC4605_1
tgatcactatatacacactactcttcagccttttcatatttcataacacccctttgctaccaaaccaattcagtgatctttttgctttgctctttcctgagtttgaaaaccttagaaccatttcagtacacaacactttctgttccttaatggcatccagttcaatctcagcctctggctcatggagtgttaaggacaacaaggcctttgaaaaggctttagctgtttatgacaaggacactcctgaccgttggtacaatgttgctcatgctgttggtggcaaaactccagaggaagtgaaaaggcactacgaactccttgttcaggatgttaagcatattgagtctggacgtgtgccattcccaaattacaagaaaactacttcagggtcaactgatcaggaggaaaaaaggctgaggaatttgaatttgaacctccagtgacccccctcaagaacaacaaattgattttctaattttcatatcaaccaacatcattaatttccagcatccctggtagtactacgtggtgttatgtcacacataattgctagtgcaatagcatcttaggctatattagtcatcataagaatcatatgtcccgtgattccatctggtactttcttgtcgttgaagcttcctcttgaaagggtcaacgaccgtttcagttcctcatcgtcctaaataaatttataattttataataaaaataattaataaaaaaaagaatatag

SEQ ID NO: 28314 - DNA, 2336 bp, Glycine max
  unsure (1)..(2336): unsure at all n locations
  Clone ID: TF_GmC21781_1
ggttatatttgtgtactgctagagatttgaataatctgagatgtggaagttggaatcaagtcaagagggcttttggagaattattatagatgaaaaatggatgaattttgattttggtcgctttgattggagaacaatactaaaagcacctacggtactgtaccttaattttttctttccaatatatgtatatgtattttacaagtgaaaatcacatgtctatatatgtggatataaatgagaacaaaatgattaagctgatgcacattgaaattgttttacttggtcccttctggaacaatccatctcccgcattattcgtaaattctagaaaaaacaacacttttaatatattacatctgcatgaattagaaaacaactgtcatttcgctcctgcgtttcgtaacgcttttttggcggttttggcctttttcggtttcgaacattcggacgaatttctctctctctctcttcaattcaacacttggaggacatgagatggatcgggaagaatatttggggaagtgttccaatatgaaatgccaaagagttcaggtggatgaatcatatgtacatgctcttcaagatgaagtaatggaagttgagcatttgcttgcagaacctagaaatgatcatgcttccctggatggtagtttggattctcatacaactttgaatgacaaggatgatttggaactggaggtccttgatggattgctggatgatgttgaaatcgatgatcttgaaggaactggtggttttgctggtgcatgtgaagaatattttttggattttggatttgccgacaaatttgaggaggtactaggctcaggtccttttgaaggttcactcttgcaaatttcaagttctgaaagtcattcttccggattaagcggaagtagcattgttggtggggttttagaatcaaccaaagtacctattgcaaaatctgaatgcaaaaatgattctctagatgagacaataacctatgaagcacatggtgccttcaggaacaatccaagtcaaccatcaaaagtaaattgcagatacaacatttcacttgatatacaacatctgcaagagttggaaaacaatcgtcatttagctgctggtatattgacttgtaagaaggaaaagggtcctgttgaaaaaggccaacctgctgtacctagagagaagagattccgaaagcctactcagaggtacattgaagaattttcaaattcaaggtcaaaggaaaaggcaccaactgctgttacaaaaactgaatatttaagtgactcatcatgtgatgtacttcatataagaattaaagcattgaaaaagagtccaagtgaaaagtctagtaatgaaaatagagatgtgatgcttcctgagttgcaagttcacaaagggcgtccgaagaaagagaaacttgagtatgacatcgagtcatttcccttggaatctgaggatgaatggttgacatcaaaaagatctagaaggaaagatcgaagaaagcatcagaagatgtggactctccctgaagtgttgaagttggttgaaggcatatctgaatatggagttggtcgatggactgacataaagaggtttctgttttcttctacaagctaccgaactcccatagatctcagggacaagtggcgaaaccttttgagagccagttctgcacagaaaagcacgagagaggctgaacaaaatgacgagcttgccctgcgtcccttgccatttaatgtggtacatcgtgtgcaagaattggctaaaattcacccatacccaagggaacgtggatcaaagaggttgcgtgttagccaagctggctcttctgtcattgctaaagattctcctccccttagtcttagcaaaagaaatgtacgtaggaagtttacttagaagtccatatgtaaaacaatccatggaaatctatagtcaaaagaatcttgttgaaatttaggtaatcacatttgcacaattttatactgtgaattaattttatgtttacaaaggcacagaaattttgaattgtaattatgaggaatcattagttgtcctacaatagtttgcgatgcttaatacctgacacccttatggaattaatggtggcatggctttgagggatggaactgatgcatctggcaggaaaggaaagggaaagggtgtttaccagtttgtagacaaatacggtgctaatgtcgatggttacagttctatctacgacaccaaggactggtctccaaccggtgatgtctacgctggcggtacgactggcttggcttattccttaagggcggggtggaactgtgactctactnggctttagctggtggtgcactttt

SEQ ID NO: 28315 - DNA, 1267 bp, Glycine max
  Clone ID: TF_GmC341_1
cccacgcgtccgtacggctgcgagaagacgacagaaggggaagtgaaaccatcaatcccctgtatatataaccactcttcctctcctccaaattaaaacacttatcatggatgttaagaaaggtgggtctgtagtacaagcacaagtgaagttgcagaagcataacgaaaaggagatgggcatgagaaaaggtccatgggcggttgaggaggacaccattctggtcaattacatcgccacacacggtgaaggccactggaattccgtggcacgatgtgcaggcatgcatgcatcttaattataatttaatttctgcatgtgccaagtaataatggtatatatgttaattatgagatttatcaattacaggtctaaggaggagtgggaagagttgcagattaaggtggctaaactacttgcgcccagacgtgcggcgtggaaatatcacactccaagaacaaatattaattctcgaccttcactctcgctggggcaacaggtatggtataaaaatattccactctctctctctctctatatatatatattaatttgttttataaggttggatgtacacatatataacatagtatgaatgaatgaatgttttttgataggtggtcaaagattgctcaacagctgccaggaagaacagacaacgaaataaagaactattggaggaccagagtgataaaacaagcgaagcagctaaagtgcgatgtgaatagcaaacagttcagagacacgttgcgttacgtttggatgccgcgcttgctggagcggcttcagcccacatcacaagcactggagccaaaccaaagtggacttgtgttacacgcttcatcatcactgcttccttcgaattccgaccatagtattgaaagggggtcggatctgtggccaggtttcaataaccaaatgttgttggaacaggggagtggcggtgacttgttggaaagtttgtgggatgacgacaatatgtgctttttgcaacagctttcttatgacctccaaatgaaataaaatacaattcccttccgtcacgcattctgcaatgcacagtgctgaaagttgagcatgcgttcaatgaatattgttttcctcactttcatgtacatattaaatcttagagactaaactagtcacgtgcctaaaagttgataccagttgaaataatatggtttattaatccttaattgaaaaaaatagtctatgcctttgtttatgtagttatcataagaattactccctccactacatattgatt

SEQ ID NO: 28316 - DNA, 394 bp, Glycine max
  Clone ID: TF_LIB3242-739-P1-K1-D2
tacggctgcgagaagacgacagaaggggcagcaagcggagatctgatggcactagagtggggtgtgtataagcactcttcctgtcctacaaattaaaacacttatcatggatgataagaaaggtgggtgtgcagtacaagcacaagtgaagttgcagaaccataacgaaaaggagatgggcatgagaaaaggtccatgggcggttgaggaggacaccattctggtcaattacatcgccacacacggtgaaggccactggaatttcgtggcacgatgtgcaggcatgcatgcatcttaattataatttaatttctgcatgtgccaagtaataatggtatatatgttaattatgagatttattcaattactaggttctaaggaggagtgggaagag

SEQ ID NO: 28317 - DNA, 821 bp, Glycine max
  unsure (1)..(821): unsure at all n locations
  Clone ID: TF_GmC1498_1
gaagctcggaatcgggcgaggcagtctctgcacccctccctccttgtttgtatcatatcaggcagctcagaaggcaaagatagatccatgtccaccaccgcaactacaacctctgaagaagttagcagcaatgagtggaaagtcatacacatgagcgagcaagaggaggatctcattcgcaggatgtacaagctagtcggggacaagtggaatttgatagctggtcgcattcccggtcgtaaagcagaagaaatagagagattctggattatgagacacggcgatgctttttctgttaaaagaaacggaagtaaaacccaagactcgtgattttctctggtcatgtatcttttctgggcataattctgctaaatatataaaattgggttaaatatatttttggtgtctataaaatttcttttttttttttggtctctgtgaattattttgtatatttttagtctcttgtttatttttttgttatcaatatcagtttcttaaattttttatacttttttctgccatttttaatctctttgatagactgatatttatgacgaaaaaattaataaatgatttgaaatagtaaaaaaatgaaatttcattagagttaaaaatatatttaaccctataaattctgttctaaatcttacagaattatcgtcaattgtatttcttgtcgttgagatgagaattaatgtacactttcgttaatcggtcatgagtatctcatatagaagctatggaaaagtttgcatgttggtttgtaaaaaagaaaaaggtgtgactagtcggtcaattgangnnnnnnnagnnnnata

SEQ ID NO: 28318 - DNA, 382 bp, Glycine max
  Clone ID: TF_uC-gmflLIB3275P088h01b1
tagaggaaatagtattttgcgaactgagacgagatgggtggagtggcatggacagaagaagaagatcacttgctcaagaaatgcatacaacaatatggagaaggaaagtggcatcgtgttcctatactggctggtacaactgaattcaattaacctctctctccttttatcattcttgagttttcaagatatattctgcaaaggagtgctctataagttaaaaggggatcatttattaatggtgcaatggcttgtttaagattagcaattggttatgactcatagatttatgtatcaaacgggagtaacacgctgttttggtaaaaagaagacagaactgattaaccagatggatggcgtagggacttttaaacaacacatt

SEQ ID NO: 28319 - DNA, 729 bp, Glycine max
  Clone ID: TF_GmC600_5
gaatatttggacatgctaagttatactatgaagcaccctttaaccacctcactttgttgtaggtttgaatagaacaggtaagagttgcagattacggtgggttaattacctccaccccgatctcaaacgagggaagctcacaccccaagaacaacacctcgtcatggaccttcattccaaatggggaaataggtttgagaaccatgcagaaattaaactataagctagctacctgctgatcatcactcatatttttaattactcttttcctaccctatatatagtactattaattagttcttcgtcttatttaattttttattatttgtgaaaatctaatacagcgctcaatcaatcaagttagactctgtagacaccttattttgttaattagttacttcgaattttgttgcttaattactttgatgatcccttgcagatggtcaagaattgctcgcaagctaccagggcgcactgacaatgagattaagaattattggaggactcacatgagaaagaaaaaggctctggagaaaaagcatgcatcagcatcagcatcatcacctgtttgttctagttgggaatcttcactacttgcaaacaaccatgttgtggattcacatgcttccaaagagagcttttatgacacaggtggatatgatgacatgatgatggggttaattgggggtgaaaaggggtactctatggatgatatatggaaagatattg

SEQ ID NO: 28320 - DNA, 410 bp, Glycine max
  Clone ID: TF_LIB5068-029-A1-XP1-E3
gccggccgggccgggattggttattgtactagcagtgctcgacccatcaacttgctcctccattaatattatattggtggacaaatatttctcggtctcaagtgggggttttggagggagaggaactgctacttcattattgagatgatgatgaatttgttgttgttgttgttgtgtactactactacccttttggtttttgttcttcatggcccagcggctggttctaccacgtttgcgccgaggaggtagggtgatgatgcctttagaagttgttttcccatggaaagtgtaaatttttctgctcaaatgagagttccagtagttttttatctcgttgtctgttcttccaggtaaatgacttgctatcaacgaccagctgaacaagttaccaaactcgtcaactatac

SEQ ID NO: 28321 - DNA, 500 bp, Glycine max
  Clone ID: TF_15663951
gttagtaagtagtttatgcgaggcatattcttaatttgtctcgttgagaatatgggaatagcaaggaaatgttcatattgtggtaacttaggtcacaatgcaaggacttgtaaaagtactcccggtcaaggacaactaaagctcttcggagtgcaactagatgtttcttcttctccatcatcctcgaattctttttcatcatcatcaccttcatattctggcatgaaaagaagttttagcacgaattacttgttgtcttcatgggcatcttcatctgtaccctcctccttttcctcgccttccctgcttggtgcaaatgaaaattcagatagttacttactcaatgccaatagcctcatatcaacaattcaagacacaaaaaaaggtgtcccgtggacagaggaggagcatcggatatttcttatagggcttgagaagctggggaagggaaactggagaggcatatctaaaagttttgtgacaacaagaacacctaccca

SEQ ID NO: 28322 - DNA, 503 bp, Glycine max
  Clone ID: TF_GmC134810_1
gaaaaggtttacaccagaggaagatgagaaaattaagttggctgtttttgattatatagagtctcatggtttgggagatgaaggtctagatatggttctccattgcaaatctcatcctgaaattagagattgttggaaggaaattggagcagccttacctcagaggccttatgttagtgtgtatactcgtgctcatattttgtttgaaaggggtgaggatcgtaagtggacacctgaagagtatgaatttttacggaaggtcaaggagcaacatggatctgattggaaatcagtagctgaagcattgggcaaacatcgatttcatgtaaaggatgcatggcgtagaataaaattaaccaacacaaaccaaggacgatggacccaagaggagtatcaaaatttatttgatttagtaaacctggatctacgtgtgagagcttcacaggattatagaaaatcaaaacatggtatgctgcgagataatattggttgggaggcaattg

SEQ ID NO: 28323 - DNA, 965 bp, Glycine max
  Clone ID: TF_GmC100_3
aattcggctcgaggaaacacgtagacatcagtttcaagttagtttgtgcaatatttattcattgacctgatatttttctatgtatgtttcacttttgaagatggtctcaaatagcggcgcgtttgcctgggcgaaccgacaatgaaataaaaaacttttggaattcaacgataaagaaaagactcaagaacatgtcgtccacgacgaccacaacctcaacctcaccaaatgcaagcgagacctcaatatccgagcctagtaataaggacctcaacaacatgggagggtttatttccacactacataataaacatgcaggttttgttcctatgttcggttcatctccatcaccatcaatgatgcaaaccagtacagttttcaataacatgattgaaaggtttcctatgctggagcaaggactgattaacatgccagcttctggagggtacttcgaaggcacaggtagtactccttgcttttcgcaatgtgaagttcacaacaataaaggttcttgttatttagaaaacgaagtgtttgagagtgtaaatatcggggtagaaggggatatgtttgttcctccccttgagaatgttacatgcaagagagaagaaacaactaacagcagttactttgacgatgacataaatagtatccttaataactgcaacaatattggcatagctgaaaataaggctcatcatggggtggagaatttgtttcagcaagagttagccactgccacaggagaatgggactttgaagagttgatgaaagatgtttcctcctttccatttcttgatttttcatactgatcaatgaaccttatttggcacactgcagggtgatatattcttcacatagagccttgtataatagtatactggtattttttacccttataccgaattcacaagttaacaatcaggtataggcctcaaataaaagtccaatatatatatatatac

SEQ ID NO: 28324 - DNA, 270 bp, Glycine max
  Clone ID: TF_LIB3030-010-Q1-B1-A6
gggaagaaagtttaagccttagctagaaaaaggagagtgagtagtgagttttttgagaagcagaagaaaggaagaaaggtggagtgagtgaattcaaaaagatcacccaccatggggaggcctccttgctgtgacaaagttggcatcaagaaaggtccatggacacctgaggaggatatcatccttgtctcttacatccaagaacatggtccaggaaattggagatcagtgcctactaatactgggttatcaaggtgcagcaaaagttgc

SEQ ID NO: 28325 - DNA, 1543 bp, Glycine max
  Clone ID: TF_GmC144_1
ccacgcgtccgggcaacgaaagaagcgatagaacgcgttccgctaagcattaaataaaagccgttaaattagaatcggagatttaagctggaggaggatattctgaaatcccatccaatcgaaggctgtgaagtgtgtgatgcactctatccttctttctcttgaacccataattccatgactcggcgttgctcccactgcagcaacaacggccacaattcccggacatgcccttcgcgtgggggcggaggtgtgaagcttttcggggtcaggctgacggatggatcaatcattaagaagagcgccagcatgggcaacctaaacctctcctccgccgccgcacatcaccaattccattcatctccttcttcttccaacctcgccgccgccccctcatcccccaatccaagctccccatgctccgaccctccccaaggttacttgtccgatgaccccgcccatgtctccaccttcgctaaccgccgcggtgatagaaaaaaaggtgttccatggactgaagaagaacatcggctgttcttaattggtctccagaagctaggcaaaggagactggcgtgggatagcacgcaattttgttgtatcaaggacccctactcaagtagcaagtcatgcccagaagtattttatccggcagagtcatgctaccaggagaaagagacgttccagtctttttgacatggttccagatatgtcttcagatcaaccttctgtgccagaagaacaagtgttgcttccaccttcccagaactcacaaccttgcaatggaaaatcacagccttcattaaatctctccctcaaatcagaatttgaacccatggagactacttctcaagaaaatgcgcaacagaccaatgaaactatgatgggatcaatcggactgacaccaatggctcctcatggattctttcctgcatatttacctgttccatttcccatgtggccatcaactgtggctcccccgtttgaagaagttaagggaggagagacatcccaccatcagatccacaagccaatcccagtcattcccaaggaacctgttaatgttgacgaacttgtgggaatgtctcatctaagcattggggaagcaaaggtacgtgatagagagccttcccctctttccttaaagttgttaggagagccctcaaggcagtcagcattccatgcaaatgctccagttggtacttcggatttaaacaatggcaaggacaacgcaattcaagctgtctgagcttgtaaggtccggtgaagacagcagcagaattaagccttcttttggtcatttttcatttgtactatcatatataattttgttttcctgatccctagcattttaatcttccaattagtagcaagttatatggtggtacgtagatcaggttagatcaattcttggaaaatacttattctaactgtaaacaaatgaagcttaaataaagaggttctgttcctctaggtttggttaattttagaatagcaccaagaggttctgttctgttcctcttggtttggctatttttagagtc

SEQ ID NO: 28326 - DNA, 1572 bp, Glycine max
  Clone ID: TF_GmC144_2
gatagaaaggaaaggagcgatagagcgcgttccgctaagcattaaattagaattccagatttaacctcgaagaggcagcagcaccctgtgttgtattacaaacacatactacatgcacttttctttcttttctcttcttcttctatccataatttcaattccatttgctctctggaccgagtcaggcggcggcgaatcggcatgactcggcgctgctcccactgcaccaacaacggccacaactcccggacatgcccgtcgcggggagggggcggcgtcaagctgttcggggtgaggctgacggatggatcaatcataaagaagagcgctagcatggggaaccttaacctctcctcctcctcctcctccgccgccgccgcacatctgcaattccgttcatctccttcttcttccaacctccccgcggcctcatcgcccaatccaagctccccgtgctccgacccgccccaaggctacttgtccgatgaccccgcccacgtctccaccttcgctaaccgccgcggtgatagaaaaaaaggtgtgccatggactgaagaagaacatcggctgttcttaattggtctccagaagctgggcaaaggagactggcgtgggatagcacgtaattttgttgtatcaagaacccctactcaagtagcaagtcatgcccaaaagtattttatccggcagagtcatgctaccaggagaaagagacgttccagcctttttgacatggttccagatatgtcttcagatcaaccttctgtgccagaagaacaagtgctgcttccacctcccgagaactcacaaccttgcaatggaaaatcacagccttcattaaatctctccctcaaatcagaatttgaacctatggagactacttctcaagaaaatgtgcaacagaccaatgaacctatgatgggatcaaacagattgacaccaatggctcctcatggatgctttcccgcatatttacctgttccttttcccgtgtggccatcaacttgggttcacccctttgaagaagttaagggaggagagacatgccaccatcagatccacaagccaatcccagtcattccaaaggaacctgttaatgttgacgaacttgtgggaatgtctcatctaagcattggggaagcacaggtacgtgatagagagccttcccctctttccataaagttgttaggagagccctcaaggcagtcagcattccatgcaaatgtcccggttggtagttcggatttaaacaatggcaaggacaacgcaattcaagctgtctgagcttgtaaggtctggtgaagacagcagcagtaattaagccttcttttgctcatcttttcatttgtaccattatatatcattttttttattcctgatccctagcatttaatcttccaattagtagcaagttatatggtggtatgtagatcaggttagatcaattcttggaaaatatttattctttctaactgtaaacaaatgaagcttaaataatcaaatagcaccaagaggttctgttctgttcctcttggtttggctatttttagagtcaaaaaaaaaaggacgaag

SEQ ID NO: 28327 - DNA, 904 bp, Glycine max
  unsure (1)..(904): unsure at all n locations
  Clone ID: TF_GmC84_5
accttcttccgttgttctcttccaattgccttgattttctcggaaaattcttattttccgagaaagttcgtgtttttactgttgaatcgagaattcccaaatcggggtgtctgaaattcaaagctgttgttgttgttggcggctggggttagtctctgtggaggtttgggtgttttttgaggcagagcttattctcattttgctccaatggagatgcaggtctcaatcgtcttacgtccactcttctggagactttttctcctcttttaataggaaaaaagagaatttcaatatgaattcatccagtgactttatttcttaaaaggaactgaaatatatgtaggaccaaatagaaagcacaagatcaaccatatttggctcagctagtaacatccattccaggctcgaaaagcaatccgaaaatgttgctcatataccttctgttggaaacaaccaaactcccaaggtgaggaaaccatataccattactaaacaaagggagaagtggactgaggaagagcatcaaaagttccttgaagctttgaaattgtatggtcgtggctggcgccaaattgaagagcatataggtaccaaaaatgctgttcagattcgaagccatgctcaaaagtttttctctaaggttgtgagggaatctgagggcagcgctgagagttctatacaaccaattaacatacctcctcctcggcctaagaggaaacccctgcatccatatccccgtaaatcagttaactctttcaaaggacactgcataccaaatgaaacagaaatatctncatctacaaacctgttagttgcagagaacgacaccccatctncaaacctcgtgctatctacggntggttcggaagcatttgggtctcaatttcagagcagactaacagat

SEQ ID NO: 28328 - DNA, 404 bp, Glycine max
  Clone ID: TF_LIB3030-004-Q1-B1-D11
gaatagccatgtctacttcaaagagcgtcagcagttctagtgaagatgacaatgaacttagaagagggccttggactctggaagaggataacttgctctcccaatatatttttaatcatggggaagggcgatggaatttgctggctaaacgttcaggattaaagagaactgggaaaagttgcagattaaggtggctaaattatctaaagccagatgtaaaacggggaaatttaaccccacaagagcaacttataattcttgaactccactcaaagtggggaaacaggtgcttatcttgtgcatttgattcttgagctccacaggttttatcgtgattcttggtattgtgagaaattgtagacaaatgcggccaatgcagccgcaaaacggtcacaaggactctc

SEQ ID NO: 28329 - DNA, 371 bp, Glycine max
  Clone ID: TF_LIB3242-524-P1-J1-D7
ctcgccgcttgctatcttcaacataatattatcgctacccctctcttcttcatcattcccatggaggattcttgagctggtgaagacaccaggacttgtccccgtggccactggagacccgctgaggatgaaaaacttagacaacttgttgaacaatatggtgcccaaaactggaattcaatcgctgaaaagctccaaggaagatcagggaaaagttgcagattaaggtggttcaatcagcttgatccaagaatcaaccgaaggccattcacggaagaggaagaagagaggttactcgcggctcatcgcattcacgggaacaagtgggcactcatagcgagacttttccccggtcgaaccgataatgctgg

SEQ ID NO: 28330 - DNA, 1501 bp, Glycine max
  Clone ID: TF_GmC1445_1
tctcaatgatgatgcaacttctcaatgctacagcaaaggcatttattgcacacttcatcagcttgaaactcgctgatcatacttacaagcaagcaagcccccatccaaaatgccacctcaaatcaaccttttagcatcccaagtccttcactatttatttatgttctctttgcattgagtgcctcaagtgtgcctttggggtgtttctgtagtgttggaaatataaaagaggagtgtggactttaaaagggtactctataagtttgttgcttgtgatatttgtactttgttcatgtgctgtggtgtgtgttgttgttgagagagtttgagaaagaataatgggaagaacaccatgttgtgacaagaagggtttgaagaaaggaccttggacagctgaagaggatgaaattctttctagttatatcaagaaaaatggtggtcatggaagctggcgttctcttccaaggatggcaggtcttcttcgttgtggcaagagttgcaggcttaggtggacaaactatctgagaccagacattaagcgtggtccctttactcttgaggaagaaaaactagtcatacagcttcatggcatcctaggaaataggtgggctgcaatagcctctcagttaccagggagaacagacaatgagataaagaacttatggaacacccacttgaagaagcgtctcaaaagcatggggcttgaccccaaaactcatgaaccattggcctcatcaacttacccttttcacaaggcacctgcatctgtctccacacgccacatggctcagtgggagagtgctaggctcgaagccgaggccagactctcgaacgagtcgtcaaggttcagccacaacaccaccaacaattccaactctgataacaacaaaaccactgattctgactactttctccgcatttggaactctgaagttggagaggcatttcgcaatgttcatcatcacaaagctgatgatgacaacaacaacaacaaaatcactactaatactcctactagttcctgccacagtcctctttctacagggtcatcttccaacaagtgtgagtcaattgctacaaatgcagacttggcttctaatgcaccagaaattatcacaccctctagcattgtgaaacaagagtttgagtgggggactcgtggttccgactcgtcaagctctaatgacatggaagactcatcagacactgctttgcagctcttgttggattttcctataaacaatgacatgagcttcttggaaggaaactcttttgtgtgtccactttagtgcatgtggaagcatgagtgatattttgtgtcatgcagctttttgtgttggtgttttgtaatattgctatctatataagcagttgaagaagtaggagaatgacatgacttggaaattggttgaatatggtcattattaatcagcataggtgtgacaattattgtggatttttttttatagttcaagtctgattatgaatatagtaaatgtta

SEQ ID NO: 28331 - DNA, 1097 bp, Glycine max
  Clone ID: TF_GmC1187_1
ctttattctctcacccctctctctcccctcttccccacccaaccttctctctatcacacacacaaaacaatggataaaaaacaacagtgtaagacgtctcaagatcctgaagtgagaaaagggccttggacaatggaagaagacttgatcttgatgaactatattgcaaatcatggggaaggtgtttggaactctttggccaaagctgctggtctcaaacgtaacggaaagagttgccggctaaggtggctaaactacctccgtcctgatgttagaagagggaatattacacccgaggaacaacttttgatcatggagctccacgcaaagtggggaaacaggtggtccaaaattgccaagcatctacctggtaggacagataatgagatcaagaactattggaggacaaggatccagaagcacatcaagcaagctgagaactttcagcaacaaaagtgtccaccatggcgcaacccatggaaacctattctccacccagttatcaaggaatgttagatccattttcaattcagttcccaacaaatcctcatcattctagttgttgtaccaatgacgacgacaacaacaactattggagcatggaggatatctggtcaatgcaattagccaattactgaacgggaattaaacctataaacataaatataaataatatatataaacctaagtgtctaagttccataaattaagctgtagtctctggcttaaaacatgttaggtttgtttatacaagtagttggatgtttggagtacttcggtcttttgcgtaccatcaatatttaagaactaagttagttatgttccgtaacttatgggctcttaattaaactatatctgcacaaaattatatatatatcaaatgtgatggtatgtggactataaaaagatatggttgagaaccacaaactttgaaacttcgaataatatattgccagtgacagtcttgttgatttgttatagcaaatgccgttacctagctcaatcgccaaacagcacatccccctttcgccagtttgcgtaatagcgaagaggcccgcaccgatcgcccttcccacagttgcgcacctgaatggcga

SEQ ID NO: 28332 - DNA, 1120 bp, Glycine max
  Clone ID: TF_GmC4565_1
ctcgagccgaatcggctcgaggctagccaatcctaattcctattcctatccttattactacataactctaaagtaagtaagaaaaatagagcaatttcacaacacaacacaactcttataattgtgtgagttattaattgagtatgggaaggtccccttgctgtgagaaagctcacacaaacaaaggtgcatggactaaagaagaagatgacagactcatatcttatattcgagctcacggcgaaggctgctggcgttcactccccaaagccgccggtcttctccggtgcggcaaaagctgccgtctccggtggatcaactacctccgccccgaccttaaaagaggtaactttaccgaagaagaagacgagctcatcatcaaactccacagtctcctcggtaacaagtggtctttgatagctggaagattgccggggagaacagacaatgaaataaagaactattggaatacgcacataagaaggaagcttttgaacagaggaatcgaccctgcaactcataggccactcaacgaagctgcaactgctgcaactgttacaactaatatatcttttggcaaacaagaacaacaagagacaagttcgagtaacggaagcgttgttaaaggttccatcttggaacgctgccctgacttgaaccttgagttaaccattagtcctcctcgccaacaacaacagactcagaagaatctttgtttcgtttgcagtttgggtttgcacaacagcaaagattgcagctgcaacgtttccaacgctgtcactgtcaacaacaccactccttcttctgctgctgctgctgcttatgatttcttgggcatgaaaaccagcggtgtttgggattgcacccgcttggaaatgaaatgaaaattcaaccaaattatatcaattagttagtgttgttggagagaagtgagagaatgaaattcgttaatttttgaattttctctcctattttttcttttttttcttctcttatttgtataaataattagtcgctgatatgcataatatatagtaccggtacagttgaacatttttgccccccttttgttgttactcttcactttcttttcttccggcaattgatggtagtcataaag

SEQ ID NO: 28333 - DNA, 813 bp, Glycine max
  Clone ID: TF_GmC6713_2
gagaggacgagcaaatcgaaagacaagagtcacagcgcacccccaaacagaaacagagttattgggagcacgaaacactaactgattcgattcgattgaggttacaaaacactaaactgattcgattcgattcgattgaggtttcggtttggtcttgatggtgtcggtgaacccaagccctgctcaaggcttctacttcttcgatccctccaacatggtccttcccggcgtcaacaatcttccaccgcccccgccgcctgctccgccttctcacgccgccgtggaggatccgagtaagaagatcaggaaaccctacacgattaccaagtccagggagagctggactgagcgggagcacgacaagtttctagaagctctccaattatttgatcgggactggaaaaagattgaagcatttgttggttcaaaaacagttatccagatacgaagtcatgcacagaagtattttcttaaagttcagaagaagggaacaagtgaacatgtacctcctccccggccaaagagaaaagctgctcgcccataccctcaaaaagctcctaaaactcctactgtatcccaagttatgggcccattgcaatcttcatcttctttcattgaacctgcatacatttatatcccggattcttcatctgcgcttggaactccagttactaacatgccttcgtcatcttggaactataataatacaccacaatctgtcaatgtgccacaagtgaccagagatgacatgggattcactgtagctggacaaacagctcctcttaattgttgctgcagcagtagtaatgagag

SEQ ID NO: 28334 - DNA, 249 bp, Glycine max
  unsure (1)..(249): unsure at all n locations
  Clone ID: TF_700907805H1
caaatattttttcacttgctctccatcttttttcagttcatcagnggccaggtaggccatgggangggctccatgttgtgacaaatccaatgtgaaaagagggccttggtctcctgatgaagatgccaccctcaaaaactacnttgagaaacatggcacaggtggtaactggatagctctccccaaaaaagcaggccttaagcgttgtgggaagagctgtcgtctaagatggctaaactatctcaggcc

SEQ ID NO: 28335 - DNA, 1700 bp, Glycine max
  Clone ID: TF_GmC5903_2
tgcacaagaagatgagacattaaggaatgctgttgcagtttttaagggaaagagttggaagaaaatagctgagttttttcctgatagatcagaagttcagtgtctgcacagatggcaaaaagttcttaatccagaacttgttaaaggaccttggacacaggaggttgaaacttggtccttttctttttaatttttcctacagctttattcaagcaataacttcttttgattggcttacaggaggatgataaaattgttgaactggtgtcaaaatatgggcctacaaaatggtctttgatagccaagtctttacctggtcgaataggcaaacaatgtcgagagcggtggcacaatcatcttaatcctgacataaagaaggatgcctggactttggaagaggaattggccctgatgaatgctcatcgtatacatgggaacaaatgggctgaaatagctaaggtccttcatggaaggactgataatgcaataaagaatcactggaatagttctttgaagaaaaagttggatttttatttagctacaggaagacttccaccaattcctaagaatagtccacaagttcctgtcaaagatacaattagacgttctgctagtaaatcaatgcttggttgttcaaataaagaattaaatgcagctgttgaaacatcatctgaaactacagccattagtaagctagatgacagtggcaggaatcagtttgagtcctcaggcacagttagagaagttggtgattcttcaagtgttcctgcaaatgactctgccgattctgactgtgtagaatgcaagcctggatcatccaacatcaaccccagctgtagcaactcagaacacgtgtcaagagctaattttggaacaacttttgggccaatatctgagaattctggactcaatggaaactcaacttttgagcattgtacaaacaatggtgacaggagcagtaccaggttaatcggaacatcttcacaagaaaatccaacctgtggttctttgtgttatgagccaccacagttagatggttcagttcccatagattctctttatttaaattatacttgccagcagaatgagtactgtccgagtccaacgatgtcacctactggtttcttcactccacctcgtgcgaagggtagtgaattatgcactgagacacctgaatcgatcttgagaaaggctgctaatacttttccaaatactccttccatattgaggaggagaagaactggggcccaaacactcaccagtcccactaaagttttgaaagtagataataatccacatacttctaataaaacagagagaaccaatgatgattctggttctgggcatttctccgggagtccagcaagccatggctatgggattggcattcccaacaataaggcattcaatgcatctcccccatacaggttaagatccaagcgaacagcaattgtcaagtcagtggagaaacaactggagtttgcatttgacaaagagaagaatgacgacaagaggagtaatgtgatgactgaagatcgtctgcatgaaaaaaaattggttgtgacatagtgcataaattggattatggctggacttgcttttgaaggtagctgattgtttctctaaattgtttgacaatgtttaccaattttatgaagaaaattcagtgcacgggtcacaatgacttggcacttctccac

SEQ ID NO: 28336 - DNA, 901 bp, Glycine max
  Clone ID: TF_GmC95395_1
acgagcaaaagtgacttaccatccacaaccctaaaccaacccctctcctccctccacttccttatatatcttgttcgagacttctctttagcgtgcttgatggctcgagtttctcgcttcagcataataatattatcgcctgcatccacagtaacagtacccctctcttcttcatcatttcatggaggattcttcagctggtgaagacaccaagacttgccctcgtggccactggagacccgctgaggatgaaaagcttagacaacttgttgaacaatatggtgcccaaaactggaattcaatcgctgaaaagctccaaggaagatcagggaaaagttgcagattaaggtggttcaatcagctggacccgagaatcaacagaaggccattcacggaagaggaagaagagaggctactcgcggcacatcgcattcacgggaacaagtgggcactcatagcgaggcttttccccggtcgaaccgataatgctgtgaagaatcactggcacgttataatggcgagaaagcaaagggaacagtccaagttatgtgggaagagaagcttccaagacgtttacaacgattccaacaacacgttcctcgaaaaaagaacaacaccacaatctcatcatcaagacatgttgtttagtacgagatttgggttagagaatggaatattcttcgactttcgaagcctcgataaaaataaggatgatagtaataataataatcataggatagtgtcagatactccctctagtacttctctggcgtcttggaattttggttctgtgccaaccaccaccaccaaaggcgcgagagacaatttcaataacacttctcgttcttctagtgtttatctctcggaatgttccagaagctcagatagatcttttctttac

SEQ ID NO: 28337 - DNA, 905 bp, Glycine max
  Clone ID: TF_GmC937_3
aattcggctctacctctctctgacacaagaattaagttgtgagatggagagaagtagtgaagaggagatgttaataacgaaaggtccatggacagagcaagaggattctcttctcttcaattacatcactgtccacggcgaaggtcactggaactctgtcgctcgctacacaggtctaaaacgaacgggcaaaagctgcagattaagatggttgaactacttgcgtccaaatgttcgacgtgggaacataaccctccaagaacagctcttgattcttgacctccattcccgttggggcaacaggtggtcgaaaatagctgaacatttaccgggaagaacagacaacgagataaagaattattggagaacgagagtggtaaagcaggctaagcaactaaaatgtgatgtgaacagcaagcaattcagggacacgttgcgttttgtgtggatgccacgtatgctagagcggattcgggctcaggcctcatcatcggcccaagcccaccaaagcagcttaatctccaacagtaacactcaagcacacagtggattgttgtcatcagcgcttcatgcccacgcgccttctctctctgactcgagcgcgtcgtacaatcttatgggtgctgatgctggaagttgctcatctcatagctactactcagacatagcaggcaatggttttggtggtgcggacttgtggacggatcaaaacatttgctttctgcaacaccagcttgctcatcatgacttgttctgatcatgcatacttcaacatcttgctccaaaattcactctaaactgcaacatataaagcaattgtaacactagtcgtgaaacatgcatgtttctttttatgttaatttggtgtgaaatttaataatctatacttcaattaatttcaagag

SEQ ID NO: 28338 - DNA, 1628 bp, Glycine max
  Clone ID: TF_GmC495_1
aattcggctcgaggtcgtgccaaagaggcttattgaacacttgcagcagctagagccacaatttcaatgcccctgattagtttgtctgtccatcacagtacatagtataataatcataaaccctttttctcagcgaggcacacagtatcattactacactttttttttcactattgttttggcaagtcctcaacccccctccccccagcataaagagctataattcccttctcagccacaatatggctttgtaaaatgggaaggactccttgctgcagtcacgaggaattgagaaaaggggcatggacggttcaagaagaccagaaactaattacttacattcagaaacatggcacaggaagctggcgtaccttgccacagaaagcaggtcttaaaagatgtggaaagagttgcaggctgagatggtttaactaccttagacctgacattaagagagggaaattaagccaagaagaagagcagacaattatcaaacttcgggcggttcttggaaacaggtggtcaagtattgcaaagcacttacccatgcgaactgataacgaaatcaagaactattggaactcatatctgaaaaagcagttcgaaaagaatgctgtggatccctcaagttcaaaaccaaatagcactgatagttcctcagaatcaaaatctaatgacacgtgcatggttccatcagagaaaactgattgccatgaaccaaacaccagccaatctcatcagcacaacttatcaaggtcaatctcatcatcaactcatcttcttaacaaagttgctagtaaaattctggcatcagggtacctagaactaatcaaatcatgccaacctgttgttgctgggaacagcaaaagtgaaagtgtggttaaaactggtattgggttagaaagtgacaatattagagacccccttgagcctaatttgacctcaccaagtcattctataacttctgctaagttactgaacaagatggctacttccctccctcataaagttcatggccttgaagctgcaaaagctgtgttctcaaaactgatggaaaacagtgaaaaaggtgccactgctagtgatgatagctttgttggaggttgtttaaatgctttaagcccttttgaggataaaccacacataacaaaaacaattgactccccttctggtcctacactaatgttcaaccatgttaccacaccctcatgcttttcagaagataatgaagataactggcaatgcgtttcatctaactatgtttccttcaaaatttgtgctgcgaatggtggtgactgcagtgtctctgagatcaacttgggtgagtcttccagttccacatccagcttcctgtttgagaatgctgaccttggaacgtgtgatgatgagataagcaagtacatccagtattgtagggaaaaaaatttgtggacatccaatgctaataatgtaggtattacaaggccctatgatgtaagaggaagatatctaaagagagataatatatcctaatagagtgtttgatatatcaccatgtttatatagaggtgtttgacggaggaatttatgtatcatcactctatttgtaataagaaattatattcttccttataatttttttttactca

SEQ ID NO: 28339 - DNA, 1630 bp, Glycine max
  Clone ID: TF_GmC5000_1
tacggctgcgagaagacgacagaaggggacatgcataagaacaagcacaaggtctgattcgtgtttccttacatcaacttgtggtctaaaaatgggaaggatgccatgctgtgagaaggtagggttgaacaaaggaccatggaaaaccgaagaagatgagaagctcgtggcttatgttgaaaggcatggccctggaaactggcgttcagtgcctgccaaagcgggtcttcaaagatgtggcaagagttgtagactgaggtggatcaactacctaaaccctaatatcaaacgaggaagcttcagcttggaggaacatcgcaccattgttcaactccactctcttctcggaaacaaatggtcaatcatagccgcgcacctgcccaagagaactgacaacgacatcaagaactactggaacaccaacatcaagaaaggactcatcggaaagggcttagatccccttacctacaaaccaataaaatccaacacttttcaagcctatggtggtaatttccttgacccttccattgacaccaccaatatgaaccatgtggctcaatcggagagtgctcaaatcgaagccgaagcaagagaatctatgttgcaatttggatctctcccttcacatctccctgggctaatcttaagcaaaatcccaactcaaccttttccttcatcagcttctctattaacccaacgcattaatacaacatatgacatgtatgccctcgtgcttgcgacgaatcatcttgaccttcatccaccaccattcactgaccctgaaagcttccctagtaggaagcttcttccttcagtctctaccagtgttggacaatccactgatcctgaaagctcactctcttatgatggtattggttataatatgatagacaatagtagtagtcaaatgcaaatgacgatggaatgttatgcgacaaactttgaagatgatgatgttatgatagctctagaagcatttggaatagcaaggtttgagggcattcaagaattgtttgacgggcacactaccatagaggttctaatcaatgaatcttttgaaagagatgtgtagaagagtatggaaatggaaagtgcaatttccatgctttcctttgttggttccaataaaagtaatgtgtggttttgtaacttttcttttgagggattttctatttcatgttgagttgggtgcctcattacatgtgtttcaggttcagggtgtcttgtgtcctggactacatgataggtgttgagggttgttctgttatcggaatacacaacacttgtactgtagttttctcatgttttggtgctatagtctcgagcatttcttgcgtttattttcctttatttttaatgagttatttgccttactaaaaaaattacagtgaagccaaagtcgtgaggttgcaagtgttgtcatggttctaaattgtgtttgggattgtggttgtgatctcattgcaattatgatcagttgtaatgagttaaaaaaaacttttatgttacagtcacagttatgaatatgaactgcaatgggtgtcacctgttctgctattgcacctcttgttcacggtctttattccaatataatccataattagcaacttccatggaaagccatgttatg

SEQ ID NO: 28340 - DNA, 1671 bp, Glycine max
  Clone ID: TF_GmC146_1
gctcgtggagcgtggcccagtgcagctacatgggatgtcacgcggctccgtgggagcggcatctctccgccgcacactttgggtccgtgcgccttccgtccttgctcttgctgccttcgtgtgcctcggcggcctggtttactagttggactccccctcgcatcacgcccctcaccttacagagcctgaccccttgcattcttgcctggtaacgtccctcaaccagaggtgaggctgggaccctcccattagaaccctatcaagtaaagagggttagagaaataaaaagagaaagccgacagcacatagatagagagaggaaaacgacttaatattctttttccttgagacctgaaggggctaaggaaaattagaaggacacacaagtataaaggcggtgaaataaaagagaaagacaagaagaagacatgggaagaccaccttgttgtgacaaagaaggggtcaagaaagggccttggactcctgaagaagacatcatattggtgtcttatattcaggaacatggtcctggaaattggagggcagttcctgccaaaacagggttgtcaagatgcagcaagagttgcagacttagatggactaattacctgaggccaggaatcaaacggggcaacttcacagaacaagaggagaagatgataatccatcttcaagatcttttaggaaacagatgggctgcaatagcttcataccttccacagagaacagacaatgacataaagaactattggaacacccatttgagaaagaagctgaagaagatgcaagtaggttgtgaaggtggtagctttggagaagggttttcagcctcaaggcaaatccctagaggccagtgggaaagaaggctccaaactgatatccaaatggcaaagagagccctcagtgaagctctttcaccagagaagccatcttgtaatttatctgcctcaaactcaaacccttcagatagtagcagctccttctcttccacaaaaccaacaacaacacaaactgtgtgctatgcctcaagtgctgacaacatagctagaatgctaaagggttggatgaaaaacccaccaaagtcctcaagaacaaactcatcatctgtgactcagaactccttcaacaactttgctgcagcaggtgctgatactgcttctagtattggagcaaagggaccaccaagcagtgctgaattgtctgaaaacaattttgaatcattgtttgattttgatcagtctttggagtcttcaaactctgatgaattctctcggtcattgtctcctgaggccactgttttgcaagatgaaagcaagcctgatgttattggtgcagaaattatgccattctctttgcttgagaaatggcttcttgatgaggctggttgccaagagaaattagttggttgtggtgatgatgccaagtttttctaagttgggttcattttgtgacatatatgagactgtggaattttttattttatttcataagttataggtagggcctcatcaattaatcttcgctttggccttagagagagaagtttttcaagcctttggtgctagacgtgtatatgttaataactattgaaattatgattattgttatcatactgtgttagatgccacactggaaaacctgcttcttttatgtaaagttgatcctgcgatg

SEQ ID NO: 28341 - DNA, 763 bp, Glycine max
  Clone ID: TF_GmC16783_1
tttagattcttctctgttaaactccctccctgccaccctatctacacgagcaaccttgttgtccttgcaatgacctacttctattaatactaccgaaataaccatgtccgggaaaccacttaattctccacgcctccttgcaatggctgactcggatctctcttcaagtcaaatttctacacattctactgattcaggaaatcgagggtcttccaaagttgaattttctgaagatgaggaaaccctcatcatcaggatgtataaactggtaggggagaggtggtctataattgctggaaggattcctggaagaacagcagaggaaatagagaagtattggacttcaagattctcgggctctagtgaatgaagctccggagtactacgattggtgttcagtctaggacgagcaagaagattttgggtgcaagattagtgtgattttgtgggacataaaaactgaattaaagttggcatagtttataggtatttgtattggctataaaaaaagaagtggggcagcaactatagaagctggtttgtgttatatttctccatcttgaaatgttccttggtgtgatattttccatcttgaaatgttccttggtgattggtcttttctgaattgtacttagtgctgttcatcttcgtgtatcttattcatttaccattttggctttttatcttgcgtctgaaatctgtattggaaatgagaattaattagagacaggttcagtattgtcattcttagtttaattacgta

SEQ ID NO: 28342 - DNA, 762 bp, Glycine max
  unsure (1)..(762): unsure at all n locations
  Clone ID: TF_GmC1167_2
gaaggatggtaaaactcattagtttccttccatcaaggtcatggagtatataaagcactcacatgcattggtactatttgcaatacaagctcatctcttgggaagaaattagtttaagcctcagctagaaaaaggagagtgagttagtgagttgagaggcagaagaaaagaagaagaaaggtggagtgagtgagtgaatagaaaaaaaaaacccaccatggggaggcctccttgctgtgacaaagttggcatcaagaaaggtccatggacacctgaggaggatattatccttgtctcttacatccaagaacatggcccaggaaattggagatcagtgcctacttgaaaagggttatcaaggtgcagcaaaagttgcaggcttagatggacaaattacctaaggccaggaatcaagagagggaacttcaccccccatgaggaagggatgataattcatttgcaagctctactgggtaacaagtaatactctcaaatatatcatactttttccgtcgattttctcaacaaaaagagaatcaatattcaataccatgacatataattaaagttcacatacttttcattgattaattttgaataaaaaaaattataattttagcatatgcctatctatatgatatgcctgaatttgtgaagttgtttgaattttggagcagatgggcagccatagcttcctatcttccacaaagaacagacaatgacatanagaattattggaacacacatcntaagaagaagctg

SEQ ID NO: 28343 - DNA, 711 bp, Glycine max
  Clone ID: TF_GmC744396_1
ggcacgagggcaaagttggtatttgcttcaacaaaaaaaacagaaagagaaatctaatcagagagagacaacaacacaagaacatgggtagagctccatgctgtgacaaggccaacgtgaagaaaggaccatggtctccggttggggatgctgcactctgggccgtctttgaatcgtcgggtactgctggcctttgggttgctctccctcagttcgctgggctcaagagatgtggaaagagttgcagacttaggtggttaaattacttgaggcctaatatcaaacatggtggatttactgaagaagaagacaacatcatctgcagcctgtacattagcattggaagcaggtggtccataattgctgctcagttacctggaaggacagataacgacatcaagaactattggaacactagattgaagaagaaactgctcgggaggcgcaaacaatctaacttaagcgcaaaagacacaaacaatggaatagaggagaattcttattcaaatgccctaagctcttcagctcttgaaagactccaactgcacatgcaacttcaaagccttcaaaaccctttctctttctacaacaacccggcgctgtggcccaagttgcatcctttccaagaaaagatgatccagagcctgcagtctttgaatgatggctctagccctgtgatgcaaaatgctttgcctaattcccacatgtcga

SEQ ID NO: 28344 - DNA, 1589 bp, Glycine max
  Clone ID: TF_GmC1872_2
gtttggattctcaaagacagattgagattttacacagagagagagagagagagagagagagagagagagagagagagagagagagatgggaagagctccatgttgtgacaaggcaagtgttaagagagggccatggtcaccagaagaagacacaaagctgaaggagtacatagagaagcatggaactggagggaactggattgctcttcctcagaaagctggacttaagagatgtggaaaaagttgtagattgagatggctcaactatctcaggcctaacattaagcatggagatttctcagatgaggaagacagaataatttgcagcctttatgtgaatattggaagcaggtggtcaattatagctgctcagttaccaggaaggacagacaatgatatcaagaactactggaacacaaagttgaagaaaaaactcatgggtttgcttcctctttctcatcacagaaaacaaccttcatttccatcctcttttacccttcaaaaccctccactctctccttcagctcaccaactgtacggagagtactgcacctacaccccaacaacaaccacatctttcacaagtaatattgaaccacccttttcccttccttcaagtaactatgcaagcacaagtgacataactacctcagtttctcaccccttttaccaaaaccaagactccatgcaatgctattacccaattatgagagacaacagcagcaacaacaacaacaacatgctcatgtttggaagcgaaggaagttgcagtacttcctctgacggaagctgcactcaaggcagagaaattatcaagcaagaagaaagaattggctaccacagctacaataatgattataactttatgcttaatcacagcaacaatattaatgatggagaaaagtcatgttttggtgagtggtttagccaaacactactaacaccgttggattatgatcttgaggatattaagcaattgattagtagcagcagtagcactactatcttcaataatgttgatgaaaacaagacagaagagaaggccatgtactactactactactagtgactgcaaactgattatgatgatgatgatgactgaatctgactactggtaaaaaaatatgatgatggagaaagggtatgttgatgttggtgtggcaaagattcagaagaaaaaaaaattgatgagatttttctggggttctgcgttctttgatgaaacatttcttgttttgacagtacatggtaaaagcttctttatattttgtatatatcttctcggaaagggtgatgatgattatgatgacgacgaagaacatgatgttagattatttttttgttaattaagtattctctccaatcagatattaatgttgtgaaaaacagccaatgtcaattcaaattattttatattagggattatatatatatatatatatatatatatatatatatgtatatatatatgtatatatataacatagtttagtgtgttaagtactactactacgcattgttataaattaatctatatcttcttgatatgtattatgtaattatatatgagaatttgtgaatttgttatc

SEQ ID NO: 28345 - DNA, 1196 bp, Glycine max
  Clone ID: TF_GmC1514_1
gtgttcagttaagagtttccgcgtgagagtggccatgggaagagctccttgttgtgacaaagcaaacgttaagagagggccatggtctccagaagaagatgctacactcaaaaattatgtagagactcatggcactggtggaaattggattgcattgcccaaaaaagctggccttagacggtgtggcaagagttgccggctacggtggctcaattatctgaggccagacatcaaacatggaggctttactgaagaagaggacaacatcatttgtaccctctatgctgagatgggaagcagatggtctgccatagcctctaaacttcctggcagaaccgacaatgatgtgaaaaactactggaacacgaaactgaagaagaagatcatggcagggaaagttaccctcaaaacattgactgacaatgacacgcttccttcaatttcaaccccatcactaaccaacaaccaaaatgtcaagactagtcaaaattcacctttcccttcttcacaaaatcaaaattctccacccttagatgctaataatacattcagcattagtgaaaaaagcattattagttttgaccaaactcatcatgggttgtatagtccacaagtcatggatgttgtgtcacaaattggtgcaaattcaaggattcccaactacaacaacaataataatcctgtggtgtcattgtctcaagaaggttcaagcagcatttcggattcctcttcaattgcaatgaacaacaagaatgtgtcacagccagaacaacatgctaatgatgattatgaatctatggaaatgttgatggattttggctttggatttccctatgattttgccaatggtcctaactgccattatgagagagttggtgaattggctccaagttcgtatccagagtgggttgattttagctatgctgacattaagccacattgaccgaatcaaaatgttatatagttagctagttatacaatattgtataaccatgggattttctgtaagaaaaaacaatgccaaaacgtatgtgaagggaagacttagctgagatttaatttttctagtttgttgatctaatatagtattaattagtagtacttgtgtgttgtgttcatagataggaactgcatagtttaattaggtcaaattttgaattaagcaaataaaaacgattaaagattattgataaaaa

SEQ ID NO: 28346 - DNA, 448 bp, Glycine max
  Clone ID: TF_GmC140404_1
agcgagtgtttgttctctctttagttcatatctatgctagggaatccactcttaccattaaactgaaattgtgacagaaaaaaggcaaaatggagagccagccactagaaaaagcaaaaccaaaatacagaaaaggcttatggtcacctgaagaagataataaactcagaaaccatatcattaagcatggtcatggctgctggagctctgtccctattaaggcaggcttgcaaagaaatgggaagagctgtagactaaggtggattaactacttgaggccaggattgaagagaggggtgttcagcaaacatgaggaagatacaatcatggtcctacaccatatgttaggaaacaagtggtctcaaatagcacagcatttgccaggaaggactgacaatgagataaaaaattattggcattcatatttgaaaaagaaagagatcaaagc

SEQ ID NO: 28347 - DNA, 1353 bp, Glycine max
  Clone ID: TF_GmC1181_1
cgaactcatcatttctaattgttctgatccatatatatcatactttctttgtaataacttaaagaaccccacaaaaacaccaaccatgtccacaattgcaaagagagatttgagttctaatgaagaagagagtgagctgagaagaggtccttggactcttgaagaagacagcttactcatacactatattgctcgtcatggtgaaggccgttggaatatgttagccaaaagtgcaggattgaagaggactggaaaaagttgcagacttagatggctgaattatttgaaaccagacattaagagagggaacctcactccacaggagcaactcttgatccttgaactccattccaagtggggtaacaggtggtcaaaaattgctcagcatctgccaggaagaacagacaatgagatcaagaactattggagaacaaggatacagaaacaggcacgccaacttaacattgaatctggtagcaagagattcattgatgctgtcaagtgtttttggatgccaagattgctccaaaagatggaacagagcaattctccaagccctcatcactcttccatgacaaacatgatgaatttagggaattccggagaagcttctatgagttcaatgtcaagcagcttcaatattaatccttctatgtcttcttcctcatctcctccacaaagggaatttattatggatgatgcaaatcattttaatactatgtccaaccccatcaatccatccccagattccttccaattttcacagctacttgaaatttctgaacaccccaaaagtccttcaaatgtgtttgagaacaatgtttgcagttatccaatccaggacaattgctatgttgataccaataactatggcatggaaggcataaacatggatcccctttcagcaatggatacttacgacttcccacagtttgattttcagacagcaggaaatggatggatgctagacagcatgggggattctactttatggaacatggaggctatgtgacagtgttggcaagagaaggcatgcatctcaagctcttttcatcgtgggatgttatattatcgaaagaaaaaaaagtttgaagattcttatgctatactgattcttagtgtgagtatacattctcataggtagaaattagtactaagtgtaaggttatttgatatgaacctcttgaaatatagtattttaaatagaaaatgcaggagatggtattagagttcccctgtttcagatttattagaagttggaaaagttgtaatttgaccaagacagtgtatcttggctgttataagtggcattttgaacataattcgtttttattttaaaaaaaaataattata

SEQ ID NO: 28348 - DNA, 855 bp, Glycine max
  Clone ID: TF_GmC1212_1
cggctcgagcatatacattttttagccttttgttagccccaaacacccacacgggcacacccctgcaggtacaaaagggggagttcacaacaaaaagaaaacaatgagaaaaccttgttgtgacaaggaaaacatcaataaaggtgcttggtccaagcaagaagaccaaaagctcattgactacatccaagtccatggtgaaggctgttggcgttccattcctaaagctgctgggctgcatcgttgtggcaaaagctgtaggatgagatggttaaactacttacgaccaggcatcaaacgtggaatctttgctgaagatgaggaagacctcatcatcaaactccatgccctccttggtaacaggtggtcactcattgctggaaggttgcctgggaggacagacaatgaggtgaagaactattggaattctcacatccgaagaaaactaataaagatgggaattgatccaaatagccataagccacaccaaagctttcctcgtcctcatgtttcttctgctgatcatcagggtgcatcaacatctgagtccatcaacaacaacaaagtccctttcttcaattcccgtggttcagctgccactgatcatcataagatttcgttcactaaagaagaaacatcaattatttcatcaccccctttgaatcttgatcttacaatttctttaccttcgcctgtggaagaaaacaaaaattctgatcatgagtccgccaagacatgtgacgtggatatagatctcaactgttagtacttttagttgttggcaagagtattaattaccagcagtagtacttcatgtttgttacaaattaattttggagaaataatcagtttttc

SEQ ID NO: 28349 - DNA, 1453 bp, Glycine max
  Clone ID: TF_GmC1729_1
gcgcgtgcgtacggctgcgagaagacgacagaagggggaagttgaaggggaaagagagaaaagaactagctagctggagtctgagaactctagcatgtactagtactactcctacattcctccatcttcctttgtactatttttttttaaccataaaagcaagagcacaaagatggtgagagctccttgttgtgaaaagatgggtttgaagaagggtccttgggctcccgaggaagatcaaatcctcacatcttacattgacaaacatggtcatggcaattggcgtgccctcccaaagcaagcaggcttgttaaggtgtgggaaaagctgtagactccgctggattaactatttgaggcctgatattaaaagagggaatttcacaattgaagaagaagaaactatcattaagctgcatgacatgctggggaacaggtggtcagcaattgcagccaaattgccaggaagaactgacaatgagattaaaaatgtttggcacaccaatttgaagaagaggctgctgaaatcagaccagtccaagtccaaaccaagttccaaaagagccattaagccaaaaatcgaacgttctgattcaaattccagcatcataactcaatcagaacctgacaattttaatttcagagaaatggacacaataacatcatcagcatgcactacttctagtagtgatttttcatcggtcacggttggtgacagcaaaaatatcaagagtgaagacacagagtctacggaaacaatgcctgtgattgatgagagcttttggtcagaagctgcaattgatgatgaaacccccaccatgtcatcatctcagtctttgacaatctcaaatgagatgcgacttcaatacccttttgctaactatgaggaaactttccagcagggtcatcatgcttatgattcaaactttgatgatggcatggatttctggtatgacatatttaccaggaccaatgattcaatagaattgctagagttctgaagttttcatgtgacacgttgaacgagggcattattgaatttggcagatagagtagtttaaatggcatggtataacttgaatttgaccgttacaacaaaagggtacgataatttctggtgtggggacagcattatcaccagctgcaagatctagaggcataatccattgacaaagaaactagccagggtaatgcgaaaggctaatgaatgatatgtaatgtacacatgtaatcaagtagtgaaacactgactttctttctttttagtggaaaacagcaatgctctaacatttttgtattttacaaattagagtttaattaggctagagttacttgattgtaatatcaataaatgatgtattatgtgaattattcaaaaaaatttatgcccttgttgagcaaaattttctaaaaaagaaaaaaaaaaaaaaaaaagcggccagcggccactcgag

SEQ ID NO: 28350 - DNA, 1079 bp, Glycine max
  Clone ID: TF_GmC1318_1
gagaaattgagaagatgggaagaaaggccaactgtgacaatcaatatgctatgaacagaggtccttggtctgctgaagaagacaaaattcttatgaactacgttcaagtccatggagaaggaaaatggagagagctttccaaaagagcaggcttgaaaagatgtgggaagagttgtagactccgatggctgaattatctcaagccagatatcaagagaggaaacatttcttcggatgaagaagatctcattattagactgcataagctcttagggaatagatggtctctaattgcgggacgcttaccagggcgaacagacaatgaaattaagaactattggaatacttatttgagaaagaaggcagagcacaagcatgacaaaattcctagccataacgataacattcctatcaaattaagaattgaatctccgggttgctcaaaaaattcctttggtaatgttcttgatcctacaaaatcccctcacccaatgaggtgtaccaaggttatgatgccagtcaatgattcagtcaacacaacgaatttgattacaacgagctgggacaatcataacccttcttctgcatccatgcaactagatgactataatcattgcttaacaggtgtcctccaagaatttgacatcagtgacttgttaatgtcgtatgaggatgattttcgttttaatggatatgcttgtgtcgaaataccccaacatatttttgaagatgagacttgcaggcttgatgattcgttgggtgaagaagcatggtatgagaattggaagaatgacccctattttccacaagatcaagatatgggtttttcttccttttaaagtgtttaaaatttaggcacattaccttaaagtgtttttagtattgttctttaatcaaaattagaatttcattttagtatcatgtgcaattaaggttgacatgaaatgttggtactaagatgaaattttaattttgaatcaagaacaggtctaaaatcccttaaagtattgtggctaaatagtctccttttaaaaaactgaacttgaatgaaatggttgaggatgttaaattaacaaaaa

SEQ ID NO: 28351 - DNA, 455 bp, Glycine max
  Clone ID: TF_uC-gmroLIB3258087a02a1
gttgttgtagtcgaagctggcgaaattgctgcttcctcatgagtctatttctagccttctctgctgcatcagagggactttttgcctttttcttgaaatgagtcctccaataattttttatctcattgtcagttctccctggcaagctccttgcaattgttgaccacctgaagtttatggtttagcaatcaaggccttggaatatgtatgttgccatttatggaaacatgcaagttcaagagaatgagaaaataaattttacctgtttccccaccttgcatgcaactctagaattatgctctcttcttgtggtgttatctgtcccctcttgagatcaggtctcagataattcacccatctcaatctgcagctcttcccatttcttttcaatcctgttaatggacaacaacaataatacataattaatcactttgatacataatcactttaccata

SEQ ID NO: 28352 - DNA, 1379 bp, Glycine max
  Clone ID: TF_GmC203_1
aattcggctcgagccaaccttaaagcttgaaactttcactaagcagagaagcatggtgtcaaaaaatccgaacccctctgaggctttttacttggacccctccggcatgtcgctccccggaatccttcccttcgccgccgcagccaccgccaccgcagattcctttgaggaccctgctaagaagactcgcaagccttacactattaccaagtctagggagagttggaccgaacctgagcacgacaagttcctcgaagctcttcagttatttgaccgtgactggaaaaagattgaagcatttgttggatcaaagacagtcatccagatacgtagccatgctcagaaatactttctaaaagttcagaagagtgggacaaatgaacatcttcctccacccagaccaaaaagaaaagctgctcatccatatcctcagaaagcttcaaaaactgctccagtactctcacaagtatcaggatcctttcaatcttcatcagctttgcttgaacctggatacatattaaagcatgactcttcagcaatgcctaaaactcccattattaacactgcagtgtcttcctggtcaaacaactctctgcagaaaaccaccagcgtattgcatgggcaaaaacaaaaagtgaataattgttgcagtagcagtagaagtcctagagcgcagttggttggtgaatctaatggtcaaaggaataacagccatccattgagagttcttccggattttgccgaagtatacagcttcattggcagtgtatttgatccaaatgtaactggacatgtacagaaactaaaaaggatggaccctatagatgttgagacggtgctattgttgatgagaaacctgtctatcaatttagcaagcccagattttgaggaccatagaaggctgcttgcatcatatgaggtggaacctgaggtcgataaatataaatgcagattgaaccatgcttgatgtgcagttgaagtgtgctacttagataggcggaggccgaaaatggctttgtttttcggctactgaatgcagtctggaaaaattttgcatgatgataaaatgccttggcatggcaactggctgaagtaaaaatgctgctgctcatcatcttggctaagcaacacttttaattctcttaattcaatttggttatgtatatagtaaaagaaattaatgtggaaatgtatagggtacatagttttgcataggtatgcacagtactagatatctgtgctctagatttagccaaacgtctaatatctggaaagcgaggcagctccctattaaacactttctaacattgtacagcataaaaattttgagcgctttgtttactaagagactcaactgagatttgttcagctcaaaaacc

SEQ ID NO: 28353 - DNA, 2086 bp, Glycine max
  Clone ID: TF_GmC6843_1
ccggaattcccggctcgaccccgcgtccgcctggtgttacaacaaggaaatggttaacaggaagtttaatctactagcctttacactttttctccaaaaggaagctacaattcttggatctcaggatgaatcagagtggcccacacttcctgtgctaccatcatatggcagaggaagggatgctcctgatggacaagggtgctaatatgaaataccaggccttacatgatcgagattatgttctttgatcacatccagatatctaatctcactttgatcaattctctatctttgtttgtccatccaatttacacaagttttgacaagaattttcatttgccttgatgattaatcttaatgcacagcgttttcttttattcttattatcccctatctctgcagcgacattataattcaagggctgaccattcttgctccaattgattctccaaacactgatggaatagatctagcaagagggactctctataccatctgttatgtaactgtgttaacgtggttcttgctgtaaatcattgaatttttgcggattgagtttcttcaaaatcagaagactcggtgtcggtgttgatttacttggccggagcgatggcaactttgtcccatgctgattctagaagaatgtattcatgatggtgggacagtcacattagccccaagaactcgaaatggctccaagtcgctagaatctgacaggagtaccatggacagaagaagagcaccgaacgttccttgttggacttgagaagctgggaaaaggtgattggaggggtatctctagaaactatgtgacttcaagaaccccaacccaagtcgctagccatgctcagaagtactttattcgccttgcaaccatgaataagaaaaagagacgttcaagtctttttgacatggtatatatatacatagatccatcatgatcaacttcctaattatctcatcttatatcaatcacatatccatatatatgcacttaaattagttttttttataatacattttatacttttactatattctaattacttaattgataattaatttaattgataacaataaatttatcttaaatttataattttttaaaattatccttattattaatacttttctcttaattatttactaatatattattttttttctttgaaaaatatttgtagtttaaaaataattaatttaaaaaatattatagttccagtattagaaaagaaaaaaacaaacatcataggaagggaggcaataaataatttaattttctcgataccatgtgattggatatcaattatggcaggttggtaacggcatcacaaatccaattagcagctctaactgcaagtcttccaaatgtgaaattgaggatgatgtgaccttgtcacttgttcaattacaagatactaaattagatgagcagaaagatagtgataaatattgtgaagctggaccagcaggtgctgaacatgaagctgtgcctttgtggcttcatcttcagatgaaatcttcaaataataatgttgcagcagtagttcctgatctggagctcactcttgcagtctccaagggcaaggctaagaccctgctaggcctggaacaaacacaaacaaaatcatccccagattccttccttcttggaccaattagcgtgacttgagctatgaattctctagggttaatgcagttgcacccctcggcccctctttatttgttgtcaagtacaagatcttctgttcaaaaaagaaattaaacacatttttcttgttggtagtcattaaccaaccactaatctatgcaattacatcccttcatgatatataccgtacgttacatagagtagttgattactttatatacatcaatcaaaatctctctttgcatcactgcaaattaattagttcaatctgttcaacggaattattaaccaactatgaaattttagatacttttttgttcgcaattggcaagtcatccataccttcctaccgaatattatgtttcatatataccttttttcttttctttctaagttatgtttaatatatacctagtgtaccaaaagcttgttttc

SEQ ID NO: 28354 - DNA, 1646 bp, Glycine max
  Clone ID: TF_GmC6713_1
acgggggacgagacgaaacccaagacaagaatcacagcgcacagtgacacatacataaaaaaaacgaaacacaaacagaaacagagttattggaaaacacgaaacactaattgatttgaattcgattcgattgaggattgctgtttgggtgtcttgatggtgtcggtgaacccaaaccccgctcaaggcttctacttcttcgatccctccaacatgacccttcccggcgtcaacaatcttccaccgccgccgccgccggctccggctgctcctgccgccgtcgaggatccgaataagaagatccggaaaccctacacgattaccaagtccagggagagctggaccgagcaggagcacgacaagtttctagaagctctccaattatttgatcgggactggaaaaagatagaagcatttgttggttcaaaaacagttatccagatacgaagtcatgcacaaaagtattttcttaaagttcagaagaatggaacaagtgaacatgtacctcctcctcggccaaagagaaaagatgctcctccataccctcaaaaagctcctaaaactcctactgcttgtcacgttatgggcccattgctatcttcatctattttcattgattgtgcatacatttatatatatcctgctttctttgtgcttggatggcccgccagtaacatgcctttattacgtcgtctttataatactacaccacaaccaggcattttactacaagtgaccagagatgacatgggattgactggagcttgacaggctgctcctcttaattgttgtgttgctgcagcagaagagagcacccctccgacttggcctcgtagcaaaaggattaatcaaggtgaccagggcaagccaattaaagtaatgccagattttgcacaagtctacagcttcattggcagtgtattcgatccaaattcaactaatcacctacagaaactacaacagatggacccaataaatgtggaaacggtattgttgttgatgacaaatctctccgtcaatttaatgagtcctgaatttgaggatcataagaggctgctttcatcatatgataccgactctgacaagtcgaagtttgttaatatttgcagcaaatccttcaccaataaatccgagagtgctgttttgtctgcttaggatgtagccagtggtttgccctgaagagtgttttcaatatattttctgaatgcacataaagtggtggagcaagaaagggaaaagacaaaggttttgctgaaaggaagtgtagtatctagatgcttgcatgtgtatataactcgtatatataagtatatgtataccttttggattgagtttttatttgttttaggcactgttagatcgtagttatgctgctgttttgtgtatatcttttgaagatgattgtccttggcatgcaggacaatgagagtcctgttaggtcacttttggaggctatactctgtacagtctgttgagtgcttttgtgtgttatgctgtgaagcttagaattagtataaaagagcggtgttaggacttagggggtgccgtctgccttgtatatataaagcaataaaacagtgtagataaagtttcttcttttcatgcgtgtatattatattaataatacttgctacctggtctcaact

SEQ ID NO: 28355 - DNA, 1535 bp, Glycine max
  Clone ID: TF_GmC1519_1
gagagagacctaacttaactattgcattgccacgcgtccgaaatccccgtatttaatccaggcaataaaaggccaatgagggaacaagagcacaagacaggaatagaagaagaagacccttgcacatagcttcaaagaaattaattaagatgggtcaccattcttgctgcaaccaacagaaggttaagagaggcctttggtcccccgaggaagatgagaagctcatcagatacattaccactcacggctatggttgctggagtgaagttccagagaaagctgggcttcaaaggtgtggtaagagttgtcgcctgagatggattaattatttgaggcctgatattagaagaggcaggtttacacctgaagaggagaagttaattataagtcttcacggggtcgttggcaacagatgggctcacattgcaagccacttaccaggtagaactgacaacgaaataaagaactactggaattcttggatcaaaaagaaaattagaaagccttctacggtgacttcatcaatgaccactacacaaagtgttgatccaccagccccaattcaattttaattccaatcaactagatcactatggcaaccaagaaaatttaacagcaaagccaccgatgcaagaaaccttattttcctcgacgtgccccctatttatgtttgacactagttcattagatcaagggacaacaacagtagacaccaccaataatgtacgagcagaactgttccaagattcattgggtttgagcagtagtgaaacgtggaacatgagccaccatcaagtccatgctcttcctcctcaactagcagcaacttttacagcaacaaacgttattgatactacgaattatctgccaccattgatagagaacgttgaaaacatggtgccaaatatggaagtacagtcttgtagtatagacgaggaaggagaaatggcactagagtgtttgcggagacaagatttgaatgagtgggtggagaatcaacaacaatgtcccagctttcttttctgggacaatattaatgttgaaggacaacttcgaggggaagaactagcaccaaacacgtcaaatatgggaaacaatacactttcaccttttccttcctctttatgactgcaacaaggactgtccccactccccactatactctttttctcatgctccctctaaccaggaagagttttcaggaatggtccggcccaggctgaaacttatattgcagagattgctttttcttcttttgttttttttccaacctctttcgattgctgattggaaagattcagaaaaatgagtgaagataaaatatgttatatatatataaccaagcgtgatgggtttattactttttattgagtgttttgacatggaagagggaaaaaaaaaagagaaggaataataataaaggcgattgtaacccgaaggaaagtttgattttgaagatatatatggaaagcatcttcaatttgcttgttttttgactgtaaaaatcgtcggttttgaatgagaataaataatgg

SEQ ID NO: 28356 - DNA, 599 bp, Glycine max
  Clone ID: TF_GmC1519_2
ctatgacgtcgtatgcacgctcggaattcggctcgagcagcatttgatcaaggcaatacaaggccacttagggaacaagaatataaaagaaggaaaaagaagaagacgacatagcaaagcctagaaacatgggtcaccattcttgctgcaaccaacagaaggttaaaagaggactttggtctcctgaggaagatgaaaagctcatcagatacattactactcatggatatggctgttggagtgaagttccagaaaaagctgggcttcaaaggtgtggcaagagttgtcgcttgagatggattaattatttaagacccgatattagaagagggaggtttacacctgaggaggagaagttaattataagccttcacggggtcgtaggaaacagatgggctcacattgcaagccacttgccaggtcgaactgacaatgaaataaagaactattggaactcatggataaaaaagaaaataagaaagacttcttcggtgtcttcaacaaccattgcacaaagtatcgatcacaattcttctgaccagttcaattacaattctaatctaatactataccactttcccaaccatgataacaatcta

SEQ ID NO: 28357 - DNA, 1386 bp, Glycine max
  Clone ID: TF_GmC213_1
ccacaggctcgcgggagtcgcctcgtgtttccgtttccgtttcaatttcctctcacaggctttaaccttaccagctcgagataagacatggaccggatcaaaggcccatggagtccggaggaggacgaggctctgcagaagctggtggagaaacacgggcccaggaactggtctctgatcagcaagtccatcccgggccggtccggcaagtcctgcaggctccggtggtgcaaccagctgtccccccaggtggagcaccgggccttcacggccgaagaggacgacaccataatccgggcccatgcccgcttcggcaacaagtgggccaccatagcccgcctcctccacggcagaaccgacaacgctatcaaaaaccactggaactccaccttgaagcgcaagtgctcttcaaccatgatcgacgacaacacccaaccgctgaaaagatccgtgagtgccggcgcggctattccagtctctactggactctacatgaacccgcccactccgggtagtccctccggatccgatgtgagcgagtccagcttaccggttgcatcctcttcgcatgtgttccgtcccgtgcctagaactgtcaaggttctaccacccgtagaaaccacgtcgtcctccaatgaccctccaacttcactttctctatcactccccggtgttggtgttgttgactcatccgaagtctccaatcggacaactgagccgattcatgttacaccgccactgccacatcggtcgaatactatgcctttgctcccaatgatgacgtcggtttcagcgacggtgatggcgccgtttaattttagcgcagagtttcgggcggtgatgcaggaaatgataaggaaggaggtgaggagttatatggagttgcacaatcagaatgggatgtgttttcaggctgcggtgaatgatgggtttaggaacgcttcggtgaagcgtattggaattagcagggttgattcgtaaatattatcatcgaagaatagaatgttcatttgctcctcctaatgaggaaaaaaactaagaatctgtttttttccctgtttttttttaatcaatgttcttaggcaataattttggttgatgtacagcgagacagaactctcgatccctaaagaggctgaatggaaattggaacgaaagagggagatagatgttacccattagataaaatctgaaatctctgttgtaactttttgtatctgaaactctgttgtaactttttttatcctctctattggtcctgttctcttttgaaaacaaaaagaaaaaataatcttggaataaacaaattcctccaaatctccttgtaataataaatctattttcttctttctaaacataaatttcaatctcgaattggttcggatt

SEQ ID NO: 28358 - DNA, 1368 bp, Glycine max
  Clone ID: TF_GmC1582_1
gctcctttatatattgtttccgtgtttttctctctttgtgattttgtgaggcccaaactaactttataagcatttacgtgtttgaaattaatattttgtgagctagctagcttcttcatcatggcaaagtcttctactgaaaagaatggactgaagaagggtccatggactccagaggaagatcagaaactcatcgattacattcagaaacatggacatgggaagtggagaacccttcccaaaaatgcaggactaaaaagatgtggaaagagttgtcggcttcgctgggctaactacttgaggcccgatataaagagagggagattctcattcgaagaagaagaagccatcattcagttacacagtgttttgggaaacaagtggtctacaattgctgctaacttgccaggaagaacagataatgagatcaagaattattggaacactcacatcaagaaaaagctattgaagatggggattgatccagtgactcacacacctcgccttgatgttattcaacttgcctccattctcaacacatctttatacaattcagcaccccaattcaactacccttctctttctggaattggaagatcagtgataaacccaagccatatgctaggtttgctcactaccctgctatcatgtcaaaacagaaattacaaccctgatgtattgaataataaccaacttagtggtggtagcactctactgcaaaatcaacaccaatgttcccgaatgcaacttgattctacacaagccttccaaccaaaccaaccacaagtctcactacaagaaaaccacattgctaagtctaattctaatccattgaatatggaaccccaagttatgaaaactacattagagaatcaaatcactccaattgctaccccttttagccaacaaaacacactaccaaatttgtggcactataatactgaaggtcacatatctgatctaccaacaatggctcaatcatcatcagctatgcaatgtttctcttctcccaagttcaattctatatacaacaatctcttggaaaatcagaatttgtgtaacaacaacgaggggatgccaaatttcaatctaagttcactgttatcgtccacaccctcatcttctagcccaattagtactttgaattcgtcatcttccacaacatttgtcaacggaaccactgaagatgaaagggacacttacggcagcagcatgttgatgtataacatttcaaatggcttgaatgactctggacttttgtgattgtacaagttgtgctgctacgtgatttagtttttcttttttctttttttgagatcagtgacatttaatgtcattaaaacagaaataatattatataattattat

SEQ ID NO: 28359 - DNA, 753 bp, Glycine max
  Clone ID: TF_GmC2603_2
tgacttatgtcgatggatctttaatgcaaacctttattatgcagatcaccatggtaaaactcccaattttgatgagaaaacaacacttgactacatctaattagtttgcgtttcatattattgtttaccctttcgtttcaaatctaataatggttactttgagacatgcaggtggtcaagaattgctcgaaagttaccagggcgcactgacaatgagatcaagaactactggaggactctgatgaggaaaaaggctcaggacaaaaagcgaggagaagctgcatcatcatcatcatctagtgttgattcctcaatatcctcaaacaaccatgcggtggatccacatgcttccaagaaagcaggagaagagagcttttatgacactggaggtcatggtgtgacagcctcaacccaagatcagggtcaaaaaggtgaacaagggttgttctctatggatgatatatggaaggatattgacaatatgtcagaagagaacaacactcttcagccagtgtcagtgtatgaagggcacagtgaagagggttgcaacttctcttgcccaccacaagtgccttctccatcatcatgggaatattcttcgtgaccctctatgggtgatggatgaggaaagtttgttttgccctttgagtgaaaccatatttttcctgctatgcacagggcaccgttttttttaaccgctaatattattattttttttcaaatcaatatttgttcatagcatatcatgtgtgc

SEQ ID NO: 28360 - DNA, 1270 bp, Glycine max
  Clone ID: TF_GmC5898_1
cccacggttacggttctgcaagactgcaactattggggaatctttcgcagcctcccactaaatcttttgaaaaaatattgaatcctcaaagtgccgatcctcctaaatccaatgtttgctctttttagcccttctctccctatatattttttcacaagcacctctttcaattctctccgtttcactagctcttattccaaagcaaaagaagaagaaagggcaaattagtataatatggagaccatgaatgttcaggtgatgagaagcttatcagatatggtaattaaaaaaggaccatggactgaggaagaagattctgttctgatcaactatgtcaacgtccacggcgaaggccactggaactccctcgctcgctcttcaggtttaaagcgaacgggcaaaagctgcagactaagatggttcaactacttgcgcccaaatgttcgacgtgggaacatcacccttcaagaacagctcttgattctcgaactccattcccactggggcaatcggtgggccaaaatagcagaacaactgccagggagaacagacaatgagataaagaactattggaggactcgagtggtgaagcaggctaagcaactcaaatgtcatgtaaacagcaaacagttcagggacgccttgcgtttcgtttggatgccgcgccttatggagcagattcaggcttcttcttcttcctatggccttgatcaaaccacgttgtgcaacactcaaacccacagagacaactcaatggtttcatcgtactcatcagaggttgatcttcagcctccttctctttctgatacaagtataacttcatcatcttacaatttaattggtgatggaggcctgtcaacggaaagtgcagaaaaggggtccatatactctctttggcagcattgggactactctgacatacaagcatttgagccatgcaatggttttggtgatgcagacttgtggaccgatgaaaacatgtggttcttgcagcagcatcttgctgatgaattatgatccagttttgcaatttacactaggctttgcaattaacaagttcaacgatatatcgctaattaaactactgaatgtcattatttgagtgatgattgattgtttgtaattgtcctacatgatacattaattttcttatgaaataagatacttgtagttgaatagtacatttctctaagaacatgtaggaactcaatttaagttgaccctctgtttagtgtccgttattgttatatacaatataagaacattcatt

SEQ ID NO: 28361 - DNA, 773 bp, Glycine max
  Clone ID: TF_GmC148_2
cccacgcgtccgctttctataaaggtagagagaagagaggacccttctcttgcatagttcaagtgagtgagagtgccaaaaaatgggaagggctccttgttgttccaaagtggggttgcacaaaggtccatggactcctaaagaagatgcattgcttaccaagtatatccaagctcatggagaaggccaatggaaatcactacccaaaaaagcaggtaattaaggttttagatgctcaactttcccaattcatttctcaatttgatgtctcatgttctggtttcgatcacaaattattatgtgtaacttttataataattatattaatattgatatatgattgaatgacagtatataattatatgtgtataatcattaaattcataatataaaattacatgtatcttttatccgaaaaattatgctggagtcggatagaataaattctgattcataactctgaatatacagggcttcttagatgtggaaaaagttgtagattgagatggatgaactatctgagaccagacataaagagagggaacatagcaccagaagaagatgatcttataatcagaatgcattcacttttgggaaacagatggtccctcatagcaggaaggttaccagggagaacagacaatgaaataaagaactactggaacacccatctaagcaaaaagctgaaaattcaaggaacagaagacacagacacacacaaaatgttagagaatcctcaagaagaggctgcaagtgatggtggcaacaacaac

SEQ ID NO: 28362 - DNA, 1046 bp, Glycine max
  Clone ID: TF_GmC1382_1
ctctgcttcctttcagagttcgctagagaagcttctgaagatgggaagagctccttgttgctctaaagtagggttgcatagaggtccatggactcctcgagaagcttttaaataccatgtttcttctttctttaaaataatatttactaattgatcactaccaaaaacagctggtcttcttagatgcggaaaaagttgccgactgagatggatgaactatctgagacctgatataaagagaggaaacataaccccagaagaagatgatcttataattagaatgcactcacttttaggaaatagatggtccctcatcgcgggaagattaccaggacgaacagataatgagattaagaactactggaatacccatctcagtaagaagctgagaaatcaaggaacggatccaaatacacacgacaagttaactgaggcaccagagaagaagaagggcagaaagaagaataagcaaaagagtactgagaataacaaagggtcagagaagaccttagtttatctaccaaaaccaatcagggttaaggctttatcgtcatgtatacccagaacggatagcaccttaacccttgattcgaattcagctacgactgcatcaacaagccaagagaaagttcaaagcccagaagcagaaacaaaagaggtgaacatggtttggggggtaagtgacaatattggagacaatggtgggattggaatattctttggtgaagaccatgacctagtcaacagtgcctcttacatggaatgctattctgatgatcatgatacgctagaaaagctctatgaagagtacttgcagctcttgaatgttgaggagaaaccagatgaattagattcttttgctcaatctttattggtgtaaacgtacaaataatggtgaaaatatatggttggaacaaataaaacaaattaagtttgctcctgctagcacgtgaacatattgtattatttattcctcagattagtatcatttatttagaatattttttaaattttaaatattattaatttaactacaaaaaaaaaaa

SEQ ID NO: 28363 - DNA, 1369 bp, Glycine max
  Clone ID: TF_GmC1121_2
agggtccatggtcgccggaagaggacgtcattctgagccgtctggtgagcaagttcggcgcgagaaattggagcctcatcgcgcgcgggatcagcggaagatccggcaagtcgtgccggctccggtggtgcaaccagctcgatcccgcagtcaagcgcaaacccttcaccgatgaggaggaccagatgatagttgctgctcatgcaatccatgggaacaaatgggcagccattgccaggcttctaccaggaagaacagataatgcgattaagaaccactggaattccactctgaggcgtcggggagttggacatgatacgattaaattagaatctggcagcttcatggaagatgttagcttggagaaagcaaaagcatcatcagaagacactctatcatgtggggatgtttctttgaaatcctcagaagggagagatgtcagttctatggagatcatggatgataaatctgatggcaaagcacaaactgagggtcaattacaccatgaagtcaaggacccacctaccctttttcggccagtagcacgcgtgagtgcttttaatgtataccactcatttgatggtacgcagccttcaacatcaattccaagatctgtttcaatgcaaggacccgttttacaatcatcaaaaccagatatggaattttatagagcgcttgaaggaatttttggtgaccagtcagtgcctcaccagtgtggccatggctgctgtgctgctccaaatggtagaaagtccgaaagctctttgttgggaccagaattcattgaattttcggaacctccatctttcccaaattttgagttggctgcaatagctacagacattagtaaccttgcttggcttaaaagtgggttggagagtagtagtgtcaaaataatgggcaacacctctggcagggtagtatctaatggatctcaagtacatattggccattaaagtgccaaatagatcatcattcctattctgagtgaggactggataatgggtatgataaaggctttagtaatgacaatctattttccttccaaatgtaattaggcaatcaaagttatgtgaatcactgctataatgtaaatggattcactaggtaaaaggaggttcataagttcaaggaacaattattttgttttttggggtgttgactgattaggacttgatttgggaccctgtaattgctaaaatgttcgtcgtaaaataggccaatagggtaaaattacttgcatatcagtcagttcgagttgctgctgtgatgctgttcactttctaagagtaaaactcatttatgttaaaaggcaattgcagcttagagaaatcaaatcagttattgttttttgttgtgatctgttgtg

SEQ ID NO: 28364 - DNA, 1405 bp, Glycine max
  Clone ID: TF_GmC1225_2
gtcactttacattggttgctagcaagtggtatggggaggcaaccctgctgtgacaaacttggggtgaagaaaggtccatggactgctgaggaagacaaaaaactcataaacttcattctctccaatggccagtgctgttggcgagctgttcccaagcttgctgggcttcggcgttgtggtaagagttgtcgtcttcgttggactaattatctaaggcctgacttgaagagagggctcctcacacaggctgaagagcagcttgttatcgatctccatgcccgtcttggcaacaggtggtccaagattgctgccaggttaccaggtaggacagacaacgaaattaaaaatcactggaacacccacatcaagaaaaagctccttaagatgggtattgatcctgttactcacgaacctcttaacaaacaagtctcatccaaagatagttcatcccctgcagagcatttctcacaagtgaataacattaacattcatcaggttgagcaaaatgatggggttctcaactcagaagagaattcaacctcatcaccggctgaaaattcttctggggaagaatcccttttggtggatagcatttgcagtgatgtttctctaattaacagcatgtggctggatgaaactcctctgatggacacattatgggacaatacacctaaagttgagaatgcaaataataacatgggcttaccaataggggaggataattgtgcttggttgttggactgccaggactttggtattcatgattttggcttcaattgtttcagcgaggttgaaacaaatgtactgcaagctataggcatggacagaaaagggctttaggatgcagtacatatggtaattaaagttagttgtccttaagaaacagagcatgcaatcaaaaaatatgtgtatatgtgaatgtgacaaaatgggaataaatcctctcgtgtccatgtcacgttcaaattttgtgtttataactttcttgatgaatattagataaagttctccttatttattatttgtcaagaaagtgatacacacgagatttgaacgtgattttgttaagttaaaatttttccctaaaggattaataaaatgccatggactcgaaattaggtttttggtgttgttgaattttatctagttattatgctacataatattcctggatggtagacgacgaacctttcctcttatcaggctcttccccaaccttttctccaaaaggattccgaacaaaatcccccaaatgacccccctttcgtcctcttgttaatgctgttagcttttgtgtatggttggccccagaaaataggaggagccaaacaaatagtgggttttgtgattgtgtaacttattgtaaaaaaatgtttaatttaaaaaaactgttaaatattcattt

SEQ ID NO: 28365 - DNA, 993 bp, Glycine max
  Clone ID: TF_GmC189_1
ggttggagagaataggatgggaaggtccccttgctgtgagaaagcacacacaaacaaaggtgcatggaccaaagaagaagatcatcgcctcatttcttacattagagctcacggtgaaggctgctggcgctctctccccaaagccgccggccttctccgttgcggcaagagctgtcgtctccgctggatcaactatctccgccctgacctcaagcgcggcaatttctccctcgaagaagaccaactcatcatcaaactccacagcctccttggcaacaagtggtctctaattgctggtagattgcccggtagaactgacaatgagatcaagaattactggaatactcacatacgcaggaagcttctgagcagaggtattgaccctgccactcacaggcctctcaacgattcttctcatcaagaacctgctgctgtctctgcccctcctaaacatcaagagtcctttcaccatgaacgctgccctgacttgaaccttgagctaaccattagtcctccccatcatcctcaacctgatcatccgcacttgaagacccttgtgacaaactcaaacctttgctttccctgcagtctgggtttgcataatagcaaagattgtagctgtgccctccacactagtactgccaacgctactgctactggctatgatttcttggccttgaaaaccaccgtcgttttggattacagaaccttgcacatgaaatgaaatcatattactgaaatctctctctttctttctttctttcttttcttctctaatataatttcttacttacttacttacttacttacttacttgttaatggttgcaaatgataaaaaagttccagccagtacagttgaacatataacaaaagttcaattcatcacttcgatcgatggtagagagaattaccacaatcattcctcgtggaagcctttctaatattcccatgttcaagtaactgtgcgtaagaataaaaaattttcttgttt

SEQ ID NO: 28366 - DNA, 1572 bp, Glycine max
  Clone ID: TF_GmC1295_1
gcccagaacacctggtaccgagtcccacaggtagggagggtcctgtttttataactatggatagaaccttcttaaggctaatcaatgatataattttggaaactgacaagacaattgaagttagaggctgttccctttgacttgtgccatttcttctctcaataaacttctattgatgccccgctccacgttccattcttcagtatcctttgtagtttgaaccttcctcacactcccacttcagaaaccaatcaaagagagagagagagagagatgggtagagctccttgttgtgacaaggcaaatgtaaagaaaggaccatggtcaccagaagaagatgaaacgctaaaggattacatagagcaacatggcactggagggaattggattgcgcttcctcaaaaagttggtttaaaaagaggtggtaagagctgtagactaaggtggcttaattatcttagacccaacattaagcatggtcaattctctgatgcagaagataaaataatctgcagcctcttcgctagcattggaagccaggtggtccataatagcatctcagttgccagggaggactgacaatgatataaaaaactactggaacaccaagctcaagaagaaatgatggccatgaatccttcagtactccaaaggaagcctcaacaaattacccttttatccatccttcaaagttcagcatcatcattcagagacagcaacaacatctcatactaccaccctcacggttccttttcctactcatcatcaagtcttgtgagtggtaacaactcttctgctaatgctgattccttgtttcaagcacaagagagtttcatggaccccaagtgccaattcaaagatagcagcatctttgtgtctggaggtgaagccacagccatggccacggccactagttgcagctcttctgatgggagctgcaacaaccagataagccatgtcatggagcctgcagagtttggtgatgcaagttttgttggtggggccaataatcacatctacagtggggaggaagatgataataatactcagaagttgatgatgttctccaatgctggtggtagtgttagtgggtggacaggcaaacaaaatggattattgtgggaacaaaatccattggattatggtcttgaggaaattaaacagctcattagcactaataacagttgcaacaactttttgtttgatgacaagaagacacaagaaagagtcacgtactactgatcgatgatgatttcttcagacttatgacttgttggactcaatttgtttgtgcttttgtgggatgggtttttagttttagtttttactttttagtattgaatagaattgaaccactttctttgtttgaaagtacatttaaagttttctttttgcagttactttgccgaggtaaccctacccattcacattcaaaccatacacatcccctaaggaagataaagaaaaggaggaacgaggaacctttgatatacttaacaagagttccctatttgtaattcttttatcttccaaacatcatcataaagaagcttgcagcagcagtccactaat

SEQ ID NO: 28367 - DNA, 660 bp, Glycine max
  unsure (1)..(660): unsure at all n locations
  Clone ID: TF_GmC2603_3
gcttgagagaaaaaatattccatttccagaattagtagcactagtgctctcttttgtttcgaaaaaaatggttcaacaggaagtgcgtaaaggtccttggacagaacaggaagacttcaaattggtgtcctttgttggattgtttggagaccgtagatgggactttatagctaaggtatcaggtttgaaggtggcgggagaaagtaaaataggcattagacaaaaaaaatcaaatgcttatttgggcatcatgctacaaaaaaatatagattatggaagaagaagcctttaaccacctcattttgttgtaggtttgaatagaacaggtaagagttgcagattaaggtgggttaattacctacatcctggcctcaagcgtggaaagatgaccccccaggaagaacgccttgtcttggaacttcactcaaaatggggaaataggtggtcaagaattgctcgcaagttaccagggcgcactgacaatgagatcaagaattactggaggactctgatgaggaaaaaggctcaggagaaaaagcgaggagaagctgcatcgtcatcaccaacaccctctagcgttgattcctcaatatcctcaaacaaccatgcagtggatccacatgcttncaagtaggcaggagaagagagcttttatgacac

SEQ ID NO: 28368 - DNA, 939 bp, Glycine max
  Clone ID: TF_GmC861_1
caaaccccaaaaaaagaaaagatgaaagcaatgaaacgctgctcttcatcatcttcctcttcttattcttctgcttctgagtccaccccacaaagcaatcaaaataaaaatagtaataacttttgctacaaaataaaaggcccatggagtgccaaggaggatcggattctgaccggcctcgtggaggcccatggcccgagaaactgggcctcgataagccgtcacattaagggtcggtccgggaagtcctgccggcttcggtggtgtaaccaactgagtccaacggtggagcaccgacctttctccacgcgcgaggacgaggttatattacacgcgcacgcgcggttcgggaacaagtgggccaccatcgcgagaatgctaccgggccgaaccgacaatgccgtcaagaaccactggaacgccacgctcaagcggcgtcgttttggtgctgacgtggtggtggaggatgatccgttgaccgcgttgactctggcgccgcccgggagtggttgttgtggccgtggagaggagcggcggggagtttcgccggcggggttttgggatgcgatgcgggacgtggtggcgagggaagtgagagggtacgtgtcttcctcgttttctgacaacttggcctctaatgagggattatccaaatattaatgtttttttttcatgatttattaagggaatttatgtggtttagttattattggacttcaggacccataaggggaacagttcagtgtaaaatttgtattattgattaattaaaaatcaatttaaatatcatactactatttcatatgtaattattataaattttaattatgtaataattgattattaagtgatattataaatattagtatatgtaaatttttttagcgaatggtatatgtaaatatttaaatcaacttataataataatttcgtttgatt

SEQ ID NO: 28369 - DNA, 2366 bp, Glycine max
  Clone ID: TF_GmC875_1
ggcaacagtctctgatgagctgaaggtagtttgcagccaaaaaagatattgaagcaagcactgcataaggggagataaaggtaggaaattcacaagagtccagctttttgaattctgaagcaaaatcactattgaagttttacacacctcagtgtgttttgagctttaattggtattgaactctgttctgcttcctggtattttctgtctctgttggctctacttcaggactggaccatagtccaacatatctgctccaatagtttagtatatcatcaaagttaatattaaggtactcatcatataagtaatctagatccataatttccatgaaacaaaccagagtttgacctacattgttgaactgtcttataggccactctaattgttgtgctgcggattgttccccacctcaaaccagaccactgctgcctgcttggactgaagccgcaggtcggtcattaactgcagctctaattaaagattgaagcattgcacgacacagataatttacggacggcacggtgacgtggaatcttcctccaatagcaagccatgccatattttattttattccttcctcctaggtgttctgagatagcaggggtaccgaactttgttcttgttccagttcttttgtgcacatcatctgctcatttatagagctccgcatccggtccctatgtacatagagtagagagcgcttgaaagaaggctaatcaaagtatgcaccatgggacataaggaaacctttcctctagatgctgtaacaaacctacatagttgattcttataagaagagatgactgtggatgaaattggtagtcgctaccagtggagaaaagaacaggataaagcatttgaaaatgccttggcaattcaccctgaggatgcttcagaccggtgggagaagattgcagctgatgtaccagggaaaaccttggaagagattaaacaccactatgagctcttggttgaagatgttagccagatcgaatccggttatgtgcctttaccatcttataattcttctccagagggctcaacaagccatgctagtgaagaaggagctggcaagaagggaggccactcttggaatagtaataacgaatctaatcatggaactaaggcttcaagatcagatcaggaacgacgaaagggtattgcatggacagaggatgaacacaggttattcctccttggcttggaaaagtatgggaaaggtgactggcgaagtatatcaaggaactttgtggtgacaagaacgcctacacaagtagcaagccatgcccaaaaatacttcattcgtctgaactcgatgaataaagacagaaggcgatccagcatacacgatatcaccagtgtcaacaatggagatgtttcagcacctcaaggaccaattactggtcaaacaaacggttctgcggataattctgctggaaaatcaaccaaaccagccccaccagccccaactgctgccttgggtgtaggaatatatgctggtcctaccattggacaacctataggaggacccctcgtatctgcagttggcaccccagtgatgaaccttcctcccccagcacacatggcatatggtctcggagcaccggttcctggggcagttgttcctggagcaccaatgaacttaggtcctgtgccataccctatgccacatacatctgctcgtagatgaagttatgttcagaggcctaatgtacaaaaagaaaacagcagattagaaggcttatgaatttaatgtaattctttacctattcctatagctgcttatgtgcaacagttttatgctccatcaattatttcaaataagggatactaagaagcattagaatgtatctacattggctgccatggatggaatatctgacagccttgacataccacagcgtgaaagtaatgttgtcgttagtcatataaagtggcccattctgtagatgaaggttctgtggcaggcttatgaatttaatgtaattctttacctattcctatagttgcttatgtgcaagagttttatgctccatcaatttcaaataagggatactaagaagcattagaatgtaattgcatcggcttccatggatggaatatttgacacccttgacataccccagcgtgaaagaaatgttgtagttagtcatataaagtggcccattctgtaaaggaaagttctggggctttggtaggttattgttgtattttgatcccttggtttctgattttccgtagggttttttaaatttcccatctagcttcccttattatcagattagttgctatgattgccatgatatattatagcagatatttgtccattttggcaacattcccatcaaaatgtttcccttaag

SEQ ID NO: 28370 - DNA, 2556 bp, Glycine max
  Clone ID: TF_GmC1021_1
ctaagatggggcataacataaagattaggcaggaagtcaagactcccccctttgatgatcaaatcatcagcttatcacagtcatatgatactgttggaaataaaaatttgtttgtgcagtcaattgctccaaagaacccacgggcgccaaacaagcctatgcaacctcttagagccccggcgatcattcgcagctcgccagtgaatgcttggtatgggaaagatttccactttcatgggatcgtacaaaatggtctggtgcagaaagggcaaccctcttcataccagttaagcgtcgactcccaaagtcagtgcttcttctatcacattctgttttacttcggggtgctgctgagccgatggacatcgcatgggtgatgtaattgcatctgtttaagatcttgcaattacacctgagacgattagacaatcttgaccgaaagtgaattggaatctgatggcgtcgctgtttgtccgtggccggtcggctgctgtacgtgtttcgtcccggtcctatggtggagatcctttgatcaaccaaggtgcatggacgaatgaagaggacaaatctcttttacttattgtccaagatattggcatcaggaactggtttgatattgccacatcattgggcacaagcaggactccatttcaatgcttagcacgattccaaaggagcttaaatccttccatgctaaatagtgaatggactgaggaagaagattctcaactctgttctgctgtggcaagttttggtgctagggattggcaatctgtggcttctgttttagaacggcggacaggaacccagtgctcaaatagatggaaaaaatccctttgtcctgagaagaaagggagctttacacgagaggaagatatacgcataacagtagcggttatgctttttggacgaaaatggaatcaaatagctaactatgttcctggccggatccaatctcagtgtagggacagatacctcaattgtcttgatccttctttgaaatggggtggatggactgaggaagaggatttaagattagaagctgcagttgtcaagcatggatactgctggtctaagattgctgaagaagtgccacctcgtactgattctcaatgccggaagagatggaaggtgttatgtcctgaatatgttcctttgcttcaagaagcaagaaagaagcaaaggtctattattggttgtaactttgttgatcgagaatctgaacgcccagccattacactgaatgactttctacctttacccgtgccagctccaaaatctgatgttggtgcttcaaatctccgcaagaaggccaagtcaagcaatgttcccaaggaaatgagtaagaaatgcaaaaagagctcgacttcataccaaggaagtacaagatacagaggtatatagtgatgatgggatcaagacttatggtgaagtctctgcatgcagcaatgttcccaagaagatgaggtccaagagacatacaaaaaaaactcgaaattgtcccaaggaagtagtggatatatattgtagtgagaaggtcaagacttgtattgagagttcagaaagtcaatctacctgtattgcgagttctggaaatcaagattcagacaacataactattgcatgctttttacgcgataaatcaaaggagatgctatctagatttaccaaagatttgagtcaggcttccttctcctctaggagtatagatgtttctaataagcagaatgttgcttctgatagacgagtgggaaaaccagaggatgcaaacactttgacaggtggtgatcatgaggaaatgacccttgcatgctttctgggaaacaaatcaaagaaaggaagtcaagctgctaacggacgtggtgcatgctcttcgaccatcatcatacctgatgatagtggactgtcaatgtcaaagcatgttgaaaaggagactgttttgcatggtggtgttgctgaaccaatggacatcgttgtggaagaaaaggatgatgagcttcttacttccttcttgcaaaacaggccaacgaggcagcgaaaacgacccagtaggtttttataaaggtgatgctaattatccaaattttggcctggtatacttttttttttttccattcctaggtatgaatagaagacaattaattaaaacctgtgccgtgaaattgggtagtggctaatccatatacaaaattgttgaagtaattgaaagccaactttgccatgatcttgaatttgaagttggtttaggtacagtgagtttcgagttccttatgctgagcttgggcctgtgtacagattttcggcctggcgcaatttgtataccaaccgattgccataattcttctgttcccagtttatattgtttctattcttaaagatctcaggcgtcaatgtgaagcgtttggattttggaaaactgatgtcgagtttctttaaaaactgattgagtacagaatcataacaaaagttattccaaaaccatcgatagagtacgggtttgaactaatatttttgcaattttaaaatttatcttgttatttttttttatcaaacaaa

SEQ ID NO: 28371 - DNA, 2366 bp, Glycine max
  Clone ID: TF_GmC5903_1
cccacgcgtccgcccacgcgtccggatttttcgaaaccttagcttcagagagagagagagagacaaagagagagaagcaatcgtggtctctcttctatgagcttcacttcgattcccgccacttctctgcaagcataggattttgggttcttgtgtgaaggatatggctgaggtggtgaaatcagaggagtgttgtcaggagaataagcaatctactgctgcttcttgctcctctgtatccgaaggcagtggcagtgcaattcacaagtctccggggagatgtagccctgcatccacatcgccctcacatcggaggaccaccggccctataaggcgtgctaagggcggttggactgcacaagaagatgagacattaaggaatgctgttgcagtttttaagggaaagagttggaagaaaatagctgagttttttcctgatagatcagaagttcagtgtctgcacagatggcaaaaagttcttaatccagaacttgttaaaggaccttggacacaggaggaggatgataaaattgttgaactggtgtcaaaatatgggcctacaaaatggtctttgatagccaagtctttacctggtcgaataggcaaacaatgtcgagagcggtggcacaatcatcttaatcctgacataaagaaggatgcctggactttggaagaggaattggccctgatgaatgctcatcgtatacatgggaacaaatgggctgaaatagctaaggtccttcatggaaggactgataatgcaataaagaatcactggaatagttctttgaagaaaaagttggatttttatttagctacaggaagacttccaccaattcctaagaatagtccacaagttcctgtcaaagatacaattagacgttctgctagtaaatcaatgcttggttgttcaaataaagaattaaatgcagctgttgaaacatcatctgaaactacagccattagtaagctagatgacagtggcaggaatcagtttgagtcctcaggcacagttagagaagttggtgattcttcaagtgttcctgcaaatgactctgccgattctgactgcgtagaatgcaagcctggatcatccaatatcaaccccagctgtagcaactcagaacacgtgtcaagagctaattttggaacaacttttgggccaatatctgagaattctggactcaatggaaactcaacttttgagcattgtacaaacaatggtgacaggagcagtaccaggttaatcggaacatcttcacaagaaaatccaacctgtggttctttgtgttatgagccaccacagttagatggttcagttcccatagattctctttatttaaattatacttgccagcagaatgagtactgtccgagtccaacgatgtcacctactggtttcttcactccacctcgtgcgaagggtagtgaattatgcactgagacacctgaatcgatcttgagaaaggctgctaatacttttccaaatactccttccatattgaggaggagaagaactggggcccaaacactcaccagtcccactaaagttttgaaagtagataataatccacatacttctaataaaacagagagaaccaatgatgattctggttctgggcatttctccgggagtccagcaagccatggctatgggattggcattcccaacaataaggcattcaatgcatctcccccatacaggttaagatccaagcgaacagcaattgtcaagtcagtggagaaacaactggagtatgcatttgacaaagagaagaatgacgacaagaggagtaatgtgatgactgaagatcgtctgcatgaaacaaaattggttgtgacatagtgcataaattgggacttgcttttgaaggtagctgattgtttctctaaattgtttgacaatgtttaccaattttatgaagaaaattcagtgcacgggtcacaatgacttggcacttctccacacttgatagttggctgtcatttccatcacacttcaacaaaattcagcaacagtagataaattccatttacttgtggatacatatagctagttgtatctatcagatttgtacagttgtcttaggaaaaataaattttctaatgttttatcaatgtttttagattccttcaatcctttctctaaataatttatggcctgacctacttaataagtgtgtaaccttacattgttgcacccgctagtttgatgtacactatacattgaaattactgtttgacaatcacagaaaggtgttcatcatgaaattatcatcaaaatcaaagataaattaatgcaaaaaaaaaaaaaaaaaaaaaaaaaaaaaaaaaaaaaaaaaaaaaaaaaaaaaaaaaaaaaaaaa

SEQ ID NO: 28372 - DNA, 1495 bp, Glycine max
  Clone ID: TF_GmC596_2
atatgcgaaagccgagggagaccaaaaaacaaaccaaaaaccatcatcataacccaaacccaacacaccatagcacagcaccacctcgtatcacataataacaaccttaaacccccaaactttcatgtctcggatcccgtgattcggatccccaacaacaacaacgccaaaaacaaaaaacaacctagtattatttggatccggttcccatgacgcggcgttgctcgcattgcagccacaatgggcacaactcaagaacttgccctaaccgcggggtgaagctcttcggggtccgattaaccgatgggtcgatccggaagagtgctagcatgggcaatctaacccactatgccggttccgggtcgggtccactccataccgggttgaataaccccggttcgcccggggaaacccccgatcatgccgccgcagtcgccgacggttacttgtccgaggacttcgttcccgggtcttcttctagctcccgtgaaagaaagaagggtgttccatggactgaggaggaacatagaatgtttttactcggattgcagaagctgggcaaaggtgattggcgtggaattgcaaggacctatgttatatcaaggacacctactcaagtggctagccatgctcagaaatatttcatcaggcagagcaatgtgtccaggcggaaaagacggtccagcttgtttgatattgttgcagatgaagcagctgacactgcaatggtacagcaagacttcttgtctgctaatcagttacccactgaaacagaaggcaataaccccttgccagctcctcctcccctcgacgaagagtgcgaatccatggattccacaaactcaaatgatggagagcctgccccatcaaagccagaaaacacacagtcatcttatccaatgttatatcctgcatattattctccggtgttcccgtttcctctgccctattggtcaggatacagtccagagtccaccaagaaggaggagacacatgaagtactgaagccaactgcagttcattctaaaagccctatcaatgttgatgaactggttggcatttcaaaattgagtttaggggagtctattggtgactctggtccctcctctctgtctcgaaaacttatcgaagaaggaccctctagacagtcagcttttcatgcaacaccgacatgtggcagttcaaatggcagtgccatccatgcagtttaagcgtgtgcctcatgttccgaggaagggattgttatgtgagcattgttgattgatgggcgcgcatgaatgtggtcttgtgttcatcaatacatctgtttgtggggtaacctaaataattttttttttttggcccattcacagtgattaacctagtttgtttatttgctggtaggcagtagcgtctaggagttactttgggtctaaagtaaaacttttatgtttgttcagtgattttatttgtcagggttatgtaaagttaatgttaattgtgcagtttgacaatc

SEQ ID NO: 28373 - DNA, 898 bp, Glycine max
  Clone ID: TF_GmC1812_2
gccatgtgtacttcaaagagcgtgagcagttctagtgaagatgacaatgaacttagaagagggccttggactcttgaagaggataattcgctctcccaatatatttctagtcatggagaagggcgatggaatttgctagctaaacgttcaggattaaagcgaactgggaaaagttgcagattaaggtggctaaattatctaaagccagatgtaaaacggggaaatttaaccccacaagagcaacttataatcctcgaactccactcaaagtggggaaacaggtgcttatcttgtgcatttgattcttgagctccacaggttttaaattgtggtccaggttgtgcttacagtcggcgttttatcgcgatttctttgtattgtgagaaattgtagacaaatgcgaccaatgcagccttgaaacggtcacaaagactctcaaagccttgaggtcgcggccaaaatcgtgatcacatactgttttttaaaacctgcctcttcaaaatgctggtagaagcaaagatgcaaatcttgccactatcaacaagcatgctttccattccaaaatattgtcttttctctggattttcatttctttctttaatgactgtaggtggtcaaaaattgcacaaaatttgccaggcagaacagacaatgaaatcaagaactattggagaactaggattcagaaacaggcaagacatttgaaaattgacactgacagcagagagtttcaggaacttgttaggcgtttctggatgcctagattgcttcaaaaagccaaagaatcatcttcttcagccatgtcaattcaaaaccaggcaactcctatgccttttgatggtgtttctcagcattcaactgttgggaccataccatcacattcacacaccccttggca

SEQ ID NO: 28374 - DNA, 1138 bp, Glycine max
  Clone ID: TF_GmC105_1
gggtgttttgagttttgatcaatgagactagccatgtctactccttccaagagcataatctgttcaagtgaagatgattatgaacttagaagagggccatggagtgttgaagaggattatcttctcacccattacattgccaatcatggtgaagggagatggaatttgctagctatacgttcaggactaaggagaacaggtaagagttgcagattgagatggctcaattatctaaagccaaatgttaagagaggaaatttaacctcggaagagcagcttttgatttttgaactacactcaaagtggggcaacaggtggtcaaaaattgcgcaacagctgccaggcagaacagacaatgaaatcaagaactattggagaacaaggattcagaaacaagcaatatatgcgaaatttgaggatcacagaagagcaggatttgtagaatttgtcaagggtctacagatgacaagatgtcttcataaatcacaagaatcatctccttcggccatgtcaacccaagaccaagcaattcctttaccttttgatggtgttactgttcctcattattcatcatttgggattgggacaacaccaacaatacaaatcacttgccatggagatctcaatcatttgaatcagcatgagcagaactcagactctgaacaccacaatagttcatgcatttcctcttcagaatcagcaaatatcccaaatatgagtcagccttttggatacactactagtcaatttcaggccttagataactgtgactttggcatgtgtttatatgatggctatagcatagataacaattcctatgacagggatgccttgaacctgacaaccacaatggttgctgggaatctggaactcccagtgtttgattgccaaacattagaaaccaataggctaaacaaggaatttgcaagtagcacatggagcatggatgaattatgacaatttaggaacatacaaagattatcatttagattctagagtatctttttagaaccactcactatctcttttataatatgtagtgcttgtcattagataatcgattattcaatagcttagctataaatataaatgtaaagactaaagagtagttgttttataatttataggacatttgggc

SEQ ID NO: 28375 - DNA, 2555 bp, Glycine max
  Clone ID: TF_GmC1241_1
actttagacacatcacggcgtactccaatatcagacaaagctcgagccgaatcggctcaaccccaaacaacacccctcctaatcctctttttctctaacagaaagaaaaactcaacacaacaccccctctccaccctctttttcttttaatttctcatcttatctattaatcttatatacatatatataaagacatagataatagtcatatagatataattatttcgttatattttccttgcatgggctgttaagatgtctcgcacgtgctcacagtgcggcaacaacggccacaactcacggacatgcaccgacggtggcgccgccgggtctccgagggagaacggcatcatgctgttcggcgtaagagtcatgacggaagctaactcctccttcaggaagagcgccagcatgaacaacctctcacagtacgacgcggagttcaacgccgccgacgccggctacgcctccgacgacgtcgttcacgcctccggccgcacgcgcgagcgcaagcgaggtgttccttggacggaggaagagcatagattgttcctgttagggttacacaaagtcggaaaaggagattggagagggatttctagaaacttcgtgaaaactcgcacgcctactcaggtcgctagtcacgctcagaagtactttctccgccgccacaaccagaatcgccgccggcggagatctagcctcttcgacatcaccaccgatacggtgatggaatcttctactataatggaagaagaacaagtgcggccagagacggtggcgacgccgctccccgtcgcatatccggggtcgcattacagggcttttagccggcgcgtgttttccgatagctccggtggtgttgccggtgagtggcgagagactaatcaatccgatcaggccgacaccgattttgccggtgcctccgtttacgatgatggctaatttgaacttgttagagaaagcttctccgacaaatctcattgagcctttgccgttgtcgttgaatctgccatcgccgacgccgcggtctcaggatcagtcgtcggcgagtagtgggcactcgtcaccgtcgtcgtcgtcatcggcggcagcttttcaggctatgtctgcagcgaagttcggcagcggcggggatagtatcatcagcgttgcttgaaaagaaggaaacaagaaaaaaattagtgtcattaagttattaattaagtatggtcttagtagttaatttgcgtgtgtaaattaatgttacttaatcgggcatgtatccaagagggggaaaaattgaagatatgtgttggggatttattgattattacgaaagataatcataatataggtaggagggaggggatatttgaattaatgagtataatggtaattaattatgatttggaaaaataaatatatactatgggtttaggttatgtaggtaattaggcaatttaattgctggtttcagtgtacaggtttagtagaatttagaattagaaagatgggttgtcatattctgtagctgttgagggattcttgtttctgtatgtatgggggagtgtgagcgtgaaatgatagggcaccgggtactcttgagatgcgactggtctgtgtaatgccactggggtcattaaaatattccttagattagattagacaaaggaatatattatgcttaccatttttttttagatttagtttctgtgttcttggacttgggttgaaccaagaagtattcgaatgcaacacaatctaggaccactattacgttggaatgaaaagaatacaacaaaaaaactcttggttgaattaaataaaagctaacacccaaccaatgccaaaccactaaaaactggtggtcataaaacgaagcggtgtagaaactaaagtactagcagcagctaagtaagatgctgcttgcccactgcgaccaacactgacacttgtggatacaagaagacctgttttgcagtaaatagcaaagtcttcacagttattcttgaaaatgttgtagacaccaaacccattttcaagaagaaatgaagaacgatgaaggacatcttcagttggatcagaaggagcaagagtgcaggtgcctcctcgagctttggctagaaaaaatgcaggtgaaaccccatattcaaagatgtatagattaccaccataaaggaaacaatccaaacaggaagagatgacaccatcagtcctagtttgatcaccgcatcttgggcacggagtgtcggaagaatgagagggagatgaactgaaaaggagattgtccaacacagttcctgttccaatttcttgacctgctcctctggtaaagtggatcaccattccatcaccgacatatattccgtggtgtgcatagatgtacgcttgcctccaagagtaaatgtgatcaccgggcttcagttgttcccgatcgatcatattggacagcactcccatttcctcttcctctctttctctctctatgaaaactgaagcccaacgaaaatggtatgaataaagaatttcagattacatcctcatccctgatttctgttatggtgcactctcat

SEQ ID NO: 28376 - DNA, 1454 bp, Glycine max
  unsure (1)..(1454): unsure at all n locations
  Clone ID: TF_GmC1241_2
ggtaagtagttcttaagaaattaacaatcactttccattaagtgctgtttggtttgagggatgattaattgcgatggagtttttggattggtgatcgaaggtgttccttggacggaggaagagcataggttgttcctgttagggttacacaaagtcggaaaaggagattggagaggaatttctcgaaacttcgtgaaaactcgcacgcctactcaggtcgctagtcacgctcagaagtacttcctccgccgccacaaccagaaccgccgtcgccggagatctagcctcttcgacatcaccacggatacggtgatggaatcttctactataatggaagaggaacaagttccgcaagaaacgatggcggcgcctatccccgccgcatatccgccttttcccggcgcgggttttccgatgagtctatctccggtggtgttgccggtgagtggtgagagactgaccaagccgatcaggccgacgccgattgtaccggtgcctccgtcttcgaagatggctaatttgaacttgaaagggaaagcttctcggacaaatctcattgagcctttgccgttgtcgttgaatctgccatcgccaacgccgcggtctcaggatcagtcgccggcgaatagtggccactcgtcgccgtcatcgtcttcggcggcggcttttcaggctatgtctgcagcgaagttcggcggcgggggggatagtatcatcagcgttgcttgaaaagaaggaaacaaagaacaaatgagtgtcattaacttattaagtatggtcttagtagttaatttgggtatgtaaattaatgttacaaaatcgggcatgtatccaacagggaaaaaatctaagagatatgtgttggagatttgtttattacgaaagatgtatgatataggtaggagggagaggatattagaattaaatgagtatgatggtaattatgattagaaaaaaataaaataaagagatatgtatggtaattaggttatgtaggtaattaggcaatttaattgctggtttcagtgtacaggtttagttgaattaaaaaagatgggttgtcatattctctagctgttgagggattcttgtttctatatgtatgggggagtgtgaccgtgaaatgatagggcaccgggtactcttgataagcgattggtctgtgtaatgccactggggtcattaaaatattgcttagattagacaaaaggaatatttcatgctcaccaaaaaaaaaaaaaaaaaaaaaaaaaaaaaaaaaaaaaaaaaaaaaaaaaaaaaaaaanaaaaaaaaaaaaaaaaaaaaaaaannaaaaaaaaaaaataaaaaaaaaaaaaaaaaaaaaaaaaaaaaagcggngttnnaaaaccccngtttttttccctttttgggggggttatttgggccgtgtggggtatggggggtttgagggggtttggggggaaattttgtt

SEQ ID NO: 28377 - DNA, 661 bp, Glycine max
  Clone ID: TF_GmC1241_3
ttattcggctcaaagaaaaactcagcacaacacccctcccaaccctctttttctcttaatttctcatcatatcatatctattaatcttacacatatattaagacatagatataatttttttcgttttatttttccttgcatgggctgttaagataagatgtctcgcacgtgctcacagtgcggcaacaacggccacaactcgcggacatgcaccgacggtggcgccgccgcttcctgcggcgggtctcccagggagaacggcatcatgctgttcggcgtaagagttatgaccgaagctaactcctccttccggaagagcgccagcatgaacaacctctcacagtacgacgcggaatccaacgccgccgacgccggctacgcctccgacgacgttgttcatgcctccggccgcacgcgcgagcgcaagcgaggtgttccttggacggaggaagagcataggttgttcctgttagggttacacaaagtcggaaaaggagattggagaggaatttctcgaaacttcgtgaaaactcgcacgcctactcaggtcgctagtcacgctcagaagtacttcctccgccgccacaaccagaaccgccgtcgccggagatctagcctcttcgacatcaccacggatacggtgatgggaatcttctactat

SEQ ID NO: 28378 - DNA, 462 bp, Glycine max
  Clone ID: TF_GmC421653_1
tcctaaatccaatgttagctagctagctcttttaagccgtgttctcgccctatataaaccaccttctctatcacacgcttgcgtgggcggacgcgtgggattttttcacaaccacctctttcaattctctcctctcttattccaaattcaaattagaggaaaaagggtcaaataataattaagtgtaatatggatacgatcagtgttcaggcgatgagaagcttatcagatagtgactcattatcatctgcaacatatgcaagtgaagaagatatgaaaattaagaaaggtccatggactgaggaagaagattctgttctgatcaactacgtcaacttccaaggcgaaggtcaatggaactccctcgctcgctctgcatgtctaaagcgaacgggcaaaagctgcagactgacatggctgaactatttgctaccaaatgttctacgtgggaacattaccctt

SEQ ID NO: 28379 - DNA, 471 bp, Glycine max
  Clone ID: TF_GmC142751_2
tctttctttacctattctctcccgtctcaaacattttctcctccatctctcgtcagattcaagatataactcattgagcaaagtagcttataaaatttgctcaacatttattagctcatcaaacagaactacttaattagctagctagcagtatgggaagagcaccttgttgtgacaagaatggtctcaagaaagggccatggacaaccgaggaggaccagaaactcattgattacattcagaaaaatggatatggcaattggaggacactcccaaagaatgctgggttgcaaagatgtggaaagagttgccgtctccgttggacaaactatctccggccagatataaagcgaggtcggttttcatttgaggaggaagagacaataatgcaactacgtttcattcttggaaacaagtggactgggattgcactcgctttccaggaaggatccacgatgaaataaagaacta

SEQ ID NO: 28380 - DNA, 1192 bp, Glycine max
  Clone ID: TF_GmC850_1
gcagcaacaccaaaaccaaaaaggcaatatgggcagggctccttgctgcgacaaagcaaacgtgaagaaaggtccatggtcaccagaagaagatgctaagctcaaatcctacatagaaaagcatggcactggtggtaactggattgctttgcctcaaaaaataggccttaagcgttgtggcaagagttgccgccttaggtggctaaactatcttcgccctaatctcaaacatggtggtttctccgtagaagaagacgacattatttgcagcctttacgtcagtattggaagcaggtggtcggtgattgcagctcaattgccaggaagaaccgataatgacataaagaactactggaacacgaggctgaaaaagaagcttctggggaagcaccgaagagagccacgtaatagagggaattacaacagtgttaagcaagaaaatgatgttaatagagggagtggtactactgatggtgattcttcttccttatctttgcttcaggaaaatggtagcactactcatcatcaagaacaacatcaacagcaaccatgttggccacagaatattaataacatgcctgtgctaccactacaagtacctttgccatacaaaaaccaaggtccatgttttaacgaccaagattccctcaaaaaactccttatcaaactcggaggaagattttcaggtgattcttaccatcctacccttgatggcttgaaccttgaattctcatcacatgggcaacaaatttatcaagaacaagtccatgttggctcttctgctgcttgcattagtgccactattaacaacaacaatgaggtacaatttgcacaaactggtcaataccctggagttgataacttggtgcaagggcaaggtggtaatttcactccgtcgtttgaggaaatggtgtcttcttctaattatccagatggtttagagttcttgtataatgagggcatgatcgaccataagataatagacactactactaccacaacctggggtgaaactagcactccaatttatcatcatcatgattcacttgcttccacttaccaaggtcaaggtgtgatacaagaatgtgttttgcaagattttagctaccccagggcacaataacatgatcttgtacatattttgttatttttatcattattaacagctgctactagccatttatcacaaaaa

SEQ ID NO: 28381 - DNA, 1415 bp, Glycine max
  Clone ID: TF_GmC1872_1
acatgctcgcgtccgttaagaagtttcattcggatcgtgagagaggttaagaagttttctagagttgttgtttgatagagaaagagagaaaatgggaagagctccttgttgtgacaaggcaaatgtgaagagaggaccatggtcaccagaagaagactcaaagctgaaggattacatagagaagcatggcactggagggaattggattgctcttcctcagaaagctggtctaaagagatgtggaaaaagttgcagattgagatggctgaactatctaaggcctaacattaagcacggggaattctccgatgaggaagacagaatcatttgcagcctttatgctaatattggaagcaggtggtcaattatagctgctcagttgccaggcaggactgacaatgatatcaagaactattggaacaccaaacttaagaggaaactcatggggttgcttccttcatctcatcaaagaatagcaccctatcaacaattctcctctcaaaacccttcatcatttccttctcactcatcgctatcctcttcacaatatagggactactactacaactcctctcatcattattacatcccagcaccaacctcatctttcacatgccttgaaccaatttctgctccttcaagtaattacacaaacacaacaacaacctccaactctctctctttttaccaacaccaagagcccttggtcagtgttagtcccaggcagtattaccccatcacagacagttccatgcttgtgtttggtagtgaaacaagttgcagctcctctgatggaagctgcagtcaggttagccttggcagagagatcaaacaagaagacatggggtttcagaatttcatgtttggagatcatcagaacatgaacaaattcatgaacattaatcatgatggaggtgaagaatatgtgaaccaatggacacagaggccaaacgggtacatttttcagactcaacaaacagcattggattatgatcttgaggtcattaagaacctaatttgtagcaacagcagtagtaatagtaataatgggtacttgagtgttgatgaaaacaagacggaggagaagggtgtgtactacaactactgcaactgaactgagtgcaactgatgaatgaactgactactgcaagtgatatcagagagatatgatcagtgagaagcatgggattgggaagattcagaaaagactttgaggttgtgtggagttctgtgttgtgttctttaatgaaatgagataattcttattttgacagtacatggtaaaagcttctttatatttttgtgtatatcccctaggaagtgatgatttgatgacgatgatgttagattttttttttgttaattaagtattctctccaatcagatattaatgttgtgaaaaacagccaatgtcc

SEQ ID NO: 28382 - DNA, 1122 bp, Glycine max
  Clone ID: TF_GmC482_1
ctcgagccgcttctggcttctgctgttaataacaaaaaaaaaaaggaagacataataacaaattatgcttatgatgattgatttaatgaaaaccctagttattatcagaaaaattagactcaatctctccacacacatatataaacccaaacaagtgaacaacactccctcctttgtcccattactagtacatacattcccctaaccaagttttaagtttttctcaacagaatggaagcaaccaacagaagctcttcctccacttcctcttcctctgattgctgctcttccgagtccaaccccaacaagcccgacagaatcaaaggcccatggagcgccgaagaggatcggatcctgaccggactcgtcgaacgatacggcccacgaaattggtccctcatcagccgctacattaagggaaggtccggcaagtcatgccggctccgatggtgcaatcagcttagccccgccgtggagcaccgccccttctcggcccaagaggacgacaccatcatcgcggcccatgcccagtatggtaacaggtgggccactatagcccgattgctaccgggccgaaccgataacgccgttaagaaccactggaactccactctcaagcgcagagccaaaggtattaacattaatgttaatcacgccaacaacgaagtggctgcttcttcttccgctccttctcgccacttcgacttcgaggatgatccgttgaccgcgttgactctcgctcctcctggtattgctaatggcactgtggcggaggacgccgtgccggaccatcgtgcctcgccggaggggttttgggatatgatgagggatgtgatcgcgagggaagtgagggaatatgtgtcttccaatttttctgataactcgggttttcattaaatcaatcataatcataattgttattatgcttcttcttttttctttttttttttttaactttaggcaaattattctgcaatttgattttgccttactggactttggaatcggatcagagaattaaattaaattagacccttctgacttttgctattcataacaattttctcttccggcgaatcatacttcgttttctagctaaaaaaaaaaaaaaaaaaaaaaata

SEQ ID NO: 28383 - DNA, 1692 bp, Glycine max
  Clone ID: TF_GmC651_1
acggctgcgagaagacgacagaaggggacacttcaacaaaaaaattacaaagcacgagggtctcgtttagcaacttgtaaaggacacaacagcatcacttacataacatgcacttccccttctccaccgcattctgtgttctctagtcaatagaaagtgagcactgaatttgctttgtgccgttcctgttttcttataatttgtgcatttttttgcacataaacaaaacccatgggaagggctccttgttgtgagaaagtgggattgaagaaggggaggtggacagcagaggaggatgagatcttggcaaaatacattcaggccaatggggaaggttcttggaggtcattgcctagtttggaaggattattaaggtgtgggaagagttgcaggctgagatggattaactatttgagagctgaccttaaaagaggaaacatttctgctgaagaggaaaataccattgttaagttgcacgcttcttttggtaacaggtggtctttgatagcaaatcacttaccaggaagaacagacaacgagataaaaaactactggaattctcacctcagcaggaaaatttacagtttcccaggtgcaggtgcaggtgcaagtgcagggatcatggatacacctaaggtagtatatattcctcccaagcgcaaatgtggtagaacaagtcgttgggccatgaagaaaaacaaaacatacacccaaaaagtcaatgataggattaaccagagacacacacaaattggtttccctcaacagaacagtgacaccgcagttccgacgccaccaactccgtctctagagagtgagggtttgtcaaacgccgttaatgacttcaaggtcctggacggtgacgtggcagagtttgatgagccgagaacggaggagctggaggcggaggtaaataaacgtgacaatagcgttggaggcgtggaagaaagtagtaataccgatgaagacatcttgggactgtgtgaactagagggcattaatgaggacagtgggatgttgttgggttttagtgacattttggaaagttgccttgcggaaacaacatgtggggtttgggacataagtgaagagagagaaagcaatgacgtggtggcggctgatgcttgtcgcgacaaaatagcatcgagtgaggaagggtcatgctcttccatgaatcaagactgggactgggagagcgtgttagagtttagtaacgctgttgataattgggaggaccaagacaaattgctcacttggctgtgggaggacgatgactgcaagagattgggagagacagatactcagatactacaaaacgacatggttattgattggtttctctcttgattcatccaagaataaaataggcttagtgtgtgtgcccccttggtcatgtttctttaatctgttcttcttggattgattagggaatgtgtaaacttaataaatactttttttagttacttatataatcatccttaagacacactagttaggaatactcttttccttttactttaatttgcatgtcacatgattcgaaaatatcatgcagaagaattggaccagacattagtcactgtagcattcctaggttgtttgaaaatatggatcttattatatacgagttagagtttgatttttttataattaatttatagtacataaataaatatagaattttctgtgata

SEQ ID NO: 28384 - DNA, 1250 bp, Glycine max
  Clone ID: TF_GmC1386_1
cgccaccttaaatataacaaatacttgtctggtaaatgtaagttttatcctcctatcctcttcacaacacttgacaaagtgatgatgagaacaccaataagcagtgatgaaagtggtttgaagaaggggccatggagcccagaagaggacaaaatattagtggatttcattgagaaacatggtcatggaagttggagagcccttccaaggcttgcaggcttaaacaggtgtggaaagagttgcagactgaggtggactaattacctcaggcctgacatcaaacgcggaaaattctctgatgaagaagagcaactaatcatcaatttacattcagttctcgggaataagtgggcggctatagcatctcatctgccagggaggactgataatgaaataaagaatttgtggaacacgcatttaaagaagaagctaatgcaaatggggttagacccagtgactcaccgtccaagaactcatcacctaaaccttcttagcaacctacaacagatattggctctaattaggttacagtcagatgctaataaactccaattattgcaaaacatatttgaagcctcaaactcagacccactgccagattcttcttattctttgctaaatgatgttttgggggggttgaataatcttcactccaatgatctccataacctttatgatggtaattcactttctgtccaaaactttgatcagaacttgaatggtggcagaaacgctgagccttcaccgtcatcaaactcgcttccaaatctggtttcagcctcacctgatcgttccccagttgttaaggaagcacaaaacatattggtaaactcgaaggacttttccacctccgcttttgagttaacgtggggagatttcatggatgaagaagaaacaaaccagacttattggaaaggttttatggaccaacattctaaccagacatggtcgactttcccatgatcacggaatttgagagctatcacagcaataacgggatttattcgctgttctatctataataaaaaaaaaatatactgttcatttagttatatataatggttggtttaatttgtatgtattatttgacgatggattgatttcagatccaaatatagaaagctcttgtattgtatattaaatgtacaacgtggaaattaaatcaatcatagaatagaggcctatgatgttctttttctttgtataaactatactataaaataaaatgctgtttgtaggctttccttctt

SEQ ID NO: 28385 - DNA, 1471 bp, Glycine max
  Clone ID: TF_GmC1766_1
gcacgcgggacgcgttccgtctcaaatatctggtatacgtttcgccacaaattccgcgattaacgctcccccaatccctttctctctaaaatctttgaaaatggtatccaaaaacccgaacccgcccgagggattctacttggatcccagtggtggcatgcctcttcctgggatgcctcccttcgcctccgtctccgccgcaaccgctgcgaactcgccggaggacgccgccaagaagatccgcaagccctacaccatcaccaagtcgcgggagaactggaccgaacccgaacacgacaagttcctcgaagcaattcaactgtttgatcgtgattggaaaaagattgaagcatttgttggatcaaagagtgttatacagatacgtagagaggcacagatatactttttaaaagttcagaagagagggacaagtgaacatcttccaccaccccggcctaaaagaaaagctgcccatccatatcctcaaaaagcttccaaaaatgctcctgtactctcacaggtatccggacgttttcagtcttcatctgctttgcttgaacctggatatatcttgaagaatgatgccccaccaatgcttaaaactcctattatgaacactgttgcgtcgtcctggtcgaacaacaccttgcaaactgccaatttatctcctgtgacaaaagtgaataatccttgcagtagcggtgaaagcactcctaaagtgtggccagttggtgaatctaatggtcaagggaataaaatccatccattgagagttcttccagattttactcaggtatatggcttcattggcagtgtatttgacccaaatgcaactgagcatctgcagaaactaaaaaagatggaccgcatagatgttgagacggtgctactgttaatgagaaacctgtccatcaatttaactagcccagattttgaggatcatagaaagctgctttcatcatatgaagttgaaccagagagagatgataactatcaacgcggatagacccatgcacgatgagcagttgaagagtgctaatgggatggaggcagaaaatggcttcattttccaccgattggatgcagtcagggtgctattattttccatgatgtgataaagatactgatggtcatggcaaggcaacaaactgaagacgtttgagtcacagctaatttttattctgctctagatttttattgctgttgctcgtcatcttagctatgcaaatcataattgtcatcattcattattatgtcatgtatatatgaatcagcctattaaaaagaaaataataatctgagattgtatagttattttcctagttctttgtaggtctgcacagaacctcataattgtgtactaaattcagcaaacacaaatatttgaacggaatatattctagatttgtgtaggtctgtacagcacctagatttgtgtgttaaattcaaccaagcatcaaatagttgaagc

SEQ ID NO: 28386 - DNA, 1479 bp, Glycine max
  Clone ID: TF_GmC205_1
gtcgagtgaaggcaagcaaaaataaaaatcaaagagcatagggagaaatatctcgttgcagattggcgtcgcgccccggtgacgatgaccccaagtacagatcaaagagaaaaagggcttcagagggggagaaatgggtcggtccagagttgcgttgcgctccgctgacgatgacccaaaccacagatcaaagagaaaaaaggctgctctgaatgtagaaaattcagaaaccttacctacaggccaaggagtaactactagcaaggtatctctctatcactgcaattattgtaacaaagatatttcggggaagattcgcatcaagtgtgctgtctgtcaagattttgacctctgcttagagtgcttctctgttggtgctgaggtgacacctcacaaaagcaatcatccatatcggattatgattggaatgcagatgaagagttgttacttctagagggcattgaaacgtatggatttgggaattggaatgaagttgcagaatatgttggaacaaaaaccaaatctcaatgtattgaccactataatgctgtatatatgaattcgccatgttttcctctccctgatttgtctcatgttatggggaagaacaaagtggaactctgtgccatggcgaagggacatgaagccaagaaagaattttctctgactgcagagcttactctgaaagaagaagctttgttcactgatcgaataaactatgaagaatcaaagaatgcagaaatcaataatcaaactatgtctaggttaacctcagcatgtggcaaagcttacccaagtacaattaagaaggcatccaacgtgatccaaaataatggtggagttaaggtggaagagtctcgagcagattggagcattggagagaagaaacctaaattatcaggcgaagataggccttctatgacagatttgagtggatacagttttaagcgagaagaatttgatgttgaatatgacaatgatgcagaacaagtgttggctgatatggaatttaaggacactgatactaaagctgaatatgcaatgaaactgcacgtgctccatatctactcaaaaaggtaaccacagataagtggatgaatattattgatatgggttatgtgattgcatcaaggtatttctaagcaatggttgtctcatgttgtcaacaactttgttatggtcaacacattgtgattatcaagcaaaacagtggcctactccttatattagttgaatgtaccagtatactaattacatgaggttgatcacacaacatgttgatttaagagaagattgaacattttgttattgtttgaataacttacatagttatgacaacatggataatgcatgtaacactttctaatcatatttgtataatgaacacaatgttttcgatcgaacataatagtcaaatacaaaataaacgcaaatgttaaccacagtcaaatacatagtcaatcaaataattaaagtatt

SEQ ID NO: 28387 - DNA, 730 bp, Glycine max
  unsure (1)..(730): unsure at all n locations
  Clone ID: TF_LIB4198-004-Q1-K1-G1
ggtccggaattcccgcggtcgacccaacgcgtccggnaaaaaaatcatgaaaagagagaaaagaagagagggagatagatatattatagctagctagatagagattagaagctatattattatatacataaagttatattatttatattgaactaaaagaaagggtacaagggaaagatgggaaggccaccatgttgtgataaaggtgtgaagaaaggaccttggactcctgaagaagacatcattttggtgtcttatattcaggaacatggtcctggcaattggaaagctgttcctgccaatactggtaattagtgaattaatcttcttccactcatcatgtgagattttaatttggtgatttttgtgatgattgcatattcaacttttttgtgtcttttcttagcaagttagggaaaaaaattctgaattattgtttcatacangctgtgatctgaaattaatggtactctctttttggtttggttttcagggttgtcaaggtgcagtaagagttgtagacttagatggactaattacctgaggccaggaatcaaaaggggtaacttcacagaccaagaggagaagatgattatccatcttcaagcacttttagggaacaggtaaattcattttatagcttcttaaagttctttntttgccataaacccctagttatggaatntggcataccatattatatgataataacacatctttttaatataaa

SEQ ID NO: 28388 - DNA, 859 bp, Glycine max
  Clone ID: TF_GmC1378_1
aaagagctgcagattgagatggattaattatctgaggccagacctcaagagaggtggatttactgaaatggaagaggatcaaattatacagctacattcatgtctaggtaacaggtggtctaagattgcttcacattttcctgggaggacagacaatgaaatcaagaaccattggaacacaaaaatcaagaagaggttgaagctcctaggtttggaccctttaaccctgaagccatctgagcaaaaggaaaagtctgttgatgacaaaaaaaatatagaattacaaccaaacacttcaaaagggtctgaacaaggtgtagagaacaagtccttagatatgcatagcacaagagaagtgccaaaaacagaagggaaaatagaagaaaacaaggtgacttgggatgataccactggatttttcaacaattatgaaatgttgtgctcacagttggacttgggatcatggatgagccaagaaaccaaaaccagcactagttcttattgtagttcttctttctcacttgatgattctagcaacctttctgtgggtgaatcctcttaccttcaggaaaattccttacaacaatgggttgatggtttggattccattttgtcatgggatagcttcaatcctcttgagaaagattttctcttcttggataataggcaatgagcacaaccacctcatgaaactgcacaatttttacaatctctcaatcaataaaatgttacaacatttcttgtgtagaatactgccactgcttttcttaatgtgattccatattgttgaatgtgaattggatattttgttattgcttgttcatccatattatatgaattaaccaagttgaatgaaaaa

SEQ ID NO: 28389 - DNA, 1232 bp, Glycine max
  Clone ID: TF_GmC314_1
tgtcagtacgtccgcccacgcgtccgaatcggctccaaacccacgagtccgcaaaacaccaccaccaccacctcgctctcttcttccctgcttcacaatttttattttaatgatactattttgttattgttaagacggcatcatcagggaaatggatcgggtgaagggtccatggagcccagaagaggacgaggctttgcggaggctggttcaggcccacgggcctcgaaactggtcggtgataagcaagtccgttccgggacgatccgggaaatcgtgccgcttacggtggtgcaaccagctctcgccgcaggtggcccaccgccccttctcgccggacgaggacgaggccatcgtcagggctcacgccaggttcggcaacaagtgggccaccatagctcgccttctcaacaacggccgcaccgataacgccgtcaaaaaccactggaactccactctcaagagaaaaaaatgttccgccgttagtgacgacgtcaccgatcgtccgcctcttaaaagatctgcaagcgtcggcccggcccatttgaaccctggcagcccatcgggctccgatttgagcgatccgagcctgcccgctctctcaaacccctccccctcggcccattacaggcccaatctcatggaaaccgcttcttctgcttgcgatccagccacgtcactgagtttgtctctccccgggttcgggtccgggtctaacccagtttgcgcacctcgaccggtatcggtgtctccgccgtcaccgcctccggcggagccggtggagcagcgggggaagcaaatgttcaacgcggagttcttgagagtgatgcaagagatgataaaaaaggaagtgaggagttacatgtcagggatggaacagaagaatgggttcagaatgcaaaccgaagcgattgggaacgcggtggtgaagcgcatgggaattagcaacatcgagtgaagaaaaagaaaacggtgtcgtttcgagattcgaatcaagccaactggcacatgaatgatgatgaatcacaagagtaggagaaaagtgagaaccgagaatgggaaacggtgttttttttttttcaattttttattttattttgtagttaactttaaattttaagtttaatttccctttacttaagggtaaaaaataggtaataattttggcactgtacagaacctcagaacagaagtaaaggatgataatcaatcaaatagtgctttttcctgtt

SEQ ID NO: 28390 - DNA, 1567 bp, Glycine max
  Clone ID: TF_GmC145_1
caggtaccgtttccgggttccacggtcgacccacgcgtccggttagttagaaaaagagagagaaaaaggaaagaaaataaaataaactgacagtaacagatagcgaaacaaccaaacctacaaccgccatgaccgaagaagaccgctccgcccaggaaaccgtccacaatggcgtcgcctcgacggagctaggcggcgaggagatggacatcgctgaggtgacggccgccggaagagtgaagggaccgtggtctccagaggaggacgcgctgctgagccgattggtggcgcagttcggtgcaaggaactggagcatgatcgcgcggggagtgccgggacgctccggcaagtcgtgccggctccggtggtgtaatcagctggacccttgcgtgaaacgcaagcccttcactgaggaagaggatagcatcatagtttcagcccatgcaatccatggaaacaaatgggcagcaattgctaggcttcttccaggaagaacagataatgcaatcaagaatcactggaattctacactgaagcgcaggtgtatggaaatgggaagatatgtcccagcacatgctgatgtgatggaagatggtactggcagctttgataaaacaaaagcatcctctgaagaaaccatgtcaattggggatatcaattcaaagaatcctgctgaagtcagaaatgtcatgatggataatgaaaataaacctccaacaaaagatgatgctaaagtggaggaacatcctactcttcatcgaccagtagcacgtgttagtgcatttagtgtttataacactccaggaaggtcaacaatgggatcatgttcaaagatgttcccaaggcagagccctttgatccaatcccccaaaccagacgtaggatcctgcaagttatttgatgatattgattgtgagcccatggttccatcacaatgtggtcatggctgctgcacaggagactcgagggaaagccattcgcatggttcacttctaggtcctgagtttgttgactatttggagtcaccttcctctagtcatgcatttatttctatagctacagacttgaacaatatagcttggatcaagagtggccttgagaattgtagtactggagtaactgagaatactgcaaacttgacagcatctcgaggagttgccagtgctttgcaaacaaacttcttaggacaagatctaaagaatggctacgggcaatttgaggagggacatggcatgtttttgggtgcgatgcaagaagtgttgtcaacaaagatggctaggcaacattatgcaatgcctgcggaagtttaactctaacttaaggttcctcaattggattttttattttttattttgatgtgcaagtggatttcaatcttagtttgtggcattttgtggtgggtggatagatagatcatagatggtataagtttgtttcactacaatcaagcgcaccgtgtagagtgagtagctcttttcggttttcattgacttgcagagttcttgaattgcatcttggtaactataatctgaaaatatatataccaaattaccaatttgatcttgtt

SEQ ID NO: 28391 - DNA, 1224 bp, Glycine max
  Clone ID: TF_GmC5794_1
ccgcgggccgggttcctaccagggcactctcactctcctttatacacacacataacacagtttggttttgatttgaggggggaggggtgagaaaacaatctttgttgttgagtgaatagttaataatggggaggaagtgctcacattttggaaccatagaccataattcaaggacatgtacatctttgagagggactcctttcgtaggttcgttggacttcggctcttaagcggacacttagtcagtactaatcgtgttaacattcaagaaaagctttagcatggacatccttaccctcatcatcatcttcctcattctcttcaatcaagactaaccattgatgaaaatttttggggtatcccttagatggtctctcacagatggcccaagagaggaagaaaggagtgccatggacagaagagcaacacagaatattccttgttggacttgagaagctgggaaagggtgactggagggggatcactagagacgaagttcttaaaactatcccaccacaagaggccagccacacgtggaagtccatgctcaaaattacttccttagattggaaaaaatagataagaaaaatcgacgtctaagtctctttgacttggatggaagcaacaaagtatattctaattctattacggatcatcatgataatttctcactgaatgaatgataaatgtttctctttaaactgaaaagtaatttacgtttcttttttacttttcctttgtcgttgaattattgtggcaggttggtagcaacaaagcaggttctaattcattttcggctcatcaaaaggatgagtctaaatgtgaagttaagaataatgatgctgccactttgtctttgctagggcgtataacttactttcaacaagaaaacaaatcatcagagtataagcaagaaacatttgataattgctcatatcaaagtcaaccaggtgaagagcatcaagtcgcagttcttaatctggatctcactcttgcagcccccaaggcaaagaccctgcaggaacaaaataagtcatctccttctgctccatttctgcttgggccaattagcgtgacttaaactgtgtcaagtgttatatatattaattgtattaggaatgtacccttttatctgttgtcaagtgtcaactcgtgtagaagatcttcaggtcaaagaaacacattgttcattgcagtaatagtagtgactagtcgttattaatt

SEQ ID NO: 28392 - DNA, 1513 bp, Glycine max
  Clone ID: TF_GmC900_1
agttaaaatcactgcctctcgttcccactcaaacttagctagcgcaacacaagcaacaaaacacaaacaagcgaacaatagttcacaactaaaggaagaggttgttgaagagatagagatacatagtgtttgtgttagtgttatttatggtgtccctcaacctcaacccaaacccacctcaaacttttcacttcttcgaccccttcaacatggaggatcagaataagaaggtccgaaaaccttacaccattaccaagtccagagagaactggaccgaccaggagcatgacaagtttctcgaagctcttcacttattcgaccgtgactggaagaagattgaagcatttgtaggttcaaaaacagttatccagataaggagtcatgcacagaagtatttcatgaaagttcagaagaatggcacaagtgaacatgtacctccccctcgtccaaagagaaaagctgctcatccctacccacaaaaggcatctaaaaatgctcttactatatcccaagttgcgcggccattgcaatcttcatctgctttatctgaatcatcacacatctataggccagattcatcatctgtggttagaactccagttaggcagtgtggccattgccatcttggggttataatgttacaccactagtcagtcttccccgagtgactaaagatgatatggtgttgatgagtcaacaaatcaatcctttcagcagtagtaatgagaacactcctaggggttggccaattagcaaacagacagatcagggtgaccaaggcaagccaactatagtaatgccagattttgcacaagtctatagcttcattggcactgtatttgatccaaatgcaattaatcatctacagaggctgaaacagatggacccaataaatgtaaaaactatattgctattgatgagaaacctctccaccaatttaaggagtcctgaatttgagaatgaaagaagggatgctgtcattgtactatgctaacatggagaaggaaaaatccagtagtcatcgaagccaacccctcacttgacagatcagagagtgttgtcttatctgcttaaggtgttaccaatggtttatcaggaacatagtttttaaatatcttccaaaaacacaataagctttcctctcagctaccactaactccaaatggtgaaatatggggcacaagaggggaaaggattacaggttttactaacagcttgtaggttgcagatacttgcatgtgtgcatgcgtgcacgtgtatgtagtttactgtcctttaggcttatgtgtgtatcttatgaagatggttgtcataggaatgcaggataatgagtccagagtcctgttaaggtaacctggaggctgtactgtacagaatattgagagcgtctgtgtgtaatgttgtgatggttttttctacaatttagtatacaagagcggtgctatgatttaggaggtgctacctgtgttgtatataaaccaaaagcaataaagagcatatataaattgtgatt

SEQ ID NO: 28393 - DNA, 499 bp, Glycine max
  Clone ID: TF_GmC953290_1
acgagcctttcttagtctgcggggttttctctttctagagaatccaagcctaccattgaagtggaattctgtgaggctaagtaaaatggggtaccagccattggaaaagggaaaaccaaaacataagaaggggttatggtcacctgaagaagacaacaaactcagaaaccacatccttaaacatggtcatggctgttggagttctgtccccattaaggcaggcttgcaaaggaatggaaagagctgtagattaaggtggattaactatctaaggccaggattaaagagagggaaattcagcaaacaggaagaggagacaatcctcacccttcaccacatgctaggcaacaagtgggcccggatgtctcagcctttgcccgcttggtcagtcttcgagagtttcaccttttggcgctcgttgttgcggaagagggtggccttggctttggcagtcgaatctcttgaccaagtcttgtctgctagctcaagctcagatact

SEQ ID NO: 28394 - DNA, 1298 bp, Glycine max
  Clone ID: TF_GmC100_1
gaaaacgtagacatcagtttcaagttagtttgtgcaatatttattcattgacctgatatttttctgaggaagttgcccttaagaggaagtacaatgaggaagccagaagcgtgtaataataatactaaaaacaatagcaacaagaagcttagaaaggggttgtggtcacctgaagaagatgacaagctcatgaactactatgctaaaccatggacaagggtgttggagcgatgtggcaagaaatgctggcctccaaaggtgtggcaaaagttgtcgccttcgatggatcaattacttgaggcctgatcttaagagaggtgcattctcaccccaagaagaggaactcatcatccacttccattcccttcttggaaacagatggtctcaaatagcggcgcgtttgcctgggcgaaccgacaatgaaataaaaaacttttggaattcaacgataaagaaaagactcaagaacatgtcgtccacgacgaccacaacctcaacctcaccaaatgcaagcgagacctcaatatccgagcctagtaataaggacctcaacaacatgggagggtttatttccacactacataataaacatgcaggttttgttcctatgttcggttcatctccatcaccatcaatgatgcaaaccagtacagttttcaataacatgattgaaaggtttcctatgctggagcaaggactgattaacatgccagcttctggagggtacttcgaaggcacaggtagtactccttgcttttcgcaatgtgaagttcacaacaataaaggttcttgttatttagaaaacgaagtgtttgagagtgtaaatatcggggtagaaggggatatgtttgttcctccccttgagaatgttacatgcaagagagaagaaacaactaacagcagttactttgacgatgacataaatagtatccttaataactgcaacaatattggcatagctgaaaataaggctcatcatggggtggagaatttgtttcagcaagagttagccactgccacaggagaatgggactttgaagagttgatgaaagatgtttcctcctttccatttcttgatttttcatactgatcaatgaaccttatttggcacactgcagggtgatatattcttcacatagagccttgtataatagtatactggtattttttacccttataccgaattcacaagttaacaatcaggtataggcctcaaataaaagtccaatatatatatatatacatataaattcttgggtatccattggtgatcgagtatttagtcttgcagattagtt

SEQ ID NO: 28395 - DNA, 585 bp, Glycine max
  Clone ID: TF_uC-gmflLIB3275P058b05b1
cccacgcgttcgggcagtggcggtagcggtggcagaagcggtggtgatcagggtggtggcaatgtggaggatgtggctctgaagaagggtccttggacaactgcagaggatgctattctaacggattatgtgacaaaacatggtgaagggaattggaatgcagtgcagaggaacacggggttgaatagatgtggcaagagttgtaggctcagatgggctaaccatttgaggcccaatttgaaaaagggtgcattctcacctgaggaagaaaagatcattgttgatcttcattcacagtttggcaacaaatgggccagaatggctgctttgttacctgggagaacagacaatgaaataaagaactattggaacacaaggattaaacgccgccaaaggcagggtctccctctctattcagatgagcatgatcataaccatcgttccacaacaccaacctctaccaccacaccttccccatgcctgacaccaacaggatcaaaccccaacattgccacaagttttgagttcttcaatcaaaaccaacaacaacaacaacaataccaacaccaataccaataccaaaca

SEQ ID NO: 28396 - DNA, 1604 bp, Glycine max
  Clone ID: TF_GmC6801_1
cttccgacggctgcgagaagacgacagaagggggaactctcgcaagcttgttttcttgccttctttttctcttattctctactacaacattttttttgtgtgaaatttctctacaactaaatttccatataggctgcaagaccctcatcaacctacaattagtttgttacatatatagctaggttgaacaatatgggaaggtcaccatgctgtgagaagacagggctaaagaaagggccatggacaccggaggaagaccaaaagctcattgctttcatcgaaaagcatggccatggaagctggcgtgcattgcctgcaaaagctaggcttagaagatgtggaaagagttgcagacttagatggtcgaattatctccgacctgatataaaacgaggaaagttcagcttgcaggaagagcaaaccattattcaacttcatgcccttctaggaaacaggtggtcagccatagcatctcacttgcccaagagaacagacaatgagatcaagaactactggaacacccacctcaagaagaggctggacaaaatgggcatagacctaacaacccacaagccaaaaaatgagtccctagcctactccaaagacggctcgaaccttggccacatggctcagtgggagagtgctcggctcgaagccgaagccagactcgtaagagaatccaaactacaagaacaacaaaacaacctcggacctatgtcctctccttcctcaacacaaattacgaggctcgttctcaacaaaatcacacccctacaacaaaaacaacactcactaccaccgtgcctcgacgtgctcaaagcgtggcaaagttcatggtcaaacaacaacaacaacattaacaaatactcatcactaaacgacaagaagaaaaccatgcatgtgcgtagcatgtatgccatgatgctttcaaatgatgacctagagtctccaacatccactttgtgcttccccgagagcgtgcaaatgaataataataacaataactctaacgctatggtctcaaccgaccaccttgggttaatcaatgagaactatttactccctccaaccaccctggatgagttcattattaccaaaagtttaggaacaacaagtagtgagggtgcaattgaaaccgtgaatggtggtggtagtgactcgtggaggtacttcaccaaacacaacaatgaagaagaacaagttgaaactgatgagaagacaataatgtacgacacgatttcatgtttgcaagacgatgacggtgatattatggtggctgttgaggcattaagaggtgctggttattatgatgatgataataatagcaacaataataatgtcacatttacgcatctctctagcaatgtcaataatatggtgggtttcgaaaacgattttgattccaatgaagatttagcggcggtgaacttgcatgtgaacttcgaggagaataaggattattggaatggcatgcttaattagttagttataagtgaacaattttcctagctagctaccatgttatcatatgtagtacgtttgtttgtttcagagaaataatacattccttttgtcattcttcgcgaaaaaaaaaaaaaatatag

SEQ ID NO: 28397 - DNA, 1745 bp, Glycine max
  Clone ID: TF_GmC596_1
ggctcgcgatcggcgaaagccaagggtcaccaaaaccatcatcataacccaaacccaacccaacccaacacaacacaacaccacctcctatcacataataacaaccttaaccttaaccttaaaccccccaattttcatgtctcggatcccgtgattcggatccccaacaaaaaaagaaacctcgtatttgttattttcgtcggatccggttgggaacgctcatgacgcggcgttgctcgcattgcagccacaatgggcacaactccagaacctgccctaaccgcggggttaagctcttcggggtccgattaaccgacgggtcgatccggaagagcgccagcatgggcaacctaacccactacgctggttccgggtcggccccgctccatgtcgggttgaataacccgggttcacccggggagacgcccgatcacgccgccgccgccgccgacggctacgcctccgaggacttcgttcccgggtcttcttctagctcccgtgaaagaaagaagggtgttccatggactgaggaggaacatagaatgtttttgctcggattgcagaagctgggcaaaggtgattggcgtggaattgcaaggaactatgttatatcaaggacgcctactcaagtggccagccatgctcagaaatatttcatcaggcaaagcaatgtgtccaggcgaaaaagacggtccagcttgtttgatattgttgcagatgaagcagctgacactgcaatggtacagcaagacttcttgtctgctaatgagttaccaactgaaacagaaggcaataaccccttgcctgctcctcctcccctcgatgaagagtgtgaatcaatggattccacaaactcaaatgatggagagcctgccccatcaaagccagaaaacacacatccatcttatcctatgttatatcctgcgtattattctccagtgttcccgtttcctctgccctattggtcaggatacagtccagagcccaccaagaaggaggaaacacatgaagtgctgaaaccaactgcagtacattctaaaagccctatcaatgttgatgaactggttggcatatcaaaactgagtttaggggagtctattggtgactcgggtccctccaccctgtctcgaaaacttattgaagaaggaccctctagacaatcagcttttcatgcaacaccaacatgtggtgatatgaatggcagtgccatccatgcagtttaagcgtgtgcctcgtgttccgaggaagggattgttatgtgagcattatggatcaacttggggcctgcatgaatgtggtcttgtgttcatcatacatctgtttgtggggtaacctaaataatttttttctttgcccattcacagtgattaacctagtttgtttatttgctggtagcagtagcgtctaggagttactttgggtctctaaactaaaactttatgtttgtccagtgattttatttgtcagggttatgtaaagttaatgttgattgtgcagtttgacaatctacctagtaccaagttgtgcttcatgtttgaagtgctgtggattaaaatgtttgaagtgctttagcccctcaaacccgggtctctcctgaattaacccagtgagacaggaaatcaagagcactgagctgcttgctagggtttgaaatgggttgagtttttttttttctccttcaggtttggttagtttttataaaaaacttaatttgggcttggaaattaattttaaagatgtcaatt

SEQ ID NO: 28398 - DNA, 483 bp, Glycine max
  unsure (1)..(483): unsure at all n locations
  Clone ID: TF_9565839
accagcagatatgagaactccatcttcctctcacaaaagtggacttaacaaaggcacttggactccagaggaagatgccaagttaatagcttatatcactcgttatggctcttggaattggcgccaactcccaagatttgcaggactggcaaggtgtggaaagagctgcaggcttaggtggctaaattatctcaggcccaacataaaaagagggaactatactaaagaagaagaagagattataatcagactgcacgaaaagctgggtaacaagtatgctctcacattccaagctaaactaaatttcccacaacattgtacagcatcaaaagctagacaggggaactataagattttcccttacttcaacacctacagaccaatgcatcttgcaaagtccactcataattaatatgacaataataattgggacaaaacttataagtaattcatacatgtntatttttttaagtggtgctttta

SEQ ID NO: 28399 - DNA, 418 bp, Glycine max
  Clone ID: TF_jC-gmXLIB3563P067bd03a2
ctttacttggttgctagcaagtggtatggggaggcaaccctgctgtgacaaacttggggtgaagaaaggtccatggactgctgaggaagacaaaaaactcataaacttcattctctccaatggccagtgctgttggcgagctgttcccaagcttgctgggcttcggcgttgtggtaagagttgtcgtcttcgttggactaattatctaaggcctgacttgaagagagggctcctcacacaggctgaagagcagcttgttatcgatctccatgcccgtcttggcaacaggttttccattttttacttgctcggcttccaagcattgccttgtgtttgttcaccagaaattattacacagtttatgacaatgtgatttcggttaactctacgcggttcttaatcatatttttcaatttac

SEQ ID NO: 28400 - DNA, 1318 bp, Glycine max
  Clone ID: TF_GmC1277_1
cccatctgctaccaatttcaccattctcatcctccaaagttgaaccataatttcaaatccaaccaagagacaccatgtcatcaagtggaaccatttggagctatgaggaagaaaaagcatttgagaatgccatagctatgcattggattgaggaatcctcaaaagagcaatgggagaaaattgcttcagcagttcccagcaaaagcatggaagatgtgaagcaacattaccaggttctagtagaggatgtaagtgcaatagaggcaggtcacatatcattcccaaactatgctgcttctgaggaaatcacatcttcaaataaggactttcatggctcttccaaggccacaagctcagataaaagatcaaattgtaattatggacgtggtttttctgggttaggacatgactccaccactcatagtagtggtaaaggaggcttgtcaaggtcatcagaacaagaaagaagaaaaggaatcccatggactgaagaggaacacaggttatttttacttggtctagaaaagtttggaaaaggagattggagaagcatttcaaggaactttgtgatatctaggactcccactcaagtggcaagccatgcacaaaagtacttcataaggttgaattcaatgaatagagacaggaggaggtctagtatccatgatatcactagtgtgaacaatggagatgtggctaataaccaagcacctattacagggcagcatagtagcacaattccttcaaacacaatgggtgtaggacaatcccttaagcatagagttcagggtcacataccacctggtttaggcatgtatggaacaccagttggacatcctgtggctgctcctccagggcacatggcatctgcagttggcactcctgtcatgcttcctcctggaccccacccccatgctcatcctcatccaccttatgttcttcctcttgcttacccaatggcacctccaacaatgcatcaataacaactctttttttctctttcttatttgtagttaggtttttttcttctttcttattagtatggaattaaaatcctttctgtggaaattcataaatatgttgttttaaattaaattctactcttagtttaagcaaggaaattgttgaatggatccaatggtacttagtttatgtcagtatagagttagtttaaatgccaaccccttttttccaatgtagatgtaatcctaagaattgccttgtggtgtatatggagatagatatggatttaaataccaaggaaatgaatttctctttatcaacaagtttgtctattgtcatgtctctattacctttc

SEQ ID NO: 28401 - DNA, 2109 bp, Glycine max
  Clone ID: TF_GmC7451_1
cccacgcgtccgtacagctgcgagaagacgacagaagggggagcgtgagcacgaggccagaccaaatcaaagttattttagtacaaagaaaaggagacacattattattgtgttgcactgagtgcagtgaccatgacgagaactccttgttgtgagagaatgggatcgaagaagggaccttggactgctgaagaagatcagatattggtttctcatattcaacaatatggccatggaaactggcgtgcccttcctaaacaagctggtttgttaaggtgtggcaagagttgtaggcttcgttggataaattacttgaggcctgatattaaacgagggaaattcagcaaggaagaagaacataccatcctaaagctacatggaattcgcggaaatagatggtctgctatagcggcaagtttgcccggaagaacagacaacgaaataaagaatttttggcatacccatttgaagaagaggatccagaaaagtggagtgcacaatggcaatccttcctcacgtatcttgcaagaggcacaagcaaatactagttcgaatgcatcaagtgtaatgattgccaattacggtttaccctcaaggaatattaatccacctattgcaggattttacggtgcagtctcctcagatacttttggagaaattaaggacaatcatggttcttgtcagctcagtgaagaaatggaattttggtacaatatatattcatcaaatcagggcaaacatcatgagacaatggaaatctaggatattatatagctagattgcatgagatactacatataatttgtctcactcctacaaattaactttttatttttatttttagatatcaacctttaattggtttcagcttggtgtttgtgtacaaaacttaaaatccattttggcaaagcaaattgccagatgaaaactaaagatgatcgatggataatttttaaataaaggctcgagagaagtttgtaaatgcatatatactgaaacaaagtacttttgactgccattttttttggtagtgacttttgactgttatttgaggcaaaggcaaacttttccttcaactttaaacttcaattcaattatgtagttcttagttcttaggaatcattgcaattacaattattatttttgaaaacttttttctgtttttaaaaataaaaatagaaaaaagaaacagtgataataattttttaaagtattttccagtataacatcttctttttaaaaaataattaatattctactttcaatattttatcatttatatttttccaattcagtatcttatcttttttgctttttatttctattctaaaaaaaattgtctttttaattacaaaaataatacatacacttattgtgtactttaccaataaaaaaaaccttactgtgtaattttttctaatgttgacaatacttgcctattattaaattctttttaaaactgaagaatcgaagtaaaatctaacacggcttgccgaataatattaaactcttaaaaaataacaagtcttaaaatagattgactgtactgcacagtggtgatattaaacactttgttttttttatgataatataataatggcccgttgatgtcgctttatgattactatgttagtttcaaatgttttccacagtaggaaaattattttggttgtaggatataccgtaagacttcctcctacactggattattctttttctttttaaaaaaaaaacaatgttttcctttcctattatgcaaatcaagttcactgtctcccttggttccatcaagcttcttcctttgcttcccacagtgtcatgacctcgtctacaagaagctgtcgttggtgtcaaaaagctctccatggatgcctactagggctttttttgggttcaccacggaaatcaaaatatcctgagtaaactccaccacaccaagatcgcataagtgttttttttttcagtttagtttttatatattttaatttattttattatgttcttaaaaaaaattatattgatgcttgtaatttaatttgggatctggtgaatatatggtgatgtttgtaatttaattttagatgttggtgaataaattgtggcttattt

SEQ ID NO: 28402 - DNA, 955 bp, Glycine max
  Clone ID: TF_GmC9784_1
ggaattcttcacccttcggcaaaggacatggatcggataaaagggccatggagtcctgaagaggacgaagcgttacggaggttggttcagacttacggccctaggaactggtccgttataagcaaatccattccgggtcggtctgggaaatcgtgccgcttgcggtggtgcaaccagctgtctccggaggtggagcgccggcctttcacggcggaggaagacgaggcgatcctgaaggctcacgccaggttcgggaacaagtgggccaccatcgcgcgcttcctcaatggccgcaccgacaacgccatcaagaaccattggaattccaccctcaagaggaagtgctccgagcctctctccgagcctcggcctctgaagagatccgccaccgtttcgggtagtcaatccggatccgatttgagcgattcgggtttacccattattcttgcaagaagcgtgagcgtgacggtagctccctctaaccaccttgcggaaaccgcgtcttcttcagtaactgatcctgccacgttattgagtttgtctctaccgggattcgattcgtgcgatggggctaataatgggcctgggccgaatcaggggcccagttgcggcccgttccaggagataccgatgcttggttcccaaaagcagttgttcagccaagagtttatgaaggtgatgcaagagatgatacgagtggaagtgagaaattacatgtctgtactggaacgtaatggtgtgtgtatgcaaaccgatgccattaggaactcggtgttggagaggatgggaattggtagggttgaataatgaattcaagagcggaaaattatattcatattaggtcatggaaaaatgattaggtgaaatcgcagagaaatagtgattctatctttttattttttgtcaggttaattatcctttttttaaatgataattattttttatctgtgccgag

SEQ ID NO: 28403 - DNA, 1226 bp, Glycine max
  Clone ID: TF_GmC1460_1
acgggctgcgagaagacgacagaagggggtggtaatgagtggtgaagatgggcaaagcaccttgttgtgagaaacatggggtcagaaggggagcttggacacccgaagaagaccaagctttggttgactacatccagaaacatggccatggaagttggcgttcactccccaaacatgcaggtctcctaagatgtggaaaaagttgtcggcttcggtggataaactatcttcgcccaggcatcaagcgtggcccatttactagtgaagaagaaagtacaatcgttcaacttcatggcatgcttggcaacaggtgggcttctatagcatctcaactacctggaagaacagacaatgagattaagaacttctggaacacccatctaaagaagcgtctccttcgatcatgtcattcccaaagagcaaaacagctatgtgtgattcctgatcaatccattgtcaagtccgaatctccttcgacgcggcacatggtacagtgggagagtgtgagagttgagacagaggcaaggttgtcattggaatccacaatgctcaattcatggccaacgagtaaaacatgccctgatcactttcttacaactttggcattcagaggttggaaaatctttcgcatgattcaagggaaaggaagaaggagtagtgagtcaaagccttatctcacaaccttcatcttcatcaaaattggagtcttgttcagatgtgtcattgcaggtgaaaaccaacactggaactagtagctgcattccaaagcttgaggatgtgagcatggttcatgaacaaacaagtagctacaaaccaaagcttgatgatgacacagctggttctgactccggcaattatgaatttcttgatacttctgattctgcactgaagcaccttctacatatgcctgatagtgatatgggattcttgggacacaatgatcatttccaaaatctccttgatggtacatgtgactaagatagtctccttcatatttcttcatagaaagacaatactttgaactgatagggaaaattttatttgccctttcttcttttttgtaaatgcgctcaccatgtagctggttttcaatagttggtgtagagggggaaaaaggtagatagaagaatagtggaaagagatcaagtttaccctccacttgatggctgtagctaaaagttaaacattaatgaattcagagttaatgatattgttcttgtcctacc

SEQ ID NO: 28404 - DNA, 1886 bp, Glycine max
  Clone ID: TF_GmC563_1
ggctcgagaaaatatctctctctcgaaaagctagtttccccaattattgtgtcaactacataagctgggttcgtgccgtttcccccatctggggttggcttccttctgggtttttccgtttccggggatactcctctttctcttcaaatggaatgggtttctaggtttggattaggagaccacatccttttctgttggcttactggctgagggggtgtgtcttttcctccagttgtggagagaaagctgcattttgttccatggattattgttttgctccggctacttctgatggggctgaagtaatatgggaaacgagtcccgtgcaaatgcttcttgattatatgcttctcagcggctccaccagtccacgaatgtcctgctcagcagttctccatctgacaactcttcaaagagagtgtgtaactagtaataactgtgtatttgtgtgtatgtttttatgatcatataataatagatatgtttttggcatgccagttatgagtgctactattactactactactaccttaaactagaacaatgaacaggggaattgaagttctttctccagcctcatacctccgaagttccaattggctgttccaagaaagcttggggaccaggtggactccacaggagaacaagctctttgagaatgctttggctgtgtttgacaaggacactccggaccggtggctgaaggtggcggccttgattcccggcaagacggtcggcgatgtgatcaaacagtatagggaacttgaagaagatgtgagtgtcattgaatcagggtttattccacttccagggtacactgctgctgattcctttacattggagtgggtcaacaatcaaggatttgatgggctcaggcagttttatggtgttactggcaaaaggggtgcttccactagaccatctgagcaggagaggaagaaaggtgtgccatggactaaagaggagcacaggcaatttctgatgggtctgaagaagtatggtaaaggagactggagaaacatctctcgcaattttgtgaccacaagaacaccaactcaggttgcaagtcatgctcagaagtatttcatcaggcaactaagtggaggaaaggacaagaagagatccagtatccatgacatcacaatggtgaatctcccagaagcaaaatctccttcatcagagagtaacaacagaccctattcaccagatcactcagtgaaggatgtgaatccaccatcccagaatcaaagattgtctactactatggtaattaaacaggaacatgattggaaattgccatgtgaaactgtgcctatgcttttcaattccacaaatggaaacatgttcatgacaccactttgtgggatttcttcatatggatctaaaccacttcaggagcagtatttcctcagtggatgccagtttggaccttatgatacaattatgcaaatgccgtccatgcaaaatcaatgaactatatagaatgcagggattaaagttaaggtactaaaatgctaaaccttattcattgatgttggattgatttttagatgcttaagggtggttttatgtaaatatttcaaggattcacgagtttccttatcactcaatctttgaagagccttcatattgtattctgatattaaatgtgctggcaccaaagatgcaatatcagagtttggcagtgatatgcatcttccacctaggcagaaaggattatctgtaaaacgtataggacgagaggagttaccttgagtttgtgattattcacttttttttaaatgcttgatgcttcaaataaatataggcctttgcagctttgctaacgaatgcaagtttttattagaattcaattttgaagatgcattgtgtactaataatatact

SEQ ID NO: 28405 - DNA, 689 bp, Glycine max
  Clone ID: TF_uC-gmflLIB3275P072d07b1
ctaactgctatcgagagctacacacaagagtaagaccaaagcaaaaatacattatacaatatattatcgatccacatcaatttttgaagaagatggttagagctccttgttgtgaaaagatgggattgaagaagggtccttggaccccagaggaagatcaaatcctcatgtcatacatccaaaaacatggccatggaaattggcgtgccctcccaaagcttgcagggttattaaggtgtggcaagagctgcaggctaaggtggattaactatttaaggccagatatcaagagaggaaatttttcaagcgaagaagaggaaattatcattaagatgcatgagttgctggggaacaggtggtcagcaattgcagcaaaattaccaggaagaactgacaatgaaataaaaaatgtgtggcacacccacttgaagaagaggctactgaattcagatatccaaaaaagggtttccaagccaagaatcaaacgatctgattccaattccagcacactaactcaattagaacctacatcatcagcatgcactacttctttaagtgacttttcatcatttagtgaagggactaaaaacatggacaacatgatcaagagtgaagacatagagtctgtggagacaataatgcctccaattgatgaaagctttggtcaaaggcaacagtggattatgaaa

SEQ ID NO: 28406 - DNA, 671 bp, Glycine max
  unsure (1)..(671): unsure at all n locations
  Clone ID: TF_LIB4164-016-Q1-K1-E9
cggtcacggaattcccgggtcgacccacgcgtccgcgaagctctgtgctcgctgttatcagttttttttcctctgtttaacccagaaatatgtaacacaaatcaaaacatcgttgttgttttatttgagcatgcaagttggctaactcttggaaaggaaaggagcttcaagaagagagagataaaataaatggtgcaagatatgaagcagcaagacaatggagaatctaagaagaaggagcgtcacattgtgacttggactcaagaggaggatgatatactaagagaacagattggtattcatggaactgaaaagtacccactactctttgataattttttcttttgtcatacacactactttcttgatgtgtgacattaaagggatttttattgcaattaaaactatgcagttgggcaattattgcatcaaagttcaaagataaaacgacaagacagtgcagaagaagatggtacacttacttgaattctgatttaagaaaggtggatggtcagctgaggaagacatgctcttatgtgaggctcaaaagggtatttggtantagatggacagaaatagcanagggtggtctcaggcagaacggantatgctgtgaanaatcgtttttcacactctgcaggaagaacagaaatatgcagctttagcaaaag

SEQ ID NO: 28407 - DNA, 1272 bp, Glycine max
  unsure (1)..(1272): unsure at all n locations
  Clone ID: TF_GmC134308_1
tgttcagagacagacactgccaactatatcatcgacagatggtatagaaaccaagggaatagttggtggtaacatggcttccaaaagaaaaagaaaggcatggtcagaagaagaggacatgcagctacgagctgctgttcaaagatggggtgaagggaattgggcaaccatggcaaaaggagacgactttcctattaagagaagtgctacacagttggctcagaggtggagcattttacgaaagaaagatggttgtacaaatacaggaaccataaccagcacacagtatactactgctgaacagctggcaactcgacactctttatctttagcccttgatatgccattcaaaaagttaactgctcctggaatgactgatgaacaaacatgttacccctttggctgataaaggtgctcaagtaaaaaatgccgtggatactactgagcctgctgttagctctttgacaaagccatctatttctaccaatttgccttctgacccaaagaacaaacacgctacccctttggctgataaagttccattgaagcaagatgttaatcccacaaaagagttacaagtttctaatccgagcaccacaccaaaagagaagttacaagaaaatgagcctcctaaagttaccactggaagccaggttgatagcaacccagagaagggaagattagaaaaaggtcaagagacgagcatacctcttgttaaaattagttgtggtgaggaagtttcaaaagataaagcaaatcaagtagtagtgtgtgaagagcaaggaagtgttaagaaggctactgagaataacaacattgacaaggggagtcaaaatttagatcatgacaagaagatagattctattaatcaaagttcaaatgatcaaaacgcgaatgataaacatgtaaatttgccagtacaagatgaactcagcctaagtgccaaggtagtaaaaagtgatggggaatgttgagtgattagtttgtgaagatgagtagattattttattgaattctaacttaaagtttggatgaaattttacgttattttaggaatttgtagcacattaatgtgttgtaatattttcttaaattcttctttagtggtaaatatattttgatgacttgcaaatttctataaatatatggatcaattgcgttatctctttgttcctnttnttgggtgattttggaattntttctattttatgtttgagttatctttattagtcaatttccaggatttgccacacttgtccattgattttgtcc

SEQ ID NO: 28408 - DNA, 461 bp, Glycine max
  Clone ID: TF_LIB3242-217-Q1-J1-G4
ttcagagacagacactgccaactatatcatcgacagatggtatagaaaccaagggaatagttggtggtaacatggcttccaaaagaaaaagaaaggcatggtcagaagaagaggacatgcagctacgagctgctgttcaaagatggggtgaagggaattgggcaaccatggcaaaaggagacgactttcctattaagagaagtgctacacagttggctcagaggtggagcattttacgaaagaaagatggttgtacaaatacaggaaccataaccagcacacagtatactactgctgaacagctggcaactcgacactctttatctttagcccttgatatgccattcaaaaagttaactgctcctggaatgactgatggtaattttctttggaactttatctattttattttgatttatctttattagtcaaattccaggatttgccacacttgtccattg

SEQ ID NO: 28409 - DNA, 713 bp, Glycine max
  unsure (1)..(713): unsure at all n locations
  Clone ID: TF_LIB4167-068-Q1-K1-D10
ccacgcgtccgcggcaaggcttcagtttcagagggggagaaatgggtcggtccagagttgcgttgcgctccgctgacgatgacccaaaccacagatcaaagagaaaaaaggctgctctgaatgtagaaaattcagaaaccttacctacaggccaaggagtaactactagcaaggtatctctctatcactgcaattattgtaacaaagatatttcggggaagattcgcatcaagtgtgctgtctgtcaagattttgacctctgcttagagtgcttctctgttggtgctgaggtgacacctcacaaaagcaatcatccatatcggattatggataatctatcttttccacttatatgtacagattggaatgcagatgaagagttgttacttctagagggcattgaaacgtatggatttgggaattggaatgaagttgcagaatatgttggaacaaaaaccaaatctcaatgtattgaccactataatgctgtatatatgaattcgccatgttttcctctccctgatttgtctcatgttatggggaagaacaaagtggaactctgtgccatggcgaagggacatgaagccaagaaagaattttctctgactgcagagcttactctgaaagaagaagctntgntcacctgatcgaataaactatngaagaatcaaagaatgcagaaatcaataatcaaactatgtnctaggttaacc

SEQ ID NO: 28410 - DNA, 1252 bp, Glycine max
  Clone ID: TF_GmC78832_2
ggctcgagctcgctgttggattttaatatttatctctgctatcaatattattaaggtctcacttctgggattctgaattctatgccccttggaccaaagtttcgtaagttctttgttgttgtgcatttcttttctttttttttttatccgtgggaatggaagaatgacaggaggtttacaataactcgtgcatccttcttaaccaacttaactagactcccttgacatttctttctagtttctcatttccatttctttagtgtaaggggattttttgttgtaaagtatggaattcgagacttcatatccaacttgttttatgtcaaattcaagttggttttctcaagaaagccactacacagaatggacaagagaagagaataagaaatttgaaagtgcccttgccatatatgataaggataccccagacagatggctgagggttgcagccatgctacctggaaaaactgtctatgatgtcatcaaacaatacagagaattggaagaagatgtttgtgaaatagaagcagggaggattccagttcctggataccctacctcttctttcacattgaagatggttgacaaccaatgttatgatgcatgcagaaagaagcctgcaactctcaggagttctgatcaggagaggaagaaaggggttccttggacagaagaggaacacagacgttttctgatgggacttttaaagtatggtaaaggggattggagaaacatttctcgtaattttgtggtcacaaaaactcccacccaagtggcaagccatgctcaaaagtattacataaggcaaaagctttctggagggaaagacaataaaaggaggcctagtatccatgatatcaccattgttaatcttacatcagatcaagagaagcctcttttactcaatgatgagtctcacatgacttttgagcaacagaagctaactagcatgccaaaagtacaactagaatggattaatcaccacgacaatgggtcacgtatggttgtcaacccaaattatgatatgttcatgtcaccttcatctggcatctcttccaagaccctcaagttgcaagggcaagatttctatgaatgtgcctttcatgagacttatgctaagcttaaaaattcgggtttcaggacaacttctagagacttcaacaaggaagactcaatctgcatcacaggatgcgccattcaggtagccaattcacttgctgatgtggctgactcacatgagcacttgaattga

SEQ ID NO: 28411 - DNA, 638 bp, Glycine max
  unsure (1)..(638): unsure at all n locations
  Clone ID: TF_GmC6850_3
cacgcgtccgctttagcatgcaacttgggtgggagggagcgtcgaagaaagagagccacaacaatagaataaacactcacacggagacaagacaagaacaagatcgtgcaacagatatgaagaagcagcagcagcaggagaaacataagaagcaaatggtcaatgaagaatctaagaagaaggagcgtcacattgtgacgtggactcaagaggaagatgacatactgagggagcagattggtgtacatggaactgaaaattgggcaattattgcttctaaattcaaggacaaaacaacaagacagtgcagaagaagatggtacacttatttgaattccgatttcaagaaaggaggatggtcaccagaggaagacatgcttttatgtgaggctcaaaaaatatttggtaacaggtggacagaaataaatagggtggtttcaggcagaacggataacgctgtgtaaaactgtttctccacattgtgcaaaaagagagcaaaatatgaagcncttagtaaaagagaacagcacttcatacatcaattcaaataacaaaggatttttctccacacggggtgtgatacagatgtagcatcagaaactgcaattaagagatgagggaggtcacatatccctgat

SEQ ID NO: 28412 - DNA, 1030 bp, Glycine max
  Clone ID: TF_GmC946_1
gtgataagcacgtgaagaaggacagcgctagcgagaaacaaaccaaccctgaaatccaaatccgaatccaaccctctccaacgtcactctcaccctctctctgttttctgtctcttctttcttttatcacacaacaacatacacacgccctcttcttcttccttgcatggactaactcagagactaaaccataccaaaaaaaacaacatgtgttccgcagagaaggacgggatcatgctcttcggcgtgcgcctctccgtcgtggataaccaccccacctccttcagaaagagcgctagcatgaccaacctttctcagtacgagtctccaccaccgcacgatcccaacgcagggtatgcctcagacgacgtcgttcacccctcccgtcacacccgcgaacgcaagcgaggggttccgtggacggaggaagagcacaggttgttcctgctgggattacagaacatcggtaaaggagattggagagggatttctagaaacttcgtgaagactcgtacgcctacacaggttgctagtcatgctcagaagtacttcctccgccgtcacacccagaaccgccgccgccggagatctagtctctttgatatcaccaccgactcggtgatggaaccgtggccggagaaggaagaggaacaagtggtgttgccgtcagctaggtcgaaaccggttctgccggtgcctccgtcgtcgaagatggctgagttggacttgagtgggaagtcgctgtcgctgaagcttccggtatccaagccacctatttctaatgagaattttggcgggataccattatcggtgttgcttgaaggttaattaaatgcggtcttgattgaatttttgcatgtaaaattggaaatatactagtattattgaagagttggaatttagaagagggttagagaattattaattattgaaatgtatgtatatatttttctttgatgagttttctcttctttttttttaatgagtaaatgtatgtttatatgaatatgattatgattgctgccaaaaa

SEQ ID NO: 28413 - DNA, 1704 bp, Glycine max
  Clone ID: TF_GmC1327_1
cttgaaactcagaccaactgacacacagagaaagagagagagagagagagagagagaagcatagcagacatgggaagagctccttgctgtgacaaagccaacgtgaagaaaggtccatggtcacctgaagaagatgccaaactcaagtcttatattgagcagcatggcactggtggaaactggattgccttgccccagaaaataggccttaagaggtgtgggaaaagctgtcgtcttagatggctgaattatcttcgcccaaacatcaaacatgggggtttctcagaagaagaagacaacatcatctgcagcctctatgttagtattggaagcaggtggtcaattatagcagcacagttacccgggcgcacagacaatgatataaagaactattggaacactaggctgaagaagaagctccttggcaaacaaaggaaggagcaacaggctcaagctcgccgagtcagcaacaaccagcagaagcaagatgtcaaaagagaaaccgagaatttgatagtggcttctgaagtcatgatcaatcaagttccctattggtcttcttcagagttttcttctgtgcctatgccagtgaccaatgcttcttcatttcaacactatggtctgaacaatcaaacatctctcaggagcatgatggttaacaaactagagggaattacattttccaacgatcatcatcagcagcagcagcaaccatacaccaatgcatgtgaaattccctccctacaagaccaggtttttccaaccatggtaaatcaagtaaccgtggtgagcaatgaaaacaatagtggcacttatcagccatcaaatatatttcaagggtttgaaaacttcccaagtgatttttgtgaactggtctgtgtcaacccccaacaaatggaggcttttaattatggaatggaatccatggacatgactatgagcaatggtggcagcacgaacacgacttcaacagaaagcactagttggggtgacatgagctccttggtttactctcctttggtatctgactatgaacgttgcagacaaggaataattcctcaagatcatgttgttgctttcgaagagtgtaagtactttggaatgcagatgcaataacggctctgaatacgaggtgtgtacatgtcaatttgtgccgctaaaaaaaattggtactggccaaaaccctaatgagttcactttgcctcacataattatttgttggttttgtagtttcttgtttcattcaaactgtgcaagtttctgccatatgtgttgatacatattgagcacaactcttttgttttgggtttcttaacgattatgtttatagtcttatatgtatggatgctacagaaggaagaatcttaattagtaatagtgcgaggcccttgaattcctaaatgtgtcagttttctgctgctcctagatgatcaagagtgcataggataatagtttggatacgttacatatgtttataccactcgatatagtttaattatgatgacatttatgatcatatttgtacttgaaaaatctcaggttctcacggaaatacatgattgagttgtatctttcgcatagttctagcaaaaagctgtgggaagtttgaaaggtgcataacattttggctgagagttttttagctttagcacccgaggcatcaatatctggctgcattcttttaaaaaaaaaaaaaaaaaactc

SEQ ID NO: 28414 - DNA, 659 bp, Glycine max
  unsure (1)..(659): unsure at all n locations
  Clone ID: TF_LIB5118-018-A1-PF1-G7
ctttgccccattccccctaaccaagtttaagtttctagaatggaagaaatgaacagaagctcctcctccacttcctcttcctctcactgttgctctttagagtccaaccataggagccccaacaagccagacagaatcaaaggcccatggagcgcccaagaggatcggatcctgacacgactagtcgaacaatacggccctcgaaactggtccctcatcagccgctacattaagggcaggtccggcaaatcgtgccggctgcggtggtgcaatcagctgagccccaccgtggagcaccgccccttctcgacccaagaggacgagaccatcatcgctgcccatgcccggnacggnaacaggngggccaccatagcccgattattaccgggccgaaccgataacgccgttaagaaccactggaactccacgctcaagcgcagagccaagggtattaacgttaatgttaatgatgccgacaacgaggatgacccgttgaccgcattgactcttgctcctcccggtattgctaatgccactttgaccgaagacgccgtaccggaccaccgggcctcgccggagagtgcggcggaggggttttgggatatgatgagggatgcgatcgcgagggaagtgagggaaaatgcgccttctaatttttc

SEQ ID NO: 28415 - DNA, 1667 bp, Glycine max
  Clone ID: TF_GmC84_4
tattcggctggagcacaccttcttccgttgttctcttccaattgccttcattttctcggaaaattcttcttttccgagaaagttcgtgtttttactgttgaatcgagaattcccaaatcgggggtgtctgaaattcaaagctgttgttgttgttggcggctggggttagtctctgtggaggtttgggtgttttttgaggcagagcttattctcattttgctccaatggagatgcaggaccaaatagaaagcacaagatcaaccatatttggctcagctagtaacatccattccaatgctgaaaagcaggccgaaaatgttgctcccaaggtgaggaaaccatataccattactaaacaaagggagaagtggacagaggaagagcatcaaaagttccttgaagctttgaaattgtatggtcgtggctggcgccaaattgaagagcatataggtaccaaaactgctgttcagattcgaagccatgctcaaaagttttctctaaggttgtgagggaatctgaggtcagtgatgagggttctatacaaccaattaacatacctcctcctcggcctaagaggaaacccctgcatccatatccccgtaaatcagttaattctttcagaggacccaccataccaaatgaacagaaatatctccatctacaaacttgttggttgcagagaagacaccccatctccaacctcggtgctatctacagttggttcggaagcatttgggtctcaattttcagagcagactaacagatgcctttcaccaaactcttgcaccactgatattcactcagtcagcttatcacctgttgaaaaggaaaatgattgcatgacatccaaagaatctgaggaggaagagaaagcatcaccagcttcacgtcctttatccactgtttctaacccaaaaatgtgcatgaaacctgagtttagttccaaggagatagaagatgctactgatatgccacaaaccactagtattaagctttttggaagaacagtctctatggtaggtaatcagaagtcactgaagatagatgatgatggtaagccgataactgtgaagtccgatgaagtagatgatgttgagaatgagaagcttggccaatcaggagaatccaagcaagtagatacacaattatcactcggcgtggttagtggtaactggcctataacacccgatgctgatggagctaatgtgaccagcatagagcccccaaaggagaaccaatgcttcagtgaatctgcacctgatgcattttttccgcagtggagtttgtcccaaggccttccacctttctacctgaggccatgcaatcaggtcctaatcccttgcctcttaggccctcctctttgaaagtaagaacaagagaggaggaaagttgttgcactggttccaacactgaatcagtctgtgacatggaaaaccaaggcaagaactcagatgctgttgattctaagtttcaaaaatatcacgaggaaggagctgcaccccagaagaagcctgcaaggggatttgtaccatataaaagatgtttagctgaaagagatggacattcttttattgttgccatggaagagagggaggggcaacgagcacgtgtgtgctcatagccttacattctatttttacatgattcataatcatggtgttaatcag

SEQ ID NO: 28416 - DNA, 1900 bp, Glycine max
  Clone ID: TF_GmC283_1
ctaactcttactttcccctctgttactttctcgagccgattcggctcgagctacacaacaccaagaaatccaaatctaattccttatctcgtttgatatcctgatttctactctctcagtttccactctattgtatatctgtatatgtatgtatgtgatgaactgatgatatttgcatttgcttttatagtttgcttggtcaccaagtaacgacaaagggaaacagtttctagctttttcttggctgattgtaaataatctctctcttttctatattggatcatagctttctgcaccctcttcctcttaggttctcctatttttctctcttgtcgtggacctcaactttgtaggctcaccttagaaacaaaacttcttttctttttggcgggggtgagagttgctatcttattcctggtttcatctacaagacactaacatctttgttgtttttagtttcagaattcgttatactcacccacacaccaaaattctggtacaccatgatttttccaaggttttgtacgaatctaaaaggtatggcttttatagattctcaactttatcttgatcacacaggtaaaagattctgaaatctgtgcaccttgtgaatcaaagctctataatttcttcctttctgtgtttctgtgagcacccttttctagttcctctccatttccatctctttaggaacttaattcaactaagtttttgtatgcttgtggcttgagatatggaattggaaaccatctaccctccttgttttatgccaaattcaaattggtttgtgcaagagagccacagcacagagtggactagagaagataacaagaagtttgaaagtgcccttgctatatatgacaacgacaccccagatagatggttcaaggtggcagctatgatccctgggaagactgtgtttgatgtgatcaagcagtatagggaactggaagaagatgtgagtgaaatcgaagccgggcgtgttccaattcctggctatcttgcctcttctttcacctttgagctggttgacaaccacaactatgatggatgcagaagaaggcttgcacctgtcagaggctctgatcaagagagaaagaaaggagtcccatggactgaagatgaacacagacgttttctgatgggacttttaaagtatggtaaaggagactggagaaatatctctcgcaattttgtggtcactaagactccgacacaagttgctagccatgcacaaaagtactacataaggcaaaaggtttctggagggaaagataaaaggagaccaagcattcatgatataaccactgttaatcttacagaaacttctgcatcagataagaacaagcctcagttatttaatgcgtctcctgtgcttgcaccacagcagaagctgaatagcatatcaaaggtacagctgggctggactagtagccactacaatgatggatcattcatggttttcaacccaaatagtgatgccttgtttgtgtcatcttcacctgatgtcacttctatggccctgaaaatgcaagggcaagatctctatgactgtgctttacatgaggcttatgccaaggtaaaagttccaggtttcagcatggctcctagagacttcaataatgaagctgtttttggtattcatgcactgtaatgccaaccctgatgatgttaaacaaagaaaattccacgtcatagatcattgttctgtaggattaatgtagatgaccataagctagctagctactttgttcatggttagtgaacaacctaaaagaaaactagaataatgtttcaatccttaaaaactgaatttggaatgaacttattttaaagttttcctctttatgtctatttctttggtgacccgatcagatcgagtatggaaaaccattcaggc

SEQ ID NO: 28417 - DNA, 1416 bp, Glycine max
  Clone ID: TF_GmC948_1
ggtccggagccccggggcgacccacgaataaacgaagaagcgaaatctcctagaaagcgagtttctctcttctctctctcaattttcacatagtcagcgaaaacaaacaaactattggaacacgaaacacaaacatcataacataagcagcagcagcagcaccacccaccttgttcattgttttgaattcaactgagaaaaacgacaaacgaggatgtttcaagagagcagcgcgacacggtggccgactcagccgactcagtggactcgctaccacgacaagctcttcgagcgggctctgctggtcgtgccggaggacctgccggaccggtgggagaagatcgccgaccaggttcccggcaagtcggcggtggaggtcagggaacactacgaggccctcgttcacgacgtcttcgagatcgactccggccgagtcgaggtcccgagttacgtcgatgactcggtggcgacaccgcccagtggcggtgctgaaatttctacttgggacaacgctaatcagatctcattcgggtccaagcctaagcaacaaggcgacaacgaaaggaagaagggcacgccttggactgaagaggaacacaggctgtttctcattgggctcagtaaatttgggaaaggagattggagaagcatttcaagaaatgttgttgtgacaagaacaccaactcaagtagctagccatgcccagaaatactttctccgccagaattcggtgaagaaagagaggaagagatcaagcattcatgacataaccactgtggacagcaactcagttcctgtgcccattgatcagaactgggttcctcctccgggtggttcagtgcagcaatcactgcaatacccatcaagcaacatgctcgatcaaatgggtacatttgggtattcaaactatggctttggcatgtaaagaatactagactagaagccgtatgttctgtatatagtgctgtagatttgattcataagttcccctatgtaaagttttatggttttgctagctgacaagggtgattaggagtattgctaattattgaattcattagtgtaggtttcgtttgaatacctttgtggatcctataaatgaaccatgaggatgaaagggtagtgaatactaatagtgaacctttaggaatgaattcaacaggtatggaaattctttgtatgtgcccaattcaattactgctttgcaattcggattataagtattgaaatgaaaccctaaaccttggccatttcttcagtgagttcagttgagtgaaagcttactgagtatgcattattgcattcaatcagcaaacaaagcctgtttcggttgctgtttcttgatggctttttatggttaaagcctgcaattttattgaagttaatgaaaagagttgcagaacttttatgtagaaa

SEQ ID NO: 28418 - DNA, 1363 bp, Glycine max
  Clone ID: TF_GmC948_2
ggctcgagggcagaagcgagatctcctagaaagcgagtttctcttttctctctctctttcaattttcacatagtcagcgaaaacaaacaaactattggagatttggagcacgaaacacaacacaagcagcagccacctcgtttcattgttttgaattcaactgagaaaaacgacaacgaggatgtttcaggagagcagcgtgacgcggtggccgactcagtggactcgctaccacgacaagctattcgagcgggcccttctggtcgtgccggaggatctgccggaccggtgggagaagatcgccgaccaggttcccggcaagtcggcggtggaggtaagggaacactacgaggccctcgtccacgacgtcttcgagatcgactccggccgagtcgaggtcccgagttacgtcgatgactcggtggcgatgccgcccagtggcggtgctggaatttctacgtgggacaacgctaatcagatctcattcggttccaagcttaaacaacaaggcgagaacgaaaggaagaagggcacgccttggactgaagaggaacacaggctgtttctcattgggcttagtaagtttgggaagggagattggagaagcatttcaagaaatgttgttgtgacaagaacaccaactcaagtagctagccatgcccagaaatactttcttcgccagaattcggtgaagaaagagaggaagagatcaagcattcatgacataacgactgtggacagtaactcagcgcctatgcccattgatcagacttgggttcctcctccgggtggttcactgcagcagtcacagcaatacccatcaagcaacatgcatgatcaaatgggtacgtttgggtattcaaactatggctttgacatgtaaagaatgctagaagcagtgtgttctgtatatagtgctgtagctttgattcataaggttcccctctttgtaaagttttatggttttgctagctgacaagggtgattgggagtattgctagttattgaatttttatcagtgtaggtttcgtttgaatacctttgtgaatcctataaatgaaccatgaggatgaaagggtagtgaatactaatagtgaacctttaggaatgaattcaacaggaatggaaattctttgtatgtgtccaattcaattactgctttgcaattcggatttaagtattgaaatgaaaccataaataaaccttggccatttgttcagtcagtttcacttgagtcaaagctgcttactatgagtatgcattcaatcagcaaccaaagcctgttttggttgctatttcttgatggctactttattatggtaaaagcctgtaatcttattgaaggtaatgaaaagagttgcag

SEQ ID NO: 28419 - DNA, 479 bp, Glycine max
  Clone ID: TF_GmC74328_1
aattcggctcgagtaaacattgacttgaaactgatcagatcaattaacacacagagagagagagagagagaagcatagcaaacatgggaagagctccttgttgtgacaaagctaatgtcaagagaggtccatggtcacctgaagaagacaccaaactcaaatcttatattgaagagcatggaactggtggcaactggatagccttgcctcagaaaataggcctcaagaggtgtgggaaaagctgtcgtctcaggtggctgaattatcttcgtccaaacatcaaacacggaggtttctcagaagaagaagataacataatttgcagcctctatgttaccattggaagcaggtggtctattatagcagcacaattaccagggcgcactgataatgacataaagaactattggaacactaagctgaagaagaagctactaaggaagcaaaagaaggagcaacaggctcaagctcgcaaagtt

SEQ ID NO: 28420 - DNA, 2119 bp, Glycine max
  Clone ID: TF_GmC3745_1
ggctcgaggaatcaaccccaattgcagggacaacaaaagcacgagctagacgctggacagaagaagaggacaaacttttgagtgagaaggtcaagaagcacaatggaaggaactggaagaaaatagctgcatacctccctgggcgaactgacgtccaatgtttgcatcgctggcaaaaggttttaaatcctgatcttgtaaagggttcatggacaaagaaggaagatgatcgcctcattgaactggtcagaaagtatggtatcaagagatggttttttattgcaaaatacttgccaggtcgtattggaaagcaattcggctcgaggtggcacaatcatcttgatccaaccgtaaagaaggatgcatggacagaggaggaggaactaatacttgcttactattaccaaatatacggcagtaagtgggcagaaattgcaaggattcttcccggaaggtactttgtttgaatgttaatatgcaggcttcaaaacattcatcaatacgtatgtataaaatatgattttaatcatgttaatatgatttgattttggttataatttttcaaaaaaaaaaatctgtttattttgagccaattatactattcaataatgttgaacttgaatctttttcaacatgctttggttttgtgatgtcataaatatttaattccaactttacgaaatatcattcacctcacttctttttcacgagatttcccactgacattaaggactaaaatgttcacttcataaaatcttcactttgttttctgactcttcaaatactattttctgctaatgacatggactaaagtaacctgcacatttaatttcaaggtctaaaatagaaattagaagtatattcaatgtttatgcatcttctctcttgtgattgtgacatgaccgtacttgtccatgttagttcgcctctcctttgagaaacaatgtaggctagcaaaagtagaacaatcatattgaagacattgataaatgtacatgcatttctggtttaagtgctacaagtctttctatatctaatgacccatgataattatttgtatcttttgggggagccaggactgacaatgctataaaaaatcattggaactgctcaatgaagaagaaattggatgcatcacccttagggtgtgacataaaagttgccccttccggtttctgtgcttctggaataaggcctgaacatgttgtggctaaagtggagggtcaaagtttcaatggaatggtttctcccaagcagagtcactggttgaatcgcagtgttgataacattctaacaaaattgattcttcaaaatgattcaggagaggaatcttgctctgcttcatccagggggactcctactcctagggcctcaagacagtttttggataattctctggattgtttacctctttccagtactgttacagatgaggcctatgagtcactgaaacggcaaaaggtttatttttcagatacagagcttaaagtgggtgatgaatctgacagtccccttttgaatttgagctactcaaaatctgccaaccgtgagaagaaaggtcaagctggaaatggaggcaattacaactcaaacaacactatgccacatagtgtagatgaattcagtgaatgtctaagtccaaaaacacacatggcattggcatgtgcatacaataacggttgtactcccccaacgtctatactcaagaatgacacaggcgacatcaacccagaaactttgctaagaaacttagcaatgacctatgagaatgttccttctattataaggaaaaggacacccaagaaggcaagctgttgtgaccgtgaccaagcaccttcgagaatgatcgtaaattctcctgaagcagaatgtgttattggcttagataatttaaaactgaacagggggtttattccattccttcgtagaccaaatactcagccatagctagatctatggaaggatgcataaaatgacagacatgatatgctagtcaattgtaatgctcctttgacatagcagaattgtttaatacagtttttacactagctcaactttattcaaactcgaattgaacttctttattcttaataatatattttttattgtaacacaaaaa

SEQ ID NO: 28421 - DNA, 786 bp, Glycine max
  Clone ID: TF_GmC142751_1
ggctcgagcataactccatttttctctccctctcttctctttcttaatttacctattctctcacgtctcaaatattttctcctccatctctcgccagcttcaagatatcactcattgagcaaagtaggtcaaaaaatttgctcaacaaggtaaaacatttattagttagctagcagtatggggagagcaccttgttgtgacaagaatggcctcaagaaaggaccatggacaaccgaggaggaccagaaactcattgattacattcagaaacatggatatggcaattggaggacactcccaaagaatgctgggttgcaaaggtgtggaaagagttgccgtctccgttggacaaactatctacggccagatataaagcgaggtcggttttcatttgaagaggaagagacaataattcaactacatagcattcttggcaacaaatggtctgcgattgcatctcgcttaccaggaaggactgacaatgaaataaagaattattggaacactcacattagaaaaaggcttctgagcatgggaattgacccggtgacacacagtcctcgacttgcccatgtggacatctcctccactcgatccgctgctctccatggcccttctcaacgcatcttcctatggctcctcgccatgcaccagcccatggcgcccccgcagcctccagtacgggctgctccccgcgcctccacctctcgcctcctcccccttctccccctcgccgcgcctcctccatgaccccgatgacagaaccagctttgtgatcctcaaatt

SEQ ID NO: 28422 - DNA, 291 bp, Glycine max
  Clone ID: TF_uC-gmflminsoy066h08b1
ggggtcttgtcttatgatcctggagtggggagggggccatggacgatggaagaggacttaatttggatcacctatattgccaatcacggggaaggggttagggactctttggtcaaggctggtgggcttaaacattccggaaagagatgccggctccggtggctaaactaccttcgtgctgatgttagaagagggaatattacactcgacgaacagcttttgatcatgggacttcatgcagagtggggaaacaggtggttcaaaattgccaagcttgtacccggaaggact

SEQ ID NO: 28423 - DNA, 1572 bp, Glycine max
  Clone ID: TF_GmC1225_1
aagactttacattggggggtcattactcattacaagctagtgtcctgaagacttttgcatttagtttggggaagtgcaatattggtcaggtagctaggaagtggtgttgtttttgtgttagtgctatgggaaggcaaccctgctgtgacaaacttggggtgaagaagggtccatggactgctgaggaagacaagaagctcatcaacttcattctcaccaatggccaatgctgttggcgcgccgtgccaaagctcgctggcctcaagcgctgtggcaagagttgtcgccttcgttggacgaattatcttcgtccagacttgaagagagggctactcacagaggcagaggagcaacttgttattgatctccatgccgattgctgtctcaggtggtccaagattgctgccaggttacccggaagaacagacaatgagattaaaaatcattggaacacccatatcaagaaaaaactccttaagataggtattgatcccgttactcatgagcctctcaaaaaacaagctgcagcatcttctcaggatagttcatcctcccctgcagagcatttgccgcaacctggcaataaccttgatgatcaggtcaaagaaactgaagggattcttctcaactcagaggagaattcaagttcatcacaagctgaaaattcttctggggatgattcacttttgctagatagcatttgcagcgacgattctctattaaacagcatgtggctggatgaaactcctctggtggaagcattatgggacacaacacctaaccttgagaatactagtaataacatgggtttgttaccatcttgggaggataattgtgcttggttattggactgtcaagactttggtattcatgattttgggtttacctgtttcaacgagatagagtcacatgcactgcaaacgataggaatgaaggaagaggggcattagcacgggaatttaattgtctatgaaagaaaattaagggtaagatatcaaatctataaatgtgacaaaataccacgggctcaaatttaggttcttggtgttgaattttatctacctagtattttacaaaaatgtttctctcggaaggtggaaggtgaacgtttcctcttgtgaggttcctcgccaaccaaaacacaaaattgatagcaaagcaaaaccaaatcatcatcaaaatggcacagtacgtacgtactttcttcttctaattaaatgctgcatgtatttatgtgtacggtagggacataacaaatgggaaatgtctagtgagtgcagaaacatattgtacaaagaagtctactttgaaaataatggtaaaatcttttgtgattacaagttcacttgtattctctcctttcctgttttactgtcccattaaaaataaatggataaaaacgtagacgaaaaaaaagtcccaagttaaaggaaaagatttttaataaccccgaacttagcttttagcccaaaggtgggataataagtggcatggaaaaattccccgtgattttagggtgggttttctaaccaaatgagtttgttttgaaataattttcccagggttttcccc

SEQ ID NO: 28424 - DNA, 1382 bp, Glycine max
  Clone ID: TF_GmC148_1
aattcggctcgaggcttcagtacttgctacctttctataaaggtagagagaagagaggacccttctcttgcatagttcaagtgagtgagagtgccaaaaaatgggaagggctccttgttgttccaaagtggggttgcacaaaggtccatggactcctaaagaagatgcattgcttaccaagtatatccaagctcatggagaaggccaatggaaatcactacccaaaaaagcagggcttcttagatgtggaaaaagttgtagattgagatggatgaactatctgagaccagacataaagagagggaacatagcaccagaagaagatgatcttataatcagaatgcattcacttttgggaaacagatggtccctcatagcaggaaggttaccagggagaacagacaatgaaataaagaactactggaacacccatctaagcaaaaagctgaaaattcaaggaacagaagacacagacacacacaaacaagttcaaattacaatgggtagatcaccttgttgtaacaaaaatggcctcaagaaaggaccatggacaccagaagaagatgatcttataatcagaatgcattcacttttgggaaacagatggtccctcatagcaggaaggttaccagggagaacagacaatgaaataaagaactactggaacacccatctaagcaaaaagctgaaaattcaaggaacagaagacacagacacacacaaaatgttagagaatcctcaagaagaggctgcaagtgatggtggcaacaacaacaaaaagaagaagaagaagaagaacggtggcaaaaagaacaagcagaagaacaaaggcaaagaaaatgatgagccgccaaagacacaagtttacctaccaaaaccaattagagtgaaggcaatgtatttacaaagaacggatagtaacaccttcacctttgattccaattcagctagtggatcaacaagccaagagaaggaggaaagccccgtgacaaaagaatcaaacgtggttagtgaagttggtaatgtgggagaagaaagtgatggttttggcttcttcagtgaggaccatgacttagtcaacgtctcagatattgaatgccactcttattttcccacagatcatggcaacctacagcaattgtatgaagaatatttccagctcttgaacatggaccatggccaattcgaactgaattcatttgcagaatctttattagattaaaagaatatcaacaaagatttgttcagttcatgaagatcacattgcttacatataaactttgttgatagatcatatgtaaatatatctgtaaatgatctctgagttatgagatcttttttgtctttaataaatatcgccatctaactcaaaaaaaaaaaaa

SEQ ID NO: 28425 - DNA, 1334 bp, Glycine max
  Clone ID: TF_GmC600_4
ggctcgagtaaagttagaataatattccctacaattagcagaaaaaatggttcagcaagaaatccgaaggggtccctggacagaacaggaggactacaaattggtgtattttgttggcatgttcggagatcgtagatgggactttatagcaaaggtatcaggtttgaaggtggagggagactgtaaataaaataggtatgaatatttggacatgctaagttatactatgaagcaccctttaaccacctcactttgttgtaggtttgaatagaacaggtaagagttgcagattacggtgggttaattacctccaccccgatctcaaacgagggaagctcacaccccaagaacaacacctcgtcatggaccttcattccaaatattacctccaccccgatctcaaacgagggaagctcacaccccaagaagaacacctcgtcatggaccttcattccaaatggggaaataggtttgagaaccatgcagaaataattaaactataagctacctaccttccaatcatcatcactcataattttaattaattttttcctaccatacagtactattagtattaattagttctttggcttatgtaattttttttttttagatagaataggatatcaaaagatttataataatttatatacattgagctagatcgtttgacaccttattttgttaattagttactttgaatttttttccttaattactttgatgattcctttgcagatggtcaagaattgctcgcaggctaccagggcgaactgacaatgagattaagaattattggaggactcacatgaggaaaaagaaggctcaagagaaaaagcatgcatcagcagcatcgcctgtttcttctagttgtcaatcttcactgtcctcaaacaaccatgttgtggattcacatgcttccaaagaggttggagaagagagttgttatgacacaggtggatatgatgatggcatgatgatgggtttaattggtggtgaaaaggggtactccatggatgatatatggaaagatattatgtcagaagaagagaacaacatttataataataatcttcaacctgtctatgaagggcatagtgaagagggatgcaacttctcttgtccaccaccaccaatgattatgccttctccaccatcatgggatcagtacaacatttcttctcaacccttatgggtgatggatgaagaagaaagtaataagatgttattccctacactaagtgaccaatattttccttactatgaacaagggaacgcatttctaactggctaatcaggagattctttttttcttttgtcctttaaaaattatc

SEQ ID NO: 28426 - DNA, 697 bp, Glycine max
  Clone ID: TF_GmC1327_2
ctttacttgaaactcagaccaactgacacagagagagagagaagcatagcagacatgggaagagctccttgctgtgacaaagccaacgtgtaagaaaggtccatggtcacctgaagaagatgccaaactcaagtcttatattgagcagcatggcactggtggcaactggattgccttgccccagaaaataggccttaagagatgtgggaaaagctgtcgtcttagatggctgaattatcttcgcccaaacatcaaacatgggggtttctcagaagaagaagacaacatcatctgcagcctctatgtcagtattggaagcaggtaattaaataggttccttatattgatcagcaaaactcaatttgaattggttattgatattaagcagcctctatgatatttaacggtggactttaattacttaatcgatcgcttagaattccttagaacacatatatacatgcaggtggtcaattatagcagcacagttaccagggcgcacagacaatgatataaagaactattggaacactaagctgaagaagaagctccttggaaaacaaagaaaggaacaacaagctcaagctcaagcgcgccgagtcagcaataatcagcagaagcaagatttgaaaagagaaacggagaatttggtagtggcttctgaagtcatcaatcaagttccctattggtcttcatc

SEQ ID NO: 28427 - DNA, 934 bp, Glycine max
  Clone ID: TF_GmC341_2
ttgatcccctgtatatataaccactcttcctctcctccaaattaaaacacttatcatggatgttaagaaaggtgggtctgtagtacaagcacaagtgaagttgcagaagcataacgaaaaggagatgggcatgagaaaaggtccatgggcggttgaggaggacaccattctggtcaattacatcgccacacacggtgaaggccactggaattccgtggcacgatgtgcaggtctaaggaggagtgggaagagttgcagattaaggtggctaaactacttgcgcccagacgtgcggcgtggaaatatcacactccaagaacaaatattaattctcgaccttcactctcgctggggcaacaggtggtcaaagattgctcaacagctaccaggaagaacagacaacgaaataaagaactattggaggaccagagtgataaaacaagcgaagcagctaaagtgcgatgtgaatagcaaacagttcagagacacgttgcgttacgtttggatgccgcgcttgctggagcggcttcagcccacatcacaagcactggagccaaaccaaagtggacttgtgttacacgcttcatcatcactgcttccttcgaattccgaccatagtattgaaagggggtcggatctgtggccaggtttcaataaccaaatgttgttggaacaggggagtggcggtgacttgttggaaagtttgtgggatgacgacaatatgtgctttttgcaacagctttcttatgacctccaaatgaaataaaatacaattcccttccgtcacgcattctgcaatgcacagtgctgaaagttgagcatgcgttcaatgaatattgttttcctcactttcatgtacatattaaatcttagagactaaactagtcacgtgcctaaaagttgataccagttgaaataatatggtttattaatc

SEQ ID NO: 28428 - DNA, 1770 bp, Glycine max
  Clone ID: TF_GmC6838_1
ctcgagccgttttcacattttcatataacctcttgtaacctagggctaaagctacaccctacaacttcccctctttgtgctttcctaaaccttgtatttatataattcatcttttataattttattcgaattcaaatataataccaaaaccgatccttgtttggccattggctctctacgtactagcggtttgaaacatttgagactcaaagagtaagttatatatatatatatatagagagagagagagatagagagaagaaattggagatagacatggggcatcactcttgctgcaacaagcagaaggtcaaaagagggttatggtcacctgaagaagatgaaaagctcatcaactatatcacaacttatggacatggttgctggagctcagtcccaaaacttgcaggcctgcagaggtgtggaaagagttgcagattaagatggataaattatcttagacctgatttgaaacggggaagcttcactcctcaagaagctgcactcattatagaacttcatagtattctaggaaacaggtgggctcagatagccaagcacctacctggaagaacagataatgaggtgaagaacttttggaattcaagcataaagaagaagctgctttctcatgatgttgttccttctttagccacattttctgatcatattcacggtcctcccaatggttccatggaaagtttcttccctttaactgacaaccctatcctaaactcccatcatcacttagaccagctattccttcccatcatcccatccccaatcctccaagcctttgatcatcatcaccataataatgatatcaagattgacataaacaaattttttaataataatgccaatttcctacaatattttcagaatccaatgccggaaacagtgcctccaatatccaatactactattccatctttgtatgaagaagatgcatggtcttctttggggtgtgtacctattcaccttaatccaaatcaagaaaatcaaatcatgatcaccaaaagtgatcatactaccccacacttgattgttgagaaattcatcaatccaagtacatggcagcagcagcagcactctgtggaagtggaaccccccattttgccaaaagtctgtgagagcattgaggattatgtctgtagcatcccatattcttcttctgttaattcacaagaccaacatgtggaagctgttgcgtgtttcacacctgttatttgtccacaagatcaagtggagtacattgatgccctcatcatgtcatcattgccatcctcaacaacaacatcttcatcagtagtatcattcttccaagcagacaaatagtcacaaaacctatcattccttcaagttaattggttgtcgtcatgagcattggttactatatcatataataggttaattttatgtgtatataattgagtagtgggagagagtactctatttatatttgtgataagcagaattaattccatgcattttaagggggggagaacatgcatatgcatttaatttttctcttgaattttggaataagagggtgagtagatgctcctatcggcaaacctctgagccttgctagttcaggctcgatcttccactgaacgatgtttgctgaagttccataaatatgtacgtctaggttctttcacatgtttgtcgaccaaaagtacgtatccgtgtatgattattgtttctttgtgaagtgctgtatgttgtataacaatcatacgatgcatagttgtgcactttaagttg

SEQ ID NO: 28429 - DNA, 574 bp, Glycine max
  Clone ID: TF_GmC175358_1
gcaaaacatacaattctatattattttatttcataattgatacattacctattgcctgaaataaactgtatcacattgtttattacatttatcactttttttatttccctctgtccctcttatttaatttccactaaactcccttaaaattaaaaaataggatttacaatttcataactcttttcaagcttgtgtaacttgataatagtttcctcctcttccttggtgtagtttcctcttttgaggtttggccttaggtaattaagccaccttagtctgcaactctttccacatctcgcaagacctggcaaattaataacaacaacaacaaagtaaaaccaattacaatggattcatatatgatttagctataatttgtgcatgtgtataattaaacattgaatatatggttcctacaaattcatgtagaagttaaaccaaaccttgaaaacagagaagaagaaaaattgaaagccacattggcgactatattgatggtacatactctcacatacttaatttgtttctaaccaaactatttggtaagttccatttccacctggattgcatgaaa

SEQ ID NO: 28430 - DNA, 712 bp, Glycine max
  Clone ID: TF_GmC78832_3
aaatgttatgatgcatgcagaaaaaagccctgcaactctcaggagttctgatcaggagagaaagaaaggggttccttggacagaagaggaacatagacgttttcttatgggacttttaaagtatggtaagggggattggagaaatatctctcgcaattttgttgtgacaaaaactcccacccaagtggcaagtcatgctcaaaagtattatataaggcaaaagctttctggagggaaagacaataaaaggaggcctagtatccatgatatcaccattgttaatcttacatcagatcaagagaagcctcttttattcaatgatgagtctcacatgacttctgagcaacagaagctaactagcatgccaaaagtacaacttgaatggcggattaatcaccacaacaatggcgggtcaaattatgatatgttcgtgtcacctaattcatctggcatctcttccaagaccctcaagttgcaagggcaggatttctatgaatgtgcttttcatgagacttatgccaagcttaaaaatacgggtttcaggacagcttctagagacttcaacaaggaagctatttttggtattcatgcactgtaatgcccactttgatcatgttatgaaaaacatacaccaagggtacttgttttatgttacgaacataaataatgtttcattccttcaactgttttggaatgaacccttttccaagtt

SEQ ID NO: 28431 - DNA, 890 bp, Glycine max
  unsure (1)..(890): unsure at all n locations
  Clone ID: TF_GmC73535_1
actcctcctcctcctcctcctaccctttcattttcatttcccacatttctctctctctctctcctatacttcctctttacactccccatctctctcacttttcattttcatctccattttttttctctaaaactccaatttcccattttacccctcactgtccccacgcgtccggccctcgctccgattcctaggaacagggttttcagttttcactgttccattaagtttccgagctcaattcagcttccgattcgccgcgcgcaaaacgacttcgtttttggattttggcgtcgcgtcctattcagaagctatatactataagatgagacgaatgaagaaagatattgaagatgaggtgcttcccaatgatatgagtggggcacagttgaatgatgagagttatgaaggaagtgctggcattgttctgaagaaggggccatggacatcaactgaagatgatattttggtggattatgtcaagaagcatggggaggggaactggaatgctgttcagaagcacaccgggctgtttcgttgcggaaaaagttgtcggctgcggtgggccaatcacctaaggccaaatttaaagaaaaggggcgtttgccgcagaagaggagcggctgattgctgaacttcatgccaaaatgggaaacaaatgggcacgcatggcagctcatttgcctggtcggacagataatgagataaagaactactggaacacccggatcaaaaggcgtcaacgggctgggttgccactttatcctccagaagtgagtttgcatgctttgcaagagagtcagcatagccaaagcactggtggacttaaatggtggcgataaaatgcatnctggattcttgcagaaaaacagttatgagatacatgatgc

SEQ ID NO: 28432 - DNA, 1926 bp, Glycine max
  Clone ID: TF_GmC794_1
ggactacgacccttctcatggggcctcgctcttatattagttcaacttcttttctcagctgccagttcattttccttcttcatatcatctctctcactgtcacatgctctctatctatcccagccactccaatagctttggttcactgccacccctgctgacatttttctcgttggaataaacaaactttgtgttaacttaaaaggtttaagggaaaaagaaaaactacaaaatgggaaggcactcttgttgttacaagcagaagcttaggaagggtctttggtctcctgaggaggatgaaaaacttctgaggcatattactaagtatggtcatggatgttggagttctgtgcctaagcaagcaggtctgcaaaggtgtggtaagagctgcaggcttaggtggatcaattatttaaggcctgatttaaaaagaggaacattctcacaagaagaagaaaaccttatcattgaacttcatgcagtattagggaacaggtggtctcaaattgcggcacagttgccggggagaacagacaatgaaataaagaatctgtggaactcttgcttgaagaagaaactgaggcaaaagggaatagaccctgtcacacataaaccactgtctgaggttgagaatggagagaaagcagcagaagtgtctaatgaactgaacctcctgaaatcagagagctccaagtctgattcagcatcctatgagcagagaacatcaatttctccaaaagcctatgcacctgagatggatggttcctgcagctccaagattgaaatcaattttgtaaccaacaacaactgttacaacaaagacttgttcctagacaggtttatgagtagtagccgccaagagagttacaccactagttgccagccctcagatttgatggggaattttccaattcagatgagttatgcaaccaatgatcactgtctccctaatgattcaaactctagtcattggttcagccaaactggaaggtcttttgatatgaacactgacgtttcctttcaatgccgctgtcacttctatcaatcctacacctacaaccaacttgtttcttcctaataattctttttgctacaagccttcacttgctgttccctctgacaatgtttccataccctatggatcccattactgggaagccagtgcctccaacaacagcaatagtagcacagaattgagaagtagcagccccttgaacatcttttcttcttggggattggcagattgtggcacctctactactaaagaggcacaaattcatatgatggagaatcataatacagaagaagctaagtgggatgagtaccttcataaccctatctcaatgctggcttcttctgtacaaaaccaagctcctgagtctctatgcaatgatataaaaacatccatgcatttggtacctgatactttaggggctatgctacctcataaccataccaagcagcaagaacagtctcaaacttctagtttcttttccaaggacatccagaagctcagggcagcctttggacacatgtaaaaggattttagaaagggttccaattcaagggattgctattcttagtacaggtgtgtgaaaccacagattttttgctcttgtatgtaggtctaatacaaaacatttattttcaccttttgtttttccttcactttgtttaacatttgtgagccaaaaaccatttgtcttttactttcttctttcgggtgtggggtagaattgaagaagaataagggttgctattctgtcttaaatctactctttctttgctacactgtaaccgcaatggtgcattttgcagtgtccaagttcaaagccatcacagattttaattggtccatgcaaagtttcatttccattttgagtgccagggacagagttactttacctgcaaacaattttcagaatc

SEQ ID NO: 28433 - DNA, 502 bp, Glycine max
  Clone ID: TF_jC-gmXLIB3563P066cf08a1
ggataatagctttgggcctatctaatagcacacaataataaggaagatccccatgctccgatgataatggcctttagaaaggtccctggactcccgaagaagatcataaactagtccaacccattcaaaaacatggccctggaagtaggagagccctccctaagatagctggtctcaataaatgtggaataagatgtgggctaagggggactaactatttaaggcctgatatcaagaaggggaagttttttcaagaagaggagcaaacaatgttgcatctccattccatccttggaaacaaaagggcggcaatagcatcccaccttccatgcaggacagatcatgagatataaaatttctggaacactcccttcatgaaaaagctgatttcagatgggctttgattcaatgactcaccagcctacaactgaccttgtgtgcaccttgactcatttggtagctttgggcaacattacagacctcatgggccattttacattgg

SEQ ID NO: 28434 - DNA, 1911 bp, Glycine max
  Clone ID: TF_GmC567_1
gcgtaataatcctgtttaattaactaaaggctagcttcataactcttcccctcaccccaccaaaacaccccctttagtttcctggtattcttcttccacgtaggtttaatttggaggacacaagagttttcaaagcatcattggtggtggattgaaagacttggtgagtgacatcgtacacatgggaagacactcttgttgctacaaacagaagttacggaaaggcctttggtctccagaggaagacgagaagcttctcaatcacatcaccaaacatggtcatggatgttggagctcggttcccaaactagctggtttgcagagatgtgggaagagctgcaggttgaggtggataaattatctaaggcctgatttgaagagaggagcattctcacagcaagaagagaacatgattgttgaacttcatgcagttcttggaaacaggtggtctcagattgcagcacagttaccaggaagaacagacaatgagattaagaacctatggaactcgtgcctgaagaagaagctgaggcaaagaggcattgacccaaccacacacaagccactctctgaggttgagaacgacaaggacatgaatatgatgccaccctcaaccgacaaaagcactcagaaagcctctgtgggatccaatgaagtagtgagtaatttggttgatcatcatcagccaccaaaaaccatgcctaattcttcatcagagagataccctcttgaagtttccactactagttccacccaggaactgttcctagataggtttggcaccacccccaccacctgccacgaaaacaacaacaacacttctgatttggtaggatcatacttctccttccagcacttgaactatggaacaacaacaagcatggccctctcttcaaaccccaacacctctctttgtttcattctaccctccacttcttcagacattaataataacaactccatcataacctcctcctccatgctcccttcaattttcccaacacaacatgtgaagctccaatctaataacaacaacccttcttccatttcatctgatggggttcaaaactgggaaacaagtaacaacacaaacaaaaacaatgggaatatgcagttacaaagtagcacaaactaccttgacagcacgtggggggtggcagagtctatgaagattgttaacattaacaaagaggctcatgtagtgcctctacaagcagaacaagaagatctaaaatggtctgagtatctttataccaataccccgtttattctgggaaacaacacagcgcagaatcatcaaattcatacctctcaatctatctatagtgaggttaaaccagaaacaggtttcataacagacgagtcatgtgctacatggcaccattatcagaatcagacaccagctttactttccgatatatatagcaaggatctgcagagattttcagtgactttcggacaaaccctgtaacgtgtgtgtacgtaattaatatatgtggaaaattcaattcaacgaaagagaaaagatgttgccgacttaattttctaaccaatatgatgatgatccaggtcagaattttctctagtgagttctgaccacaggtgtgtgcaaaaaaaaaaaacttcctttctttctttctatattgtaaattttgttacagtgtaatatttgtgattaattccagcttcttattccacccaccattttgttaatcaaacatttatgtagaggcgctactgctgaataaggcttgttccaatccaaggcttctcttctcctcttacaaaatattcttcagttgttaattatggatgtgtagcttgtgagttgtgagtttttttttttttttttaattcgtgtgtacacagttgacagcattaattgttatacattttttttaccttaattcc

SEQ ID NO: 28435 - DNA, 1013 bp, Glycine max
  Clone ID: TF_GmC1102_1
gaaagatattccaacaccatggtaagagctccttactttgataaaaatggaataaaaaaaggtgcatggagcgaggaagaggataagaggctcatggcttatgttgagagacatgggcatcccaattggcgtcaactaccaaagtttgcaggattgcaaagatgtggaaagagttgcagacttcgttggatgaattaccttaggccaaatctaaaacgagggaactatacccagaaagaagagcaaataatcaaggatttgcataaaaagcacggaaataaatggtctctgattgctgaaaatctccccggaagaacggacaacgagataaagaactattggcacagcaacctaaagaagttcctaaagggcaatgagaacaccccttgtgatgatgatgatgagttaaagtccactgaatgcaaagagtttgaaaggtcaatgaacaaggctcatagtgctgattcccaccacattctggagagttcagtgtccatttcctcagaaacttcctacactgaaggcaattccccttcattctcctctagtcatacaacagaatcatcaaccctttccaaggaagaagatagtgttgtttcatggcaaacaatggatgtgcttagtagcaatttctggactgaaccgtttatttcagaaaatgctcttaatcaagactactttcccatttcatcctacggaacagaaccatttttcttgtggtagttgtgaacagttgttctaccaagtggctctagaatttccatagagttatacagcaaatagtgttgcatttttgctagtaagttcttgaaatttgaggaatttgggggaacttagtcacctgttatttcttaatttccaaatgaaggggaaaaaagagaaaaggtttgtgtcagcaactttgttttgcagaacaagcactcaggttatggagagaatcagaatatgttgtattttatacatgatacagtgaaaaattacagaaccaattgcataaaaaaaaaactcgagac

SEQ ID NO: 28436 - DNA, 1222 bp, Glycine max
  Clone ID: TF_GmC5525_1
ccaccacctcccatttatattcccttctctcaccaattactttccaggttccattccccccacacacaacacaacacaaccaacatatcttgttgttatttgctctctctcaaaccatgggaagatccccttgttgcgagaaagaacacaccaacaaaggagcttggaccaaagaagaagacgaacgcctcatcaactacatcaagctccatggtgaaggctgttggagatccctccccaaagctgctggcttgctcagatgtggcaagagttgcagactcagatggataaattacctcagacctgatctcaagagaggcaacttcactgaagaggaagatgaactcatcataaacctccatagcttacttggaaacaaatggtctttgatagctgcaaggttacctggaagaaccgataacgaaataaaaaactattggaacactcacatcaagagaaaactctacagccgcggaatcgaccctcaaactcatcgtccactcaacgctgcctccgccactccggcaaccaccgtcacagccaccgcagttccatcttctaacagcaagaagaagataaagaacaataacaacaacaacaacggttttcagttggtgaataatagtgcttatgccaacacaaagattggaaccgacatgattgctgctgaagattctaacagcagcagtggcgttacaacagaagaatccttccctcatcatcaactcaacttggacctttccataggtcttccttctcaaccccaagtttcttcttcgttgaacccagaaaagttgaaaccagaaccgcaagagcatgatgatcagaagccacaggttttgtaccagttgtatgggaagaacatcactggccaacaaggtgtgtgcctatgttacaatctagggcttcaaagtaaccaagcttgttattgcaaaaccatgggtacttctactactacggttactaccacaactgcgaccgataggaatctatatagattttacagacccatgaacatttagaccttaaaatgtcatgttaattaattattgtgacctctttgttaacatggaaatagttgtagaatcccaaaattttgagaaaatttagatcattttttgtgtccgagaaaatttagatcatttttgggtctaatttttttcattttggttttaatcttttatttatgagattgaattcaatttttgacccttaagttaat

SEQ ID NO: 28437 - DNA, 680 bp, Glycine max
  Clone ID: TF_GmC16783_2
ttcgggaaaacacacttaattttttcacgccttcaatacaccacactcttctagctccttgcaatggctgactcggatcgctcttctagtgaagtttctacacattctactgattcagggaagcgagggtcttccaaagttgaattttctgaagatgaggaaactcttatcatcaggatgtataaactggtaggggagaggtggtctttaattgctggaaggattcctggaagaacagcagaggaaatagagaagtattggacttcaagattctcaggttctagtgaatgaggtgccaagagttctactacgattggtgttcagtctaggatgagcaagaagattttgggtgcaagattagtgtgattttgtgggacataaaaactgaattaaagttggccttattttataggtatttgtatttgtattggctataaaaaaaaaaagtggggcagcaactatagaagctggtttgtgtaatattttccatcttgaaatgttgcctggtgtgatattttccatcttgaaatgttacttggtggttggtcttatctgaattgtacttattgatgttcaccttcgtgtatttttcttattcatttaccattttgggtttttatcttgtgtctgcaatctgtattggaagagtccaactatggaaatgagaattaattagagat

SEQ ID NO: 28438 - DNA, 681 bp, Glycine max
  Clone ID: TF_GmC100_2
ggaattgaacactggggtcaggatcatcaacctagctagctagtgtatacaacaacaatatgaggaagcccgaggtttctggaaaaaacaacaacattaataacaagcttagaaaggggttgtggtcacctgaagaagatgacaagctcatgaactacatgctaaacagtggacaaggttgttggagcgatgtagccagaaatgcgggccttcaaaggtgtggcaaaagttgtcgccttcgatggatcaattacttgaggcctgatcttaaacgaggtgcattctcaccacaagaagaggaaatcatcatccatttgcattcccttctcggaaacaggtacaatatcctctacacccttcttttctacctacatatgcatgtttttattaccatatttgtatgatcatgcatctttaactatatatgccataatgcattttatacttaattctatatgatcttcagtgttgcacatgtattatgtatttgtaaatccaaatatacttatatatacgagcgtgtgtacgtatctcaattatttataatgcaaatccaaagtaattaagcgtatctgacatttctaacatatgtaacacccactagctccttctaactttagccatcgtctttatttgaaaaagtgaaagggagatagatgcatgattaatatgtttgaaaag

SEQ ID NO: 28439 - DNA, 1518 bp, Glycine max
  Clone ID: TF_GmC1274_2
gctcgagctcatgcaagctgtgtctctcttctctctcttatattaatcactcactcacacattcgccacttccacacagcatagatcacctttccttttttcccacagaaaaaaacaccacctttctttttccgactaaaggttcgccggaaaatgcctctatcctcctcttcctcctccgccgtagactccgccgtctccggcgagatcatgctctttggcgttagagtcgtggtggactccatgcggaagagtgtgagtatgaacaacctctcgcagtacgagcttcctcgcgacgctgccaacgccaaagacgacgccgcaggatacgcctccgccgatgatgcagctccgatcaactccgacaagaaccgcgaccgcaagcgagggattccatggactgaggaagagcacaagctattcttggtggggttgcagaaagtggggaaaggtgattggagagggatctcaaggaactatgtcaaaacgaggacgccaacacaggttgctagccatgctcagaagtactttctccgccgcaccaacctcaatcgccgtcgccggagatccagcctctttgacatcaccaccgactcggtctctacaacccctatggaggaaggagtacagatccagcatcaagataatgtgtctctctttcatccagtgtaccctgtaacccctgaaggaagcaacatgaatggatttccaaagatgtccatgtatccaaaggatgttggttctggagtcatgtcagttcaagctgggaatccaatggaaacactcactttgggacaaggaaatgtggaaaaacacaatgtgccaagtactgctaacaaggcctctacagtgtctggtatcatcacccccggttcttctagttctgccattgacccaccaccgacactgtccctggggctatccttctcatctgaccaaagacagacatcatcaagacattcagctttacatgccatgcaatgtttcagcaatggagatagcatcattagtgttgcttgagaatatggtccttggattcacagattaattacatatattaatatttctctagtttcctgtctttttggtgggagaaagagaaagaggttgaaggaaagggcgatggattagagaaggcaagaagagttttaacagactgaatttgatccttctgttccttgtacagaccccagaaaaggtcctgtcctgtttcttcttgtttgcttatgttaattaatgtcatgactttagattcttgtttatttggccgtttacgtttgtagtagttgatgtaactgaaaataacaaagtacactctgttctttgctgataatgtattaacgttcgatatgaactttcactgatgaggtctttgtggctcctttcagttggtagtctgtgtcattcctgttaggtgttagcagttggccacgtttattttttctcatgaatttgggtagctgcagtagtatcataattgttttcgagcaaatgtaaatgttggtcgatttacatgtg

SEQ ID NO: 28440 - DNA, 526 bp, Glycine max
  Clone ID: TF_jC-gmst024169f06b1
ccacgcgtccggagcggacgacacgaagcggccatagccgcacgttgggatcccctccgctacgcctctcgatggtctccgccagcgcgccgccgccgcaggcccagtccgacgcggccgggtcgggggaggaagtgagcaagaaggtgcggaagccgtacacaatcaccaagtcccgggagagctggacggagcaggagcacgacaagttcctcgaggccctgcagctctttgatcgtgactggaagaagatagaggcttttgttggctccaagactgtcatccagattaggagccatgcacagaagtaccttttgaaggttcagaaaaatggaaccagcgaacatgtcccacctccacgaccaaagcgaaaagctgcccatccatatcctcagaaggcttccaagaatggacacattttcgtcatttccgaagagaagatgtctcaagacaagaaggcagttgctgagacgaagctaactgaagaggaaaagcttcttgaggagaagattgctgggtttggtga

SEQ ID NO: 28441 - DNA, 3131 bp, Glycine max
  Clone ID: TF_GmC1050_1
ctcgagccgattcggctcgagatcagagataatcaattttacaagcaaactgctttcagaatcccaagttaaagtgcagagaaacaccctgaaaatgccagcattaattttggatgaaaaagagaagatgatttccaagtttgtatccagtaatgggttggttgaagatccattggctatcgagaaagaaaggactatgatcaatccttggaccccagaagagagagaagttttcttggagaaatttgctgcctttggaaaagattttcggaaaattgcttctttttttgaccacaagacaactgctgactgtgttgaattctactacaaaaatcataagtctgattgttttgagaaaattaagaagcaagatggtgataagcttgggaagtcatattctgccaaaactgacttgattgcatcaggtaataaaaaattgcgggcaggaagctcacttttgggtggatatggtaaagtgaagacgtataggggtgaggacttcatagagaaatcaagcagttttgacattcttggggatgaaagagagactgaggagttatggttattgggatgggaaccgaatacagactggtctctcgacattgcctgattctgccatcttgctagcaaagtatcctgctgccttcagtaattatcccacatcttctgccaaattggagcaaccatcattgcagacatattccaagaataatgaacggctcctgaatggtgcacccactttgacgacaactagagacatcaatggcagcaatgctgtgattgattatcagttgtttagaagggatggtccaaaagtgcagccatttatggtagatgtcaagcactgccaagatgtattctctgagatgcagagaagaaatggattcgaagcaatctcaagtttacagcagcagagcaggggagtgatgggaatgaatggtgttggaagaccggggattcttgtggtgcaatcgtgcggtagagtgacacagatgatgcatgtgttgttgagacaggctcggtggttgaaactgataagtctggcacttaaacagatgaggaccttcatttgtatggcacaaacacataccatgatgaatcccatcctgtggaagctaggaacctgtcagctgaattaaatgaatcaaaggaaattaattggacagaagtagatcttgaagatgcaaatgtcacttctggtgcttgtcaaatcaatattgattctaaacagggctgtgatggtagtgaagttttcttgtgtggttctaacaagtctggatctgttggtgaacgagcagatataattatgtcagatagcacagaagttgaaaatgataaagcaaataaattgggaggtgcagctacagaattgatttctgctccaaatacaagggaaccatgccagagtaattccattgctgaggatagaatggtggtttctgaggtatcttctggcggtcttggaaatgaattggagaggcatagagtgtcttctaccctatgtgttgatgatagagataataagcatgaagctgattcaggtgttatagttgatatgaaaagctctgtgcatgatttaagcactatgataaattcttcaatctcatctttgggcaattcttgttcaggattgagttttagttctgaaaataagcatgtgccccttggaaatcctcgtgtctctgcattgtctatggacaaccttcatgcacttttgcaaaatacagttgctgttgatgttcaatgtgagaaaactgctagccaagatcaaatgtcctctacttgtgatattcggggaggtagagatatgcactgtcagaattccattagcaatgctgaccatcagcatattactgggaatttatcagaccacgttgatgctgttagcattctccagggatatcccttgcaagttcctgtgaagaaagaaatggacagtgatatgaattgcaccagttcagcaactgaattgccttttctgccccataagattgaacaggatgatgatcatatcaaaacattccagtcgtcagattcagataaaacatccagaaatggtgatgtgaaactgtttgggaagatactaaccaatccttcaaccacacagaaacctaatgtgggtgctaaagggagtgaagaaaatggcacccatcatcctaagttaagcagcaagtcttctaatccgaaaattactggccatcatagtgctgatggaaatttgaaaattttgaagtttgaccataatgattatgttggccttgaaaatgttcccatgaggagttatggttattgggatgggaacagaatacagactggtctctcgacattgcctgattctgccatcttgctagcaaagtatcccgcagccttcagtaattatctcacgtcttctgccaaattggagcaaccgtcattgcagacatattccaagaataatgaacggctcctgaatggtgcatccacttttacgactagagacatcaatggcagcaatgctttgatcgattatcagatgtttagaagggatggtccaaaagtgcaaccatttatggtagatgtcaagcactgccaagatgtattctctgagatgcagagaagaaatggtttcgaagcaatctcaagtttacagcagcagagcaggggaatgaatggtgttggaagaccggggattcttgtgggaggatcttgcagtggggtctcagatcctgtggctgcaatcaaaatgcattattccaattctgacaagtatggtggtcagactgggagtattgcaagagaggatgaatcatggggagggaaaggggattgactgagacaggtagtagattgtgctgagcggcaaacacctctttttgccgcactcctgtattatagtttctgttatttgctcaatacagtgtagggtgatttaatggttctcaagcccgtctttttggtaaaatatttaggtgcttgtaatatggcagcagctttgtatttgttgtatttgatgaaaatacagaaataatctctgaaaaaattaggaggggcgattgccattgccaattctggatcctttgctgccttcactcacctgctcattcttacagttacaaccggttgtctggataattgacaagttttgacggttc

SEQ ID NO: 28442 - DNA, 1141 bp, Glycine max
  Clone ID: TF_GmC934_1
accaggagaaccccatcttgtgacaaaagtggaatgaggaaaggtacttggacactggaggaagataggaagttaattgcatatgttactaggtatggctcctggaattggcgccaacttcccaggtttgcaggtctggcaagatgtgggaaaagttgtagattgagatggatcgaatatctaaggcctgatgtcaaaagggggaacttcactcaacaagaagaagaattcatcatcagaatgcacaaaaaacttggtaacagatggtctaccattgcggctgagttaccaggaagaacagataacgaaataaagaaccattggcacaccacactcaagaagaggtctcaacaaaacacactcacaaaggaagaagctagagcctccaaatcaaaggataaggtacttcccaacaagggtgttactgttactcttccagctacttcttcccagatttcagataattcatcattatcgccagcttcatccaccagcagcgagttttccaacataacttcagatccttccactgctgccagcatgcaaaatttggtgtttgaagatgatgatgagttcggttttctggattcatacattgatcctatgaataatgaaagtttctggaaagagctaactctggatgacatttcctttaataatgtaccaatagtttcagaagataccaatggctgttttcaaagtacaagttctagcaatagcaacacccttgattctctgcataaatcaaccagcgaaagtattgttgcggataatgactttggcggctttttcgatgcatacgcagaagcaaccgttgacaacttttggacacaaccatatgtggctggcatgtcctcccacgttccaactgaactacttgctccctccgttgcagaatctgaatattttactccaatatatgatgatctgtggggccaaactcatttgtattattagcttatattctgatatacaaaaaatagtgcttgttcagtttgagagtaactactactattatacacagtcatgaataatgataattattgttacttattgcaggtgtgtattagtcgggttaataaacgagagtgtatatatatataaataaagtatgtatattgaagttgctttagggtaaaaa

SEQ ID NO: 28443 - DNA, 2306 bp, Glycine max
  Clone ID: TF_GmC156_2
ccacgcgtccgatttttcctacgagaaaatagaacttcaacgtctgacgtgtcaccctgtcgttgctccttccttcttttttttcctcacaacaatcacaagaagcactttcggagtctgagctttcacttcttccaacttcttcatctatctatatacttctcttgtaacctctcatctttacaataacactttttccctcagaaattaaccgtttttcctttctgggttttgtataattttgttgattttccattccttctatttttttgctgctgctaagtagcagtggtatgtatgacttatgagctttgagcctctttatattttgaaaagaagattggaattttttttttcttcttttgggaaaggcttctagtggttggatttttgtccatcaagttattgatcgaggagggggttatcacttatcaacctttggtagtgcgtgatcacgggatcttgtagatgatggagagggttttttgtgctttgtgattctgagatgtgaattaatggttggtgaagtaaagaatcaaggcagagtttgcatgataaatttgacttttggatcgaggtgggtccatttttgtacacaatttgttgtttgattctgtttccagctttctaagggagagatgggaggagggtggaacttgtgattttcttgtttgtgttggacttttcttgatttcggaattcgtatccagaagcagagagagaggtggacagatgaagaacataagaagttccttgaagccttaaagctatatggcagggcctggcgacggattgaagaacatgttggcacaaagactgctgttcagattcgaagtcatgctcagaagtttttttctaagattcttcgagagtctagtgggaacagtacaaccttggaggagtcaattgaaattccacctccgcgaccaaaacggaagccaattcatccttaccctcgtaagctagttgagtttccaaagacaggaatttccaactcagaacacccactgaggtctaattctctgaagtcatcagattttggtcaagaaaacaattctcccaagtcagttttatctacagttgtttcagaaactgttggttcctccgattcagatacatctagtcgatgtttgtcaccagcctcatccattagtggtgtccccacaaacagatttccacttgctgagcccaaaacatcatttaaggaagaagggtctgcaccaagttcagctcatgatgagcaacctcctgtgaaactggagttttttcacaaagaaagtgtttctaccagagatgatgcaacagaagaatcatctggtcgtactctcaaactttttgggaccactctactggtaacagacacatgcaaaccttcttctccaacaacggagccgtgcaaaccaacacctgcggctgcaatgtatcttatgcaacttcagaatgtttgttcagatgttacagaaggtcatgcttctattgttccttggtggactcttccccacaatactccatttatgccactgcacaaggagccaaaagggaagcatctatattctaatcttggagagtttgaacataaagaagttcaaaaggaaggatcatggactggttcaaacactagttcaattgatgatggagataacactgaaaaatcagatgatcaagccaaaagtcatgtacatggttttagcaaaagtgaaactttaactatatctgagctaagggtgaggcctaaaacatgtggaaaagggtttgtaccatataaaaggtgcatggcagagagggaaaaccagtgctcatcagtatattatgaggaaagggaagagcaacgtattaagctttccttatagtaccctcttattggcttttcttcaaagcagtttcccttttacaggtataatgtacctgtttctgttgctggatgaccttgcatgagaagaaagataagggagctgaaatttttgatatttctactgcattgttaattctccacaagcctgtgtgttaacctatatgagcttcaagactttgggagaaacactatccagtgaattatcccacctttttatatttcttcatgcctaggccttttgtatttcttcaaattctttctcccaccctccactcggatatatctagtgctttttttctttttaattctaattgtctttcaagtgtaagttacatacttatgtatcgcttattagtgtagttgttcatatttctcaaatgaagcaaattattatactcaaatcagctgaagttgaataaaattgtacttagtactccttccttttgcgacatta

SEQ ID NO: 28444 - DNA, 807 bp, Glycine max
  Clone ID: TF_LIB5118-056-A1-PF1-A5
aatcttactttatcttcaagtcgaggaccttgggcgaggcactttacattggtcaatcagtgttgtagttggtttcccttgttcaattttcctcactttgatcgacagcactcgagcttgttttagattttaataccccgacgacttccatcttaaaatgcctccatcaaagcgttcaaagcacagacgtatgggctctaacacttctacggaagagaagagtgacttcgaagctcgcatgaagatccctgccgagctcgttaagggcccttggaagaagcaagaggacgaattgcttgcttctctcgtggaggaacacggtcctaaggactggtcaaagatcgcaaacaagatggcgcagttgggtcatgttagaatgggaaaacaatgccgagagagatggttcaatcatttgagtcctgaagtccgtaaagaatcctggaccgccgaagaagaccgagttattatcgagtctcaccgccagttgggcaacaagtggactgctatttcacgcctcctgaatggccgtcccgctaacgcgatcaaaaaccactggaattctactttgaagcgccaagttcaattcggcgctgaaattggctccggcagccctagacccggcaagagacaacgcgccactgtcggtcaccagccccgaaagaagagaagactcgacgtctctagctatgagtccgatgaggactttgactccactagcgatgagatggatgacgacgattctgagttggtcacatacgagagccgaaacgaggatcaagaagatcagcgcacctttgctacttcccc

SEQ ID NO: 28445 - DNA, 1387 bp, Glycine max
  Clone ID: TF_GmC1121_1
ctcacagatggaaccggaagaaaccgccgccgccgccgacggaagcttcgacgaggggctgctcgggctagacgacggcggcggcggcggcagggacagagtaaagggtccgtggtcgccggaggaggacgccattctaagccgtctggtgggcaagttcggcgcgagaaattggagcctcattgcgcgcggaatcagcggaagatccggcaagtcatgccggctccggtggtgcaaccagcttgaccccgccgtcaagcgcaaacccttcaccgatgaggaggaccggatgatagttgctgctcatgcaatccatgggaacaaatgggcagccattgccaggcttctaccaggaagaacagataatgccattaagaaccactggaattccactctgaggcgtcgtggagttggtcatgatacgattaaattagaatctgtcagcttcatggaagatgttagcttggagaaagcaaaagcatcatcggaagacactctatcatgtggggatgtttctttgaaatcctcagaagggagagatgtcagttctatggagatcatggatgataaatctgatgacaaagcacaaactgagggccaaatacaccatgaagtcaaggacctacctaccctttttcggccagtagcacgcgtgagtgcttttaatgtataccactcatttgatggtacacagccttcaacatcaattaaaagacctgttccgatgcaaggagctgttttacaatcatcaaaaccagacatggaattttgtagaatgcttgaaggaatttgtggtgatcagtcagtgcctcaccagtgtggccatggttgctgtgctgctccagatggtagaaagtccgaaagctctttgttgggacccgaatttgttgaattttcggaacccccatctttcccaaattttgagttggctgcaatagctacagacattagtaaccttgcttggcttaaaagtggattggagagtagtagtgccaaaatgatgggcaacacctctggaagggtagtatctaatggatctcaagtacatattggccattaaaatgccaaatagatcatcattcctattctgagtgaggactggataatgggtatgataaaagctatagtgatggcaatctattttccttgcaaatctaattaggaaatcaaagttatgtgtgaatcactgctataatgtaaatggattcactaggtaaaaggaggttcttggactgttgaccgattaggacttgatttgggaacctgttattgctaacaaatgttcgttgtagaatagggggaaattacttgcatttcaatcggtttgagttgctgctgttcactttctaagagtgagtagctcgtttaaattaaaagccccttagag

SEQ ID NO: 28446 - DNA, 510 bp, Glycine max
  Clone ID: TF_jC-gmXLIB3563P057bh11a1
ggttctctttcatccgaggctatgagttcctgcataacaagttcagttgatcctgtagaaggtaacagggataggaagttcctgaaagtaaaccctttatgcaaaccacccatgacacctgatgttactcaagatgttgatgatgagacttgctcagatgagagctgtggtgaaatggatcctacagattggactgatgatgagaagactgcttttcttcaggctgtatcatcctttgggaaggattttgccaagatagcacggtgtgttgggacaaggtcccaagaacagtgcaaagttttctttagcaagggccggaaatgccttggattagatctcatgcgcccaatacctgagaatgttggatccccggttaatgatgatgcaaatgggggtgagagtgacacagatgatgcatgtgttgttgagacaggctcggtggttggaactgataagtcaggcactaaaacagatgaggacctgcctttgtatggcacaaacacataccat

SEQ ID NO: 28447 - DNA, 976 bp, Glycine max
  Clone ID: TF_GmC139_1
acgtaagctcggaattcggctcgaggaagtagaggtcttaagagtttgagaactgagaagagatgggtggtgttgcatggacagaagaagaagatcacttgctcaagaaatgcatacaacaatatggagaaggaaagtggcatcgtgttcctttactggctggtttaaacaggtgccggaagagttgtaggctaagatggctgaactatctccgtcctaacatcaagagaggaaattttgcggaggaagaagtggaaatgataatcaaactccataaattactaggcaacagatggtcgttgattgcaggaaggctaccaggaaggactgccaatgatgtgaaaaactattggaactgtcatctgagcaaaaaactaaatgtaatagaagctgaagatagaccaataacaagagatgttcaagtcattaggccccagcctaggaacattgttggttcaagctcagtgaaaagaaggggtcaaaatgagtctccaactgacaaaggagttcaacaagagagtagcatgtcctcactgacgtttgatactgctgatggacagaaccatatgcttgattcacaacaagacaacaacatatatgcatgcctggaccaacagggcattgttagtgagttgtcaatggattttcagttcgaaggatttggagcaatgatgaatggggagggtagtagcagccaatgggattggggtgatttgctcttagacatggacttgtacaagtgaattaattttcttcttagttattgctcctgttgatgtggggatggcaatgttggtctcataccttggctacgtatcaatatcgaagttaagtgtttcgatggaaatggtagctaagttggttgtgtatcatgggtatgtcataatcataattaagatctagtgggtttcatcttttgacccctgtagatggtccatctcactaccatgagccatttataaaatcatcttcagtc

SEQ ID NO: 28448 - DNA, 462 bp, Glycine max
  Clone ID: TF_GmC130538_1
ccacttttaccctctccacgcataacaacactgacacatttttcacctcctcctcaaaaaaacgtttcactgacacaagcacacgggcaatgtctcactatatagagccactgatgaccacttcttcatagttcagagagcctttctccataattaagaaaaacgctgtccttttgtgtccttttttcttcctctgtcctcgcacacatgggtcgccattcctgttgtttaaagcaaaaattaaggaaaggtttatggtcccccgaagaagatgagaagcttttcaactacataaccagatttggcgttggctgctggagttccgtccccaaacaagccggactccaaaggtgtggaaagagttgcagattgagatggataaactacttgaggcctgatttgaagagaggaatcatctctcctctcttctcattactaatcattagtcttcatgaagtctag

SEQ ID NO: 28449 - DNA, 644 bp, Glycine max
  unsure (1)..(644): unsure at all n locations
  Clone ID: TF_LIB4199-010-Q1-K1-A5
ggtccggaattcccgcgtcgacccacgcgtccgaagacacccagtttcactctccactttgcttctcatacgaggctctgtgcttgctgttatcagtttttctctgtttaaccccagaaatacgtaacacaaatcaaaacatcgttgttgtattcgagcatgcaagttggctaagggaaggagcgtcaagaagagagacgccaataaaataagcactctaaaagataaatggtgcaagatatgaagcagcaggacaatggagaatctaagaagaaggagcgtcacattgtgacttggactcaacaggaggatgatatactaagagaggagattggtattcatggaactgagaattgggcaattattgcatctaagttcaaagacaaaacgacaagacagtgcagaagaagatggtacacttacttgaattctgatttcaaaaaaggtggatggtcagctgaggaagacatcctcttatgtgaggctcaaaaaatatttggtaatagatggacagaaatagcaaaggtggtctcaggcagaacggataatgctgttaaaaatcgtttcttcacactctgcaggaagaaaacaaaatatgaagctttagcanaagagaacagcacatcatacatcaaattcaatac

SEQ ID NO: 28450 - DNA, 4201 bp, Glycine max
  Clone ID: TF_GmC1645_1
caattccaaaacattaagtgattccttcacgttaccgtggatgcagaaattatctaattcctcaagtgtagctctatatcgactatcattagatgcattgtctgattcgccatcatgatatgcattatttgatagatgagagccaacccctgatctttgtgcaatagtcaagtttggcaaatatcgaccatcttttagactatgctgaaactgtccagaacttgggtactattgacgcatttcatgactcccgatgcattaacaaccttactgattcttgctcgaggcttgtgcctttgttgtagttgaagtcgctcccctcattcttctttcgttgctacttctactgtttcttcctccgatccctcattgccgcaaatgactcctcctgctagtgttaggtgaattccctcgcttcacatgcatgatcgcaccttcaactctcttcttcttcttcttctccatggctttttttcaaggttttggcgccgtggagttcgttttgtagcatcaccgtatcatcagcttcagcttgctttcaccaaaacggctttactatttggtgtgttccatgtcacaaaaaacgaaaggagatattccttttacccactcctcgtcagggaagatctgaagcagcgctagcagcacacgtcctctaatggacgccgactcctctggagaagaagtggttattaaaacaagaaaaccatatactatcacaaagcaaagagaacgatggacagaggaggaacataacagatttctagaagccttgaagctatacgggcgagcatggcagcgcatagaagagcatataggaacaaagactgctgtacaaatcaggagtcatgctcagaaattctttacaaagttggagaaagaggcctttgtaaaaggtgttccaataggacaagctcttgatatagacatcccccctccacggccaaaaagaaaaccaagcaatccttatccccggaagaccaattgttctaagactgctgttttttgcagtactcccttcgttgctatttcttctttttttcactgggttccctctctgcagcctcttacccttaaatgataccttttggtagatttactcgcttcacatcccttcacataccttaaaatctcttcttcttctttttgttcttgctttttgttggtggtctttacatagcggagcaacgtatggaaagtctctcatttcaattgtatcttcacgtggtaaacaagcattgggctttatgaactctgcctctctatagaagagtgttttttaattatggtttttttacttttttaactatataatctttattagttccatactacctaccaatcttcactgtacgccttagtttctcaagatatgctagtaacttgagatcaacctcaatgttaattttgctttcaaatatccctaccaccagtcacatgtcattttgtggtaacgctacgcctctgtaatatacgggcgatttcaactacgaaaatgatattgtatacttaccaacattggactgtaaatcagggtacatccttagaaggtctatacaaggttgtcaaatgttccgggccgaaaagtcgaggaaatagtaccacttccaaatgagaagcataatgtcgaggccaacataaggaccaccataaggtggttatactacgagagctttgtgctcttcaacatctgaaagccaacgtccaagatcaaactttatcaagtctccacctatgaagtcccctaaccctctacactgcacaattcctacccttttggatgtgttgttagtgttaccatgtcttcctctccaacccttcatcactctcacactgttgtgcttattgctcaagaaactgttcctcattgcttgctgcttctttgtgtgatgaacgttgttgaagcaggttggagccccataacccaagctagcagtggatgacatttttttcttttttatttacaattatctaagggtcaccaaatgcaagagtatcttccgccaacaagaattcaacatcaatatcagtgccactgagaaattcatgtgccctaagggagtttataccttcggtaaaagaggtaataactcgagatgaaaccaacgaatcttttgttactgatgagcttgaaaatcagaagttggagatagatgatggcaagcacacacaaaagactaatgacacttgtgaagtctctaagttggagaattctggtgcttcagaattggttcaaactgagaaaacagatggtcgtaattgtgcattaacaatagatggggtgccaggcaatcagaattacccaagacatgtccctgtgcacgttgttgatgggaaccttggaactagtactcaaaatctatccccagatatggtgtttcaagactccatatttcagccgaagggaggggttaataggcaacctaaccttgtcaccaattctgctacatcacacataagtgaatgtcaaaacaacgccgcacggtcctctattcatcaatcatttcctcctagtcctcctttcgcacaggatgattatcattcatttcttcacatgtcctccacattttcaagtcttattgtctctaccttgctgcaaaaccctgcagcccatgctgcagcgagttttgctgctacattttggccatatgcaaatgcagaaacttctgcagattctcccgtgtgcactccagattttccatcaagacaaattggctcgcctccaagtgtgacagctattgcagctgctacagtagctgctgcaactgcatggtgggctgcccatggactgcttcctttatgtggtccactccatacagcttttgcctgtcctcctgcatcagcaactacagttccatcaatgattattgatgaatcaccacaaaaaacagaacgaggagagattaaaccacaaaatcctcctctgcaagatcagataccggatccagaacactcggaagctcaacattcagctcctaagtcaccagctgtttcttcatccaaatctgaggataggggagatgccaatttagatacttcaccaaaggctactaatcatgagatgaaccaagcaatttctgagaaccccgattccaacaaaatgaagggcagaaaacctgtagaccgttcctcatgtggttccaacacaacctctagcagtgaagagactgagttactagagaaggatgagaaagaaaaggaagagcccaaaacacctgatgcaaacgttttagataccgagcttagtaatcgtcgaagtagaagcattaacaaccttactgattcttggaaggaggtctctgaagaggggcgtcttgcctttcaggctctattctccagagaggtgttgccacaaagcttttcacctactcatcatttgataaataaagataatcagatagatagcatcaaggataacgagctaaacacagactacaaagatgaagaccttgaaagcaagaaatgcagttctatttgtgatggggtgcagaaaaatctgctatttgtcaaagataacaatgaggaggagggactgctaaccataggtcttggaccaggaaagctaaagactcgtcgaacagggtttaaaccttacaaaagatgttcggtagaggccaatgaaaacaggatcggaacagcctgcatccaaggtgaagaaaaaggtcccaagagattacgcttgaatggggaggcttcaacttgatgcctgatattcccatgcaaccacacaaagaaaatctctagttttgcatatatttctaagtttccttgttcattgtctgtattgcttattttctaattctgcagctcacgaaacttgtcgtgtaggtctgtgtaccatattaaattactacatacacactttttactttcttggcctgatgttactgcagttaaaaactccgctaaaatagacttagacaagaaacattaagtaccgtttgagcattgatcatttaagtaatttatgatgcttcattcagtccaaaaaaaaaaaaagagtgtaatgtaataatttaatatggtggacccacattctgcactacgtggtatgcagatcaccctcacgactattactgttaacactattgtgctgaacgtggacacgctcgacactatggacgatatgatggagaaaatgcaagacatcgaaggagtccaaccgaagctgcttatgcttgtcttacctgtcgaagatcta

SEQ ID NO: 28451 - DNA, 1045 bp, Glycine max
  unsure (1)..(1045): unsure at all n locations
  Clone ID: TF_GmC184_1
cggcattcggctcgagggaagacaaagtttacctaagagccaactttatcactatattgtatgtattacgaagatatggcgggaaacgtggggtggggtgtgatagaagaggagggatggaggaagggaccttggacttctgaggaggacagattgctcattctgtatgtcaagttcccatggtgagggcagatggaactctgctgctaggcttgcaggactgaaaagaaatggcaagagctgcaaattgagatgggtgaattacctgaggccacacctcaagaagggtcaaattacaaattcggctcgaggcataattcaagagctgcatgctaggtggggaaacaggtggtcaacaattgcaagaagcttgccaggaagaactgacaatgagataaagaattattggaggactcacttcaagaaaaagatgaaaactccatctgatgctgctgagaaggcgagaatccactcctcgaggagacagcattttcagcagcaacaacagcagttgaagcagcagcagcaacaattccaattcaacttggacatgaaagggatcataaacttgcttgaggaaaatgaccatagagtgccttctatatctcaagaggcacaagaaatggccagcatgtacccaaacacttcagaacaccagggctacttctactcaatattcaatgtcaatgacaatgacaataatgtctctgcacctgagtcctcaaatgaagaaattctatgggatggactgtggaacttggacgatgttctttgcaatttcaatgcagctagtgccacaagcaaagccagtttacacaatttagtttctcctttctgttaaaaggttttatttagccttgaaaacagttaggaagaatagtagtgtactaatgtcagtcacggcttgataaggctccaaaatcctgcagcttagagttaggattaattgtttcttaaaagtgtggagtctgggtagtaagtaatttctgaaggcgagttattgtgtaaccctttaataaagtatctcaattttgcttataanana

SEQ ID NO: 28452 - DNA, 1397 bp, Glycine max
  Clone ID: TF_GmC1130_2
ttagaagatgagcctaaggtgtatgaaataagacgacaatattttgttccgatgggaccggacaagggacgatgaaatcagtgtagtggaagaagttgtgtttttgttcgagcaattggtggctctcaaattgtgaaccgcacatatacccaccctgcttcccacgccacatcgatctcacgttctctctctttcttttttcttgttgaaactgtgagtctatgttatttgtggcggagcatgaactcctccaccaacacctcgaattctcagtcaatggctgcagcagccagtgatgggtctgggaagaaggtaagaaaaccttacaccataaccaagtccagggagagttggactgaggaagagcacgacaagtttctcgaagctcttcaattatttgacagggactggaagaaaattgaagattttgtaggttcaaaaacagttattcagattcgaagccatgctcagaagtacttcttgaaagttcaaaagaatgggacagtggcacatgtgcctcctccccgtccaaagcgcaaagctgctcatccttacccacaaaaggcatcaaaaaatgttttggtgccactaccagcttctgttggttatgcttcatcaagaaatacgcttgcacctgggtttgcctcatgggatgaaacttccctgctgatgaatgccggagctgataaacccatgacctgtcaggatgaactcaacatgttcatcatggaaatgatgggatgaacgatgaatgccggaggatatgactgtcaggatgaactcaatgttcaattcggctcgagagctgatattggatcaaaggggataacacagattaccaacagcagtctcagtggtgttggaaattctactagaacactactgacttctgagataccaaagcaagggaaacaagctccagtgcttcatggtttgccagattttgctgaagtttacggtttcattggaagtgtatttgatccagaaacaaatgaccatgtccagaagctgaaggaaatggatcctataaattttgaaactgttttgttgctaatgagaaacctcactgtcaacttgtctagccctgacttcgaacccatttgatagaatggggagacaccccaatactactgggcaaggcgccaatgacccacccaaaagattactgcacaagcttaaaccacaagtaatttgacaactactcaattagtccctagacgtcaagggatctctctgagaaggccccagagtgttctctttttctaattacatgtgaatgacgtgataggatttccatgtaataaatataggctcttgtattaatttgtgattagccccggattacttgaaaaattaaagtatttattagattagtaagtgtataaaaattttaatat

SEQ ID NO: 28453 - DNA, 543 bp, Glycine max
  Clone ID: TF_GmC1130_3
attttgtccggatgggaccgaacaagggacgatgaaatcagtgtggtggaaagaagttgtgtttgtgtttgtgggtggtgttgggacaattgataggggtggctctcaaattgtgaaccgcacatatacccaccctgcttcccacgccacatcgttctccctctccctccctctctctctctctctctctctctctctctctctaagctctttcttgttgaaactgtgagtctatgttatttgtggcggagcatgaactccaccaccaacacttcgaattctcagtcaatggctgcagcagcaccgagtgatggttctgggaagaaggtaagaaagccttacaccataaccaagtccagagagagttggactgaggaagaacatgataagtttctcgaagctctccaactatttgacagggactggaagaaaattgaagattttgtaggttcaaaaacagttattcagattcgaagccatgcccagaaatacttcttgaaagttcaaaagaatgggactgtggcacatgtgcctcctccccgt

SEQ ID NO: 28454 - DNA, 740 bp, Glycine max
  Clone ID: TF_GmC6850_6
gggagcgtcaaagaaagagagccacagcaatagaataaacactcacacggagacaagaagaagatcatgcaagatatcaagaagcagcaggataagcagaagaagcaaatggtcaatgaagaatctaagaagaaggagcgtcacattgtgacgtggagtcaagaggtccttcttctctcactataaaattattttccttctgttttattttgtgaatttctccttctttggagtctaatgagtgttatgagggttgcaggaagatgacatactgagggagcagataggtgtacatggaactgagaattgggcaattattgcttctaagttcaaggacaaaacaacaagacagtgcagaagaagatggtacacttatttgaattctgatttcaagaaaggaggatggtcaccagaggaagacatgcttttatgtgaggctcaaaaaatatttggtaacaggtggacagaaatagcaaaggtggtttcaggcagaacggataacgctgtgaaaaaccgtttctgcacattgtgcaaaaagagagcaaaatatgaagccttagtaaaagagaacagcacttcatacatcaattcaaataacaaaaggatttttctccagcacgggtgtgatacaaatgtagcatcagaaactgcaattaagaagatgaggaggtcacatatccctgatgccgcagagaaaatcaactttgggagacagatcacataaacaaaatggggattca

SEQ ID NO: 28455 - DNA, 1347 bp, Glycine max
  Clone ID: TF_GmC192_4
cattcctcttggctcccttaaactctctttctctctttgtgtgtctctttctctatttctgagtctcagtgttaggggggttattcattattcataataacttggctttatagcattttcccttttgatataaaatgggaaggcaaccttgttgtgacaaagttgggttgaagaaggggccatggactgcagaggaggataagaagctcataagcttcatcctcactaatggccaatgttgctggagagctgtccctaagctagcagggcttttaaggtgtgggaagagttgcaggctcaggtggacaaattacttgaggccagacttaaagagaggtcttttatcagaatacgaagaaaaaatggtcattgatcttcatgctcaacttggcaatagatggtctaagattgcttctcatctccctggaagaactgataatgagataaaaaatcattggaacacacacataaagaaaaagctcaagaaaatgggcattgatcctgccacacataaaccacttcctaatgcaaatgaacaaaaccaaaatcaaaccagacaagatcaacaactacaccaccaaccagtagaattagaagagcctaaccaacaacctttgcaagttgactttgaccccaaagttgacccaaataaggagccagagaagccagagacttcattggaatcatcaaccatcactgaagaagccaaagaggaagaccaaatcataacacccttatttgacacaatggagctaatgaatggtttctgcacagatgaagttccaataattgaacctcatgagattctaatgccttgtgctccttcctcttcatccaccacctcttcatcatcttcttcaaattcaaccaattttcttgaagacttgcagctaccagattttgaatggtcttgtaattacaatgataataacactattactaacaataacaacaatgaagacaaagacgacgacaacaacaacaatagcagcatggccttgtgggatgatgacattattggcaaccgttattggctgattaatgaagatgatgatagtgatgaaaaccaagtgtttgatgcttctctcactcaattctcaaaaatgttcatggaatcagaatcttggggatatggcttattttgatttgaattttctccccattatttgcgatttgcttctaagtttttacgaagaataaacggttaataatttattaggaagaacacaactgttgtttagcattaccaacttttcactttatcatttacacaaattacatgtaatatgttaatggaaataataagtttctttttttgcagtaaaaaaaaaaaaaaaaaaaccccac

SEQ ID NO: 28456 - DNA, 658 bp, Glycine max
  Clone ID: TF_GmC482_2
ctcgagccgcttctggcttctgctgttaataacaaaaaaaaaaaggaagacataataacaaattatgcttatgatgattgatttaatgaaaaccctagttattatcagaaaaattagaagacacatattccctcacttccctcgcgatcacatccatcatcgctgcccatgcccggtacggtaacaggtgggccaccatagcccgattattaccgggccgaaccgataacgccgttaagaaccactggaactccacgctcaagcgcagagccaagggtattaacgttaatgttaatgatgccgacaacgaggatgacccgttgaccgcattgactcttgctcctcccggtattgctaatgccactttgaccgaagacgccgtaccggaccaccgggcctcgccggagagtgcggcggaggggttttgggatatgatgagggatgtgatcgcgagggaagtgagggaatatgtgtcttctaatttttctgataataactagggttttcattaaatcaatcatcataagcataatttgttattatgtcttccttttttttttaggcaaattattctgcaatttgattttgccttactggactttggaatcggatcagggaaataaattaaaacccttctggcttctgctgttaataaccc

SEQ ID NO: 28457 - DNA, 1637 bp, Glycine max
  Clone ID: TF_GmC563_2
tttgatttagccttttcttttctcttttggttgtcatggtggttatttcacctcctcttagatctgaagagtttcataagggtttttgctttgcccatcattgattctcttgagttttgtaaaagaaagcctcttttagattcctttgatcataagaagctcctatcctctgcattcctctctgagggtatctctctctctttgaacttagagagagagagagagagttgaatttagaagtatcgtttttgctatgtgcaattgttagagagatcaatgaataggggaattgaagtgctctctccagcctcctatctccaaaactccaattggttgttccaggaaagcaaggaagcaagatggactgcagaagagaacaaactgtttgaaaatgccttggcttactatgataaggacaccccagatagatggatgagggtggcagccatgattccagggaaaactgttggtgatgtgatcaaacagtacagagagcttgaggaagatgtgagtgtcattgaagcaggtttgatcccagttcctggctatactactgccagttctttcacattggagtgggttaacaatcaaggctatgatgagttcaagcagttctgtaatgttggtgcgaaaaggggtgcatccacgaggccaactgagcaggaaaggaagaaaggagtgccatggactgaagaggagcacaggcaatttctgctgggtctcaagaagtatggtaaaggggattggagaaacatctctaggaactttgtgaccacaaggacaccaactcaggttgcaagtcatgctcagaagtacttcatcaggcagcttacaggagggaaggataagagaagatccagtatccatgacatcacaatggttaatctccaagaaacaaaatctccttcatcagacactaccaaaccctcttctccacttcagaatcaggcattgtctagcatggttaaggaggaatatgagtggaaattgccatgtgagggcatgcccattgttttcaattccacaagtggaaacatgttcatgtcagcaccactgcatggcatttcttcatatgaatctagaccacaggagcaaaatttacttagacaatctccatggatgccagttttcaccttgtgatgctattttgcaaatgcaattgatgcgacatcggtgatctatacaagtggtgcagggattagagttttgaagttagatggaaggtttgtgtgagctagcatccgatgttcatcttcctatataggcagccaggagttatctgcagatcgccctgaggaagaggagctatctcttgcctttttaaaagatgcttcaaataaatatattcagttccaagtatacataaagaattaaataaaggcatcaatcatgttgatgtactagtggtgtaatataaaacaatttggactgttaatttttataaccctatattaggagtgtatttcaagccataaagttatgattataccagaaagattttccaagtgtggtgaggagttggacagagctttggtcctcatgtaaaaatgtgatcataaagcatttgatatgaaacataatgtcttggaagcatttgttccacaacatggtggacattaagatccaagctgaaagtc

SEQ ID NO: 28458 - DNA, 1289 bp, Glycine max
  unsure (1)..(1289): unsure at all n locations
  Clone ID: TF_GmC1779_1
atagaatgagtactccatcctaactgccacactcttggaaatcatcatctctatccaactacagttaaaaacaacacacattttaaattaatgaaacaaaccgtgagacgttataaaataatgacgaaagaatcataacaggaacaccatcaaacaaaccaccttccttgctagagtttctaggaaaaggcgttatttaaaagaggaagttataacttcctccattattaattaatcttttctcatcacccactctcttcataaaccctcaattctctcggagaaacctaagtccaaaccaaaaacacccacacaccaagaggtcgtggaacagattggaaccagaaaccttcctatcccacggagttaatcaacgttaatcaacttgttctcgttaattagtactgaaaaatgacttccaagatacaaatattatcaatcctaggcatgttggccatgttctttcttatctccacggaggtgttagccactggattacatggtgttggtgttggtggtggattacctggtgttggtgttagcgctggattacctggtgttggcactggattacatggtgttggcggcgctggattatctggtgctggtggcgttggattatctgccgacgcgggattatctcgtgctggtgacgctggattatctggtgctggtggcggccgtcgtggtcgtgctggctccccttctttgtgttttttctctgtcattttctcgaacaggtgaaaggcgacgacaacgatgaccggtggccacgatcgcgtgaagggttcatggagtcctcaggaggatgcgacgttgctgaaactcgtgaacgagcacggggcacgcaactggtccgtcataagcgccggaatttccgggcgttccggcaagtcgtgccgtctgcggtggtgcaaccagctgagtccggaggtgcagcaccgtccgttcactccggcggaggacaagatgatcataaaggcgcacgccattcacggaaacaaatgggccaccatctcgcgcctcctccccggccgcaccgacaacgccatcaagaaccactggaactccactctccgccgccgtcgcgcggtggagtcatcctcctcctcatcggcgtctccgccggcgaaacgtcactcttccttgtttgacacgcttcaccctttcaagaaacagtgcatcgagaaggaaaacgaagaagagcgagtgctgagtcccgttacgacgtcgttgagtcttttnctcgagcgcgaattnccgaggcttagcgtnacggcgtgccatgc

SEQ ID NO: 28459 - DNA, 1490 bp, Glycine max
  Clone ID: TF_GmC78832_1
acgcgagcttgagcttgggatggagtttacattcatctcaagccatttgtctctcacatcaattcatgcttctcctctcttttgaacacacaacaaaaccagagttaccaacagatccaattctaatcctttgaaattcactaaccccctatttctattctctcttagttccagtttttcactttgctagtgtcttctgcatttgcttccacagttgcttcgccaggaagaaataacaaaaggaaacaccttcttgcttttcctacctgattgtaaagaatctctcttttctcatttgggacatcactgttcactttctgcatcaactcgctgttggattttaatatttatctctgctatcaatattattaaggtctcacttctgggattctgaattctatgccccttggaccaaagtttctgtaaggggattttttgttgtaaagtatggaattcgagacttcatatccaacttgttttatgtcaaattcaagttggttttctcaagaaagccaattcacagaatggacaagagaagagaataagaaatttgaaagtgcccttgccatatatgataaggataccccagacagatggctgagggttgcagccatgctccctggaaaaactgtctatgatgtgatcaaacaatacagagaattggaagaagatgtttgtgaaatagaagcagggaggattccagttcctggatatcctacctcttctttaacattgaagatggttgacaaccaatgttatgatgcatgcagaaagaagcctgcaactctcaggagttctgatcaggagaggaagaaaggggttccttggacagaagaggaacacagacgttttctgatgggacttttaaagtatggtaaaggggattggagaaacatttctcgtaattttgtggtcacaaaaactcccacccaagtggcaagccatgctcaaaagtattacataaggcaaaagctttctggagggaaagacaataaaaggaggcctagtatccatgatatcaccattgttaatcttacatcagatcaagagaagcctcttttactcaatgatgagtctcacatgacttttgagcaacagaagctaactagcatgccaaaagtacaactagaatggattaatcaccacgacaatgggtcacgtatggttgtcaacccaaattatgatatgttcatgtcaccttcatctggcatctcttccaagaccctcaagttgcaagggcaagatttctatgaatgtgcctttcatgagacttatgctaagcttaaaaattcgggtttcaggacaacttctagagacttcaacaaggaagtcagacagttatttaacatgtctatttctttgtatagactcaatctgcatcacaggatgcgccattcaggtattctcagtctcgggcaacgagacaatattcagtattcatgcactctgatcttgttatgaacagcataccggttctactacatagatca

SEQ ID NO: 28460 - DNA, 810 bp, Glycine max
  Clone ID: TF_GmC1768_2
ctcgagccgcaagagagagctagcagtgcaagctttcaacatccaaaacaacagagagtttttggctttagaagctgaaggaatatagttatcacaatggggagagctccatgctgtgagaaaatggggttgaagagagggccatggactccagaagaagatcaaattctcatcaattacatcaacacttatggccatgctaattggcgtgcactgcccaaactagctgggctattaaggtgtggaaagagttgtagactccggtggataaattatctgagaccggacatcaaacggggcaactttaccagagaagaagaggacactataatcagtttgcatgaaatgttgggaaacagatggtcggctattgcggcaaggttgtcagggagaacagacaacgagataaaaaacgtgtggcacacccacttgaagaagaggctgccacaaaattaccaacaaagccatcacactaaaaaacgaagcaaaaaacaaccaccaaagttggatgcggacgcctccaaatccaaccaagacgccaaactagaacaacaagaccccgttaatattcatggatcgaactctgaggacatgatgatgccactatctcctcctcattgttctagcgacatgtcctcctccctcaccaccagtgacaacaatagtaacgttaatattattaataataatcatgatatgtccttaaatgttaatgattatgatattgacaccgaataatcacgaatcggctatagcggcaaggttgccagggagaacagacaacgagataaaaaacgtgtggcacaccca

SEQ ID NO: 28461 - DNA, 1418 bp, Glycine max
  Clone ID: TF_GmC1321_2
aatccaactctctttctccctatcccaacaatctcactcatacctcttcaatctaacaaacttaatttcttttgttttgagtttcttagagaatggatgaaaaaggagcaagaagtagcaacacccttttaagttgtgaggacgagatggaccttcgaagaggcccttggaccgtcgatgaagacctcactcttatcaattacattgccactcatggcgaaggtcgctggaacacgctcgccctctctgctgggctgaaacgaacggggaagagttgcagattgaggtggctgaattatctgcgtcctgatgttcgacgtggaaacatcacacttgaagaacaacttttgattctggagcttcattctcgctggggaaaccgttggtcgaaaattgctcaatatttgccgggaagaaccgataatgagataaagaactattggagaacccgtgtccaaaagcatgccaagcaactcaaatgtgacgtgaatagcaagcaattcaaggatgccatgcgttacctttggatgccaaggctggtggagcgcattcaagcagcggcgacggcccaccaccaccgtaactgctgcggtttctccaacggcatctgccggtgctaccacaaccatcaccaccaacaacaacaccaccacatacaactactacgacaacaacaaccttaacaacagttttgaggtgcacagtgggaacatgatggtgagaaatccaacaatcatgaacaacaataacttttgtggttcacatagttacactcccgagaatagtagcacgggtgcatcatcggattcgtttggtacacaggtttcacctgtctcggacttgactcaggattattacaataatgtcacggctgggaataataacaacaataaccctaatcctgatcagtattaccaacaagcacatgatcaactgagtttcttagactgcatcacaagcccatcagggttgttcgatttccaacccatggaaccaaacaccccgtggattaatctgagtaatgttggggacacgtccaacggtttctggaatgttgaaaacatgttgctctttcaacaattctctgacaacaacatgtgaaacattcgtaggagaattcatggtgaaaaccgtgacgaaggggggaaatattgttaaatttacagatgataaagttatataagtagaaaattgagcaaatagaataaattcatatgtaggacacacgtaggatccacgacatggacatagattttaagctaaggatattataagagcaaagagaaggaaactgtgaattactttttttaagtttaatttgtacggacttttttttgttctttgattttccttattttaaagggggtgtgggaaatatttgtaatttgagctttctcagtataagatttcattctttg

SEQ ID NO: 28462 - DNA, 1182 bp, Glycine max
  Clone ID: TF_GmC988651_1
atgtttgggttttctcagcaacataacaatgttgataataatggtgggaccagcagtttgagtgatgatgaggatgatttgactcggttctttgattatgacactgcgccggggcagaatctagatgagctattcgcgccgagcattgtcactcagcttcctcccatgttgccggcggaggccacccaacaccaccatacattgcctcagcacgtgaatcagattgtgtcgtcgtctccggtcgatttgcccagccacgtcccaattgaggcactggtgcagcagaatggtggttcatcggttcagcgtcagagaggaaaagggttgcaatggactgtagaagaacacatgaaatttttagttgcacttgacgaagttggcaagggagactggataaccatctcaaaacatattggaacaaaatcttctactcaagttgctagtcatgctcaaaaatactaccttcgccaaaaagccaaaaagaaaataagaaaaagcattcatgacattactttaaatacaatttctcaccaggatgacacacaaaattcaactcctcatccagatcctgaaattcaaccagttcatgaaattcaccaaatgcaagaaatgccaccaaacagcatgactcatcaaatgagtggattcgaatattttgccaatcaacaagtccatgaaatacaacaaatgcaagacatattgtcggtgtatccatcaaacaacataactcatcaaatgggtggatttgaacattttgtcaatcaacaagttcatgaaatgccggtgtatccaccaaacaacatgactcatcaaatgagtggatttgaacattttgcgaatcaacaagtccatgaaatgcaacaaatgcaagacatattgtcgatgtatccatcaaacaacatgattcatcaaatgaatggatctgaatattttgtcaatcaacaagtccatgaaatgccggtgcatccaccaaacaacatgactcatcaaatgagtggatttcaatatcttgctaatcaacaagtccataaaatacaacaaatgcaagacatattgccggcgtatccatcaaataacatgactcaccaaatgagcggatttgaatgttctaataaagactttggaagaggttgctacaagccggagtatccaccaaacaacactagttcatccaacaattaa

SEQ ID NO: 28463 - DNA, 1463 bp, Glycine max
  Clone ID: TF_GmC1310_1
aaataacactctctctctctcaattatttctgccgtaaatagacaagggttatctcaaataatcaatctaagctagctgaaagcaacaacaacaacatggggagggcaccttgctgtgacaaatcaaacgtgaagaaaggcccttggtcgccagatgaagatgccaaactcaaatcctacatcgaacagcacggaaccggagggaactggattgctttgccacaaaagattggcctcaaacgatgtggcaagagttgccgtctcaggtggctaaactacctccgccctaacatcagacacggtggtttctccgaagaagaagacaacatcatttgcagcctctacgttagcattggaagcaggtggtcggtcattgcagcacaattgccgggaagaactgataatgacataaagaactattggaacacgaggctgaagaagaagcttctagggaaacaccgtaaggaactacaggcacgcaacaaaggaaacggtggtatccttaaacaggagaacagttcctcgctcttgcttcagcaaaacagtgctcaacaattacatccatgttggccacagattccagtgctgccactttcatcaccgtacacaaaccaaagtccaagtttcaacgaccaagattccattagaaagcttctaatcaagcttggagggagattctccgatgattatcaacccatcctagatgggttgaatcttcagttcccacatggttcaaattctctctcatcaacacaacaaattcaagaggagcaagtccatgttggttcttctgcactagggtgcatgaactctattggccacaatcaagtacaatttggtcagagtaatgagtactgtgctgagttggtgcaaggacaagggagtttcattaccacagcaattggggaaatggtttcttctaatgattattctcgaaggttattaggtgggtcgttggagttcttctatggggaggaaatgattactgataataagataatgggtgcttgtgcttcttcaagttgtgggcaaagtactaattggggtgaaaccagtagttctctgatgtatccttctcttgttgcttcgaattacgagggtgtgcggcaagagatgccacgagaatgtgcttttcaagagttgagctacccgggggcgcaatagcatgtgtgtacattatttgttatcaattggtggaggttgggattatatgtatccaaattgaagctagcaaaagggaattaactttgtatttgattcccatatagataataaaaatcagcttgatttatatataactagagacttgtccgctatgtgagactttctcatgtgctgatcccttagtggcagtgcagtttaattatctgatttgtttgtgtattatttggttgtaatcttgagagtcatttaaatatatccttttatgttccaagctaaaaaaaaaaaaaaagaaaaccccc

SEQ ID NO: 28464 - DNA, 1161 bp, Glycine max
  Clone ID: TF_GmC691_1
ttggctttgtggcaaatgaggaaaccttatatgatggaaaaagacaaaatgaacaacaacattaagagcaagctaaggaagggattgtggtcacctgaggaagatgaaaaactcctaaggtacatgatcactaagggacaagggtgttggagtgacattgctaggaatgctggccttcaaaggtgcggcaagagttgccggcttcgttggattaactacttgagacctgatctcaaacgtggtgcattttcaccccaagaggaagaactcatcattcatttgcactctattcttggcaacagatggtctcagattgcggcacgtctccctggtcgcacagacaatgagatcaagaatttctggaactccactctgaagaaaaggttgaaaatgaacaacaatattaacgccacttcatcaccaaacaatagctactcatcatcagagcctagagatgtcaatgtcatgggtgggatcatgcccatgaacgagcatgacctcatgaccatgtgcatggactcctcctcatcaacatcatcatcatgcatgcaatccatgcatacaaccaaccgagccgtaactgaccaatttgatccctttcccttgttgtccaacaaccgttacgacatgaccggcgcaaccgatttccttgacaacatggctgcatgcttaacccaagttggcatggtagatcatgatcatggggttgttcatgatggttatgggacattggagcctaacaaaacgggtttagaaagtgacttttcccttcctccactagaaagtagaagcattgacgacaatagtagtaccccaattgatcatgtgaaaagccataacaacaacaaccacttcaagaatagttgcttcaataacactgatcatcaccatcatatccaatgctccaacaacgtagttgtagaggatttgtttgggtttggaaatcatggacatggagaaagctttagaatggaagaatgggactttgagggtttgattcaagatattccctatttttcttcccttgatttccaagtttaagtatgtgtttggatcacgttatcgcaatcgataaacgctacaatttgtagcttctgcattgacatgacgcgttgatacagtttcaaacacactttaaatgttggccattcttttgaaaaa

SEQ ID NO: 28465 - DNA, 1093 bp, Glycine max
  Clone ID: TF_GmC3823_1
caacaaccttagcagttaattagcacaacacaaaaggagagagagagagagagagagagagagagagagagagagagagagatggggagaagcccttgttgttcaaaggagggtttgaatagaggtgcttggacagctcatgaagacaaaatcctgagagaatatattagagtccatggtgaaggaagatggagaaaccttcccaaaagagcaggtttgaaaagatgcgggaaaagttgtagacttcgatggttgaattatctcagaccagatattaagagaggcaatatatccccagatgaagaagagctcatcatcaggctccacaagctcctcggaaacagatggtctttaatagctgggaggcttccaggacgaacagacaacgaaataaagaattattggaacaccaatttagggaaaaaggtgaaagatggtcaccaaacaaccactggaaacaacacacagaatccaatgcccaacccatcaccctccctatctcctcctaaactagattcccatgttgtccgtacaaaggctaccaagtgctccaagttgttattcctaaacccaccccctcacccatcaatgcagaacaagttcaagactgaggcagaagaagaagaagaagaagcaaggcttgtgaatggtgtaattagaaaccaaatggaacacactacatacgacaacgggttcctgtcgtttccggatgaagaaaaagaactctcaacagatttgctcatagatttcaacgtgggggatttctgcttgtctgattttctcaactcagatttctcaaactcgtacaatttcagctgcaatattaataatgttaacaaccacgagcagttatcgccttgttcggaccaacctgatcctatgttctctgatgaagttctcaaggactggacacacagcaattttgcagacgaagcgaatgcttccaacaatcttcgttctttcatttcgttccttgagtccactgaggaaagattaggagaatgataatggcaacaaatattgtacttttgcacgtattaatatgcgttcaccaataaaattcaccaattcgatcgctttaaaaaaaaaaaaa

SEQ ID NO: 28466 - DNA, 1601 bp, Glycine max
  Clone ID: TF_GmC508_1
cttacgcgtccgcccacgcgtgcgcccacgcgcgggctcacgcgtccgcccacgcgtccgaactcagccacagccacaacacacaaacacaaacccttcgttcctctctcgttcccttcttcaattcgatcaaacacagaatagtacttttttattatgatggccgtggcccgaaaggaaatggaccggatcaagggcccgtggagcccggaggaggacgaggctcttcagaagctcgtggagcggcatgggcccagaaactggtccctcatcagcaggtccattccgggccggtctgggaaatcgtgcaggctccgatggtgcaaccagctgtcgccacaggtcgagcaccgggccttcacgccggaagaggacgagaccataattagggcccatgctcggttcggtaacaagtgggccaccatagcccgcctcctctcgggccgcaccgataacgccatcaagaatcactggaactcaacgcttaaacgcaagtgcgcgtccttcatgaccgccgatgaagccgccgccggcggcttcagcccgaggccgctcaagcgatcgttcagcgccggcacggcggtgcctcctccaggaagcccctcaggatccgacgtgagcgagtccagcgctgctcccggcgtggtctctgtctctgtctcttccttcacaagtgtttcgccccgtgccggttcggccggttgtcgaaacggcgtcgtcgcaagacgacgccgatgccgacgccgaggatgctggacctactacctcgctgtcgctgtctcttcccggggtggagtcatcggaaatctctaatcgcacctcgacggttccggtgatgccggtgcacaccgtggctgcggcggctccggttccgttaccggcgccggaggttggattaggagcgttgaatttgaatgcggagtttatggcggtgatgcatgagatgataaggaaggaggtgaggagttacatggagcagcagaatgggatgatgtgttttcagggtatggaaatgatggaagggtttaggaacgtgtcggtgaagagaattgggattagcagggtggattcgtaattattattattattattattattatgacctaattagtgttttcacaaaatgaggtttatgaagaactatgatcaagggaagagaaaaaaaaaaaaggaagctgttttcctttttttattttatttttagggaataataatattggttagtgtacagtgggaacgggacgagagaagccaagagtagtagcctggaatggaatgatggaaagtgaaatttcatggcaaatttgaaatttctttggcttgtttctgagcctctttggatgatcctgtgcttcaggtttatttagtttggaaaaaaacataaatgaggggttagatgcgaaaaaagaaagggttggatttaaaaatgaatggaatatcctcaaattttcaatattaagttcacattttattttcatatccgcagaagcataatgtagatatttgttttcgctaatagtgtttgggcgcaacaacagaaaggaaaaccagccggtatttggtttgaaagtagtttttgtctgttgttctttcatggatct

SEQ ID NO: 28467 - DNA, 1786 bp, Glycine max
  Clone ID: TF_GmC508_2
cccacgcgtccgcccacgcgtccgcccccgtccgcaaaataactcaccaacaaccgcaaacacaaacacagacccttcccttccttcctccctccctcattcccttcttcaatttcatcaacacaaccatcaatttcatcaaccatcgcataataatagtattatcatgatagccgtggcccgaaaggacatggaccggatcaagggcccgtggagcccggaggaggacgaggcccttcagaagcttgtggagcggcacgggcccagaaactggtcgctcatcagcaggtccattccgggccggtctgggaagtcatgcaggcttcggtggtgcaaccagctgtcgccccaggtcgagcaccgggccttcacaccggaagaggacgagaccattattcgggcccatgcccggtttggtaacaagtgggccaccattgcgcgcctcctctcgggccgcaccgataacgccatcaagaatcactggaactcaaccctaaaacgcaagtgcgcgtccttcatgatggcgggtgatgaagccgtcgccgtgagtccgaggccgctcaagcgatccttcagcgccggcgcggcggtgcctcctcccggaagcccctccggatccgatttcagcgagtccagcgctcccggcgtggtctcggtctctccttcgcacgtgtttcgccccgtgccggttcggccgattgttgaaacggcgtcgtcgcaagacgatgccgacgatgccggacccgcgacttcgctgtcgctgtctcttcccggtgtggagtcggcggaaatttcaaatcgcgcaactacggtgccggtgatgccggtgaataccgttgcggctccggcaccggttccggcggaggttggattgggagcgttgaatttgagtggagagtttatggcggtgatgcatgagatgataaggaaggaggtgaggagttacatggagcagcagaagaatgggatgatgtgttttcagggtatggaaatgatggaagggtttaggaacgtgtcggtgaagcgaattgggattagcagggtggattcgtaattattatgacctatttagtgttttcacaaaatgaggtttattaagaacttcgatcaagggagggaagagagaaaaaaaaaaaagaaggaagctgttttcctttttaatttttatttttagggaataataatattggatagtgtacagtgggaacgagacgagagaagacaagagtagtagcatggaatggaatgatggaaagtgaaatttcatggcaaatttgaaatttctttggcttgtgttctgaacctctttggattatcctgtgcttcagggtctatttagtttggaaaagacataaaaatgaggggttagatggagaaaaaggaaagggtaggatttaaaaaattgaatgaaatatcctcaaattttcaatattgagttcattttactttcatatctgcagaagcatgatgtaaatatttgttttcgttcaaatccaaaattagcaaatagtgttttagtgcagcaacagaaaggaaaaccggtgcttcgtttgaaagtagtttttgtctgttatccttttatggatctgaaagcagttagttaatcagtttactgcataatcttgcaccggattttttgcaacctaaaaattggggttaagctctcctggagtgttttagccttttaggaatcagttgagaccgtttatccagatattttgaatatttgaacctcccttcgacacacgtggtgaataaaacttataaattaaaattatattatttg

SEQ ID NO: 28468 - DNA, 662 bp, Glycine max
  Clone ID: TF_10237307
ggcagaaccttgtctctgcatcatcataattctctcaattgaggagcccaaagggatcaaatctcttcaacccagaagaagaaaaacaaaagagaaattatagaattaagttgctatagctaatagctataactggcttagatataccatttttattttatttttattttggggtgtacaaaatgggaagaccaccttgctgtgataaaattgggattaagaaagggccttggactcctgaggaagacatcatcttggtctcttacattcaagaacatggacccggaaattggagatcggttcccagtaacacaggtttgatgagatgcagcaaaagctgcagactcagatggaccaactatctccgacctggtatcaaacgaggcaatttcaccgatcatgaagagaaaatgataatccacctccaagctcttttgggtaacagatgggctgctataacttcctaccttccacaaaggacagacaatgacataaagaactattggaacacccatttgaagaagaagctgaagaagatgcaaaattggaggtggtaatgagatgataataatgatggacagagaaactcttctaacaattcaccaaattagggttcaatgcgaagaagaacttatacagatttccacatggcaagacatgct

SEQ ID NO: 28469 - DNA, 813 bp, Glycine max
  unsure (1)..(813): unsure at all n locations
  Clone ID: TF_GmC90208_1
ggtccggttacgcattcgacccacgcgtccgccctgcttttccgttttttctcttcttctcgtgcttcggcggaaatcggcttagctcttcgaccgctttgctttttggttcaaggacataagagctcaatggcaccaacaaggaaatctagaagtgtgaataaacggatgtcaagttcaaatgacaattcccctgagagagatggaattaattcaaataaaaacaagctgcggaagaaaaagttgaccgataaattgggatctcagtggagcaaggaggaactagagcgattttatgaagcatataggaagtatgggaaagattggaagaaggtggctgcttttatacgtaatagatctactgaaatggtagaagctctttacaatatgaatcgggcatacctctctctgccagaggggacagcttctgttgttggcctcatagcgatgatgacagatcactacaatgtgatggaagggagtgatagtgaaagggagagcaatgatgcaccaggatctcaaaaacctgtaaaacgaaagcatgaagaagttcagcttagtgtctctaaagatcagtctcattcaattgcttctagagatgattgcctctctatattgaagaagagacgctntgatggtatgcagctcaagccttatgctgttggtaaaaggactcctcgcgtnccggtttataagaaagacgatacagaanattatgtttcaccttatagaagaaagcctgaagtcgactattgatgctaatgatgaatgaaagtgctcatgnntgtagcttttggcattaaactgaggctg

SEQ ID NO: 28470 - DNA, 1254 bp, Glycine max
  Clone ID: TF_GmC1813_1
cgcttccgcttggttgcagagaaacacaaacactgaaacactcaagtgagttcgatagtatatttgtttttctttttcacaaagatggtgagaaccccatcttgtgacaaaagtggaatgaggaaaggtacttggactccagaggaagatatgaagttaattgcttatgtcactaggtatggctgctggaattggcgccaactccccaagtttgcaggtcttgcaagatgtgggaaaagttgtagattgagatggatgaattatctaaggcctaatatcaaaagagggaacttcactcaacaggaagaagaatgcatcattagaatgcacaaaaaacttggtaacagatggtctgctattgcggttgagttaccaggaagaacagataacgaaataaaaaatcattggcacaccgcactcaagaagaggtctcaacaaaacacactcataaatgaagaaaccaaagccatcaaatcaaagaataaagaatcagttcacaacaacggtgtatttgttactcttctagcaacttctcagatttcagataattcatcattatcgccagtttcatccacctgcagcgagttttcctccataacttctgatctttccactgctgccagctgtatggaaaatttggtgtttgaagatgatgacttgggttttctggatttatacaatattgatcctatgaatggaaatttgtggacagaactaaatctcgatggcatttccttcaatacaccatgtgaaatagtttcaggagatactaatagcactttccaaagctcaagttctagcaatagcaacacccttgattctccgcatcaatcaaccagcgaaagtattgttgtgaataatgactttggtcgctttctcgattcatacgaagaggcaacagtcgataacttttggacacagtcatatgtagctgacatgtcccacgttccaagcgaactatttgttccctccgtggcagaatctgaatattttactccattatatgatgatctgtggggtcaaactcatttgtaccatgaaaatcattgcttattctgatgaacaaaattactccatctctagagatcaatagttttgagagtgttattagagttggtgattccaattcttgatccaacctagatggatgaatctttttatatttttggcttaggggtttgtatagtattgtagcagttgctctcctatatttctcttgtaccaattttttataaagtgaattgcttctgcttt

SEQ ID NO: 28471 - DNA, 525 bp, Glycine max
  Clone ID: TF_GmC148_3
gcttcagtacttgctacctttctataaaggtagagagaagagaggacccttctcttgcatagttcaagtgagtgagagtgccaaaaaatgggaagggctccttgttgttccaaagtggggttgcacaaaggtccatggactcctaaagaagatgcattgcttaccaagtatatccaagctcatggagaaggccaatggaaatcactacccaaaaaagcagggcttcttagatgtggaaaaagttgtagattgagatggatgaactatctgagaccagacataaagagagggaacatagcaccagaagaagatgatcttataatcagaatgcattcacttttgggaaacagatggtccctcatagcaggaaggttaccagggagaacagacaatgaaataaagaactactggaacacccatctaagcaaaaagctgaaaattcaaggaacagaagacacagacacacacaaaatgttagagaatcctcaagaagaggctgcaagtgatggtggcaacaacaacaac

SEQ ID NO: 28472 - DNA, 459 bp, Glycine max
  Clone ID: TF_GmC143158_1
ggtttgtccaatccctccaactctctaacggaaaacactttcccatcttcccccaccatatattctcttcctgtgtctctttctatactcccttgtctttattgttagtttcttatctctattattcctctctctctctctctctctctctctctcttatagctttaatattctttactcatcatagcttagggaagggaagataaatagatcaagcacaagagggaaaaatatataccctattcttgaattagggttttttttttctttctttgtgtttcagctcctagctagggagagataattaatatgtgcagtagaggccattggaggccagctgaggatgagaagcttcgagaattggtggaacgctatggacctcataattggaacgccatagctgagaagctccgaggaagatcagggaaaagctgtaagttgagatggttcaatcaattg

SEQ ID NO: 28473 - DNA, 506 bp, Glycine max
  Clone ID: TF_jC-gmfl02220131d02a1
ctcggaattcagctcgaggtctctttctgtgtctctatctatcgttttctcaagataatgggcaaatcaccatgcgactcgagtcatgatccataagtgagaaagggaccatggatcatggtcgatgacttgttcttgataaactatcttgctgatcacggtgagtgtgtttggaattctccagccgaagcttgtggtctcaaacgaacatgaaagagctgtcgactccgtttgctaaactacctttgtcctgatgttagatgaggatacattacaccctgagaacagcttttgatcatagaacttcatacatagtggggctatacgtggtccaaaattgcaaaggatcttccatgaagaactgactgtgtgattaagtgcttctggagacctaggatccagaagcccatttagcaagctgagactctacaacgacatgggaattcatcagaaaataagaactatgagcatcatgccagcaatagcactagccaggtgtccaccat

SEQ ID NO: 28474 - DNA, 2033 bp, Glycine max
  Clone ID: TF_GmC274_1
acaccgcatacgttgtttcccttgggcgacccacgcgatgggaataatttttttttttttttttttgtgctgagttgttttgtttattactatttcttctcttttccttgtgacacagacaaggaaaaagggagaaagaacagttttttttttcttttttttgaataagtctttctctaccctcagttgctctcatagactcttgactctttcagttgtttactaattaacactcatcacattcgttgtgtttggcttcttcactcgctttctctatttttttctcactaaaaagttccatcttttttttttttttttaatttctggggttattattgctttctgtgattctgtctcagttccattttggtatctttgagggaaattcattgggtttgcagggttttatcttgttagaatttagaccaattggctaacagataatagtcttcattgaacatcaatttcaagcattctctctgatttttttgatcaagtggctcttttctagattctgattcccttcaaaatgcttctggatttatccttagtattgattgtataaaacctccacttctgttatcattttctctctgccttatcttcctcagtttccactcatcaagtttcaatcttcctttgaataagcccaaatttgattgtatgaaccagtagcttttgcttgtaaattgaattgatgaagtgggaaagtataaccctttcttctcctacttcttgtactccaaactccaacaccaattggttggtggaaaataatagcaggagcacaaaatggacccctgaagagaacaagctctttgaaaatgctcttgcagtgcatgataaggacaccccagatcggtggcacaaagtggctgagatgattcctggaaagacagtggttgatgtgataaggcagtacaaggagttggaagtggatgttagcaatatagaagctggtttgattccagttcctggctatagtagcactgctatctcacccttcaccttagattgggtgaacactcctggctatgatgggtttaaaggatgtggaaagagaccttcctcagtgagacccattgagcatgaaaggaagaaaggagtgccttggactgaagaggaacataaattgtttctattgggtctgaagaagtatgggaaaggcgattggagaaatatttctcgcaatttcgtgattactagaactccaacacaggttgctagccatgctcagaagtacttcataaggcaactttcaggaggcaaagacaagaggagggccagcatacatgacataacaacagtgaatctcacagaaaccatcacaacttcttgttcagaagacaccaatagatccacttcaccacatgttctctcacagccgcagcagcaaaattctactcctactacccccagaactcattttcagtggactaatcagtctaacacaggagtagctatgactctcaaccctgctcatgaaagagtcttcatgtctccttatggtgctaactcctttggggttaaaattgagggacagaatcttcatgagtcttcttacttgggacctcagacacagaacatggttttccaaatgcaacagtcctcacaacactagttccatgcattagaacttgttgtagtgaattattaatgggtagaagtagaaccagaatcttctgtccatttcaataagtacggtgcttgagttgagctttttcctaagttcttatgtgaatatcctagattattggttagttattatgaacttgaaggaaggtacatagatttgtttctttaacaaataagaacttcctgaaaggagtggcaggcaaccaagtcccaaacgttggtcttggttggttttgttgtctgggaataatggatttcaagcaaagtgtataaataatggaatttcgacttagaggaaaagaggcacttctcgtgtcttgtcctctccggcatatatatttgtatgtggaggatactgttactgcaattgaattcaaagcaaactttttatagaaatc

SEQ ID NO: 28475 - DNA, 559 bp, Glycine max
  unsure (1)..(559): unsure at all n locations
  Clone ID: TF_LIB4392-025-R1-K1-C11
aaattcttagcttcagagagagaggcgaagagagagaagcaatcgtggtttcttctatgagcttcacttcaattcccgccacttctctgcaagcataggatatggctgaggtggtgaaatcagaggattgttgtcaggagaataagcaatctactgctgcttcttgctcctctgtatctgaaggcagtggcagtgcaannctcatgtctccggcgatatgtagccccgcatccacatcaccctcacatcggaggaccactggccctataaggcgtgctaagggtggttggacagcgcangaggatgaaacattaaggaatgctgttgcagtttttaagggaaagagttggaagaaaatagctgagtttttccctgatagatcagaagttcagtgtctgcacagatggcaaaaagttcttaatccagaacttgttaaaggaccttggacacaggaggaggatgataaaattgttgaactggtgtcaaaatatgggcctacaaaatggtctttgatagccaagtctttacccggtcgaataggcaaacaatgtcgagagcg

SEQ ID NO: 28476 - DNA, 724 bp, Glycine max
  Clone ID: TF_GmC8312_1
cgctgacctttcttcaatatcgtttattatttttctctctctctctctctcttttcatagtgttctaactcctcttgtgctatataaagaagtagaaaagtcaccacagtgtttatcactgtttccacttgctccaaaaatgggaagatcaccatgctgtgacaaggtgggtttaaagaagggaccgtggacgccagaggaagatcagaagctcttggcttatattgaagaacatggccatggaagctggcgtgctttgccagcaaaagctggacttcagaggtgtggcaaaagttgcaggttgagatggactaattatctaaggcctgatattaagaggggaaagttcagcatgcaagaggagcaaaccatcattcaactccatgcactattagggaacaggtggtcttcaatagctacacatttgccaaagagaacagataatgagatcaagaactactggaacactcatcttaagaaaaggttagacaaaatgggcattgaccctgtgacccacaagcccaagaacgatgcccttctctccaccgagggcccttccaagattgctgccaacatcagccacatggctcagtgggagagtgccaggctcgaagcaaaagcgagattacgcagagaatcaaacctacgtagttcttgacactcatcatcatcatcataaaaccacacccctattggcacttctgcatcatcatcatcatcactt

SEQ ID NO: 28477 - DNA, 547 bp, Glycine max
  unsure (1)..(547): unsure at all n locations
  Clone ID: TF_17400850
aaacgaggtaatttcacggaacatgaagagaagatgataatccacctccaagcccttttggggaacagatgggctgcaatagcttcatatcttccacaaaggacagacaacgacataaaaaactattggaacacccatttgaagaagaagctgaaacaaagtgggagtgatgagggtgttgaccaagagggacattcttcttcttcttcttctaattcacatccaaagggtcaatgggagagaaggctgcaaacagatatccaaatggccaagaaagccttgtgtgatgctttgtcccttcacaagccagcaacagcaacagcaacaaaccttgttgtgcctgatgatgccaccaaaccttcttcaacttctcaccaaccctacaagcatgcatcatcctcatatgcatcaagctacgagaacatttcacggntgatggaaaactggatgaaatccccaaactcaaactcaacaaataattcgccagggtattattcttcttccttcagcaacatggtcaataataacactacaactggatccagtt

SEQ ID NO: 28478 - DNA, 1342 bp, Glycine max
  Clone ID: TF_GmC1413_1
ccggacgcgtccggcaatcagtaagaagaaaatcatgaaaagagagaaaagaagagagggagatagatatattatagctagctagatagagattagaagctatattattatatacataaagttatattatttatattgaactaaaagaaagggtacaagggaaagatgggaaggccaccatgttgtgataaaggtgtgaagaaaggaccttggactcctgaagaagacatcattttggtgtcttatattcaggaacatggtcctggcaattggaaagctgttcctgccaatactgggttgtcaaggtgcagtaagagttgtagacttagatggactaattacctgaggccaggaatcaaaaggggtaacttcacagaccaagaggagaagatgattatccatcttcaagcacttttagggaacagatgggctgcaatagctgcttacctaccacaaagaacagataatgacataaaaaactattggaacacatatttgaaaaagaagctgaacaaaaaattggaagcaggttctgatcaaggaagcttgttgggaggaggacataataatattgggttttcatcagtttctcaaccaatgtctagaggccagtgggaaagaaggcttcaaacagatattcacatggccaaaaaagcacttagtgaagcactctcaccaaacaaggcatcatcatcatcatcaaccttgttagctgaatcaaattcaaacctctccaatgaaaatagtaccttctataatagtaacactaataaaccaacaacaacacaatctatgtgctatgcttcaagtgctgacaacatagctcgtttgttgaaagggtggatgaaaaacacaccaaaatcagcctcatgtgctgcctcggctgtgactcaaaattcctgttcttctagtgaaggaattacaacaacaaagggaagcacaacaagcactagtactgttgaattgtctgagacttttgagtccttgtttggttatgagtctttcgataattactcttcaaattctgagttctcaccatctctttctcctgaggctactcttttccaagatgagggcaagccagatataactacaggattaatagacatgcctttctctttgcttgagaaatggcttctagatgttgatgctggtagtcaagagaaacttggcttctagattattagttcaatttgatatgttttttcttagttacaggagagtaagttaaatctctctctcactttggccctcaacccttcttttggttctagaagtgtatattccaatccaatgttaacattattatatgataaatctataataccactatcctataatt

SEQ ID NO: 28479 - DNA, 1308 bp, Glycine max
  Clone ID: TF_GmC1768_1
aaggcaagcaaaatcataatcagttggattatgtcggtctgcaaagattctctctttcgctgcaacattttcacgtgctttttttaacataacatttaagcacatcaatcaatatcccacaacattattactactgtatcattattgtgacctatggagcagcaagagagagctagcagtgcaagctttcaacatccaaaacaacagagagtttttggctttagaagctgaaggaatatagttatcacaatggggagagctccatgctgtgagaaaatggggttgaagagagggccatggactccagaagaagatcaaattctcatcaattacatcaacacttatggccatgctaattggcgtgcactgcccaaactagctgggctattaaggtgtggaaagagttgtagactccggtggataaattaatcttgtgataattacacaattgcgtgcagatggtcggctatagcggcaaggttgccagggagaacagacaacgagataaaaaacgtgtggcacacccacttgaagaagaggctgccacaaaattataaacaaagccacgaccagaaaaaaacgaagcaaaaaacaaccaaagttagatgtggacgcctccaaatcaaaccaagacgccaaactagaacaacaacaagagcccgtgaataataattttccctttcatgcatcgaactcagaggacatgatgccactatctcctccacaatgttctagccacatgtcctcctcctccctcaccactagtgacaacaacggtagcattaacaataaccatgacatgtccttaaatgttaatgatgatatcgacacgccggagacggacgcgggggtggacgaggatttctggtcggaagtgttgtcgtctgataattccggtgagacaacaagcggatttccgaccattgactatgatcatcagtttctaccgatgtctcctctaatgaccgaagaaggggtccttatagatgctagttcgtcgagtgtgtgcgacgacggcatggacttttggtgcaatgtttatgcgagagctgaggaatttacgcagttattggaattgtgatgttagttaatgttgctcttaattagtagaggccaagtccttcattcaacggaaaacaaaagatcatgtcattgttcttctattgtttggacttgaattaatttcctagatagaaattaataaagtgtgtccattacgactgttactcgatgtgattataataaagtgtgcgtgttcattgttcgtaatattcagtggagactgtcaagcttttatgttaaacaatt

SEQ ID NO: 28480 - DNA, 1101 bp, Glycine max
  Clone ID: TF_GmC1466_1
cggctcgaggctgcgagaagacgacagaagggggagctagttaggtgttaaatatttgattgcaatattaatatgaaggcacagtgtgagtagtgagaaggggcattagtaaagaggatgggtagacgaccctgctgccccaaagagatcaacaaaggtgcttggtctcgagaagaagatgaaaccctctccaaatatgtttccatccatggagaaggaaaatggcagaaggttgcccaaaatgcagggttaaagcgatgtggaaagagttgcagacaaagatggttgaattatctcaagcccggtataaaaagaggccacatctctgtggatgaagaggatatgattataagacttcatcgtcttcttggtaacagatgggcattgattgcaaagaggctacctggacgaacagacaatgaaatcaagaactattggaacacaaatctgtcaaagaagttacaaaaacatccaacatcatcagtttcttcacttcaacacaaacgtcatgaaaaagaaaaaaccatacaaatgcatgtatcacccgaagcaccacggcctaggagagttaatgcagttgaatacagtaaaaatttggagaatggtgggtgtggaaatagacctagtacaactcccagtccctcaaataaagtagagggtagtagtgaagaagcttcttttagtgatttcctcatccacgacattgatcaaaaccaatttttgattgctgatgattcaaactcaaaggtgccacaaatggaagaagatcacccccacaacaacaaggtggaattaataaccaacaacagtcctagctcttcatcaccttctgatcattgtcaccatctcttgccagagaaatttgacccttttgagacccttttggatgtggagctggcttcctttcttggatttgaaaatgattgatcaagagattttatttattattattgcatgcagtgagatgaatgaaaaaaggtcaagtacttagggagtgttatagataatatcccatctatatatggaatgcctaactaattatgcatctagctatagctagatgtaatatacaaatccagggtttctttttctttttcccgg

SEQ ID NO: 28481 - DNA, 1495 bp, Glycine max
  Clone ID: TF_GmC146_2
ggaagaccaccttgttgtgacaaagaaggggtcaagaaagggccttggactcctgaagaagacatcatattggtgtcttatattcaggaacatggtcctggaaattggagggcagttcctgccaaaacagggttgtcaagatgcagcaagagttgcagacttagatggacgaattacctgaggccaggaatcaagcgtggtaacttcacagaacaagaggagaagatgataatccatcttcaagatcttttaggaaacaggtacaagtcaatcttccaagcacctacttacttggagttttgtgttcaattcaagcaattaagttactaatgaaatcttttagcttataaaaaagaaaaaaactttgttttgaagatttattttttataactgtttttgagtattttgatttgggaagttctatcttttggatccacatgcttaacttaactggatcacattggctatgttacagatgggctgcaatagcttcataccttccacagagaacagacaatgacataaagaactattggaacacccatttgagaaagaagctgaagaagatgcaagcaggttgtgaaggtggtagctttggagaagggttttcagcctcaaggcaaatccctagaggccagtgggaaagaaggctccaaactgatatccaaatggcaaagagagccctcagtgaagctctttcaccagagaaaaagccatcttgtttatctgcctcaaactcaaacccttcagatagtagcagctccttctcttccacaaaaccaacaacaacacaatctgtgtgctatgcatcaagtgctgacaacatagctagaatgctcaagggttggatgaagaacccaccaaagtcctcaagaaccaactcgtctatgactcagaactcattcaacaacttagcaggtgctgatactgcttgtagtagtggagcaaagggaccactaagcagtgccgaattgtctgagaataattttgaatccttgtttgattttgatcagtctttggagtcttcaaactctgatcaattctctcagtccttgtctcctgaggccactgttttgcaagatgaaagcaagcctgatattaatattgctgcagaaattatgcccttctctttgcttgagaaatggctccttgatgaggcaggttgccaagagaaattagttggttgttgtggtgatgccaagtttttctaagttgggttcattttgtgacatatgagcctgtgggatttttttattttattttattttatttcataagttataggtagggcctcatcaattaatctcgcttcggccttattagagagagaagttttccagcctttggtgctagacgtgtatatgttaattattattgacattatgatgattattatcatactgtgttagttgccatacactggcaaacttgcttctcttatgtaaagttgatcttgcgacgagatcttgctttatgaattaattgtttttaaagt

SEQ ID NO: 28482 - DNA, 1799 bp, Glycine max
  Clone ID: TF_GmC1321_1
cccacgcgtccgtccacgcgtccgcccacgcgtccgcccacgcgtccgctctctcattctctttccctcttcaactcaaccacacacttcttagatcaaaagctatctttgttgctttgagtttgaaccttgaatctatcaatcaatcaaagtgggtggtgactcatggaagtgaaaggaataagggcaagcaactccaccaccaccaccacaatccaaagtgaggatgagatggaccttcgaagaggtccttggaccgtcgatgaggaccttgctctcatcaattacattgccaatcacggtgaaggtcgatggaactctcttgctcgttcagctggactcaaacgaactggcaagagctgcagattgagatggttgaattatttgcgtcctgatgttcgacgtggaaacatcacacttgaagaacagctttttattcttgaactccactgtcgctggggaaaccgatggtctaaaattgctcaatatttgcctggaagaaccgataatgagataaagaactattggagaacccgtgtccaaaagcatgccaagcaactcaaatgtgacgtgaatagcaagcaattcaaggacaccatgcgttacatttggatgccaaggctcgtggaacgcattcaagccaccgctgcggcctccgccaccacaaccgttaccgctaccaccgcgaccaacaatgcatacacctacggaagcaaccttaataacaacaaattcgaggttcacgatcacaagggcaaaatggggttaaccgatccttcagttatgaacaatgacttagtgggttcacatgtcacgcaaagttacacccctgagaatagtagcaccggtgcgtcatcatcagactcgtttgggactcaagtctcagcaatttctgatttgactgaatattacactgtcactgttagtggtaacaataacaatactaattctgcggattattatcaaccctctcaaattagttactcggatagttgcatcacaagcccatctgggttgttccctcaagggctagattttcaatccatggatccaaacaccccgtggaacatgcaaagtggggactcctctgacagtttttggaacgttgaaagcatgttgttcttagagcagcaactcatgaatgacaacatgtgaaaacattgggaataggaaaataagacttagatacggttcttcttagtattgtgttttaattaaagttaaagttaacacaagttattgaagtgaaactttaattttaattgaataataatactgaaaacaagagttgtatttaagttttattcttttatgaattatgaattagattgacagaaggggttgtttgtgaaatatacaggtgaaagtatagaaagtagcaacattaataaatcattcatgtgtagcacacacctagatatttaggatctatgatcaacaaatatctgaaacggtggattattataaggataaagagaaggatttttttttacaagcgtgtaggaatttaaattataaagtttttataaattttttgttattactaataatcgatctcactttttattcttttatgtattagtatgaattatgaattagattgacagaaggggctgtttgtgaaatatagaggtgaaagtagaaagtagcaacatcgaataaagtattcatgtgtagcacacacctagaaatataggatatctatgatcgacaaatatctgaaactgtggattatataagctttaagagaaggaattgttttttttttttcaatttgagctttctcagtataagatttc

SEQ ID NO: 28483 - DNA, 2444 bp, Glycine max
  Clone ID: TF_GmC1272_1
gaagatttggctctggcatgtcttcattggattttatactcatggaaccagctgaagttgcaggggttaatggtggaaagtggactgatcaggagactctcctgctccttgaagcattagaactgtataaagaaaactggaatgaaattgcagaacatgttggaacaaaaacaaaagctcagtgcatattgcactttgttcaaatgccaattgaggatacctttgttgactgtgatgatgatgttgatgctggttgcaaagaaactgcggatccagttgcaacaaaaagtgactcatctatggacaaagatgcttcagaatgtattgagaatcatactagcgatggcatcaaagacagtgaaaaaacttccaaagctgaagatctcgaagtcaaagtgaatgagaaggagactccaaagttacaagaaggcagtgatgagaaagccagcgaggaaacttctaaatcagaagatgctgttaaggtaaagattgatcaggaagcagacaatgactgtgctataaatgctcttaagtaagcatttgcttcttttggttttctcctggacctgaaggcccttcttcatttgctgatgtgggtaatcctgtcatggcactggcaacttttcttgcacacttggtgggttctgatgcggctgttgcttcagctcacagctccataaaatccatgacaagaaattctcctggcaccgagcttgctgcaaggtgttgctttcttctagaagatccgccagatagcaagaaggaaccaactagttctgagagggattctaaaagtgagggagaccaggatgaagtaaatgtaaaccaggataaatcaacattggaggataaagatttaccgaatgatcacaataataagaaaattgaaagtaatgctttagaagacaagggaaagccggcttctacagatgatggagccttggaaaaacccatttcttcaaaggagcaagcagtggttaataatgaatgtgggcttgacaagggtcatgatctcaacaatgcaaagctacccaatgatcaagcaccaggcactctgcataattcaggtggttcaacatccaaggctgaaattccacctagttctgacaaggctcaggaggaaactttaattgaagaaccttgcccttctgtaaaggacaagcatgtgtctgattctcttctatcagacaaatcaaaagatgctgagatggtttctaatgctattccctcaactaagagcaagcctcaaaatccagagtctacaaatccagctcatgaatctctagaaacaacggactcagtaatggatgtggatggagtttctaattccttgccattggaaaagattgactctcagccactaattacatcaaaatcatcccaatgtaatgggacagaaaaggatgtagaagtgatgtcaccttcaaatccagttagatcaaattctagtgctgaaaatggtccaaatacaggggcaggtaaagataatgcagataatggagcaaaagtggaagatgatggtacaaagactaaacaggatagcagttttgagaaagtgaaacgtgctgctgtttctacacttgctgcagcagcagtaaaagcaaaacttctagcaaatcaggaagaagaccaaattcgacagcttacttccttgttgatagaaaagcagttgcacaagttggaaacaaagttggctttttttcaatgatgtggagaatgtggtgatgagggcaagggagcatgtagagcgatcacggcataagctttatcatgagcgtgctttgataattgcatcaaggcttggtataccaccttcctcatctagaggtgtaccaccatctataccaaccaatagaattcctacaaatattgcaaactcactcccaagaccacaaatgatgatgaatccaccaagaccactgatttctagacctgcaggcacggtagcaactattcaaaacccattaacaccttcaactgcagcaggaaattcagttcggccatctaatcaggaaaagctttcttctgttgggacaaaataaatgtcaatacatatagaaaaatgttcatgtcttcatacttactgatctctcgccatcattttgacaattaaattcttgcaaaggtcaagtgctggttaggactaactccaaattgagtagtattgggaattcggtgaccagagtagtgtgcattggaagctcatcctttccccgttattaggagcagccgcagatgagaggacggaagtttactgatagatttgaagttgtagaccgatttttttatatttatttttgaggtgtttaacttaaaactagtggatagttgtgcaaaatgcgcgccttcaatcctctaacttgaatgctattcactacattattattggatgagagcatattgaaatttggatgacttcataaagaatatatagcagtctggca

SEQ ID NO: 28484 - DNA, 1002 bp, Glycine max
  Clone ID: TF_GmC116854_1
cgattctctaccagagttgcaatattttttcttaagttccaacgtctccccttccacgccgcttcctggctcttcgtctcactccgccgcctcgtaggttcctgtcgcaatcgcttaaggcataatattagtgcacatggggagacactcttgctgctacaagcagaagcttcgtaaaggcctctggtctggctcgagagacgagaagcttttgaattacatcaccaaacatggccatggatgttggagctccgttccaaaactagctggtcttcagaggtgtggcaagagctgcagattaaggtggataaattatctcaggcctgatttgaagagaggagcattctcacagcaagaagagaattccattgttgaacttcatgcagtccttggcaacaggtggtcacagattgcagctcagttaccaggaagaactgataatgagataaagaatctatggaattcctgtctgaagaagaagcttaggcaaagaggcattgacccaaacacacaccaacccctctctgagattgagaatgacaaggacaagcctctcacagctgacaaaagcaaccagaaagcctccaatgaagtgatgagtcattcggagccaccaaaaccaaagccaatagctactactgcaactacttctatgcctatggatagacatccccttgaagtttcttccacctccaagatcagcagtggcaacaacaacagcaccctatacaggtttgacagctccatcactgttctgatatgatgggaatgggatattttcctttccagcacctcaactatggaccaaacatgggactcactactactcccaacaacaccccactttgcttcataccaagttccacttcttctcaaatgatgtcagagctgaattccaccatgttccattctatggttccaacacatgtaaaacccactggtagtcttcactctaacaacaacaacaaccctttttcaatatcctctgatggtggtcaaaac

SEQ ID NO: 28485 - DNA, 1279 bp, Glycine max
  Clone ID: TF_GmC57353_1
tagagctccttgttgtgaaaagatgggattgaagaagggtccttggaccccagaggaagatcaaatcctcatgtcatacatccaaaaacatggccatggaaattggcgtgccctcccaaagcttgcagggttattaaggtgtggcaagagctgcaggctaaggtggattaactatttaaggccagatatcaagagaggaaatttttcaagcgaagaagaggaaattatcattaagatgcatgagttgctggggaacaggtggtcagcaattgcagcaaaattaccaggaagagacctggagacttgaattgctagtagatggcattgaccaagaaatattgaactgggttaaggatggaaaatacattttcttgttcggaggggatgatcctgaatgggtaagaagatttgtgaaggaagcccgcagagttgcaacggctacacaaatacccctagagatggtatatgttgggaaaagcaacaaaagggagcaagtgcagaaaatcattgacaccataattcgtgataagctcaacactcaatactggtcagagcagagcatgatatggttcttctggacccgtcttcagagcatgctcttctccaagcttcaactcaagcaaacagacgacgatgaccacgtgatgcaggaaatcaagaagcttctgagctatgacaaacagggtggatggattgttctggcaagagggtctcacattgtggtcaatggacatgccacaaccgggttgcaaaccttggtggagtatgatgctgtgtggaaagaacttgctgacagagatgggtttgaaccagcatttaagaatcactacgacaaggttcattcaattgttagtccttgctgcaggtttgagttctctcattcaatggggagaatcccagagaggctcacgtgccccgagtgtcgccgcaacatgcacgtgctcaccaccttccagtgctgccacgatgaaaaaattgatgaggacttttttgtcagcactgttactcctcctaccatttgataattcattgttcactctctattgcttcctgtgattctctgcagcgcaatttcatgcatagccctatatgtttacatgtatttttttatttttttttatcacatatctatgtaataaaatgtgagtggtgaggttcaggctcccccattgaggtatgggtaaattattatgtgatttgtgtcagggcttgactcttattgtacaattgacacttaaagaagagtatggataaattgagtacttttgaatgatcaaaa

SEQ ID NO: 28486 - DNA, 2065 bp, Glycine max
  Clone ID: TF_GmC692_1
ccacgcgtccgtaatctctctcgcgctaatcttctccctattcaatctggttcagacctactcctgctgacatttcatctacaagtgtcgttcaaaaacccattagttaattggaaaggtagctcattcccacattgttttgtgggggaaaacccacaatacaaaatgggaaggcactcttgctgttacaaacagaaacgtaggaagggtctttggtcaccagaagaagatgaaaaacttctgaggcatattacgaagtacggtcatggatgttggagctcagttcctaagcaagcaggtttgcagaggtgcggcaagagctgcaggcttaggtggatcaattacttaaggcctgatttgaagagaggtacattctcacaagaggaggaaactctcatcattgaacttcatgcagtgctagggaacagatggtctcaaattgcagctcaattgccagggaggaccgacaatgaaataaagaatctgtggaattcttgcctaaagaagaaactgaggcaaagaggaatagaccctgtgacacataagccactgtcagaggttgagaatggggaagaggacaaaacaagaagccaagagttatccaatgaattgaacctcctgaattcagagagcttcaagtcagatgaagggtcctatgagcagagagcatcatcatcaattgcccccaaagcctatgagatggaaggctcttgcagctccaagattaacaccaccaaaaatgacaccaacttgatgtccaattgttccaacaaagacatgttcttagacagctacaccactagttgccaaccctcagatttgatgggaaattaccctcttcaaatcactgacactctcccaaccaattcaaactcttgccattggttcagccaaactgcaagaccctttgatatgaactctgagtttacaatcacttccaatgttatgtccattcttccacctacaacaacctcatttctcccaagcacttctttttgctacaagccatcacttggtgtcccttcagaagatatttcaacagcatcttttgctttgaatggtcccaattactgggaagccagtgcctccaacaacagcaatggaagcaacaacacaagtgatggcagcagagagttgacaactacaagtagcaagaacagtgtactctcttcttggggattgacagaagaaacaaagtggtctgagtacctccaaaacccaatgctaatgctggcagctcctgaatcattgtgcaaccaaattaggccagccacacatttggtacctgataacactttagggtcaataatagtgcctgattccaaggaccaacaacaacaacaacaatctcaaaattctagcatcttctccaaggacacgcagaagctaacagcagcctttggacatatatagcaccaggctttgacacaatgaaatactattttagaagggctccaagggatttatttgtgttcttagtacaggtgtgtgaaacaacagattaattttgctcttgtatatagataaggtctgtaaaaaaaaaaaaaacattttggtaatacatttgtgagccaaatcatttgttttttttaccttctcgggtgtgggtggaatagaattgcagaataaggattgctctgctttgttctttctactctttcttttcatttccttgctacactgttgactgcattgcaacggtgcattcattaacttccaatacttttacaccatccacagatgtttattagcacacgggaagtatcacttttagttactttgaccacacactatttaccgaatctctttcatccgttatgatcttctattcttctctcaccgcactatcttttagagtactcaaaatggcatcaaacttgtgcagccaaaactttaccctatccaatatcctaagggttgcccatcattttcttgacacaagaatgatttattctattttatttatttcacttccataaataatagcctaagtttcaagactttcccatctaagcaagttttaattttacttgcacaaggaggtgacttggtgttgttatctctc

SEQ ID NO: 28487 - DNA, 859 bp, Glycine max
  Clone ID: TF_GmC1076_1
aattcggctcgagccgaggaagatcagggaaaagctgtaggttgagatggttcaatcaattggacccaagaataaacagaagtcctttcacggaggaagaagaagagcgtcttctagcttctcaccggattcatggcaatagatgggcagtaattgcaagacacttcccaggacgaactgataacgctgtcaagaatcattggcatgtgatgatggcaaggattcggagagaaaggtctaaaaattatagtccaaaacagccactttttcctccaaacttgcaggtcgatcttgagacaaattttgagaccatcccttcttttgttgacaagtattatgaaaagtacagccacccttgtgtcgcactcactcatagctcttttcaatttcccaccaagaatttttactttcaagatccaagttctgctggttccacagtgcctcgagacaattgtgaatcagtagagttctatgattttcttcaagtaaataccgattcgaataaaagtgaagtgacagacaacgccagaagagacgaggaggaagtaagtcaagatgctgtgggaatgaagaataaggacaatggtgttccattcattgattttttgtctactggaggctgctaacatatatataattgccaaagtacaacctcaattacttccaatattgatcaattgatcgagtctgactacagaacaaaatctccacgtacgtagatccatttatgtaattaactacctactgcattcacaaaacagtaatgtatttaaggatatatacatgtacatttataacatgtaaaaaaactgcttctaagaagctccatgcatcgaagatcaaaaacgtacattgcatc

SEQ ID NO: 28488 - DNA, 402 bp, Glycine max
  Clone ID: TF_LIB3109-021-Q1-K1-D10
ggaagaggaaggggctagagaggaaagaactagctggctggaagctgagaactttagcatggactagtactactagtacattcatgcatattacgttggactatggtggcttaaccatagcatcgagagcgcaaagatggtgtgagctccttggtgagaaaagatgcgcctgaagaaagagccttgggctatcgaggaagatcaaattctaagatgttacattgacaaacatggacatggcgaattggcctgccctttcaaagcaagcaagcttgttaaggtgtgggaaaagctgtatactacgctggattaactatgtgaggcccgatgttcaaagacggaatttcacaattgacgaagaagatactatcattgagctggatgacatgctgaggaacaggt

SEQ ID NO: 28489 - DNA, 544 bp, Glycine max
  Clone ID: TF_jC-gmro02910019d05a1
ggctcgagaaagaattaaagtagcaacaaatactctttcctacacttggcagaaaaaaaatggttcaacgggaaatccgaaggggtccctggacagaacaggaggactacaaattagtgtattttgttaacatgtttggagatcgtagatgggactttatagcaaaggtatcaggtttgaaggtggagggagactgtaaataggtttgaatagaacaggtaagagttgcaggttacggtgggttaattacctccaccccgatctcaaacgagggaagctcacaccccaagaagaacacctcgtcatggaccttcattccaaatggggaaataggtttgagaaccatgcagaaataattaaactataagctacctaccttccaatcatcattactcataattttaaattaattttttcctaccatacaagactattagtattaattagttctttggccttatgttttttttttatagaataggatatcaaaaagattatattaattatatacattgagctagatcggttgacaccttattttgta

SEQ ID NO: 28490 - DNA, 1775 bp, Glycine max
  Clone ID: TF_GmC937_1
ctggccaaaccatatctcaaccaaaactattacctctctctcttttctctctaacaaacactccataaacggaaaagaaaagccacacaacaattaattaagttgttaaatttttgtgagatggagaggagtttatcaggaagtagtgaagaggagatgtcaataacgaaaggtccatggacagaggaagaggattctgttctcttcaattacatcactgtccatggggaaggtcactggaactctgtcgctcgctacacaggtctaaaacgaacaggcaaaagctgcagattaagatggttaaactacttgcgtccaaatgttcgacgtgggaacataaccctcgaagaacagctcttgattcttgacctccattcccgttggggcaacaggtattatcatttatgtttattattcattaaattttttaggttaaaatattccttggttcatgtaatttttcttatttttagtctcttgtacaagaaaattgtaaattttaatcccttcacatgcatccatgtttgctaaagttttggttcgcgtcactactaacatatatggaagactttttaggttttagtagtataaagcagccacaaacactttctccaattaatataagccgctaaaaaaatgttgtacatacattaaaactgaaaaatgtttgagaaacactcaatataccatcatatacttaatgagaaaaatatagataggaggtaaataaaatctgattaataattatttttatcaagaagcaaactcaaatattattcaaatgattcaaccttaatttcaacagcacatgaattacttatgctgaatcccctaattaggtggtgatttcctgcacagaactgaaacttaagatgaagcaagcaaatagcagtttgaccaatttttaatctgttagtgatagaacttggtaattgaagtgatgttgtgttatttgttttataaaatgaaggtggtcgaaaatagctgaacatttaccaggaagaactgacaacgagataaagaactattggagaacgagagtggtaaagcaggctaagcaactaaagtgtgaggtgaacagcaagcaattcagggacacgttgcgttttgtgtggatgccacgtatgttagagcggatccaagctcaggcctcatcatcatcatcatcatcatcaggccaagcccaccaaaccacgttaatctccaacgctcaagcacacagtgacccttgcggagtcatgacgaccaacccaagtttgttgtcggaggtgtcatcatcagcccttgatgcccacgcgccttctctctatgactctagtgcgtcttacaatctaatgggtggtggtagttcctcatcgtatagtgcagaatattgctactactcggacatagcaggaaatggttttggtggttcggacttgtggacggatgaaaatatttgctttctgcaacagctgctcgctgatcatgacttgtcgtgaaacatgcatctttgttttaaacttaggtgaaattaatttgcatctatcaagtatcaacgtaactattattatgtatacttcaattaatttcaagagaactgctatttgttgtaaatttaatttagcctgatttctaagagataatgatgagtattttaatttcccagaagacgattttgttcacaacaaatagaattaataatagagtaataaaatgtgattcgaaaaaatcatacaaatgcatgagtgtaagtttttgacagaaataacatgtgatgagttgtatttggctgg

SEQ ID NO: 28491 - DNA, 1461 bp, Glycine max
  Clone ID: TF_GmC1085_1
ggtccggattcccgggtccgccccacccttccggaaccatgggctttcccccccagtcctctctcacaaatggggtcgccattcctgttgtgtgaagcaaaaattaaggaaaggcttatggtcccctgaagaagatgagaagctatttaattacataacaagatttggagtcggatgctggagctcggttcccaaactagctggattgcaaagatgtggaaagagttgcaggttgagatggataaactatttgaggcctgatttaaagagaggcatgttctcacagcaggaggaggatcttataatcagtcttcatgaagttcttggaaacaggtgggctcaaatagcagcacagttaccagggagaacagacaatgagattaagaacttctggaactcatgtttaaagaagaagcttctgaagcaagggattgacccaagtacacacaagcccctcacagaagctcatgtgaaggaagaaaagaaaatcatagagacatcaccaatgcaaacaccattgtctcaaggcccttcagttccattaatctttccttcatcacagggatcatcacttctaataagtgattccagttactatgatggagggctaacagaagcctcaagagaaattttcatgaccaagccagcattggaccctttgtcctactatgattttccaatgggtgttgcacagtctggttttaacttacctgttagtcagtatcagacaagccttaaagcatctgatcagaacccctttggacccaattcaagctatgtattctcttcaatgccaagtctaaccaattctgatcacgggaacgtgtcggtgactgagttttcagacaacaattcagcttccaaaataagttcattgttcatgaatgaccaggtgaaagaaagttccagcaacagctcaaacttgagcaccatttaccatggaggagggtgtcatatcagcagcatgatggaaaatgcagggttctcgtgggagggtgacaacaagtttgaccctttgtttcagttccaagtaaatgccacaaaatcagaggattttaagacaagttcatgggaagaagggcagctgcatactcaaaattccatagatttcacgagctttccgttaacgtcactttcagaagatctaacaggagcaaattttgatgtattccagcatatatgaactgtaaattcttttctttctttcttttgatttttttgaactctttttcatgttagcaaaaatagaatgatgttgatagtacaggagatttgtagcaaaagatttgagatgagatgattccccccctcccccgcatctattattaccattgatgtatctgttttcatcacccaaagtttgaataacgatatattcaattgagtgcagctaattttgttttatgactgtaatatttccatgttgtccaactagtgaattattattatcattattattta

SEQ ID NO: 28492 - DNA, 736 bp, Glycine max
  unsure (1)..(736): unsure at all n locations
  Clone ID: TF_GmC241740_1
gaaaagaaaagacaattattattcccaacagtcccctcagttattcaagtcctcactacccttaaaataggaatttcttattgaaaaagaaaaaagaaaacagaaatgggacgtattccatgttgtgagaaggacaacgtgaaaagaggacagtggacacctgaggaagataacaagctctcctcctacattgctcaacacggcactcgcaactggcgtctcattcccaagaatgctggtaagtccctccccactctatattgatatcattcatatcaatgccaaaaaaaacaagcttttattcttgattttgcttatgaaataggcctccagagatgtggaaagagctgcagattaaggtggactaattaccttcgtcctgatctcaaacatggccaattctcggattcggaagagcaaaccattgtgaagcttcactcagtttttggtaacaggtacattgaatattagccatacattgaaattattgttctgttgattcttttaaataaatgttttactttaatgggtgtttagatggtcactgatagcagcccagctgccaggacgcactgacaatgatgtcaaaaaccactggaacaccaagctgaagaagaaactgtcaggcatgggtatagaccctgtcacccacaagccattntcccatctaatggctgaanatgctacaacattggcacccccacaagcagctcaccttgctgaagcggcccttggc

SEQ ID NO: 28493 - DNA, 843 bp, Glycine max
  Clone ID: TF_GmC189_2
ggtgggagagagagatgggaaggtccccttgctgtgagaaagcacacacaaacaaaggtgcatggaccaaagaagaagatcatcgcctcatttcttacattagagctcacggtgaaggctgctggcgctctctccccaaagccgccggccttctccgttgcggcaagagctgtcgtctccgctggatcaactatctccgccctgacctcaagcgcggcaatttcaccctcgaagaagaccaactcatcatcaaactccatagcctccttggcaacaagtggtctctaattgctggaagattgccgggtagaacggacaatgagataaagaattactggaatactcacataagaaggaagcttctgagcagaggtattgaccctgccactcacaggcctctcaacgatgacaaggtattggaacgctgccctgacttgaaccttgagctaaccattagtcctccccgtcaacctcaatctgatcagcatcacttgaagcccgttgggagaaactcaaacctttgctttgcctgcagtttgggtttgcaaaatagcaaagatcattgtagctgtgcgctcaacactgccaacgctgcttctggccatgatttcttggccttgaaaaccagcgttttggaaatgaaatgagtcaaattcattttggaatctttcttccctaattaattagttgttaatggatgcaaatgattgcctgcccaatttcctcgtggagccctttctattattcctatgttcatgtacatgtgcgtaagactacaaactttcttgtttatacgattggttctttccaaatagaatacaactatatatttttgctatttct

SEQ ID NO: 28494 - DNA, 979 bp, Glycine max
  Clone ID: TF_GmC937_2
acacaagaattaagttgtgagatggagagaagtagtgaagaggagatgttaataacgaaaggtccatggacagagcaagaggattctcttctcttcaattacatcactgtccacggcgaaggtcactggaactctgtcgctcgctacacaggcatgcaaagcattaattatattcatcatcttaatcctagcttctttcttactcacactcatcacgttttcaatcacaggtctaaaacgaacgggcaaaagctgcagattaagatggttgaactacttgcgtccaaatgttcgacgtgggaacataaccctccaagaacagctcttgattcttgacctccattcccgttggggcaacaggtggtcgaaaatagctgaacatttaccgggaagaacagacaacgagataaagaattattggagaacgagagtggtaaagcaggctaagcaactaaaatgtgatgtgaacagcaagcaattcagggacacgttgcgttttgtgtggatgccacgtatgctagagcggattcgggctcaggcctcatcatcggcccaagcccaccaaagcagcttaatctccaacagtaacactcaagcacacagtggattgttgtcatcagcgcttcatgcccacgcgccttctctctctgactcgagcgcgtcgtacaatcttatgggtgctgatgctggaagttgctcatctcatagctactactcagacatagcaggcaatggttttggtggtgcggacttgtggacggatcaaaacatttgctttctgcaacaccagcttgctcatcatgacttgttctgatcatgcatacttcaacatcttgctccaaaattcactctaaactgcaacatataaagcaattgtaacactagtcgtgaaacatgcatgtttctttttatgttaatttggtgtgaaatttaataatctatacttcaattaatttcaagagaactgccatttgttgtt

SEQ ID NO: 28495 - DNA, 744 bp, Glycine max
  Clone ID: TF_GmC106208_1
cacgcgtccgctgcattttagcgcgtaaatacctaaatcctcagcggcaacgtaaaagcttcagtttttgtatcaattcgagtgatccaattgcactattccttaattgcaacctcaaaaaaatctagggtttttatcgtaaaaagtagaaagtatagctacccttttcttccattctgatcctgcgcctcaacaaattcaaattcattcaggagttcgcgcagagaatcaatgggtcgctctcgtctcgagccgattcggctcgaggaggaccccaaccagaggtcaaggagaaaaaagaatgctgccagtggagagaattcagaatctggagctgcaggccaaggagcaggtgaagggaaaaaggctctgtaccactgcaattattgtaataaagatataacaggaaaaatccgtattaagtgtgccatgtgcccagattttgacttgtgtatagagtgcttttctgttggagctgaggtgacacctcataaaagcagccacccttacaggggtatggataatttgtctttccctcttatttgcccagactggaatgcagatgatgaaatcttgcttctagagggaattgaaatgtatggcttgggaaactggacagaagttgctgagcatgttggaaccaaaaacaaagagtcatgcatagaacactataggaatgtatacctgaactccccgtactttcctggtccggacatgtcttatgatggtgggaaaaacagaaaa

SEQ ID NO: 28496 - DNA, 552 bp, Glycine max
  Clone ID: TF_GmC1274_7
ggtgtgtccccttagccaagctcgcgtctcacttctctctcttatattaatcactcccgcacacagagcataattcacctttcttttccgaccaaaggttcgccagaaaatgcttctatcctcctcctgctccgccgccggctccgccgtctccggcgagatcatgctgttcggcgtgagagtcgtagtggactccatgaggaagagcgtgagtatgaacaacctctcgcagtacgagctccctcgcgacgccgccaacgccaaagacgacgtcgctgccggctacgcctcagctgacgatgccgctccgataaactccggcaagaaccgcgaccgcaagcgagggattccatggacggaggaagagcacaagctattctatctcgggttgcagaaagtggggaaaggtgattggagagggatctcaaggaactatgtcaaaacgaggacgccaacacaggttgctagccatgctcagaagtactttctccgccgcaccaacctcaatcgccggcgccggagatccagcctctttgacatcaccaccgactc

SEQ ID NO: 28497 - DNA, 589 bp, Glycine max
  Clone ID: TF_GmC879133_1
gcaccagtaacttagcttttccccaagagcatacacttgctaataactgctaactattctttgccttagaaaatatattcgctgtgccactgcattatgggaaggtcaccatgctgtgaagagaatgttggtgtaaagaaagggccatggacgccagaagaagatgagaagctgattgattatatcagcaaacacggccatggcagttggagaacacttccaaagcgtgcaggtctcaataggtgtggtaagagctgcagattaaggtggacaaactatctgacgcctgatatcaagagaggcaaattcagtgaagaagatgagaggattatcatcaaccttcattcagttctcggaaacaagtggtcaaagattgcaacccatctgccaggacgaaccgacaatgagatcaagaactattggaacactcacataaggaaaaagcttctgaagatgggtattgatccagaaactcacaagccaaggacagacttgaatcacctcatgagtctttctcagttgcttggcacgtcaaacttgagcagtgccatgaacactacttggggcaataaccctcttggtttacaac

SEQ ID NO: 28498 - DNA, 2364 bp, Glycine max
  Clone ID: TF_GmC6850_1
ttctcatacgaagctctgtgctcgctgttatcagttttttttcctctgtttaacccagaaatatgtaacacaaatcaaaacatcgttgttgttttatttgagcatgcaagttggctaactcttggaaaggaaaggagcttcaagaagagagagataaaataaatggtgcaagatatgaagcagcaagacaatggagaatctaagaagaaggagcgtcacattgtgacttggactcaagaggaggatgatatactaagagaacagattggtattcatggaactgaaaattgggcaattattgcatcaaagttcaaagataaaacgacaagacagtgcagaagaagatggaacacttacttgaattatgatttcaagaaaggtggatggtcagctgaggaagacatgctcttatgtgaggctcaaaaggtatttggtaatagaaagacagaaatagcaaacctggtctcaggaaggacggataatgctgcgaaaaatcgtttctccacactctgcaggaagacaccataatttacatcttaaaaaaaagagatttgcacctcgcacatcaattcaactaacatggggttgaagtctcaacattgtaataatatggatacaacatcagaatctggagtacctattaagaatttgaggagggccgatattgctgatgatgcagaaaagatcaaatttgaggaccgatcacatttacgaaatggaactccaataaatcagcagccaagagcaccacttgcagtcttagctcaaaactctcataactcaaacaacttgacagaccagcatcatctttgcaatcccaagtttagcagttccgcccaaaataacaagattcaaggaacatttctcaaaaaagatgacccaaagataagtgcattgatgcaacaggcggagttactaagttcactagctctaaaagttgatacagagaacatggaccaaagtcttgaaaacgcatggaaggttcttcaagagtttctgaaccgatccaaagaatcagatatccctggacaaaaggttccagatgtacggcttgtagatcttaaagatatgattgaggagttgaagagtggtaatgaggaaggccgggttcttcaagagcttctgaaccgaaccaaagaatcagatagtactgggcataaaattccagatttacggcctgcagattttaaagatatggttgaggactcaaagagtggtaatgaggaaggccaggtacttcaggagtttctgaaccgaaccaacaaatcagatatccctgaacataagattccaaatttacagcttgtagatcttaaagatatgattgaggacttgaagagtggtaatgaggaaggccaggcttgttggaggaaaatggactgttatgaaaactctccaggcagttctggatacagtacaggatcaattctcatctgtcagtcagctagtgataatttggagcactcattgcatcaggatattggaaccgaaatgaagtctaaacaacttgaagatgaaaaaggagtaaaagtggttatgcctactgcaaatgtagatcaagatatggtaccatgttgtatggaacagataaacaatgacgggattgtttctacctcatcaagattggagttcagctcccctcttcaagtaacccctctgtttagatctttggcggcaggaattccaagcccacaattttcagaaagtgaaaggaacttcttaaggaaaacactaggaatggaatctccatccatcaacccaagtgccaactcatcacaaccgccaccctgcaaaagagccctactacctagtctataaactatctgagatacaaatattgaaccgttctttccctgttctgaatcctactttgtcttccttggcagtaatctggcttgtggagaaaaaaatacaatttcactgtgcctaaaattttgaaaggcatatgctgctccccaagaatgttatgatgcattctttccaccttcaacatatctaacaactcaaaagttacctttttgaaacttgcacataaaaattggcttgcttagtgtgtcattctttggcttgttttcttataatattattctgggtttgtttttctccaatccagcaatcagcattttgtccggaaccttattttttttgtacagagcttgctgtgtaatcactagcatcctgattcctgagtgtgtatgaatacattagcatatatagaagagagaaaaaagaaagtgagaacttggattctaatttgttgtttggtgtgtgcataggtattttaataaagatttttcccttatggttctgatgtactgaaacttaactataagtgattggaaatgcattttggttttggtgtgc

SEQ ID NO: 28499 - DNA, 400 bp, Glycine max
  Clone ID: TF_GmC142212_1
gtgtgtgtgtgagaagagatgggaagagctccttgttgtgacaaggccaatgtaaagaaagggccatggagtcctgaagaagatgaaaagctaagagagtacatagagaaacatggaactggagggaactggattgctctcccacaaaaagctggtttgaaaagatgtgggaagagttgtagactcagatggcttaattatctcagaccaaaccttaagcatggggagttttctgaaggtgaagatagaataatctgcactctctttgctagcattggaagcaggtggtcaataatagcatctcagttgccaggaaggactgacaatgatatcaagaactattggaacaccaagcttaagaaaaaaatgatgggagtggaaatgaaccccttcagcactt

SEQ ID NO: 28500 - DNA, 2113 bp, Glycine max
  Clone ID: TF_GmC192_1
gcaaaggggttttatttgtatgatgataaatgcaagcctagtcctgatcctgaattgaaaaactatatcgagaaagcaattcggctcgctctttctctctcgctataccaatattaatttgaacctctctcagttcaattccagatagactttgttggcatttgagttttgtcgaatagaaccaaaaagaaaaaatgggaaggcaaccttgctgtgacaaagtggggttgaagaaggggccatggaccgcagaggaggataagaaactcatcaatttcatcctcactaatggccaatgttgctggagagctgtccctaaactagcagggctgttaaggtgtggcaaaagttgcaggctcaggtggacaaattatctgaggccagacttgaagagaggccttctatcagaatatgaagagaaaatggtcattgatctccatgctcaacttggcaatagatggtctaagattgcttctcatctcccaggaagaactgataatgagatcaagaatcactggaacacccacataaagaaaaagctcaagaaaatgggaattgatcctgttactcacaagccactttccaataaaactgagcaaactcaagcccaaccagatgaacaacaaacccaccaaccattgcaagaacaacaagaagaacctatcccagttgagaaagacaccaaatttgaacctgaaaaagagcaaaacaaggagccagagaagccagagagttcaattgaatcattaaccatcactgaagaagccaaggaggaagaccaaattatgacacccttatttgactcatgggaactaatgaatgagttctgcactgatgaagttcccataatagaatcaaatgagattctagttccttctgctccttcttccacttcaccaaccactactactactacatcatcttcaacatcaacatcagcatcttcaaattcaaattcatccaacttccttgaagaccttctgctcccagattttgagtggtctgatgattacaatgatactaattttgacaataataacaatagcagcatggccttgtgggatgatgactttattagaagttggaatttgcttattaatgatgatgatggtgatggtgacagaaagcaagtgtttgaggctcctatcaatcagtacccaagagtgatcatggattcagattcttgggcctatggcttgttttgatttgaaatttttttttctcctctctcccccggctgcttacttgtaattgttcttttaagttgttgcaaaagaaaataaaagaaaatcaggattcttgtttaagaaaaggacatcattgaaatgacattctttcctgtggtgaatgaggcttgtcgagtccttgatgaaggtattgcagtcaaaggatctgatcttgatatttctgctgtcatgggcatgggttttcccccttacaggggaggtatcctattctgggctgactctcttggatccaagtacatatattcaaaattggagaaatggtcagagttgtatggagaattcttcaagccttgtgcctacttggctgcaagagctgccaaaggaattccactgagtgcctctgtggagcaggcaaattcacggttgtaataaataaatagctcgttacatgtttgcttgattcaatggtcctttcctttctaatggtaggaatatagtggtgaattgggagataccaaaaaagtgtacgatgagaaaatatttgaacagttgtgtgtgaggcagtcgaaattattaaatgtcagtaaattttttcagagaaaaaaactgtattttttatttaggacgtggagcatggtttcttctttgtatgtttcatcataagttactgttgcagtgctgctgattattgttagaacctaagctcatttatttccttttcattcaagcaaactatttgtcatgttattcttggattgtttagtaacttaaggtaattttgaggtctaaagggcccttcacttacactttgcatctgtagccagaaagtcaagatcgtctaatggaatttgtctattaaaactatgcttggtagtactgtagtatttattagaataaaggctaaaagagttaactccattactccc

SEQ ID NO: 28501 - DNA, 1095 bp, Glycine max
  Clone ID: TF_GmC100_4
ggctcgaggaaaaattggccatcagtggaataatattttgaacactggggtcaggaatcatcaacctagctagtgtgtacaacaatgaggaagcccgaggtttctggaaacaacaacaacaacaacaacattaataacaagcttagaaaagggttgtggtcacctgaagaagatgacaagctcatgaactacatgctaaacagtggacaaggttgttggagcgatgtagccagaaatgctggccttcaaaggtgtggcaaaagttgtcgccttcgatggatcaactacttgaggcctgatcttaaacgaggtgcattctcacaacaagaagaggaactcatcatccacttgcattcccttctcggaaacagatggtctcaaatagcggcgcgcttaccagggagaacagacaatgaaattaagaatttttggaattcaacaataaagaaaagactcaagaacatgtcatccaacacctcaccaaatggaagcgagtcctcatatgagcctaataacagagaccttaacatggcagggtttactacttctaatacccaagatcaacaacatgctgattttatgcctatgttcaattcatcatctcaatcaccctccatgcatgccatggttctcaattccataattgacaggttgcctatgctagagcatggactaaacatgccatgttctggtggattcttcaatagcacagggccatgcttctcatcatcacaaagtggagttgacaacaaagggatttatttggaaaatggaggagtatttgggagtgtaaatattggtgcagaaggggatgtgtatgttccccctctagagagtgttagcactacttctgaccataacctgaaagtggagagcacatgcaacacagatactaacaatagttactttgatgacataaacagtatcctccttaataattgcaacattaatagcaacaataagagagctgaaaatagggctggtggggtggagaatttgtttcaggaagagttaaccattggagagtgggacttggaggagttaatgaaagatgtttcatcctttccctttcttgatttttcaaatatccaataa

SEQ ID NO: 28502 - DNA, 1039 bp, Glycine max
  Clone ID: TF_GmC875_2
ggtgagtctaatcatggaactaaggcttcaagatcagatcaggaacgacgaaaggggattgcttggactgaggatgaacacaggttatttcttctgggcttggataagtatggaaaaggagactggcgaagcatatcaaggaactttgtggtgacacgaactcctacacaagtagcaagccatgcccaaaaatacttcattcgtttgaactcaatgaacaaagatagaaggcgatccagcatacatgatatcaccagtgttaacaatggagatatttcagcacctcaagggccaataaccggtcaaacaaacggttctgctggaaattctactgccaaagcagccaaagcggccaccccggcctcaactggggtgccaggtgttggaatttatgcagctccaaccattggacaacctataggaggacccttagtatctgctgttggcaccacagtgaaccttcctgcacctgcacacatggcatatggggtccgagccccagtacccggtgcagttgtacctggtgcaccggtaaatatgggccctgtgacgtaccctatgcagcatacgtctgttcctcacaggtgaagtgctgtttagaggcctagtgtacaaaagaaacaagagactagtggtggcttctgcagtgaatgaaattcttttcttgacaattgctttttgcttattatatgcaacaatgagttatatgcataatctgtcatttcaaataagccatatgaggaagcaattgaatgtatccgtgtaggctgccatggaatgtttgacagccttgacataggagagcataaaagtacggttgttttgtagacatttgaactggctattattaaaccgtgctatagaggaaggttctatggatttcaagtgtaaattattgttgcactcttggtttttgtaggaaataaactcttcgcctatggtctaccttaactttatgtgtgtaagttactacaattgaattggcacgaattattaaggttatgcttggattaaagtttggaaaatacttttatgaaaa

SEQ ID NO: 28503 - DNA, 595 bp, Glycine max
  unsure (1)..(595): unsure at all n locations
  Clone ID: TF_GmC8609_13
gggattatggtgaactagatggggatagttggactgatcaagaaactttgctgcttcttgaagcaatggagatttacaatgagaattggaatgaaattgctgagcatgttggtaccaagtcaaaagcacaatgcattcttcattttctccgtctacccatggaagatggaaaattggaaaatattaacgttccaagcatgtctttgtcatccaatgcaataaatagagatcatagtggaagactgcattgttactcaaatggagatactgcaggaactgtccatcaaaccagagattctgacaatcggcttccttttgcaaattctggaaatcctgttatggctttggttgcctttttagcttctgcggttggaccaagagtagctgcttcttgtgctcatgcagcattagcagtattgtcagaggataattctggcagcacgtcacaaatggaagcaccgggacatgataataggacaaattcagaaaacatacatntgtcgagatggtggccctcatggagaaacagcagtttcaaataatcataatgaggataaggcaaaggtgcgtggttcatggggtctgaatgaaggta

SEQ ID NO: 28504 - DNA, 966 bp, Glycine max
  Clone ID: TF_GmC316_1
tgatccgaacggtgctaggttgtggttagctgagacggcaaagattttcgaggctataggttgccttgaggagcataatgttctttatgcgacagtgcatgctccaaggggaggctgagacgacagccaccaccgaaattcccaagtctccgttgacatctttatctgcatctaattcaatatacaacactgaaactttcaaagctcttttgagaacttgttattgcaatggctgacatagatcgctcctttgataataatgtttctgctgtttctactgagaaatcaagccaagtttcagatgttgaattttctgaagctgaggaaatccttattgccatggtgtataatctggttggggagaggtggtctttgattgctggaagaattcctggaagaactgcagaagagatagagaaatattggacttcaagattttcgactagccaatgatcggtggcagaaaacgaagcaaggaaatttttggtgcctacaagtcattacagtgactttgtggggatatgaaatggaaattgatcctattaatcatatgggtacttatatttgcattttgcggtaaccaacaaaaaggggcatgccattctaaaagcccttatgtttaatgttacttaattttatctttgtaatgttcccaagtgttttaggcaatctatgattcagatctgttcgatcatggcaagaacagtatgtacttaattaatgcagatcacctgcatgtgcatgtgtatttctggttcatttagccttcttgctaatggttacaactagctttgccttggcctatagcattggatttggaagcggattttttctttgcatgtatacatctgttgatgtacgtcaagtgaagtatgtttttaatgcagaccacctgcatgtgcatgtgtatttctggttcatttagcttcttgctaatggttctacaattgtcatgtggctacaaaa

SEQ ID NO: 28505 - DNA, 1094 bp, Glycine max
  Clone ID: TF_GmC1195_1
ctctattcggctcgaacatgcacacaaagtaatggacaaaaaaccatgcaactcatcatctcatgatcctgaagtgagaaagggaccatggaccatggaagaagacttgatcttgataaactatattgcaaatcacggtgaaggtgtttggaactccttagccaaagcttctggtctcaaacgaacgggaaagagttgtcgactccgttggctaaactaccttcgtcctgatgttagaagaggaaacattacacccgaggaacagcttttgatcatagaacttcatgcaaagtggggcaataggtggtccaaaattgcaaagcatcttccaggaagaactgacaatgagattaagaacttctggagaacaaggatccaaaagcacattaagcaagctgagacttcacaacaacatggtaattcagagaataatgatcatcaagcaagcactagtactagcaaagtgtccaccatggcacatccaaatgagactttctctccaccctcataccaaggaacttttgagccattccaacctcaattccctacaatcactgatcaatcaagttgttgtaccaccaccaacgacaacaacaactattggagcatcgaggatatctggtcgtctatgcaattactcaatggagattaaacctagctatatgcatgcctatataaatcatatatatgatgatatataaacctaagctcttgtagagtgtgttcaggcttaataacatcattaggtctgtttatatgagtagtctaagtttggtgtttgtaatgcatgatgtgagttaagaattaatttagttatggattgaaatatatagtaacttatatactacatgtgcattctcctattatcgtaaataatatggttgttgtaccatatattatcagtgacgggcatgctcgtattttagtaaatcggtataaataattgctttgtctcaaaaaatatttgagaactgcaaaatttgaagcataagatatatatattatcagtgacgggcatgctcgtagttttagtaaaaaaaaaaaaaaaaaaaaaaaaaaaaaaaaaaaaaaaaaaaaaaaaaaaaaaaaaaaaa

SEQ ID NO: 28506 - DNA, 1709 bp, Glycine max
  unsure (1)..(1709): unsure at all n locations
  Clone ID: TF_GmC1584_1
atgaagatgtagaagtacaggaaccattggaagagagtgttgatgcgaatcaggaagtgggtgggtttgacttatctcctcggagggataaagcaattccaaagcggaattctcagcttaaacacaaacactctgcatttcgtgcatctcataggggaaggggagttgaaatatctagtccgaaggaagtgaaggcaaccaaatcatggagcaaacatgatcctgtgcctagtgctgaagttaaaaaagttcgggaatccctaaaatcaagttctttggagttacgagcgttggttaaggatcctcttccccatgcattgcatatatctgatgttgtaagatccaaattggcaactagtgatacaaaaactgagccactgattgaaaaccaacatgaagatgtagaagtacaggatccagatgtttgtcagagtattgtaccttttcagcctaatgatgtcaatcttgggaagaagtcttttgttcattgtagtaatattcatcagcccagcttgatggaacggaacagaagtgctcgtacctttgagtgggaggattcaatagacaactcacaacaagcaagacagccaaggaggaggaaaaggaaatggagttcgttggaagaagagacactaagggctggtgtaaaaatgtttggagaaggaaactgggcaacaatccgaagtttttacagtaacatatttgaaaatagaagtggagttgatctgaaggacaagtggagaaacatgatacggtgacactaacgcgctactttcatgtgtatatcttggtaatgacaattttgacagcagcttctctctatgcaatcaagctttgttaaaacaccatccaaatcgtacagttagtgaggaccaactggtatccaaggccctttcaaacacatcattcatccccgcgttttggtttcaatggctcagctgaaggttcccccattatggtatgctcggtacgaaaagaaatcatggcaatttcgaggtcttaattgtattagttaacattgaatttcgtatgatggtgttttttgtttcatctgtatattcaattattccttgatacggctacgagtatgatagctatgtaaatttttaatccaacgtatgcttttgtctagtaattaagtcgtagaatttttcaaaaagactgggcttcgctccgtgcctctctcagccccggttctgacttcagaggcggtggggggctcaaggtggcctggaggcgcttgacaccgtgacacttgtctgctccgctcgtgtgtttatcccggtcaggtaatgacaattttgagagcagcttctctctatgcaatcaagcttttttgaaacaccatccaaatagtacagttagtgaggaccaactggtatccaaggcccacgcatgggccttttcaaacacgtcattcatcactgggttctggtttcagtggctcagctgaaggttggatttgaaattgcaggttttgatgatgcatgcatatagcattaatatatctataagttttgtggttgttacctgtttcatgttttaaagtagcttgtaatcattaagtagagtaaggtttcttgtcatggtgtcaacaccttgtaatgaactcctgcttctctttcgcccaaggagattttaattttcttgctactaattttgaataaagaaatcgaaggatagaaacttcnnaaaaaaaaaaaaaaaaa

SEQ ID NO: 28507 - DNA, 531 bp, Glycine max
  Clone ID: TF_17022754
gaaaaaaaatgtaagaactaaccctaatttttcatccctaaccctaaatcctgaatctaaacagaaggtgatataagtaccggttgccgaggaggcggtggaggcggaggatgagatcttcctcgtcgggggcgatgtggccccgcttaacggaggggcggaggtagttcatccagcgaaggcggcagctcttgccgcagcggagaagtccggcgcgcttggggagcgttctccaccgtccttctccttctttcttgatgtaattcgctaatacctcgtcttcttctggcgtccatggacctcgcttcaacccaaccttgttacaacatggagagttgttgctaccaatgttgttgttactattgttcttcaccttggtcttggttgttgttgttgctgctgttgttgttgttgatgatggattcctcattttcttcttcttctgaaattagggcaattaatggaagtggaacgaagaatgaagagtatatagtgagtgagttttgggtttggaaaggaaatgataatgga

SEQ ID NO: 28508 - DNA, 1832 bp, Glycine max
  Clone ID: TF_GmC283_2
gaacacaaccacctctcacctcaaatgacttcccattctctcttttgaaatcactacacaacaccaagaaatccaaatctaattcctcatctcgtttgatatcctgattcctactctcttagtttccactctattgtatggatgcatgtgatgaactgatgatatatgcatttgcttttatagtttgcttggccaccaagtaacgacaaagagaaacagtttctaactttttcttggctggttgtaaataatctctcttttctctattggatcatagctttctgcaccctcttcctcttaggttcccatatttttctctcttgtcgtggacctcaactttgtaggctcgccttagaaaaaaccttcttttctttttggtgggggtgagagttgctatcttattcctggtttcatcaacaagacactaacatctttgttgtttttagtttcagaattccttatactcacacaccaaaattctggtacaccatgatttttccaagattttgtacgaatctaaaaggtatggcttttatagattctcaagtttatcttgatcacacaggtaaaagattctgaaaatctgtgcaccttgtgaatcaaagctctataatttcttcctttccgtgtatctcttctgtgttttttgtgagcagccttttctagttcctctccatttccatctctttaggaacttaattcaactaagattttttgtgtgcttgtggcttgaggtatggaattggaaaccctctacaccccttgttatatgccaaactcaaattggtttgtgcaagagagcctcagcacagagtggactagagaagataacaagaagtttgaaagtgcccttgctatatatgacaaggacaccccagatagatggttcaaggtggccgctatgatccctgggaagactgtgtttgatgtgatcaagcaatatagggaactggaagaagatgtgagtgaaatcgaagcagggcatgttccgattcccggctaccttgcatcttctttcacctttgagctggttgacaaccacaactatgatggatgcagaagaaggcttgcacctgtcagaggctctgatcaagagagaaagaaaggagtcccatggactgaagaggaacacagacgttttctgatgggacttttgaagtatggtaaaggagattggagaaatatctctcgcaattttgtggtcacaaagactccaacccaagttgctagccatgcacaaaagtactacataaggcaaaaggtttctggaggcaaagataaaaggagacctagcatccatgatataaccactgttaatcttacagaaacttctgcatcagacaagaacaagcctcctgtgattgcaccacagcagaagctgaatagcatgtcaaaagtacagctggactggactagtagccactacaatgatggatcactcatggttttcaacccaaatagtgatgacttgtttgtgtcatcttcatctgatgtcacttccatggccctgaaaatgcaagggcaagatctctatgaatgtgccttacgtgaggcttatgccaaggtaaaagttccaggtttcagcatggctcctagagacttcaataatgaagctgtttttggtattcatgcactgtaattccaaccctgatgatgttaaagaaaaaattatagatcattgttctgtaggattaatgtagatgacctgaagctagcaagctacttcgttcatcattagtgaacatcctaaaagaaaactagactaatgtttcaatccttaaaaactgaatttggaatggacttcttttaaagttttcctcttttatcttttt

SEQ ID NO: 28509 - DNA, 597 bp, Glycine max
  Clone ID: TF_GmC14594_1
aaaatatgatgcattttcaggttcccacatggaaacgaaggacgacagtgctgaaaaagaagaagcttggtcttctcatgaagacgaaattcttttgaactatgttcaagtccgtggagaaggaaattggagaaaccttcctaaaagagctggcttgaaacgatgtggtgagagttgcaaacaacgatggttgaactatcttaagccaaccatatctagaggaaacatttctttagatgaacatgaactcataatcagactgcataagctcttggggaatagatggtctatcattgctggacgattaccaggacgcaccgaagaagagatcaagaactactggaatacctatttgagaaaggaggcagaagagaaccaaaacaataagaacgaatttccaagcacaagtatgacaacaactagcatgtctagtgttcaatctccatggtacttccgaacattccgtaggtaccaatcccacggaatctccaaatcctgtgattagacctaaagttgtgaggttatctaagtttaatttgtcgtgccaagacaggtagcctatgaaatacacaatgaccgtgataattgtttttgcta

SEQ ID NO: 28510 - DNA, 377 bp, Glycine max
  unsure (1)..(377): unsure at all n locations
  Clone ID: TF_GmC941313_1
ccacgcgtccgggtggtcactaatagctgggagattgcctggacgtacagataatgaagtgaagaactattggaattctcatataagaagaaagcttattagcaaaggcattgacccaaataatcatagattgaaacatgcgatcccttcttcccttcagaattcactcatgtctgatgatagtgcagaagcctttaggatgaaagacactaataagaacgagacaagtaaattacctcgtgtctacaaccatgttgaagtttcagatgctgcaagtggtgaggctgagtcaccgtgtgcatggcccgatttaaaccttgatctctctattaccaatcctgcagcttcacagagtatgnnnggaaacaatgtaaaac

SEQ ID NO: 28511 - DNA, 464 bp, Glycine max
  Clone ID: TF_uC-gmrominsoy223d02b1
ttctttttgatcaacagggctgttaaggtgtggaaagagttgcagactccggtggataaattatctgagaccggacatcaaacggggcaactttaccagagaagaagaggacaccataatcagtttgcatgaaatgttgggaaacaggtaatcaaacattttccctagctagctagcataacatttcacattatttcgttaaagatagatgatttagtccaacttaatggaaataaattaatccttaatgaaagaggttaattgaaaagccaagactgcacaagggatagtctcaataatacatataaccatatgtagtactcaggctcgaacagtgaagcaaattaattaagattcccagatatcttcatttctatatgttgggtcctcttctattctgttccatgaaactgatggaggagatgcatgtgacttcataaacttcaactctcggtagtatatac

SEQ ID NO: 28512 - DNA, 1209 bp, Glycine max
  Clone ID: TF_GmC600_2
aaagaattaaagtagcaacaaatactcttccctacacttggcagaaaaaaaatggttcaacaagaaatccgaaggggtccctggacagaacaggaggactacaaattagtgtattttgttaacatgtttggagatcgtagatgggactttatagcaaaggtatcaggtttgaaggtggagggagactgtaaataggtttgaatagaacaggtaagagttgcaggttacggtgggttaattacctccaccccgatctcaaacgagggaagctcacaccccaagaagaacacctcgtcatggaccttcattccaaatggggaaatagatggtcaagaattgctcgcaggctaccagggcgaactgacaatgagattaagaattattggaggactcacatgaggaaaaagaaggctcaagagaaaaagcatgcatcagcagcatcgcctgtttcttctagttgtcaatcttcactgtcctcaaacaaccatgttgtggattcacatgcttccaaagaggttggagaagagagttgttatgacacaggtggatatgatgatggcatgatgatgggtttaattggtggtgaaaaggggtactccatggatgatatatggaaagatattatgtcagaagaagagaacaacatttataataataatcttcaacctgtctatgaagggcatagtgaagagggatgcaacttctcttgtccaccaccaccaatgattatgccttctccaccatcatgggatcagtacaacatttcttctcaacccttatgggtgatggatgaagaagaaagtaataagatgttattccctacactaagtgaccaatattttccttactatgaacaagggaacgcatttctaactggctaatcaggagattctttttttcttttgtccttaaaaaaattatcaatattttgttcttatgtgtgtgccatctgtcacaataagaaggcttaagtgttaacctgtacagcatagtatctttgagctttcggcatggtcctccatagtgtgacacagctgtaatcgatctcaaatgtaactgtagtctatgtcaaaatgtgtttgtggttttactttaaagaaacatccaatagggaaagtggttatgttctgaattatgtaaaatatacatcaagcacttatgcaaattcaagttttaatctaatttgaatggatgcctatcaattatagc

SEQ ID NO: 28513 - DNA, 1162 bp, Glycine max
  unsure (1)..(1162): unsure at all n locations
  Clone ID: TF_GmC600_3
ggttcagcaagatatccgaaggggtccctggacagaacaggaggactacaaattggtgtattttgttggcatgttcggagatcgtagatgggactttatagcaaaggtatcaggtttgaaggtggagggagactgtaaataaaataggtttgaatagaacaggtaagagttgcagattacggtgggttaattacctccaccccgatctcaaacgagggaagctcacaccccaagaacaacacctcgtcatggaccttcattccaaatggggaaatagatggtcaagaattgctcgcaagctaccagggcgcactgacaatgagattaagaattattggaggactcacatgagaaagaaaaaggctctggagaaaaagcatgcatcagcatcagcatcatcacctgtttcttctagttgtcaatcttcactatcttcaaacaaccatgttgtggattcacatgcttccaaagagagtttttatgacacaggtggatatgatgacatgatgatggggttaattggtggtgaaaaggggtactctatggatgatatatggaaagatattgttttgtcaggagaagagaacagcatttataacaacaataatctgcaacctgtgtatgaagaagggcatagtgaagagggattcaacttctcttgtcctccaccaatgatgattatgccttctccaccatcatgggatcagtacaacatttcttctcaacccctctgggtgatggatgaagaagaaagtaacaagatgttattccctacactaagtgaccaatatttttctcactatgaacaagggaacgaatttctgaccggctaattaggagattcttttttttctttctcttttcaattatcaatattttgttcttatgtgtgccatctgtcccaataagaaggcttaagtcttaacctgtactgcttattatctttgagctttcnccagggtgcttcttcatagtgtgacacagctgtaatcgatctcaaatgtcactgtagtctatgtcaatgtgtttgtggttttactttaaaaaaaaaaaaaaaaaaaaaaaaaaaaaaataaaaaaaaaaaaataaaaaaaaaaaaaaaaaaaaaaaaatttttaaaaaaaaaataaaaaaaaatataaacaaaatcaataaaaggcc

SEQ ID NO: 28514 - DNA, 1103 bp, Glycine max
  Clone ID: TF_GmC184_2
ggaagacaaagtttacctaattaagagccaaacttaaaaactttttgtatgtattgggaagttatggcaggaaacatggggtggagtgtgataatagaagaggagggatggaggaagggaccttggacttctgaggaggacagattgctcattcagtatgtcaagttccatggtgaaggcagatggaactctgttgctaggcttgcaggactgaaaagaaatgggaaaagctgcagattgagatgggtgaattacctgaggccagacctcaagaagggtcacataacaccacaagaagaaagcataattcaagagctgcatgctaggtggggaaacaggtggtcaacaattgcaagaagcttgccaggaagaactgataatgagataaagaactattggaggactcacttcaagaaaaagactaaaaccccctctgatgctgctgagaaggcgagaatccgttcctcgaggaggcaacaatttcaacagcaacagcagcagttgaagcagcagcaggttcagcagcagcaacaacaacaacaacaattccaattcaacttggacatgaaagggatcataaacttgcttgaggaaaataaccatagagtgccttctatatctcaagaggcacaagaaatggccagcatgtaccctaacacttcagaacatcaggactacttctactctatgttcaatgtcaatgacaataatgtctctgcacctgagtgcttaaacgaagaaattttgtgggatggactgtggaacttggacgatgttctttgcaatttcaatgcagctagtgccacaagcaaagctagtttacataatttagttgctcctttctgttaaaggttttatttagccttcaaaattgttaggaagaatattagtactaatgtgagtcacggcttgataaagctccaaaatcttggagcttagagaaaaaaaatatcattaaatgttccttgttagtttttgttagtgagaaatttaaactcacaacctctccgctcctccttgaagcttagagttagggtagtgaatgatattctgaaggcgtgttattgtgtaacccattaataaagtgtctcgattttgcttat

SEQ ID NO: 28515 - DNA, 1766 bp, Glycine max
  unsure (1)..(1766): unsure at all n locations
  Clone ID: TF_GmC1182_1
tccgagtgcactgtattccagttcacgtgtcttctggttgctttctcgcacttccaccatacgtaattcaggtttcgaaggcgtgctcgtaataagtctccagtgctatattcatggccaccgccgaatccgggccccgtgctaaaatcatggccaccacagccaccgaacctctcccttcctccgctgaaatgcctcctgccccgcctcctccgaagcaaccgccgcaaccggtggcggcggcgtcagcagtgaagcctgaggctccattgtccgattcgaaagcttcggcggaggcgaacgtaatagtggtcccgagctactctcgttggttctcgtgggattcgattgacgaatgcgaggtgcgtcacctccccgagttcttcgaatcggcgtcgaagagccctagggtttacaagtactacaggaactcgatcgtgaagtacttcaggtacaatcccacccgaaaaatcaccttcaccgatgtccgcaaaacgctcgtgggagacgtcggttccatccgaagagtcttcgatttcctcgaaacttgggggcttatcaattaccatccctcttcgtcgctcaccaaacccttgaagtgggacgacaaagagaccaaatccgattctgcctccaacaccaccgaatcttcttccgctcccgccaaagaaaacactaagagactctgcagtggctgcaaagtcgtttgcaccatagcttgttttgcctgtgacaagtatgatttgactctttgtgcgaggtgttatgttcgtggcaattatcgagttggtgtgaactcttcggattttaggcgagtggagataagtgaggagacaaagacggattggaacgaaaaggagaccacgaatcttctggaagctattacgcattacagtgatgattggaagagggtttctcagcatgttcctggcagaactgagaaggagtgtgttgctcattttctgaagcttccttttgtggatcaattccagcattatcaacaacaccctgctgtcaatggcactgatgacagttgtaatccgttaaagagggtaactaatgctgatgcagaatctgaattggatactgttgcctctgctgaacccaataagagaatgcgtctcacgcctcttgcagatgcaagcaatccgattatggctcaggctgctttcctgtctgctttggctgggtcagaggttgcacaagctgctgctcaagctgcattgacaactctgtctgaggtttacaaagcaactaaaataaattatcggtcgtttccgaggaatacattgctgcaagatgctggtatcatgtctaacggtggtaatacttcagattcatttcaaggatctcgattgcatgcaaacatacagcttgagaaggaagagttagatgtggaaaaagcaatttctgagattatagaagttcagatgaaaaatatccaagataagcttgttcagtttgaagatttggacctgctgatggaaaaagaaggccaacagctggagcaaatgaaaaatatgtttttccttgatcagcttactcttttatttcataaatcatctgcaccaaaaactggagaatgccaagaaggcaataatgtaaagacgaaccatggctattgatcttaggcttagcgaatgtattcaattttccttttcaattatcctgctctctccatttgctttggcctcgagtcactggactatttcttcaatatcatacaactctatcttgatgtttataaccaannnnnncatgcatta

SEQ ID NO: 28516 - DNA, 1276 bp, Glycine max
  Clone ID: TF_GmC1004_1
caaccctgcttcccataaaagtttgtgcaatctttcaagtaaaataaaatccacaaacatacacaccaaaccaaaccaatcctcaattggctgaaaaccttgttctacatgctctcatagttcgtgtgttgaattgtgttgtgaatttggtgtgatgaagtgggaaatggagatcctccctcctgcatcaccttacatgtacaattccaattggcttcttgatgataacaggaccaacaacaccaaatggacccctgcagagaataagctgtttgagaatgctcttgccgtgtatgatagggacactcccgatcggtggcacaaggtggccgagatgataccaggaaagacggttatggatgtagtgaagcagtacaaggaattggaagcagatgtttgtgacatagaagcagggttgatcccaattccggggtacagtagtggtaccaccacaacctcacccttcaccttggattgggtgaacactagtcctgcttatgatgatggcttcaaaggaatcactgctaagagatcctcctctggaagaccccttgagcaggaaaggaagaaaggtgtgccatggactgaagaggaacataagttgtttctactggggctgaagaagtatggcaaaggtgattggagaaacatatcgcgaaattatgtgatcactaggacgccaactcaagttgctagccatgctcagaagtacttcatcaggcaactatcaggaggcaaggacaagaggagggctagcatccatgacataacaacggttaatctcacagaaaccaccagaacttcttctgatgaaagcaagagatctgcttcgccacaaaattccgcaatgctctcacgccaccagcagctgaattctaatgctgcctcatccggattgaatttccagtggagcgatcagccaaatgcaggggtagctatggcactcaaccctgcacatgaacaagtcttcatgtccccttatggccttaactcatacgggtttaagatgcagggccaaaatctgcacagaagttctcttcatgagtcttcttacttaggacctcagacaccaaacatggttttccaaatgcagccctcccaacactattcccatgcatgaggtggtggtggttgttgttttgaattattattactattattattattattattatttatggctagaaccagtgtcttttgctcagttcactagtacagtgtctgtgctttttaccatgttttatgtgaatatctttcattacactgttgaaacaaa

SEQ ID NO: 28517 - DNA, 1255 bp, Glycine max
  Clone ID: TF_GmC143_1
tcccggggtcgacccacgcgtccggttggcgtttccgtttcaagtgtttgcgagagaatggagttcctggacgaggacgcaaggccaaggttcgtgttccagtccggtgcagctgcgaggagcagcgagccaccgcacccgatccacaaacctaccaagccattcctcttcgccaccgtttccctctcctcactcttcctcactctctccctcttcttcctcgaagcggagcccttcaaatcgctcctcttctggctcgcactctctctcctcgttggccccttcgcccctccctccatcactggcggcgacgtccgcgtcggccgcggcgaggtcgtcaacttccccgatccggagcccgagcccgacgaggacgccagtaggaagtcctcacaacggcgatccagacagcggagggccgaggaagcctccgccgccgtaggcccggtggtttccgtcagcgcggcggagaagagaaaagaatcttctggaatcgagaagcgtgcgacggtggtggaggaggagaaggggtggagcgaggaggatgtggaggtgctgaagaagcagatggtgaagaatccggtggggaagccagggaggtgggaggcgatagcggcggcgttcggggggaggcacggagtggacagtgtgataaagaaagcgaaggaattgggggagaagagagtggatgattcggagtcgtatgcgttgtttttgaagaagaggaaagcgttggataagagggttgtggaggagaatgcggatgagggtgagaaagttgttgataatggttggagttctgctgaggatatcgcgttgctgaatgctttgaaagcgtttcctaaggaagtttccatgaggtgggaaaaggttgctgctgcggttcccgggagatccaaggctgcttgcatgaaaagattcgccgaattgaagaaagggtttcggactgcaaaagctgcagccgagtgagcactgaacactctcaaagggatcatttttttgtttgattttgatatgttaaggtaaatggattcgtcgacttgtaacttaaacataattttttgtttctagctattttgagttatgatttatgttggcctccttctaggtgacactcaaattgtggttgtgtaactttataaaatgcaatgaaccgatcgagattgtgtattcgggatctcttatagtgcgaataaatatttaatatttcgacttgaaaaaaaaagaaaaaaacaagggcggcagctctagagga

SEQ ID NO: 28518 - DNA, 1756 bp, Glycine max
  Clone ID: TF_GmC1274_1
gccaagctcgcgtctcacttctctctcttatattaatcactcccgcacacagagcataattcacctttcttttccgaccaaaggttcgccagaaaatgctgatattcttaaaaagcaagagtatcatccccggttctagtccatacgtcacaatcacacatccttaccggaattcccgggcagcgtctctctgtctcaactttccttcattttctctcttcctctcaccgagtcacgcactcggctcgactcgtacgaactccgatccccccccgagtcacactcaaccagcaccaccgcccgatccgacgatgtctcgcgcctcctccgccgcagattccgccgcctccggtgagatcatactgttcggggtcagagtcgtcgtcgattccatgaggaagagcgtcagcatgagcaacctctcacagtacgagcatcctcaagacgccaccaacaacaaagacgccctcgccgccggctacgcctccgccgacgacgccgctcctcagaactccggccgcctccgggagcgcgagcgaaagcgaggagttccgtggacggaggaagaacacaagctgtttttggttggattgcagaaggtagggaaaggtgattggagaggaatctccaaaaactacgtcaaaacgcgaacgccaacgcaggttgcgagccatgctcagaagtactttctccgacgaagcaacctcaatcgccgtcgccgtagatccagcctctttgacatcaccaccgacacggtctctgcaattccgatggagggagaacaggtccagaatcaagacacgctgtgtcattcacaacaacaatcacccgtgttccctgctgaaactagcaaaatcaatgggtttccagcgatgccagtgtatcagtttggggttggttcttctggagtgatttcagtccaaggtgcactggaaacccaatggaagaactcactctgggacaaggaaacgtggaaaaacacaatgtgccaaacaaggcctctacagtgtctggtatcatcacccccggttcttctagttctgccattgacccaccaccgacactgtccctggggctatccttctcatctgaccaaagacagacatcatcaagacattcagctttacatgccatgcaatgtttcagcaatggagatagcatcattagtgttgcttgagaatatggtccttggattcacagattaattacatatattaatatttctctagtttcctgtctttttggtgggagaaagagaaagaggttgaaggaaagggcgatggattagagaaggcaagaagaagttttaacagactgaatttgatccttctgttccttgtacagaccccagaaaaggtcctgtcctgtttcttcttgtttgcttatgttaattaatgtcatgactttagattcttgtttatttggccgtttacgtttgtagtagttgatgtaactgaaaataacaaagtactctctgtttttatgctgataatgtattaacgttcgatatgaactttcactgatgaaaaaaaaaagtggctcctttggggggatattatcaagttggtagtctgtttcattcatgttaggtgttagtagttggccacgtttttcttttctcataaatttgcgtatttactaaaagggaaaaaaaaaaaaaaaggcggccctggtagctgcagtagtatcataattgttttcgagcaaatgtaaatgttggtcgattcacatgtgaagttataaatttgtttaaaaa

SEQ ID NO: 28519 - DNA, 994 bp, Glycine max
  Clone ID: TF_GmC344_2
gcgggcgtgggaggcactcggtcctccggattttaagggccgccgggggcgcaccggacaccacgcgacgtgcggtgctcttccagccgctggaccctacctccggctgagccgtttccatgggaggcagacagatgttattagagcaagcaaaagttttgagagatgcactgagttctaagaaagaagaggcggttgatgagaaaactaatcaacaaaatgccaatggttccatcaaggctaatggcagtccttcactaagcaacattgagaagaaggagaaaccctggagtaaagaagagattgatctattgaggaaaggaatgcagaaatatcccaaaggaacctcacggagatgggaggttatttcagaatacattggtactggaagatctgttgaagaaattatgaaggcaactaaaactgtactccttcagaaacctgattcgtcaaaagcttttgacacatttcttgagaaaaggaaacctggtgcacaatcaattgagtctccattgacaaccagagaagaattaggagtgccagctcctgcctcctctacaaataatgcagaagactctcagaacaaaggtactgatgatcagaactcccctgctaatggagtttcttccagttcagaacaggatgtgtggtctgcggtgcaggaacgagcactagttcaagctttaaaagcctttccaaaggaaacaagccagagatgggagcgtgttgcaacagctgtacctgggaagactgtgaatcagtgtaagaaaaaatttgcattgatgaaggagagtttcaggaacaagaaaactgcagtctaatgttctgttgtgatattttagattatattaaatttttctcatgagtgtataggctagtttcgaatatccatatactagtttatgagccaaaatttctagttttcttatcgtattgattgcttttgataccgtactttgaacttggaattaatacatttacttttattgcttgt

SEQ ID NO: 28520 - DNA, 1646 bp, Glycine max
  Clone ID: TF_GmC1167_1
cggctcgaggaaggatggtaaaactgattagtttccttccatcaaggtcatggagtatataaagcactcacatgcattggtactattggcaatacaagctcatctcttgggaagaaattagtttaagcctttgctagaaatagcaaagtgagttagagggatggtcggtggacacaagaagaagaaaagatgcagtgagtttgcgtccaagaacaaagaccacaaaatggggaatcattgccgatgtatcctggtttgtcaaagtacaggtcaaggtacagccttggatggacaaattacctcatgtcaggaaccaagacatggaacatcaaattccaggacagtggatactaataccgggttatcaaggtgcagcaaaagttgcaggcttagatggacaaattacctaaggccaggaatcaagagagggaacttcaccccccatgaggaagggatgataattcatttgcaagctctactgggtaacaaatgggcagccatagcttcctatcttccacaaagaacagacaatgacataaagaattattggaacacacatctaaagaagaagctgaagaaatttcaagcagctttggatcctcactcagcatcagactcaacagccagtggtcaatttctaccaaagagctttagtgacagaagaagtactttagacatcagcagcaacaacaacaataatcatggctcgtccattaggcttagtcatcatcaatctcagtcctcttccacaacaacatatgcctcaagcactgagaatatctcaagactcttggaaggttggatgagatcttccccaaagcaactcaacaagggatcatcatcccaagatgatgaagatattcagctccaaggcatcaatgatgatgataaaaataacaacaactttgaaagcactactaagctagtgaaccttcatcatcttcagcacaaagtaagaaacaaagatgagcatcaagagggtggtggtggtggcgtagataacatggtttctcatgaagagtttgattctattttgtcttttgagaaccaaaacaatgctgcttgggacaagtccacttgtgattccatgccagaaaagagttctgaagcttctgctgctgctgatcatcatcatcatcatcatcatgatatagctgctgctcatgagaggaacaatgtcaggcaaaaatctgagaatagtagtggtgctcctccattgtcatttcttgagaagtggctcttggatgaaaacgttggtcatcaagtggaggagatgatggagttgtctccgatgttctaaattaacatggaattgggtcaccaatttaatccctttaagtttgggatgtgacattcaaatgatcatatgatattagtcagatgaaagaagagatcaaaggaatgaaattcttttgaaatctgactagggtttaatccattacaatggtggagagattcacagaagctataagggatctctttcaacttgtaacttggaagtctatgaagaatggtttaattatttcaagtaatactatatgcttagtgcatgttgctctctttgtcttgtagaaaaattacaaattaatgttaacttcagctcaaataataatactacaataacagttatattttcaagaattgtc

SEQ ID NO: 28521 - DNA, 421 bp, Glycine max
  Clone ID: TF_jC-gmXLIB3563P045ah05a2
ctggaatgacgtgcatgcacagctcacaacacacaaacacaaacctttcgttgctgtgctcgtacccttcatccattcgatcaaacacaaaatagtactttcttattatgatggccgcggctcgaaaagaactggaccggatcaaagtcccgtggaacacggatgaagacgaggatcttcataaactcgaggagcggcatgggcccaaaaactggtccctcataatcatgtccattccatggcggtctgggaaatcgtgcaggctacactggtgcaaccagctgtatggacaggtagagcacagggccttcacaccgtgagaggacaagaccatcattaaggcgcatgctaagttcgtgttcaactgagccaccataacccgcctcctctaagacgcgcaccgataacgccatcaagaatg

SEQ ID NO: 28522 - DNA, 618 bp, Glycine max
  Clone ID: TF_uC-gmroLIB3258P126b12b1
caaaactcaaaactcaggcacaaatttttgcagctcttctaggagacacacaccaaacttgaagttcatccttgatcttgcttagtggaggctagaggcaccatagaagtttcacctcttgattgattgctctctatctcacgtgctacatcgaaagcatgcaagttggctaactcttggaaaggaaaggagcttcaagaagagagagataaaataaatggtgcaagatatgaagcagcaagacaatggagaatctaagaagaaggagcgtcacattgtgacttggactcaagaggaggatgatatactaagagaacagattggtattcatggaactgaaaattgggcaattattgcatcaaagttcaaagataaaacgacaagacagtgcagaagaagatggtacacttacttgaattctgatttcaagaaaggtggatggtcagctgaggaagacatgctcttatgtgaggctcaaaaggtatttggtaatagatggacagaaatagcaaaggtggtctcaggcagaacggataatgctgtgaaaaatcgtttctccacactctgcaggaagaaacagaaatatgcagctttagcaaaagagaacagcactttata

SEQ ID NO: 28523 - DNA, 1939 bp, Glycine max
  Clone ID: TF_GmC1812_1
cggctgcgagaagacgacagaagggggtggcaatgactatggaaggtgaatggaaggtgtcgtatggaatttagagcatgattttagagaagtattaaagtgtatagtattcactttgacttgatctcactccccaaaatgggatacagacatagtaatagtatattatacactatgcatcttgcgtaggccaatttgctttgtaactttagtttctcccttgaccccatttaagtcctgcatatatatgcgtagttttttttatagttttagtgagtgagaatagccatgtctacttcaaagagcgtcagcagttctagtgaagatgacaatgaacttagaagagggccttggactctggaagaggataacttgctctcccaatatatttttaatcatggggaagggcgatggaatttgctggctaaacgttcaggattaaagagaactgggaaaagttgcagattaaggtggctaaattatctaaagccagatgtaaaacggggaaatttaaccccacaagagcaacttataattcttgaactccactcaaagtggggaaacaggtggtcaaaaattgcacaacatttgccaggcagaacagacaatgaaatcaagaactattggagaactaggattcagaaacaagcaagacatttgaaaatttacactgacagcagagagtttcaagaacttgttaggcgtttctggatgcctagattgcttcagaaagcaaaagaatcatcttcttcaaacatgtcaattcaaaaccaggcaattcctatgccttttgattatgtttctcagcatttaactgttgggaccataccaccttggcagggaccttgtatgaatgaagctggtcccacttacatggaccaacatgagcagaactcagactctgaacacaacaatggttcatgcatctccttgtctgagtcagcaaattttccaaaagtgcctcagcattttggacgcaccaccatcacccaatatcatgccttgaataacaatgactttggcaccttcacatatgacggctacaatgtaagcaacaatgtctatgagatggacaacttcaaaacgcctactacaagggtggctgaggatgcgcaatacccaactggtgattgtcaaatggtaggaagcaattgggtaaacagcgattttgcatgtaacatgtggaacatggatgaattgtggcaatttagcaagttacaaaaataagattttagggtttggtttttttggagttaccaagactctatctttggtgatgttattattgttatcatgaactgttgattagctactaccaaattaattaatacagatggtgattgttttctgtacatctgttttgcattacactgttcagataagtacttttgcaatttgtattgattgagaaaagtcattaattagtctggtaggaagcaattgggtaaacagcgattttgcatgtaacatgtggaacatggatgaattgtggcaatttagcaagaaactttggtgcatttgtaggggaaatcggaatgccgaatgcagccactatgatatctaaatgaagagggcccgtgattgaatgaggatgcaattgaagccaataaagatagttcgtttttcagtgattgttttctgtacatctgttttgcattactctgttttgcaatttgtattgattgagaaaagtcattaattagtcactagttcataacacaaacagttggagattgagtgctaataaagatttcgtaaatatatagaagtaaccacttttggaaactttggtgtatttgtagtggaaatcgaattgcagccactatgatatataaatgaagagggcccatgatccaatgaggatttaattggagatgaaagtagaaagctgcaaaatgactcatagcgtgtttgcttatccattcacgacgtagatttc

SEQ ID NO: 28524 - DNA, 690 bp, Glycine max
  Clone ID: TF_uC-gmflLIB3275003f07a1
cccacgcgttcggaagaactatattgagaaggctaggagcatttctggtgtctccgttgatccaaagcttgccaaattacaagaaaaggatatcatagagatgatattctttcctgtggtgaatgaggcttgtcgggtccttgatgaaggtatcgcagtcaaagcagcagatcttgatatttctgctatcatgggccatggactgcagaggaggataagaaactcatcaatttcatcctcactaatggtcaatgttgctggagagctctccctaaactagcagggctgttaagatgtggaaaaagttgcaggctcaggtggacaaattacctgaggccagacctgaagagaggccttctatcagaatatgaagagaaaatggtcattgatcttcatgctcaacttggcaatagatggtctaagattgcttctcatctcccaggaagaaccgataatgagatcaagaatcactggaatacccacataaagaaaaagctcaagaaaatgggaattgatcctgttactcacaagccactttccaataaaactgaggaaactcaagcccaaccagatgaacaaacccatcaaccattgcaagaacaacaacaacaacaacatcaacatcaacaacaacctatcccagttgagaaagacctcaaatttgaacctgaaaaggagcaaaacagggag

SEQ ID NO: 28525 - DNA, 2362 bp, Glycine max
  Clone ID: TF_GmC344_4
tacggctgcgagaagacgacagaagggggtgtattaggtttttttgcttcttctcatttgctaatagagagggacatgaagaagtaagatagggcatggggtgttggtggcacatataaaacggccaaaagcaatgcttaatttctcttatgctcttcagagtcggcttcattctgtgattcctccctccttttctcttcgcttggttcaagttgttacagtgttaaatttgaggggagtcatatttcttggttctgaaggccaccgttatggctgtacatacagaattccctcttattacttactcacaagagattgtagatggacagcctatttttgtctcttcaaactgtcttcctatcaaggctttgaaatttgaacctgcaggtcattctttccattctgctgcacttaaacttcttggtgttcaggaagataacaatgatgctgatgataaaaaagtggttgatgataaggaacaaacatatctcccatctgattcttatagcagcaagagcaaaaagaaaactggcactggagacatgcaacaagatcactatgcattattgggtctgggtcatctaaggtatcttgctacggaggatcaaattcgtaaaagctatcgtgaaactgccttgaggtttcatcctgacaaacaggctgctcttcttcttgctgaggaaactgaagctgcaaaacaagcaaaaaaggatgaaatagaaagtcactttaaggcaatccaagaagcatatgaagtgttgattgatcctgtgaagagaagaatctatgattccacagatgagtttgatgatgagattcccactgattgtgctccacaagacttcttcaaggtgtttggtcctgcttttatgaggaatgggcggtggtcagttaatcaaccaattccatcactaggtgatgataatactccgttaaaagaagttgataatttctacaatttttggtactcctttaaaagttggagggagtttcctcatgctgatgagtttgatcttgagcaagctgaatctcgagaccacaagagatggatggaaaggcagaatgcaaaattgacagaaaaagctaggaaggaagactatgcacggatacgcactcttgttgataatgcttataagagagatcccagaagattgagaagaaaggaagaagaaaaagctgagaaacaaaggaaaaaggaggctaagttcctagcaaagaaggtgcaggaagaagaagcagccagaattgcagaagaggagaggcaacgaaaagaggaggaagagagacaagctgcaaaagctgctttacaacagaagaaggtgaaagagaaagagaaaaaactcttgcggaaggagcgagcacgtcttcggactctttcaggacctattttatcacagcatttacttgatatttctgatgatgatgtagaaaggctttgcatgtcacttgatattgagcagctgaggagtctctgtgagaacatggaaggcagacagatgttattagaacaagcaaaagttttgagatatgcactgagttctaagaaagaagaggtggttgatgagaaaactaatcaacaaaatgccaatggttccatcaaggctaatgggatttcttccctaagcaacattgagaagaaggagaaaccatggagtaaagaagagattgatctattgaggaaaggaatgcagaaatatcccaaaggaacctcgcggagatgggaggttatttcagaatacattggtactggaagatctgttgaagaaatcatgaaggcaactaaaactgtactccttcagaaacctgattcgtcaaaagcttttgacacatttcttgagaaaaggaaacctggtgcacaatcaattgagtctccattgacaaccagagaagaattaggagtgccagctcctgcctcaacaaataacgtagaagactctcagaataaaagtacagataatcagaactcccctgctaatggagtttcttccagttcagaacaggatgtgtggtctgcagtgcaggaacgagcgctggttcaagctttaaaagtctttccaaaggaaacaagccagagatgggagcgtgttgcaactgctgtacctgggaagactgtgaatcagtgtaagaaaaaatttgcattgatgaaggagagtttcaggaacaagaaaagtgcagtctaatgttctgttgtgatattttagatttcactactaattttttcttaagagtataggctagagtcgaatatccatacatttctagttttcttatcgcattgattgcttttgataccgtactttgaacttggaattaatacatttacttttattgcttgaaatagcaaatatcattattattgatt

SEQ ID NO: 28526 - DNA, 1227 bp, Glycine max
  Clone ID: TF_GmC503_1
aattcggctcgagctgatttgaagagaggaatgttctctcaacaagaggaggatcttataattagtcttcatgaagttctaggaaataggtgggctcaaattgcagctcaattaccagggagaacagataatgagattaagaacttttggaattcatgtttgaagaagaagctaatgaagcaagggattgaccctgcaacacacaagcctctcctcagtgctcaagaacacataattataaaggaagagaaggaaaccattttggagacaccaccacctatgttattaccaatgtctcaagggattttagcttcctcacaagagtcaccacttgtagtgaacaattcaagttactgtgatggtggattaaatgtaacagaagctgcttcaagggaagttttcatgagcaagaatgctgctttagaccctttgtcctactttgaattccaaatgggttacaacccaataagacaatttgatcagaaccatgtggggaccaactcaagctatggattctcctcattgccgtgtctgaatagttcttctgatcacgggaacgtgtcggtggcggcggagttttcagataacaactcagcttcaaaaatcagttctttgatgaaggaaagttccagcaatagctcaagtatgagtgtttatccagctgggggagggtgtcaaatgatggaaaatgcagggttctcatgggatggtgagaacaataatactaagatcgatcctttgttacagttccatgtcaatgtgctaaaatctgaagagttcaagacaagttcgtggcaagaagagcagattctgactcagaatttgatagatttcactaactatccgttaatgtcactgtctgaggatctaaccggagcaaattttgatgtgttccagcagatgtgagctgtaaaaaattctcattttcttcttcttattattctgagttgaattttttgaactcttttctttctttctcttgttgaaagttgaaacgaccaagatagaaaacaataggaagatgttgataacaggaaaaattgtagcaaaagatttgagaattgatgagatgatgatctccccccactcccctccggatatctttgtttttcctgttgatgtatctgttttcatcagcagaagtttggatgacgattattgctgattaatgagtgaagctaaattttttttgtgatcctgcacaaaaaaaaaataaaaaaaataaac

SEQ ID NO: 28527 - DNA, 400 bp, Glycine max
  Clone ID: TF_uC-gmrominsoy034e07b1
tcgattacgagtgggatcacgcttaaccgcactgcgtgcgctcactcggtcctccacgcatgcgtcaaaccacgccgagcactgagttaccttccacagcaactacgacatcatgaacctccacaagatgaagacattcgcgaactatgaagaatactcagttgaaaggtgattagacactcatcaacaaatataggacgaaagcgtagagaatggagaacttgaggatgcaccgaagctcacattacagacgactgatcaagaattggtgaatgattactggtgtaagaagtgcgctgtgcaaccaagctgggttccgataatcaactacgtcgatgtcaacaagaaagatccatggaagcgttcataaatgggttaatacagaaagatagaatggtac

SEQ ID NO: 28528 - DNA, 698 bp, Glycine max
  Clone ID: TF_GmC642_10
ccacgcgtccggtcattcttatgaattgttgatgacttcatagcttatgccaactgatatggttcctctaccgctaacatttttagacctttttgtagtttcttctagtatataagtttttgtttcctacaaacaaaaacttatattaactataagtaaatatgtatttaaaggtcttcatttatttttagtttgttagtcatagactggcaatatagagtatatttgctaattttctctacaggagctggcttattgacattggaggatttgcaaagaaagtgaaaagcactactctatcttcagctgatcaaatcaaagattgtggggcatatcgtgaatgtccaaactgttcttatcatattgataacagtgatgtttctactgagtggcctggctttcctcttggtgtaaagtttgatccttctgatgtagaactcttagaacatttagcagcaaaatgtggcattggaaacactcagcaacacatgtttatcaatgagttcatcccaacactggaaggagaccaaggaatttgctacacacatccggaaaatcttccaggtgctaagaaagatgggagttatgtccatttctttcacagaacaaccaatgcatatgctactggtcaacgaaagcgtcgaaagattcatcatcaacagggttttgactgaagagcatgtgcgctggcataagac

SEQ ID NO: 28529 - DNA, 544 bp, Glycine max
  Clone ID: TF_uC-gmroLIB3259P159h08a1
cagaaaataatattcaaataattacgaggacataattttttcgtttcacactgcagggcaaaaaaaactcaacatcaggactgtagtaaagacaagagtacttgtgctttagaggcttcttgatcatatctcataaattgaggaaaataaacaaagcatgcactgttctacacttctactcctaaatcctaatctaacttgctagaggagatttcactacagccttcacttagacatgcggaacaaggtgtgcgtcatgattaaaatccactagctttaacatcaacaagtctctgaagtttgctgctactagagggcttcttcccatgtgatcttcttgtcttcatcttgtttttctgaaatatgcgatacacagcaaaatctgccactggcatctgacatgggtaggaagctacaaggcgcaattcgtgcatgacccactggagtctttgctcatggggccctttgcaaaaaaacagtgtttccttcatcccaattacttgaatgctctctgaatggatgatttggttttctttggctacag

SEQ ID NO: 28530 - DNA, 271 bp, Glycine max
  unsure (1)..(271): unsure at all n locations
  Clone ID: TF_LIB3242-770-P1-J1-D1
tcggaattcngctctagcggctcgagctcttctaaaacttaccaacacaacaaaatcgagtttccaataaagagttttgttgaaatggaaaacgttcctgctgtntntaaggagagagtatcanattgatttgcctgccnnatttctattccacccnacttatgaagagctcataatccattacctctacaagaaggtcatttacaccaanttcttctccaaggcttatttataagttaccttatcatttcctatctctttgattttctca

SEQ ID NO: 28531 - DNA, 418 bp, Glycine max
  unsure (1)..(418): unsure at all n locations
  Clone ID: TF_uC-gmropic072f11b1
ttgcgaccgnttagtgtcggcccaaacaaagagccaggtttagggaacgtcaccggggaagccctcacngaccgcataaatcaacggaagcatacaccgcagtagacgctccttttgctgcatggtctgcaacacggggcgcgaaactatgtgactatcaaccacagcaacaaccactgtgaacacaacagcgaacccagcgccggcaccgcctacagcactagctacatgttttgcgccacgctcaagggtccacgaaactgatgaggagctcgttaagcactacgttaagcgcaagggctgtggaaaaagcgccctatctgatgccgtctcagacggggacatacacaggagcgaaccctgcgagctaagggacaagactagggagcagaagagggaccaggaaagggcattgttc

SEQ ID NO: 28532 - DNA, 384 bp, Glycine max
  unsure (1)..(384): unsure at all n locations
  Clone ID: TF_LIB3092-021-Q1-K1-B7
gaaaaaccggccgaccgacgcgtacggacacgcntacaattttcatcatcttcttcttttttgacatcaatcatcaccacttccgccgctttttttgacaagatcgaattgccttttacaaaaattgaacctccaaagaaagaccctctttcccaactgactctacctccttgttaacccttttaccccaccgacaacgaacttctcgttcaacatctgtgccccaaagtcgctagccaccatttctctcttacaatcattacccaaattgacttgtacaaattcaacccaccaaatcttacaattaaaaccaatttcaatgaaaaaaaatagtacttttttagccccaaacacatgaaattccccaaccgtttttcacccaac

SEQ ID NO: 28533 - DNA, 153 bp, Glycine max
  Clone ID: TF_jC-gmXLIB3563P084ad08a1
tttgtctgatccgtggggattggccaccgtaattgcgatctacaagacaggcactttttcatcccgaaggaagcaaaatatcgaaatggtaatcgcatgaaccgaacacagagtgtggatattgaaaggcaacaggctcagacaaaaaaatat

SEQ ID NO: 28534 - DNA, 265 bp, Glycine max
  Clone ID: TF_uC-gmrominsoy306c04b1
tctttttgcaacttttttctacaagctagtgcagccagttgagtttctggattaacaaggatggccactaccacaacaggaagctgatcctgtgggtggaaatcacgtgcagcctatgaaaaacttgttgtctgctgggtttgtttaaaaggctcttatgagcacatagaggttaacataatcaacgacatggatttgtacaacgctcgaaccttgggaccttccaggaatggttttgtacggagagaaagagtggttttttttt

SEQ ID NO: 28535 - DNA, 238 bp, Glycine max
  Clone ID: TF_700874479H1
agaaaagaaaaaatttgtcttataactttgcaacttatggttcacttcttcttcttcgacttctgcattatcgtggtgctttgatattattctattgagtcaaaaaatgggagttccatagagggaccctctcgcactattgagcttgcctcctgggcttagggtctaccccacagatgaggagcttctggtgcagtaccgtttctgtatagtatcttgccatcattgctctcttcca

SEQ ID NO: 28536 - DNA, 280 bp, Glycine max
  Clone ID: TF_9901760
ggagaaggggagccttgtgtctaatggagaactttgatggcctgcggggtttatgtcccacccgactgataatgagctggtatggcagttcttgaggcgcaaagtcgtctgctgtcctttgacaatctttatcattcctgaggttgatgtatgtaagtttgatccttgggatatatcaggcgatattgagtccgaataattctcgatttgcaccgaagatgccggatatattatcggaaatcgttctaacatagctccatattattggcagacgattgcg

SEQ ID NO: 28537 - DNA, 641 bp, Glycine max
  Clone ID: TF_uC-gmroLIB3259P208f01a1
gaataataaacagttgcttcttattagaaaatttatgagcccatacacaaaacaaacttccatatacacagatcatgactagaaggatatataaagatttttttttactgcctacggggcttcacaattaatttcttacactattgaaggttttgagcaacttgtaatctaactaattaggaagcttcactggtagcaggagagggaggaccagtcacagtgccattctccattgtgaaatcaatgacaatgggtgtctcatccatagcttcttcctcactgctgctgctgctagaggtctccccttcagacctttttgccttctttccctttcttcctttttcgtcttgaatatgcgatacacagccatagctgacaccatggaaggatgcgatttcgagacgagacgaaattcatgcatcacccaattcgatttggcaaaaccattgcccttggcttcccagaaagccaaaacgttctttcttgcaacaacctgttctttagagagctcaaaatcttgagctttctctattgctctccattgaccgatcccggcttctctcttgttgaggttttcgaacacacgggtcctcaaatcatggaagaaaaacctctgccaattcaaattcttactaccacct

SEQ ID NO: 28538 - DNA, 2842 bp, Glycine max
  unsure (1)..(2842): unsure at all n locations
  Clone ID: TF_GmC207_1
ccacgcgtccgtatttcctctctctctctctctctctctctctgaacaagagccagcagccgttagggaaatcaagcacagctcaatcattgaatcttagcataaacacatacagaagaaggaaaagtggcaccctgggaggagctgatattgtaggagggtttggaagaaaaagaattttgttttgagatatatatacatatatgtgcaagtgcataggaaattaacacaaaaagatgacatggtgcaatgactctgatgaggatagggttattgaatcaacgacgccaacaataactattactcctaacactgatggcataaagctcaccgaagaaattagaaccataacatgcccctcgtgcggccataacattgaattcgcggtgaaagataagggtggaatccatgacttgccggggttaccagctggagtgaagtttgacccaaatgaccaagaaatattagaacatttggaggcaaaagtggcgtctgatgcatgcaagcttcatccccttattgacgagttcataccaacgcttgaaggcgaaaatgggatctgttatacacacccagaaaagctaccaggtgcttcatgttttacttaatttattttattttaattattttttgtctaattaattagtatagtttcgtgttttagaatacttattgcatatacacatcattgaattctcatttattgggagacacgtcttgatgtgcacgataccgcatgcatgaaattaattgttttagcaatgaaatgattttttttttctttgaaaaggatctctaatcataaggcggttcaaatttgaaaatgacagcagaacattttatgcactctataaaatgagatctcaaaaattaacttatgagaaaatgtttttggtttaaaattaaattttcttcatatttttagagatactaaagattttaatatgagctctcacttctaattattatgaaaattggtgataaatatgaacgctcatcttgacgcttaaaaatggttgcatcaaacacaagatcagtaagtaacacggggtacagattctaggcagagagcaaagaaaactttccggcaaataatccttgtctgtgttattcttaatatatgttcaaaggtagatacaaatagttgaatcatggatttgatttatataattaacttcttggtaaactaaatatggtgcaagtatgttcttaagtttgcaatgactaccaaactcatcaaaatcgcatcttatcttccattaaccatgtaggaagagaaatgtaagtgtcatcccttaattttcagcaatatttttttatattttatgtcatatttcaacatgataccaaatagaggattgtcgtcggctaattgtatcaacaaaagaaaaatgaggttgctgcctttttactcttaatggggagctttctcaatttcttactcgattcaacttttacaaatatacattcattttctcttatatttcatttgcatcacattttctttaattttatctctttttttactaaaatatctttttttttattttttttgttctccttctcttttcttatatatatatatatatatatatatatatatatatatatatatatatatatatatatatatatatatatatatatatatattagcaaagatggacagatccgccacttctttcacaggccctcaaaagcatacacgactggaacaaggaaaagaagaaaggttcacactgatgatgaaggaattgaaacaagatggcacaaaacgggaaaaactagagcagtttttgcagcagcggtggtgcagtaaaaggttttaagaaaatactagtactctacaccaactatggaaggcaaaagaagcctgagaaaacttattgggtgatgcatcaataccatcttggcagtactgaagaagagaaagatggagaattagttgtttcaaaggtcttctatcagacacaacctagacaatgtggcaatcccattataataaaggattcatacgaaaaaatgttgaatgatggaagtggccaagacaacattaatatatcattaatacctaaaactactgcaactcttttggattgctacactgctccttacatagattatgatcacgtccatgtgagtcataacagggaaagttcctcacaactaattattcccagctcggttgttcaagttgatggctcttatattcgcttaacaatggatgcaaagaaagcaagatttgaaagtaacactgggaagagattctaggcagagcagcaatgacaaagacttgcatataaatgttctccatattgtttcctttactaattgatcagtacgtaacattatttatatgtgggattagaatgaaggaatttcaagggttggaaaaataagttggcttccttattaagatcaatatggtgcaggcatggtggacttaatttcccataattgaccctggttgaagttgagagacaagcaagttaggtatatatatttgcggtactgtagtttgattttaattttagggtacatgtatattcgtaaaatgtgcttatagatattacaatagtagcagggatatcgtttattgactactcttcagaactatagtcagtctatatactgtattttgtctagaattgaattttgcaccccctcaatcctgaaaaaaatgctgagatgtttcattattattatattatgcgtgtcagctacttaatttgctgggaagtttgtcccttgtagttttcccccctgttttctttgaaaggtcgattgtaaaataaggtgaagaacagtagattttttttannnatggttctaaattgcggtt

SEQ ID NO: 28539 - DNA, 375 bp, Glycine max
  unsure (1)..(375): unsure at all n locations
  Clone ID: TF_LIB3242-524-P1-J1-A6
gggctcgangggccaaatcggctctagcttgcttttttttctatccacctaccacgtagtgctgacatcgaaataatgaggggaagcattcaccaaaacaaacactcgattatgataccttaggactcgattttcgtacaacataacttgagcttgttaacttttacctcaaacacaagttcctcggcgatgatcctattgaccacgacatccctgacattgatcttttacatgattaaccttggaatgtaccagattggtttaatttcttccatggcgattccaagaacttgacaagcaaatggttaatcaggacaaccaattgtaaatactggaacgtcactgcgaaagaccgtgacattattacagttgaca

SEQ ID NO: 28540 - DNA, 402 bp, Glycine max
  Clone ID: TF_jC-gmfl02220081f01a1
ggctcgagaatagattaaccgtatatgtttttatctctagatattgcgaaccttgccctttggctataaaatcagcaaagacatgggttttagagacattggcgcttaactgcccccagggtttcagttctacaactgagacgagggagggatgcttttttgcctttacagaaagatcactattgatgaagttgtagagtggcacctttatggatattgacatacacacgtgcgagcaatggagactccctgtggtggcttaacttaatgcaaacgagaggagcttcttctgctgacgcgatcgtaaatatgctactggattggggaccaatacagctacgacatgtggttattgataagcaacagtgtaggatcgtccagtgcttgctccttacactcttg

SEQ ID NO: 28541 - DNA, 709 bp, Glycine max
  unsure (1)..(709): unsure at all n locations
  Clone ID: TF_GmC432953_1
actctctctctctctctctccttctcaggggggacagtttagaaaaccaagttgatctagttcaatcatacatagagaatacagtgtaaagaatagattttctcccctaccaaaaacaagagggagctgagatattgtaaggtggtgtgaaaggaattaacaaggatctgttttgggatatatgggcataagagaaagagatgacatggtgcaatgactcagatgaggagaggggaattgatcaactggttgcactaacaattactcctacttcaactaataacactactgttcttactgatcatcacacaaaagcaagcgaaattcgcaccttaacttgcccctcatgtggtcataacattgaattccaagaccagactggaatcaatgacttgccggggttaccagctggggtgaagtttgatccgaatgaccaggagatattagagcatttggaagcaaaggtattctctgacgtgccaaagcttcatccacttattgatgagttcataccaacgcttgaaggagagaatgggatctgttatactcatccagaaaagcttccaggtgtttgatattttatttttgctttcaatttnttttattgnnaatttcgtcatgcttttggtatttttggaaacggggttttagattacaggttatgataataattggaaactttatcatctatctcacttccatcatattt

SEQ ID NO: 28542 - DNA, 363 bp, Glycine max
  Clone ID: TF_LIB3138-042-Q1-N1-C2
gagttgttccattaggcactgtgcatggagacttcaagccttacttcagtggaaccatatcaaaaagacccctaactcatcttttcatctcgcttgccgatggatttgtcaggcccattgcggcttgcccatattccaagttggcaccttgtgataggttccacagaaacgatgaggagctgattcttgactagcggattgctacggtagcctccgtacgcttgtccgcacacattattgctgaggctgatatctacatgttagatccatgggactatccagctaacgccacctatgtggagcaagaatggtatttgctcagtcctagagacggaaagcacccaaatggtgcagggccataca

SEQ ID NO: 28543 - DNA, 725 bp, Glycine max
  unsure (1)..(725): unsure at all n locations
  Clone ID: TF_LIB4128-056-Q6-K1-H2
cttctgcttttttttataaactatgaccaggggttgttttccttggtgagaggatggaatagtgatgtgcatagacggtatactcactagaaacagactcctatgttccaccgagtgatgcctactggatttcggatttaccccaccgacagaggaacttctcatggagtatcatgagcccaaaggtcgctgggcaccattatgtgtgttgcatatattggcgaatatggctgggaccggtgcgacccatggggtcttccaggtagctctattttcggagaaaaagagtgttgctttttcagacccggagtacaggagatacccgaacgggtctcgacccaacacaggatctgggtcggggtattggtaagcctaccgaaaccaacgagatcatgaccacacgcatgtcctaacgattacataagaaaagtcctagtgctctactttggcaaaaacctcaagggcaccataaccatttgtgatcatgcacgagtatcgtctactcgactcttcccgaaagaacactgtcccaagctgagatgactgtgttctgtgtcgnatatacaacatgaactgctgtgctcagaagactgcgcagaacggcgtggatccgagcgacgagctcactctatacagcaacggttactctctctcttcttcgacccagctggaggactatctggaatctctgccatcgattgatgaacggtgtttcacgatgccac

SEQ ID NO: 28544 - DNA, 382 bp, Glycine max
  unsure (1)..(382): unsure at all n locations
  Clone ID: TF_21994330
aagnatggtagagggaaagttggnannaggattnaggtttnatntaagagatgaagagnttgggggggattattttttttttttggngnaananaatgatntaattgtnttgatagatgttgattttaanaagtgggaggggggggaggttngtgaaaaagtatgggttggagggaaggagtggtatttttaaatgaaaagaagggggaaggatggaagagggttaggganaagtnggggtagtggggtaaggnattggaagggtanagggaagggaaggggatgatgtgggaagggtaaanaggtagggatggggaagagtggggtgttataatgaggaagggaganggaagggagaaaaaatgaaggggggatggatgag

SEQ ID NO: 28545 - DNA, 277 bp, Glycine max
  Clone ID: TF_LIB3170-055-Q1-K1-C1
aataactacattttccctatgtctttcgcccctactctacacaaaaatatattattagcgtggagaaggtgaatactgcgaagaatggagagcttatattgcctccggagttacgtttccacccgactgatgaagagctggttatgcaatacttggagcgcaaggatttctcctgacctgtgccagcctgtattattcctgagcttcatgtacgccagtgtgatccttgggatttgccacgtgatttggagcaagagagatacttatttagcaccaa

SEQ ID NO: 28546 - DNA, 380 bp, Glycine max
  Clone ID: TF_jC-gmle01810023f12a1
tgggtagtgaagctcgaggggagacgaaaattaagcagcgagaaacgttgacttttggtgtataacttttaaacttattggccactgcttcttcttcttcttcttaagaactcatggctactatgatattattctagtgcacaaaaggatgggagttccagagagagaccctgctgcacaagcgagtcaggctaccgggtgtaggtcttaccccacagatgatgagcgtttggttcaggtcctttgccgcaaggctgctggccatcatttatctgttgcagtcgttgctgacgatgacctgtacaagtatgatccatgggctctttcaggataggcagtgtttggagagaaggagtggttctttcttagaccaggagaca

SEQ ID NO: 28547 - DNA, 421 bp, Glycine max
  Clone ID: TF_uC-gmflminsoy023h05b1
caccccacagacgaggagctcgtggttcattacctcaagaagaaagtagattctgttcctctccctgtttcaatcatcgctgatgttgatctctacaagtttgatccatgggaattaccagctggatgattgggtgttgtgccgaatctacaagaagggcaacacacaaaggtcacatgagagggacgattccattgatgacatgattggagaagtacctccttccatcaacgtgggccacatgagtgcgaggtttcacctttcaaggatgtccacgagctacagtggtgcattgttggaaaatgacagaaacacgttagaaggggtggttataggcaatggtagtgtgaatgggatcagcaatactaataatattacaagtgtcatatcatcatctcaataggtttgcaccctcaaactc

SEQ ID NO: 28548 - DNA, 633 bp, Glycine max
  Clone ID: TF_GmC126188_1
gctctttccacttcttcttcttcttagaaattgattcttcattcctcttttcaatctcttcttagttataatagctttcttcttttgctagcttgaaagggttttgtgatacatataatatttttgaattcttcaaacttatatatatatatatatatatttgatttcatggaagagcctattgtggtgaacaaaggtgaggagcctctagatttgcctccaggtttcaggttccaccctacagatgaagagataatcacttattatctcactgagaaggtgaggaatagcagtttcagtgcaattgcttggagaggctgatttgaacaagtgtgaaccttgggatttaccaaagaaagccaagataggggagaaagagtggtacttcttctgccaaaaggataggaagtacccaactgggatgaggaccaatagagcaacagaatctgggtactggaaggccacagaaaagattaggagatttacaaagggaaagggaaccttgtggggatgaagaggacccctcggttctatgaaaggagagctcccaagggtgagaagggctattgggtcattgatgagatacgatcggaagggcaatgggatgcgaccaacctgcctagggcgcgaagg

SEQ ID NO: 28549 - DNA, 1788 bp, Glycine max
  Clone ID: TF_GmC642_6
cacgcgtccggtgggtgggtgcttccagattcggactcagctttgtttcttttcttccgcgcttcctctatggctaggagctggcttattgacattggaggatttgcaaagaaagtgaaaaatactactctgtcaacagatgatcaaatgaaggactgtggaacatatcgtgaatgcccgaaatgtcattatcatattgataacagtgatgtttctcatgagtggcctggctttcctgttggtgtaaagtttgatccttctgatgttgagcttttagagcatttagcagcaaagtgttgtattggaaacagagagccacacatgtttattcatgagttcatcccaactctagaaggagagcaaggtatttgctacacacatccggaaaatcttccaggtgctaagaaagatgggagttatgtccatttctttcacagaacaaccaatgcatatgctactggtcaacgaaagcgtcgaaagattcatcatcaacagggtttgactgaagagcatgtgcgctggcataagactggcaagacgaaagctataatagaagatggagcacataagggctttaagaagatcatggttctctacgtaagatccagtgagaatgggtccaggtcttataaatccaactgggtaatgcatcagtaccatctagggactgtagaagaagaaaaggaaggtgaatatgtggtttcaaaaattttctgtcaacagcaaaagcagactgagaaaaatgagggcaatccaatggctgaagatcctgacaatataatatcacgaacaggtcctagaactccgaaaccaaatccccccaatccacctcgtgcgggaaaatctgttgattgtgatgataacattgatgaaactgtacttctgtcttctgccctggataccaagacaatccctggagaatcacatgctccacaatcagatattcaggatcaagactttactggcaatgctgcatggctagctggcgaatcgcaggctgaggaaagcaccaaatatgatggctgtgacgacatcttattgtgcaaggagatcttagattcttctgctatattaaatgaccctggattggactccaccaatcttgaagacattgcaggctatgctacccaaagggctagaaatgataatgaatcttgcggaatttctgttctggattcactggaattggatactcctgattttgatctttctagtttgtatttttgttctcaagacagtatccttgattggatggacaggttatgaggtgctctatgtatgatgccctttttggtaccaaatccagaagttgttccattcaattgccggggtagtgcatcctttttctccctttcatgcttcaattgctgtggtttttcttcttctggatgcagcaaatatagtgcatgaagttttggtcgtcatcatctgatgtttcatgctagtaagcggaaataatactactttctttggttcctcaactcttgcaacttttgtcatattatgaagttaagctcttatctagctagagctggagttttgccttcttcattggaggttatttgtgtgagaaattgtttttggaggctatttgtttcttcatggccaatttaaacttgtgctttggctcattatgtcagccgtgaaagtgaatactactttggtgatgaaatccgaaatggtgtagttgactttatgtactagatttcaagatggtgagtgttctatgtgaatattgataacataattattgcgtccaattattttcaaggcaaaatattctctccc

SEQ ID NO: 28550 - DNA, 597 bp, Glycine max
  Clone ID: TF_18730400
actcttttcaaacagcacctcatagtacacttcttttagggttaattacttcaaagccttagaccagacatctctttgaaaaccaccttccactcttgtttattttcttttcttttcactggtttttgttaaatcttgaggaggcaaaacaagggtctctctctttttctcttttctttcattgaacagaagattaggctttgttctagaagaaattaaacagtttaagacatggaagagagaaatcatgatggtgagaaactagatgaggttatgctaccgggttttaggtttcatccaactgatgaggagcttgttggattctacctgaagagaaagattcagcagaggccactctctattgagctcatcaagcagctagatatctacaagtacgatccttgggatctttcaaaaatggccaccactggggagaaagagtggtatttcttctgccccagagacagaaagtacaggaacagtgcaaggccaaatagggtaacaggagctgggttctggaaagctacagggactgatcgccctatctattcctcggagggctctaagtgtattggcctcaagaaatctctagtattt

SEQ ID NO: 28551 - DNA, 1221 bp, Glycine max
  Clone ID: TF_GmC1124_1
ctgttccgaattaatattgtagtaaagaaattttatatggcaaagtctcttatgatcctaactatatatataagccataccaacctttctgccataataccttaatatttcaaatatccccagcagagagtaacctctcaatcctagcttcaattatattgattttttcacatttctaaatccacctctaccatatatatctccctctaattaaacctctctatccatatctaaaatttcaaaaagatctcaattaattagatttccctctctctttctctctctaactatattgcaaacctttccctctgctttcaaaatcagcaaattcatgggtcttagagacattggtgcttcactgcccccagggtttcggttttacccgagtgatgaggagttggtccttcattacctttacaaaaagatcactaatgaggaagttctgaagggtaccttgatggaaattgacttgcacacgtgcgagccatggcaactcccagaggtggctaagctcaatgcaaacgaatggtacttcttcagcttccgtgaccgtaaatatgcaaccggctttcgaaccaatcgcgcgacgacatctggctactggaaagcaacggggaaggatcgtacggtgtttgaccctgccacgcgtgaggttgtagggatgaggaagacattggtgttctacaggaacagggctccaaatggcatcaaaacgggttggatcatgcatgagtttcgcttggagacgccacatttgccacctaaggaggactgggttttgtgtagagtgtttcacaagggcaaagcagacaacagtgccaaactcatcatgtacgagagcacagttccatccctaactttggcttcgtcatctccaaccaaccaaaacaccacaccatcaattgggtataaccaatttcttgccccattctcttcctcaatggcaacccatcatcacaatcacaatcatcatattccaaaccaaagccaaaacaacaacaacaactccttgatgggtctccttcagttctctagggaaacaaacaccaacaactctagcaccgttactcaaattagtcccaaatgtgatgataataatggatatgggttcttatgggacatggacctcgaagaaaatagcttcaatgatggcgtggcatcaaacttggatggaatgagattcttcgagcttgataataataatagtgtggtcttgttatg

SEQ ID NO: 28552 - DNA, 2563 bp, Glycine max
  Clone ID: TF_GmC580_1
gcacgcccctgataaaaaaaaaagcaaacttttctctttctctcttcttcatgctcgagtgcttggtctcgctcctttacaaaaaaagctatggaccacaacatctaatctaatctaaacaaacaaacaaacactcctcttaattattcttttgattctcaaattcttcttcggtttttttccctttctttttggtttcattgagtatgggttcggtggactgttatccttctcgtacggacgatgctgccgtggtgtctttggattcgctgcctttagggttccgattccgacccaccgacgaggaactcgtcaattactacctgcgacagaagatcaatggtaatggtcgctaggtttgggttatccgagaaattgatttctgcaaatgagagacttgggatatgctcggtttgtcggtggtacagaccaaggatccggaatggttctttttctgtccacaggaccggaagtatccaaatgggcatcgattgaacagagcgacaaataatgggtattggaaggcaacggggaaggatcgtagaatcaagtctgggaaggatttaattggaatgaagaagactttggtgttctacactggtcgtgcacccaaagggaataggaccaattgggttatgcacgagtatcgtcccactttgaaggagcttgatggtactaatcctggacagaatccatatgtcctttgtcgtttgtttaagaaacatgatgagagccttgaagtttcacactgtgatgaagcagagcagactgcttccactcctgtggcttactccacagaggaaatacaatctgatctggctgttgttgcaggatccccctcacaagttaccgaagatgataagcaccaggcaatgatccctgcacactctgaggaagcaatatccaatgttgtaaccccggttgtttgccgtagtgacagatatgatgcttgtcatgcaccaaatcaaattgtattaccaactgcggaggagtttcaaccattgaactattatgacccaagaaacgagctattggatgataaattattctcccctgtacttgcacatattcaaccagaatttcattatcaagcaaacatcgaatcagatgattggtatgggcttcaatatggtacaaatgagacaaacatgtcagactttttgaattcagttgtgaattgggatcaagtatcctttgaggatctcaattgtcaacagcagagctaccccttgtttaatgttaaggatagcatattaagcagcgatctagattctgaacttgccaatatgacatgtatgcaagctggttatgcggagggggcaattgacggaaggaaacctttggtgataacttcagaattttgcagcaccactggcatccccgttgactgtgttggtgacgagcagaaaagcaatgttgggttatttcaaaacaattcccagagagcttttactgatgttaatataggtcaagtatacaatgtagtcgatgattatgagcaacgaggaatctgcagtgcagttgctagtggcaatactggaatcataaggaggcatcgtgaggtacaaaatgaacagctaagctcaaactcaacacaaggtactgcacagagaagaattcgtttgtcaatggctacacatggctcaaataagatggtgaaaagtggaagttgtgcacaagaagagcttaatttaaaatccgtcattgctatggtaagaattttgtttttttagcttctgtccaagagaagagattgtctttgcatgcgaaatgaggtttgtttttcttttgtaggaggagaaagcttcagaaagccatatttctgatgaaagttctactcttactaatgacgggaatgaactgccgaagacatccaaatcatccggcaaaagaaagatttctcgacaagctacaaaagcaggctcaaccttggggttgaaagactttttattgctcagaagggtgccttacatttcgaaggcttcctcaaatcgtgccaagtgctcttctgtttttgtagtttctgcctttgtaatggtcaccttagtggtctttactgacatctggggatatcttaaattttaaactgctaggagatcattcctttgttgttttttttgcctccatttcttttttgggccatgagtggaggtatgtagggtcttcttagatttgttgatagttcaatttataggtgagtgcacttgtagttggtatatgtatgctcacctggttggcttgtctgtttctgttgctgtacatcatgtatacatttttttttccaactttttatcacctccttttaagtttgtggcttctctatttcaaaaaacaaagggtgatagaaagacaaaaataatggctggaaattttgaattacatgcgagtgttttgaattatgtagccttcaatggtaaatttagcgatgctaatgaaatcacttaaaataatggccgggaatactataccatcttgggaatattaactgctaagtgggcgtgcacatttatcgcagctcgctaaaatcacgagcagcgctgccatttggctaatctgtatgtgt

SEQ ID NO: 28553 - DNA, 715 bp, Glycine max
  Clone ID: TF_GmC451863_1
agagagagtctggaatttgagctttagtcagaaaattaaaaaccaaccggattttctttttctatcctgtttctttgcttctcttttttcctctctctctctctttctctttctctctcataaaccgctacatacatgcactttttaaattagcaaaaacgtaaaggtactatatgtgtgtttgaagcagctcctatagccaccttttcctttattatttctttttctcactgccttcagttaaagtagcgagctagataggaaattctggtgtttttccatggttaaagaaggtttatagctcaatcctattagaacaacctcggacatgctcagttgtggactgttccataaaaagggagttgaaatagtatttgaaggcatctggtttcatcaagagagatagcacacgcgcgcgcacgcttcagagatgagtaagatcagcaactggagttctgtaagcagttctgatctcatagatgccaagcttgaagagcatcagttgtgtggatccaagcagtgccccggttgcggacacaagtttgaagggaagccggattggctaggcttgcccgcagaggtgaagtttgatcccacagaccaagaactaatagaacatcttgaagccaaagtggaggcaaagaacatgaaatcacaccctttgatagatgagttcattcccactattgaaggagaagatggaatttgttatacc

SEQ ID NO: 28554 - DNA, 1217 bp, Glycine max
  Clone ID: TF_GmC416_2
cttagcctataatataacttagccaacatggagtttctcccacctggttttcgattctacccaacagaggaagaattagttgtcttctatctacacaaccagctagaaggccaaatacacgacacaagcagagtcattccagtcactgacatcaatggcgtagagccatggaaccttccaagtactaccaccactttaattttgttactattcattctttgctgctaaaatatatagtttggtttgtgttgttgtaatcagcacttgcaggggagttttgtcgtggagacacggagcaatggtttttcttttcacctagacaagagagagaggccagaggaggcagacccaacagaaccacggcaagtgggtattggaaggccacgggttcccctggccatgtttactcttctgacaacaaagtcattgggatgaagaaaaccatggtgttttacaaagggaaagctcccaccggaaggaaaaccaaatggaagatgcatcaatacaaagccattgaacactctcaccaatccaacactgcccctcccaagttgaggcacgaattcagcttgtgtcgtgtgtacgtgatatcgggaagctttcgatcgtttgatcgacgcccactggagatgccaagaattgagctacgagttgatggggacagaggtgctgcttcaacaagtactcaacagagagcagcagtggtggatggattaagttcttctgatacttcttcccactctggaggaggaagagggggttctcatatctcagaggctggagcagggtcaagtggaaccaattggaatgcaagtaatagtagggttgaggaaccactttgggaatgggaacaacttaattggccatgacccaaaagtcaagaacatgcttcaacctagcaagactttattaattgagaaacatatcgtttacatcaatttaatctaagttggaaaaagcagggcgagaaattgattaattaatcatctaaattgtaggcgtagttgggtataacttccttcacctttaaggggcaagcaatgtaatgtaacataatctttactatttgttgtttagcataggattgatttttcccaggaaaataagttgggaataagatccaaacataaaaaggaaggtggcgtggatcttgtaattttgttttagtgacttgttgtcttgtaacgataatcaatcaatctccttttcaccccttg

SEQ ID NO: 28555 - DNA, 1893 bp, Glycine max
  Clone ID: TF_GmC625_16
ttttcttttgggcggacgcgtgggcaaagtaacactagaactcacaaaggacagaagaaacgcgaatgccaggagaactccaattaccacccgggttcagattccaccccactgacgatgagcttgtgaatcactacttgtgtagaaagtgtgctgcacaaaccattgctgttcccatcatcaaagaaatcgatttgtacaagtttgatccatggcagcttccaggtacctttttttcttttctcactctagtctctgtattcttttgccttttttaatttcattagggtcttaattctactacattttttttctctccaccttaaagtcctattatttatgtttttatgtacagagatggctctttacggtgagaaagagtggtactttttctctcctcgagaccgaaaatacccaaacggttcgagaccgaaccgggctgccggaagcgggtactggaaggctaccggagctgacaaaccgatcggaaaaccgaaagcccttggaatcaagaaggccctcgtgttctacgcgggcaaagccccaaagggagtgaagaccaattggatcatgcacgaatatcgcttagccaacgtcgacagatccgcctcaaaaaaaaaacaccaccaccaacaacttgagggtatgtcccgataacaatcttattaataataattataagattcttgctaatcaatatcgttaggtgttagttgaggaataaaaagaatatttaatgtgagatagcgttaaaaagtcattaatacataattttatgtattttaataaatacataaacaaaattctttttttaattttttaactaagattaagaacagggattaataatgtttcaaagtttggttaggtagaaataatatgtgatttggacaatttttttaactgttgtgcttattggaatggcagcttgatgattgggttttgtgccgaatttacaacaagaaagggaagattgagaagtacaatggtgttgcggtggtggatcagaaagtggccaagttatcagaagaggaggttcagttccagcacgagaccaagcctcagatcaagatgtacggccacgatgatttcaggaacgaccaattgtacatggacacgtcggattcggggcccaggttgcacacggactccagctgctccgagcacgtggtttcgcccgatggcacgtgcgagaaggaggtgcagagcgagcccaagtggaatgatcttgagttgggccccgacccagccttgggcttcgattttaatttcatggacctgacctcagatgacgcttttgcccctcaggttcaataccaaatcaaccatctctcaccgtggcaagaaatgttcacgtacctaccaaagacattttgatttttttagggtcaatgggaccccaagaaggaaatacgggtctcacatttatttttaaaattcgttaaaaaaaaaaacaacaaaaaaatcacattcaagcgtacctactatactactgtacctaactactactcatgccggctttggtctgcacgtgtggtgactattatctgttcttgggattgttgaatttgactgccattgatcactaggaaaaaatgagatcataggtacctaaaaataagaaaaatgatctcaactgggtgaagaatgaagatccattagctatgttaggaattgtgtcgacatgtaaggactaaggacccctagtagaaaattcttgtttcattgctattgtagtaggatttttttgtatgtctgtgaaatattatattatattatattatatatatatatatatatatttttttttaattttcaaagtaagcagcaattgaaatgaaaatgtaagggtttcatttttgtgaaaaaaaaaaaaaaaaaaaaaaaaaaaaa

SEQ ID NO: 28556 - DNA, 475 bp, Glycine max
  Clone ID: TF_GmC525_5
gacccttttgctttctttatccaataataataataaccccctttttccctctccatacccttttgctttctttatccaataataagaacttcccacgagtggctttaactggtctggtctggtctggtcggacacacaaaaatattagtatggagaaggtgagttttgtgaagaatggagagcttagattgcctccggggtttcgtttccacccgactgatgaggagctggttttgcagtacttgaagcgcaaggtcttctcctgccctctgccagcctctatcattcctgaggttgatgtttgcaagtctgatccttgggatttgccaggtgatttggagcaagagagatacttctttagcaccaaagaggccaaatatcccaacggaaatcgctctaacagagccacaaattcgggttattggaaggcaactggcttggacaaacaaattgttacttcaaaagggaaccaagt

SEQ ID NO: 28557 - DNA, 1619 bp, Glycine max
  Clone ID: TF_GmC424_2
tgagaagaaaaaaaaaacattttcatcatcttcttcttctttttcatcaatcatcaccagtggttcttttccttctgagaagatcgaattgtgttttgcaaaaatgggagttccagagaaagaccctctttcccaattgagtttgcctcctggttttcggttttaccccaccgacgaggagcttctcgttcagtatctgtgccgcaaggtcgctggccaccatttctctcttccaatcattgccgaaattgacttgtacaagttcgacccatgggttcttccaagtaaagcgattttcggtgaaaaagaaggggattttttttctgaattgaataaatttgattgattaatttttgcaggtaaggcgattttcggtgagaaagagtggtactttttcagccctagagacaggaaataccctaacgggtcccgacccaacagagtagccgggtcgggttattggaaagccaccggaaccgacaagatcatcaccaccgaaggtagaaaagttggcataaaaaaagccctcgttttctacattggcaaagcccccaaaggcaccaaaaccaattggatcatgcacgagtatcgcctcctcgactcttcccgaaaaaacaccggcaccaagcttgatgactgggttctgtgtcgtatctacaagaagaactcgagtgcacagaaggcggtgcaaaacggcgtcgttccgagcaacgagcacactcaatacagcaacggttcctcttcctcttcttcgtcacaactcgacgacgttctggaatcgctgccagcgattgatgaacggtgtttcccgatgccacgtgtcaacacgctgcagcaacagcagcacgaggagaaggtcaatgttcagaacttgggtgaaggggggttactggattggaccaacccttcggttctgaattcggtcgttgatttcgtatcggggaataataatcataatcaattggtgcaggaccagacgcaaggcatggtgaactacaacgcgtgcaatgacctctatgtccctacgttatgccatgtgggcacgtcagttccgcaaaagatggaggaagaggtgcaaagcggcgtgagaaaccaacgggtccagaacaattcctggtttcttcagaatgatttcacacaggggtttcagaattcggttgacacgtctgggtttaagtacccggttcaaccggtggggttcgggttcaggaattgaaccctgttatcgattaataatagtagtaatcttttaaatcggtaaataggtgggggattctttgggcttaactcgtgggggttttagattaatcctttagaaaagggaagaagaagaagaagaagaaggtgaaaattttggtcctcattttcagctaaagatgtagggtatacaaacgttcaatgaaccaatccacgagataaagcaatgacgggaccattttaatttgttacgacgtagttttcggcccacacaagcccttactcagccacatgaatcacatttgtacttcaaatgaacagcaagaattttttttactatatgttaggtttcgttaaataattccaatcttgatattactttgttaaccaactaaagtacctaaagaaatgcaactcattag

SEQ ID NO: 28558 - DNA, 519 bp, Glycine max
  Clone ID: TF_GmC625_8
gcggttcccatcatcaaagaggtcgatttgtacaagtttgatccatggcagcttccagaaattggctactacggcgagaaagaatggtacttcttttctcctcgggatcggaaatacccgaacggttcacggccgaaccgtgccgccggaagcggctattggaaagccaccggcgccgataaggcgatcggaaaaccgaaagcgctagggatcaagaaagctctggttttttacgccggaaaagcccccaaaggagtgaaaaccaattggatcatgcacgaatatcgcctcgccaatgttgaccgatctgcctccaagaaaaacaacaacaacttgagggtatgtcccaaattgtaatttcactagtttttcttttatgggcaaatattaattttgttagaatgttagttttcttgcaatcttttttctgtttcccttattcaattcaccttatatctccaatttgactaaaattttgattagaaaaggattagaattgcataagttttgatctttcag

SEQ ID NO: 28559 - DNA, 1093 bp, Glycine max
  Clone ID: TF_GmC625_19
ttttcggattttataaaggacagaagaaacgcgaatgccaggagaactccaattaccacccgggttcagattccaccccactgacgatgagcttgtgaatcactacttgtgtagaaagtgtgctgcgcaaaccattgctgttcccatcatcaaagaaatcgatttgtacaagtttgatccatggcagcttccagagatggctctttacggtgagaaagagtggtactttttctctcctcgagaccgaaaatacccaaacggttcgagaccgaaccgggctgccggaagcgggtactggaaggctaccggagctgacaaaccgatcggaaaaccgaaagcccttggaatcaagaaggccctcgtgttctacgcgggcaaagccccaaagggagtgaagaccaattggatcatgcacgaatatcgcttagccaacgtcgacagatccgcctcaaaaaaaaacaccaccaccaacaacttgaggcttgatgattgggttttgtgccgaatttacaacaagaaagggaagattgagaagtacaatggtgttgcggtggtggatcagaaagtggccaagttatcagaagaggaggttcagttccagcacgagaccaagcctcagatcaagatgtacggccacgatgatttcaggaacgaccaattgtacatggacacgtcggattcggggcccaggttgcacacggactccagctgctccgagcacgtggtttcgcccgatggcacgtgcgagaaggaggtgcagagcgagcccaagtggaatgatcttgagttgggccccgacccagccttgggcttcgattttaatttcatggacctgacctcagatgacgcttttgcccctcaggttcaataccaaatcaaccatctctcaccgtggcaagaaatgttcacgtacctaccaaagacattttgatttttttagggtcaatgggaccccaagaaggaaatacgggtctcacatttatttttaaaattcgtaaaaaaaaaaaaaaaaaaaaaaaaaaaaaggcggccgttttaaaggatccaacctaccttccccttccttccaacgtattactttttttttagggca

SEQ ID NO: 28560 - DNA, 413 bp, Glycine max
  unsure (1)..(413): unsure at all n locations
  Clone ID: TF_GmC54821_5
gcggccacgcgtactgacaatcccaaattcttccttccttctccacatcatttcaaaaacacaaaaaaccctaacccccaattcatctctcttgaatcgaatcgatggcacgcatgggtccagggttccgattccaccccaccgacgaagagctggtggtgttctacctcaagcgcaagatgactggaaacctctcccgctacgaccacatcgccgtcgttgacgtctacaagctcgagccctgggaccttccctctctgtcgaagctgaagacgaaggacttggagtggtacttcttcagcgcgctggatcgcaagtacggaaacggctccaggaccaaccgcgccaccgagaggggctactggaagaccaccggaaaagaccgtcncgtcacccacggcgaacgcaccgtc

SEQ ID NO: 28561 - DNA, 2367 bp, Glycine max
  unsure (1)..(2367): unsure at all n locations
  Clone ID: TF_GmC195_2
tcgtccacgcgttcgcccacgcgtncggattcttaatttttatttattaattgttactgtgttgactttacaggattggctacttatggagagaaagagtggtacttcttttcaccacgggaccggaaatacccaaacggttcgaggccgaaccgggcggctggcaccggttactggaaggcaaccggggcggatatgcccattggtcagcccaaaccgcttgggattaaaaaagctttggtgttttacgcagggaaagctcctaaaggggacaaacccacgctggctcctcggcacgtgtggcggtatcggctataaataaaggggtctctcttatgttctaagtttgaagcggctcgagcatagttggtgtagctagcgagggagggatatagggggaagcgtttattcattcattaagatggcatcggagcttcaattgcccccaggcttcagattccatccaacggaccaggagctggtgttgcactatctctgccgtaaatgcgcgtcgcagcctatcgccgttcccatcatcgccgaaatcgacctctacaaatacgacccctgggacctacccggtaacattatcttcaacttctgatatattcttattcttaattcttaattcattcattttttgaattgttattgtacaggattggcttcctacggagagaaagagtggtacttcttttcaccacgggaccggaaatacccgaacggttccaggccgaaccgggcggcgggaaccggttactggaaggcaaccggggcggataagcccattggccaccccaaaccggttgggataaaaaaagctttggtgttttacgcagggaaagctccgaaaggggacaagagcaattggatcatgcacgagtatcgtctcgccgatgtagatcgctccgttcgcaaaaagaacagcctaagggtacatacatacatgaatgatgatgcatgccctttctagttcaagattattaggataggataattgcatgaaattacgactttgccctcaagttgaagctgaggatgataatcatttcccatgcaaattgcaaaatctatggccgtaatatcttaaatgttatctcaccgcgcagaaccttcaccagttgaagacttagccatcgcattaaaaacaataattgatgtggaaagagaaaaaattaaaaatataaaatcttctgccaaatcgcaattatcactttctatttttagaaattattccttcttatcactctcacctgccaccgcctgcgagattaaattaatcttacgttggtttccgattatgcagttagatgattgggtgctttgccgtatttacaacaagaagggcacgatcgagaagttccaaccaagcagcgatgttgttgttagccgaaaaatggaatcatcggagatcgaagacaggaagccggagattctgaaaagcggaggaggttgtcttctgccgccggttccgccgccgcaagcgaaggcggcggtgaagacggattacatgtacttcgacccgtcggattcaatcccgaagctgcacacggactcgagctgttcggagcacgtggtatcgccggaattcgcgagcgaggtgcagagcgagccaaagtggaaggagtgggagaaaagcctcgagtttccgtttaattacgtggatgccactctgaacaacagcaacagcttcacgacgcaattccagggcaataatcagatgatgtcgccgctgcaggacatgttcatgtactggcccaacaagcccttctgaacaaaccgatccacgccgcccattcgcatttgcacggtagcacgagactcaaggtctatgagtgtgcctgtgcgaccacacacagacgattatttatcaagttagcttagctagggcaaagaaagataaaaacattgaagctggaaacgcatgtgtttgttgggtccaccgtctgcaccggttctttttggtgttttgctatgtgacgacgacgacgacgatgacgatccaacggtgcatgtttgttgacctgtccctagtagtagtagcatgtgtacagctattgtatgtagaatgtagataggtacactactacacgttgttgtcatgtgatcatagaaagctctctcaccgtacaaaaaaaaaaaaaaaagtgatagaaggtctatttgatgaccttctaattaatatatgttgaattattattagcatgtgttacatctaatttattaggcgtgcctttgtcttttctcatttttttaggtctttttaaattgagtatcgtgatatcctactgtgtttactttttcatttcaatatcttttgttttttatgtactactataatataattaatataaaacaattttagtt

SEQ ID NO: 28562 - DNA, 1567 bp, Glycine max
  Clone ID: TF_GmC424_3
ttcttcttctttttcatcaatcatcaccagtggttcttttccttctgagaagatcgaattgtgttttgcaaaaatgggagttccagagaaagaccctctttcccaattgagtttgcctcctggttttcggttttaccccaccgacgaggagcttctcgttcagtatctgtgccgcaaggtcgctggccaccatttctctcttccaatcattgccgaaattgacttgtacaagttcgacccatgggttcttccaagtaattatcaaatcgctcacccatctccatttttttttaagttaattactttgttctaaattgaatagatttgattgattaattttgcaggtaaagcgattttcggtgaaaaagagtggtactttttcagccccagagacaggaaatacccgaacgggtctcgacccaacagagtagctgggtcgggttattggaaagccaccggaaccgacaagatcatcaccaccgaaggtagaaaagttggcataaaaaaagccctcgttttctacgttggcaaagcccccaagggcaccaaaaccaattggatcatgcacgagtatcgcctcctcgactcttcccgaaagaacactggcaccaagcttgatgattgggttctgtgtcgtatatacaagaagaactcgagtgcacagaagacggcgcaaaacggcgtggttccgagcaacgagcacactcaatacagcaacggttcctcttcttcttcttcgtcccagctggaggacgttctggaatctctgccatcgattgatgaaaggtgtttcgcgatgccacgcgtcaacacgctgcaacaacaacagcaccacgaggagaaggtcaatgttcagaacttgggtgcagggggtttaatggattggaccaacccttcggttctgaattcggtcgccgatttcgcttcggggaataatcaagtggtacaggaccagactcaggggatggtgaactacaactgcaatgacctttatgtccctacgttatgccacttggactcatcggttccgttaaagatggaggaagaggtgcaaagcggcgtgagaaaccaacgggtcgggaataataattcgtggtttcttcagaatgatttcacacaggggtttcagaattcggttgacacgtgtgggtttaaatacccggttcagccggtcgggttcgggttcagaaattgaaccggctgatggattaataatagtaatgtttaaatcgggtttatttggtgtaaataggtggggattctttgggcttaactcgtgggggttttagattcctttttagaaaagggaagaagaaggtgcaaattttggtcctcattttcggctaaagatggagggtatactacaaacgttcaatgaatcaatccacgagataaagcaatgatggaaccatttaatttgttaggacgtagttttcggccatacaagcccttacttagccacatgaatcacatttgtacttaaaatgaagaactagaaaattgtttgctatatgttaggtttcgttaattaattaattccaatctggttattatgttgttataaaaa

SEQ ID NO: 28563 - DNA, 1798 bp, Glycine max
  Clone ID: TF_GmC834_1
attgaaggtacccttcttttgttgcttgatcctcaatcaaagacccatcttttccgtttggcttagggaacttcagcactgaagccctaatcccaccgtatccatccaccgcagcacacacccccttttgctgcttcttctcttccaacatgggtcgcgaaactatgtgccttccaaccccaccaaccactgccaccaccacagtgaacccagtgccgccaccagcaccagcaccacctacctctcttgctcctggcttcaggttccacccaactgatgaggaactcgttatctattacctcaagcgcaaggtttctggcaaaagcttccgatttgatgccatatccgaggttgacatatacaggagcgaaccctgggacctagcagataagtcaaggttgaagactagggaccaggagtggtattttttcagtgcactggacaagaaatatgggaatggtgggaggatgaacagggctaccagcaaagggtactggaaagccactgggaatgatcgaccagtgaggcatgaccaaaggaccgtggggctgaagaaaacgttggtgtttcatagtggcagagctcctgatgggaaaaggactaactgggtcatgcatgagtacaggcttgttgaagaggagcttgagagggctgggtctggatcctctcagcctcaggatgcgtatgttttgtgtagagtgtttcacaaaaataacataggacccccaaatgggcaacggtatgcgcccttcattgaagaagagtgggatgacgcatcgggaatggttccaggggcagaccctggggataaccgctcttttgcccaccaaccacatgttgaaggcaaaggtggtgttttatgcgccgaagggagaaatggtgctgtgcaggacactcaatctttcaacaaagctccatttgatgtgaacaagcttcctatagaaactcaaaatcttctagctgtgtgcaagagggaaagcatggctgagtatccatcacccgaaaaggatgataataattgtaagcacatggatgactacccttcacctcaaacagataatccaaagcctttctctcaaatatacaaacgaaggcggcataacttgaactccaacaactctcatgtttctggagattcaatccgaaccagccaggatccgtgctcctctacaataactactgctgcaactgcactcccaaccactaatgctgctgctggcacagccaccaacactgcaccgaaaaaacattttctttccgcactggtggagttttcgctgctagagtcccttgaatcaaaggacagccttgcttcaattaagacaccggattttgacgtggaaaatcttgagtcatccatgcctccaagctgcgcaaagttcatcaaggaaatgaagagtgagatgcagaagctttcagttgaaaaggagacgatgaggtttgagatgatgagcacacaagcaatgattaacattctccagtctcgcgtcgacgttctcagcaaagaaaatgaggatttgaagaggatggtggcccaaaatccttaggaatcggcaatgccaatcccttgtatcagtgtaagttagttaaaactgagtaatgaagctcggtcttccggatattttcttatttttctgagtaagaattgtagttcgtttctttggctaaacttgtcaagttatcatttaaaacttgtcatcgtgtatcatatgactttcagtttcccagtgttgtgaaaatggccatgttagttcttgcttctctgaatgaatagattagcatctcaatttgatagctg

SEQ ID NO: 28564 - DNA, 1419 bp, Glycine max
  Clone ID: TF_GmC1311_2
gacagaattcaaatccttgtcatgcgatcatcctttcctcctctcaactttatttcgattgaaatgattcaatcatagtgcctaatcttcatccacccataataaaaagaaagatagagcaaagaaacaagagaatctacagaaaaaagccaggcacaaaaagttgtacataatattgtatgcatgagaattgaaggagggggttgaagactctttatcatcatcgatcgtgtacagcatggattcatcatcttcaggatctcagttatctcagcacccacaactcccaccgggttttcgattctaccccacagatgaggaactagtggttcactacctcaagagaaaagcagactctgttcctcttcctgtttccatcatcgccgaggttgatctctacaagttcgacccatgggaactcccaagtaaagcaacttttggtgatcaagagtggtactttttcagcccaagggataggaaatacccaaatgggtcaaggcctaacagagctgcttcttctgggtattggaaagcaaccggaactgacaagcccatacttgcatctcatggccaccaccacaaagttggagtcaagaaatcacttgttttctatggtggaaagcctccaaaaggggttaaaaccaattggatcatgcacgagtacaggcttgcagatagcaactcaaattctagctcaaaaccaccttctatggcttcagatcatgcacagagttgcaagaaaaattccttgaggcttgatgattgggttttgtgccgaatatacaagaaaagcaacagtaccaacctgccaaggttacctttggtggagcagaataaggagctttctatgctaccaatgaggtccactttgtcaatggctaataataacacctctcaggattccaaacccacgtcttctattagcacaagttatgggccccttggagtagaaaatgatgataacttatttgatggaatcttaggagttgatcatcagagcatgtagcatgatgtttctgattcccaacaagtgtcttcaaagggaaacttccctatgaaaagagaactttcgtcacagtacttttggaatgacacagggtcatcctcttcaagcaggagattccactgtgatcttaattatgctggaagcagcactgttgaggaagacaattccttcgtttctctgcttagccacctttcacagaacacaacatcgtttcacccaaatgcgcttcttggccctattggtaatggagtattgaggcaacagtttcaacttccaagcatgaattggaatacttagggtggttaatttggcttagggtatatactgggttggataataatgtagcggctattgtaggtttatattataagttaatttaacttgagttttatgagccatataaaacaaactag

SEQ ID NO: 28565 - DNA, 628 bp, Glycine max
  Clone ID: TF_GmC7703_4
ctcgagctcgtttttctctagggaattcgcggtaaacaatgatgcggaaggtggctatgctgtttgatttgcttctttttttttttttaatttgcttgttgggtttggggtgtgcttgttgtagatttgtcagtggtacggaacaaggatccagagtggttcttcttctgtccgcaggaccggaagtatccaaacgggcacaggttgaaccgagctacgaatcatggctattggaaggcgacggggaaggatcgtaaaatcaagtctgggacgattttgattggaatgaagaagactttggtgttctacactggtcgagcacccaaggggaataggaccaattgggttatgcatgagtatcgccccactttgaaggagcttgatggtaccaatcctggacagaatccatatgtcctttgtcgcttgtttaagaaacatgatgagagccttgaagtttcacactgtgatgaagcagagccgactgcttccactcctgtggctgcctattactccacagaggaaatacaatctgatctggctgttgttgcaggatcgccgtcacaagttacagaagatgataagcatcagtcaatgatccctgcacactctgaggaagcaatatccaatg

SEQ ID NO: 28566 - DNA, 929 bp, Glycine max
  Clone ID: TF_700736976_FLI
caataataataactccattttccctctgtcttccccccctcctctacacaaaaatatattattagcatggagaaggtgaattttgtgaagaatggagagcttagattgcctccggggttccgtttccacccgactgatgaggagctggttctgcaatacttgaagcgcaaggtcttctcctgccctttgccagcctctatcattcctgagcttcatgtttgcaagtgatttggagcaagagagatacttctttagcaccaaagtggccaaatatcccaacggaaatcgctccaacagagccacaaattcgggttattggaaggcaactggcttggacaaacaaattgttacttcaaaaggcaacaaccaagttgtcggaatgaagaagacacttgttttctacagaggcaagcctcctaatggatccagaactgattggatcatgcacgagtatcgcctcatccttaacgcctctcagtctcagagccatgttgttcccatggaaaattgggttctgtgtcgcatatttttgaagaggagaattggtgctaaaaatggggaggagagcaactctaaggtggttttctatgacttcctagcgcagaacaagaccgattcctcctcatcggtcgccagtggaattacacatgaatcagatgaacatgaagagagcagtagctccaacaccttcccttatactattagaagaaaaccttaacaaccttccttaaaaatttaagttcattatctagttgttgtttttaattgtctttccctttccctgtaattatcatcaatcacttgttgaaaggaagcatcctcttcccaaatgagaccggcattaagggtagtctggagagtatggtactaatactagtagtagtgtgtaatacacttctcatttcccttcaatttaaccccttttttct

SEQ ID NO: 28567 - DNA, 1662 bp, Glycine max
  Clone ID: TF_GmC416_1
tctttccacgcgtccgcccacgcgtccgcccacgcgtccgcccacgcgtccggaaaaacatggatgatctcccaccaggttttcgattctacccaacagaagaagaattagttttcttctatctacacaaccagctagaaggccaaatacacgacacaagcagagtcattccagtcattgacatcaatggcgtagagccatggaaccttccatgtactactacatgcataccactttaattctttaattttgttagttgttaccactcattctttagtatgtttcaaacccaaatgagttttgctaaaatggtttggtttgttttgttgtaatcagcacttgcaggggagctttgtcgtggagacacggagcaatggtttttcttttcaccgagacaagagagagaggccagaggaggcagacccaacagaaccacagcaagtggttattggaaggccactggttcccctggccatgtttactcttctgacaacaaagtcattgggatgaagaaaaccatggtcttttacaaagggaaagctcccaccggaaggaaaaccaaatggaagatgcatgagtataaagccattgaacactctgatcaatccaacactgcccctccaaaggtatactcatcattattatagtaaaacttcattccattttttcttttcaatttcgcgaatttggtcctttcatgttatttttgtcaatttgaacttcactattttaattacgtaattttagcctacgtgttaagttaatatttgatattttgacaggaaatgctgacatgacgatctaacaatactgtcacgttagcaatacaatgtgacattatgctatattatcacgtcaacgtttttgttgtatattatatgttaagttagctgatagactaaaatggagagtagaggtttgcaaaattgagaattatgaaagtaataagattaaaaaaaaaatgcatatccaacgtgccaatctggtagtatagtggtagttgctgctgttggttgcatatttcacacaaattctggtgctaatatagtttgtgtttttgttatgtataacagttgaggcacgaattcagcttgtgtcgtgtttatgtgatatcgggaagctttcgatcgtttgatcgacgcccactggatatgccaagagttgagctacgagttgttgatggggacagaggtgctgcttcaacaagtgctcaagctcaacagagaagttcttctcatacttcccactctggtggtgatgctcatgtcacagatgctggagcagggtcaagtggaacaaattggaatgcaagtaatagggttgaggaaccactttgggaatgggaacaacttgattggccatgacccaaaagtcaagaacatgctcaaacctagcaagactttcttaattgaataacgtcgtttcaattaaattaatcatataagttgtaggcgtagtttggttcgatttccttcacctcgaagggccatgtaatgtaacataatcattagtatttgttgtttaacataggattggttttccccgggaaaataagttgggaataagatccaagcataaaaaggaaggtggtgtggatcttgtaattttgtttttgtgacttgttgtcttgtaacgataatcaatctccttttcaaccctaga

SEQ ID NO: 28568 - DNA, 1572 bp, Glycine max
  Clone ID: TF_GmC525_1
tacggctggagaagacgacagaaggggacccttttgcgttctttatccaatgataatacactttttccctctccatacccttttccttcctttatccaataataataactccattttccctctgtcttccccccctcctctacacaaaaatatattattagcatggagaaggtgaattttgtgaagaatggagagcttagattgcctccggggttccgtttccacccgactgatgaggagctggttctgcaatacttgaagcgcaaggtcttctcctgccctttgccagcctctatcattcctgagcttcatgtttgcaagtctgatccttgggatttgccaggtgatttggagcaagagagatacttctttagcaccaaagtggccaaatatcccaacggaaatcgctccaacagagccacaaattcgggttattggaaggcaactggcttggacaaacaaattgttacttcaaaaggcaacaaccaagttgtcggatgaagaagacacttgttttctacagaggcaagcctcctaatggatccagaactgattggatcatgcacgagtatcgcctcatcttatgcctctcggcaactggcttggacaaacaaattgttacttcaaaaggcaacaaccaagttgtcggaatgaagaagacacttgttttctacagaggcaagcctcctaatggatccagaactgattggatcatgcacgagtatcgcctcatccttaacgcctctcagtctcagagccatgttgttcccatggaaaattgggttctgtgtcgcatatttttgaagaggagaattggtgctaaaaatggggaggagagcaactctaaggtggttttctatgacttcctagcgcagaacaagaccgattcctcctcatcggtcgccagtggaattacacatgaatcagatgaacatgaagagagcagtagctccaacaccttcccttatactattagaagaaaaccttaacaaccttccttaaaaatttaagttcattatctagttgttgtttttaattgtctttccctttccctgtaattatcatcaatcacttgttgaaaggaagcatcctcttcccaaatgagaccggcattaagggtagtctggagagtatggtactaatactagtagtagtgtgtaatacacttctcatttcccttcaatttaacccctttttttctaaaggtgatagagtgtgtaatggactccccattttccttcaatttaacctttttttctaatgcccatgcttcttcttttagcaaaaagctactcattttcagtttcaaaggagatgctttgacagaggaaaagtagaaagcataagaaaagaagatcaaaatatatattgtcaaaaattaaaacaccgttttcaggagaataagaacataatctatgcgacatcagcgacgcactagttacttgctcttcttcctttagggaaagaagaagggtgcccagctcctcaatgtttattcttgccggatcgaattttcaatatattttttttgggcttatacacaactgttatttatgtatcttaatcaactgc

SEQ ID NO: 28569 - DNA, 513 bp, Glycine max
  Clone ID: TF_uC-gmropic111g01b1
accactcgttcgagcgattatcggggaaaagagtggggctttttcagccccagagacaggaaatacccggacgggtctaagacccaacagagtagctgggtcgggttattggaatgtcactggatcgcgcgggatcatcaccaccgaaggtagaaatgttggcataaaaaaagccttcgttttctacggtggcaaagcccccaaaggcaccaaaaccaattggatcatgcacgagtatcgcctactcaactgttcccgaaagaacactggcaccaaggtatacagctacacatacacacatgcacatactctgttgcttaatggtcttacaccttcaattaattagaatgtctaattgcagcatgatgattgggtctctgtgtgcgtatatacatgaagaactcgagtgcacagaagacggcgcataacggcgtggttccgagcaacgagcacactcaatacagtaacggttcctattcttcttcttcgtcctagctggaggacgttctggaa

SEQ ID NO: 28570 - DNA, 507 bp, Glycine max
  Clone ID: TF_GmC580_6
cactttctctcttcatgcgtgagtgcttgatcgcgctactttaccagagaaaattagaagtgagaaaaagctatgggccacaacatctaaacaaaacaaacaaacacatctgaattattcctttgattttcaaattctgcttcggtttatttctttataattgatagcgggtgctttggagattttatttttccctttctttttggttgagtatgggttcggtggactgttatccgtctcgtgtggacgatgcggccgtggtgtctctagattcgctgccgttagggttccgattccgacctaccgacgaggaactcgtcaattactacctgcgacagaagatcaacggtaatggtcgcgaggattgggttatccgagaaattgatgtctgcaaatgggagccttgggacatgcccggtttgtcggtggtacagactaaggatccggagtggttcttcttctgtccacaggaccgaaagtatccaaatgggcatcgaatgaacagag

SEQ ID NO: 28571 - DNA, 1286 bp, Glycine max
  Clone ID: TF_700954809_FLI
gggaattaccagccatggcatcgtttggggcggaagagtggtactttttcagcccgagagaaaggaagtacccgaatggcgcaaggccaaacagggctgcaacttcagggtattggaaggccacaggtacagataagcctatatgtagtggaactcaaaaggttggggtgaagaaatctttggttttctatggagggaagccaccaaaaggggtcaaaactgattggatcatgcatgagtaccgtgttgctgaaaacaagcctaacaataggcctcctgggtgtgacttgggccacaagaaaaactccctaaggctggatgattgggtgttatgccggatctacaagaagggtaacacacaaaggtcacatgagagggatgattccatggacgacatgattggagaagtacctccttccatcaacgtgggccacatgaatgcgaggtttcacctttcaaagatgtccacgagctacagtggtgcattgttggaaaatgacagaaacacgttagaaggtgtggttataggcaatggtaatgtcaatggaatcaacactaattcaataaatgccatatcatcatcatcatctcatcatcagtttgcctcctcaaactccaaggcagagcttcttccttttgccccttcaaacaacaacacttctaattcagcctccaaaagaacactctcatcactctattggaatgttgatgatgataatgatgatgatgatcacaaacacttcaatttggacagtaatgggaatgtgagtgttttgaggactgaagagaataataataatactaatggtacttctggctcctttgccactctgcttaaccaacttccacaaacaccttcattgccccaaatagatgggttacttcgaacaccatatcaaatacaagggaccaattggtatggttaactccattttgggggatacgtacgatatgatatgataatttcataattataatgcacaaggagatccaattgaactaaggtgtggcaaggaatatcttcaacttgtgctagatcgcaaagatttcaaaagggtcattgagattgtggtttaattgttaggagaatggaagcacgttagagtactctaatcaatgctttcctccaaccatttgcaggtagctcatggcaattaataccacatgaggtgagggtgtaaggccttggtacttttagtttaattttaatttatatagattgatatagaaacatagatatagatagatataaagggatatttaatttgcttgttttattagtgtgt

SEQ ID NO: 28572 - DNA, 1235 bp, Glycine max
  Clone ID: TF_22597157
cgggtgaaaattgaaatcgcaaccgcaatttaaaaccttggtgtatgttcttatattgaaattgaaattcttggctagggaagcaaaagggtagtaattggttttagagtaagtgagaatggaaaacgtttcggttcttttgtgtaataaggaaaaggatcagatggatttgcctcctgggtttaggtttcacccaacagatgaagagcttattagtcattacctttacagaaaggtcactgacaccaacttctcagctagagccattggagaggtggacttgaacaggtctgagccttgggatttgccatggaaggccaaaatgggagagaaagagtggtactttttctgtgtgagggacagaaaatacccaactggtttgaggactaatagagccactgaatcaggatactggaaggctacagggaaagacaaagagattttcagagggaaatctcttgtgggtatgaagaaaactttggttttctacaaaggaagggctcccaagggagagaaaactgattgggtcatgcatgagtataggcttgatggtaaattctcttttcacaccctccccaaaactgcaaagaatgagtgggtgatttgcagggtttttcagaagagttcaggtgtgaaaaggactcatatttctgggatgatgatgttggactcttatggaaacgaaatggtttattcttcttctgctttgccacctctcactgattcctcaccttccattggcaacaacaccaaagcactgagtgtgactgattctgcttacgtgccctgcttctccaatccaattgatgttcctagaggaatctttgattccttgaacaacatcaatatcagcatcaacagcaacaccctttatggagtttcttcaaaccattcattttacaatactcagggggttcaacttcaggctccaccaactttgccattacctagttcttcaaaccattaccttagagcctttcttgaaaaccaaggaaatggatcgaacatgagcaacaatggttttgagccagagagggaaatggtcagtgtctcacagaaaacaagtctttctactgatgtgaaggctgaaatctcttcattgggtaaaaggcactttgagaatcaaaacaacccaattgcttcagcagctgcagttgcaccaatggaccttgctaccttgtggaactactgatctcaaataaagaattgccattggaaaaaaaaaaaaaaaaaaa

SEQ ID NO: 28573 - DNA, 760 bp, Glycine max
  Clone ID: TF_GmC119269_1
cgtccttgtgttaatttgtctctcccactttctgactttggatcttcttcttccctaaggttgtttagataaccataagaggaagaaggaggcccaaagtatataaatatatacacatggcacctgttttgcctcccggtttcagattccaccctacagacgaagaacttgttgcttactaccttaaaagaaagattaatggacgaaagattgagttggagatcatacctgaagttgatctctataagtgtgaaccgtgggacttgccagggaaatcattgttgccgggaaaggatttggagtggtatttctttagccctcgagacaggaagtacccaaatggatcaagaacaaaccgtgcaactaaatctggatactggaaggccacagggaaggatagaaaagtaaattcccaggctcgagctgtaggtatgaagaaaaccctagtttattatcgaggaagagcaccccatggctctcgtacaaattgggttatgcatgaatatcgtcttgatgagagagaatgcgaaaccaattcaggcttgcaggatgcatatgctctttgccgtgtggtcaagaagactgcagtgattcctccaaaagttggggggcactatgttaatgttcccaatgcgaacaagattacaagcgatcaatcatcaagcattgaactatactctgaaggaaggcacgaagatttagatagctcaaactatttgatgtccatggatatttgctcaccctgcaacatggggaatga

SEQ ID NO: 28574 - DNA, 1805 bp, Glycine max
  Clone ID: TF_GmC500_1
aattcggctcgagaccaccaccacaattttcagttccatgtcttcccatgattttcaccctttttctctctctcactttctgtggacttttctgtggtttccttttcagtgaaataaaaaaaaaaccactctggcttattactgtctatatagattcttctgaatccagttctttctaaaccaaaccaaaaaaacattccctctccaaccaagttttgtttttttttttttttcatgtgaaaattgaaatcgcaaccgcaatttaaaaccttggtgtatgttcttatattgaaattgaaattcttggctagggaagcaaaagggtagtaattggttttagagtaagtgagaatggaaaacgtttcggttcttttgtgtaataaggaaaaggatcagatggatttgcctcctgggtttaggtttcacccaacagatgaagagcttattagtcattacctttacagaaaggtcactgacaccaacttctcagctagagccattggagaggtggacttgaacaggtctgagccttgggatttgccatggaaggccaaaatgggagagaaagagtggtactttttctgtgtgagggacagaaaatacccaactggtttgaggactaatagagccactgaatcaggatactggaaggctacagggaaagacaaagagattttcagagggaaatctcttgtgggtatgaagaaaactttggttttctacaaaggaagggctcccaagggagagaaaactgattgggtcatgcatgagtataggcttgatggtaaattctcttttcacaacctccccaaaactgcaaaggtaataataataataactaataacaactttgattttggcttgatcatgttgcttcctatgttccactttttattctcttattagtattagtactttgtttgctttgtttgattttcagtgctgtgtttattattgtgttgcagaatgagtgggtgatttgcagggtttttcagaagagttcaggtgtgaaaaggactcatatttctgggatgatgatgttggactcttatggaaacgaaatggtttattcttcttctgctttgccacctctcactgattcctcaccttccattggcaacaacaccaaagcactgagtgtgactgattctgcttacgtgccctgcttctccaatccaattgatgttcctagaggaatctttgattccttgaacaacatcaatatcagcatcaacagcaacaccctttatggagtttcttcaaaccattcattttacaatactcagggggttcaacttcaggctccaccaactttgccattacctagttcttcaaaccattaccttagagcctttcttgaaaaccaaggaaatggatcgaacatgagcaacaatggttttgagccagagagggaaatggtcagtgtctcacagaaaacaagtctttctactgatgtgaaggctgaaatctcttcattgggtaaaaggcactttgagaatcaaaacaacccaattgcttcagcagctgcagttgcaccaatggaccttgctaccttgtggaactactgatctcaaataaagaattgccattggaaaaaaaaaaaaaaaaggccaactttttcagctgaaaaagtatagcctcataatttaccatatttactgtctggttttgatttttatgttgtccttcttgttgttattgttgtttgtttgtttgtctgtatagattttaactaaaagatttgctgaataatagtgaagcatgtattttgtactgttaagtgttaagttatgctgttttggtcc

SEQ ID NO: 28575 - DNA, 474 bp, Glycine max
  Clone ID: TF_uC-gmflpic081d07b1
tttcgaagctacaagagaagaaaaaaaaaaagagagaaaagaaaaaatttgttttataactttttaacttattgttcacttcttcttcttcttcttcttcaatatcttggttctttgatattattctattgagcaaaaaatgggagttccagagagagaccctcttgcacaattgagtttgcctcctgggtttaggttttaccccacagatgaggagcttttggttcagtacctttgccgcaaggttgctggccatcatttctctcttccaatcattgctgaagttgatttgtacaagtttgatccatgggttcttccaggtaattaatttcattatttatcatcaaagctttattaaaaatcatcatttaccacgattttagtgacaacatcaaagcttctagagtttacgatcataattgggactgcctcaatcatatttgcccttaatttcttttaaatatttaagaattg

SEQ ID NO: 28576 - DNA, 2028 bp, Glycine max
  unsure (1)..(2028): unsure at all n locations
  Clone ID: TF_GmC44609_1
gtccgctgggacccacgcccccccaaaatcgccaaagcttgaaatctgattgcggcgtctcgcgcttccttcttccaccttccccgggtttcactgtgccgatgacttttcttctgagaaagagatcgtcatccatcgcgtgccttcgttttcccttcatgaaccggggcaggctttggcgttcttggaacttcttcttccgccactggacttgaccctacccccccccaattagggttatctatttcttccatttttttttccttagaaaaaaaaaacccgtttcttcttctctcgctgccgacgagtcttctttctcttcgaatctttctggctgctacattctgaagcacttcatatttcggtttttcattttcatttttattttttttttattatctggatggccaaaccaaaaatgccagggtttcggtttcaacccactgacgttgagctgattgagtattttctgaagaggaaggttcggggtaagaaattcccttccgaaatgattgctgaacttgacttgtactagtttgctccgttggacctcccagatatgtctttgctcaagaatggggatttgaattgagacttcgtttgccctcggggaaagaagtattcgactggtggagtatcggggttatgcatgaatttagacttgatgacaaggtgctggctgatgaaggcgtattgcagggtgtaccaaaaggagggtcctggtcctaggaatggtgcacaatatggtaaaccatatgaggagaaagagtgggaaacagatgaggaaattgattctgtacaatctgcccctgttgctgctgtttgtgcacctgttcctatacaacctagtgaaagccatatttcagttgctaattacatccatccctctacaagtggatgtgctggattgacctctgtatcatgtgtatcagaattgatgccatcttgctcgacacatccttcagcacctagcaatccagttggcactgtatcatgtgtatcagaattgattccctcttgctcggaaccacatcatttgccatcaaacaatcaagttggctctgtttcatgtgtttcagaattcatgccctcttgctcggcacatcctttggcaccaaacaatcaagttgactctgttccatgtgtttcagaattcatgccctcttgctcagcacatccttcagcaccaaacagtcaagttggctctgtatcaggattgataccctctttcttggcacattcttcagcatcaaacaatcaagttggctctgtaccatgtgtaccagaattggtgccctcttgcttggcacatccttcagctccaaataatcaagctgacgttggcattctaccttttcttgattgttccatagaagatgatgacacattggctgtgaatgaaaacaacagcattgagaacgttgatgatcctgatcaggcaaacaatgcagaacgtggaccatgttcagatccaaatgctatttttgaggagttaggagaccttaacagcttggttggattgggtgaaggcagtttttcctgtggccagaaaaatgaatatactacaagcgaaatgctttatacagttgatatatttgggtcttgtgaccatgactttttggagttgattgacctagagacgccgcacgctctggcagaataaacatggaagtggtagccaagataagtaaggttaaaaaattgagggaagtatcccagaaaattgattgaactatagccccaagtacctaacgtggattagaataaacaaaggattctcttcctgtcttcatttaaaaaccatcatggcaccagttttctatttgacattaatttctggaattacttgacaatgatatcaactgacaagaatgttgattaaaatctagtgatgttctttgattgtgttatgtttgattaaaatctaattatgctggaagttgttccagacattttttgccgtgaagatttattnnnnnnnnnnnnnnnnnnnnnnnnnnnnnnnnnnnnnnnnnnnnnnnnnnnnnn

SEQ ID NO: 28577 - DNA, 610 bp, Glycine max
  Clone ID: TF_GmC518857_1
atgatttatcttctgaagtgatgcatggtcccacgcgtccgcccttgtgtccgctttcctatggcaggaccatcgtggttggtggacaaaagtagaattgcaaccaaaataaagagtgcctctggaacatgtggtaaagttatatggaaaagcaatccttccagagcttgcccaagctgtcaccatgttattgacaacagtgatgtagcacaagaatggcctggactacctattggtgttaaatttgatccatctgatcaagagataatttggcacttgcttgcaaaagttggtgctggaaattcaaaaccccaccctttcattgatgaatttattactactcttgaagtggatgatgggatttgttatactcatcctcaacatttaccaggtgtcaagcaagatggaagttcttctcactttttccatcgagtaatcaatgcgtataatactgacagtcgaaagcgtcgaacaatatgtggtcaggatcttggtgatgtccgctgtcacaagactggaaggactaaacctgtcatcttgaatgcgatccagaaaggctgtaaaaagattatggccctgtatataagcccagtgagagggagaaaatctg

SEQ ID NO: 28578 - DNA, 1192 bp, Glycine max
  Clone ID: TF_GmC1902_1
cacaaccaaggccactccacaagccagtaataatacttagctttgaatctccctgttgacatacatgggtttgcttctctgattacaaaaatcacttttggggagatggggaggttcgaaaaccatgttgtcaaaggaggcatcaagttgccaattgggttcaggttttgtcccaccgatgaagagcttctccttcactacctcaagaagaaggcgtttgctcaacaattacccgcttcagtcatttcagagtttgacgtgtttcagactgagccatggaaacttccaggtgaattgagggaaaataggtacttttttagcaatagatcaaatggaaacatcaagagacctgctggttctgggtgctggaaatctgtaggcaaagaaaaacaaatcatccattcagagagcaatcaagtaattgggatgaaggaaacactgtttttttgcaaagggtcccatgagacaagaactcagtgggtcatgcacgaattgcgccttgtagcttcctacccatgtcagatgccagtggcagattttgctgtgtatcgcatatttcagaaaaacaagatgaagacaagaagatcacatgggaagaagccctctagtagcagcaaacttcagagacttgttgatgttaaagctagtttctttgacttcactgtggattttaatcatgacgatatagggcctcccacacctttctttcctacagctgcttcatttgttttttcttggttgttacttagtttggatttcagccattgaaaagtcttaaaaaatttagtttaggtcttatttaatctcaaaaccagctcatatgcattagtttgaaaacggtctaataaaacaatagttgacagaagtggtaatcacttatatcttttgatcaagaaatcaggactggcatctgattgactcttagacataaaatgaatcttcttgtgagaagaatatttatattttatgtgctcacgattttcatgaaaattaatcatcaatttcacagaaatgttttatatcaatattatgatcatttgatcaacaaaataaaaatatcaatctaataatgggtgaagaaaaaaaaagtttcaataataatgatcaagggtgtgtatgattaacataatagaaataaaaaagataaaaataaaataaaaattaaaataaaacataaaaaatgtaaattata

SEQ ID NO: 28579 - DNA, 1078 bp, Glycine max
  Clone ID: TF_GmC407_1
gtttgatcctactgatcaggagattcttgaacatttggaagcgaaggtgcgctctgatattcataagcttcatcctttaattgatgagttcatccctactcttgaaggcgagaatggaatctgctgtacccatccagagaagttgccaggagttagcaaagatgggttgatccgacatttctttcacaggccttccaaagcatacacgaccggaacaaggaaaaggagaaaggtgcacacagatgcagatggcagtgagacacggtggcacaaaacaggtaaaactaggccagtcttcataagtggcaagttgaaagggtacaagaaaattcttgtgctttacactaactacagaaaacaaaggaagcccgagaaaacaaactgggtcatgcaccagtaccaccttggcaacaatgaagaggagaaggaaggggagttggtggtctccaaagttttctatcaaacacagcctagacaatgtggctcactcatgaaagactcatatcctgcaaaactaaagggtgaaggcgtgcatgaggtaactaatcataagaacactggctatgttgagtactacaataattcttttgtatcctttgatcaaggggaccagcataggtccagcactgcacaattagtctcccatttcccagtccatggtggtgctactttcattccttgaaagtagcggtggagggtatgaggaaaggtgatatatgtcatgcatggaattggaacattgcaattgtattctgcaatgaagaaataagttaataaccaactagaaatagttaggagggaaaaaggtggcacagaataaggagaaactgcttcatctgaaagctagtggtcagatacttcaactgaggaaaaaaaaggagggggtgaggggggcaacgtaaagaaaaaaacaaaatgatttggcttgtaactttgttttctttcttttattcttttgaaatttttgaatggtagctgttatcatgctttgtacagtgacacgaaaacatatctcaattgtccttacttgggtaaatactaaccatcaatctgtgccaacatgactttcatctaaaaa

SEQ ID NO: 28580 - DNA, 2187 bp, Glycine max
  unsure (1)..(2187): unsure at all n locations
  Clone ID: TF_GmC195_1
ggagtggcacattgtttgtctcggaaaagcaaagaaacatggtattctgggatgaaggaaaaatttgtacaaatgatgaagagcatctatgaaacagaagttacagattggccagtaccactgaaaatcatttctggaaccattcttgcaacaattttgggaacaaccttctggaaactcttttcctttcttagagatgctggtaatgggggagtttttgttgtnnntgtttnttntttttttacatctttntgtgttnttaaatttctgattcttaatttttatttattaattgttactgtgttactttacaggcgtgagcgggggcggacgcgtgggtggtgccaccatagttggtgtagctagcgagggagggatatagggggaagcgtttattcattcattaagatggcatcggagcttcaattgcccccaggcttcagattccatccaacggaccaggagctggtgttgcactatctctgccgtaaatgcgcgtcgcagcctatcgccgttcccatcatcgccgaaatcgacctctacaaatacgacccctgggacttacccggattggcttcctacggagagaaagagtggtacttcttttcaccacgggaccggaaatacccgaacggttccagcgccgaaccgggcggcgggaaccgggacttatggaaggcaaccggggcggataagcccattggtcaccccaaaccggttgggataaaaaaagctttggtgttttacgcagggaaagctccgaaaggggacaagagcaattggatcatgcacgagtatcgtcttcgcagatgtagatcgctccgttcgcaaaaagaacaccctaaggggttggatgattggggttgctttgccgtatttacaacaagaagggcacgatcgagaaacatggctccaaccgtcgaagcacgttgtatagccgaaatatgagatcgagcgcgagcgagccaaatggaagggtgggagaaaagcctcgagtttcgtttaattcctgcatgccacccaacaccagaacagcttcacgacgcagttccagggcaataatcagatgatgacgccgctgaaggacacgtcatgtactggcccaacaagcccttctgagcaaaccgatccacgccgcccattcgcataggcacggaagcccgagattctgaaaagcggtggaggttgtctttgcagccacacacaatcaattatttaccaagttagcttacctagggctggcccaattccagggcaataatctgatgttgcggctgctgcgcggcatgcgcatgtgccggtgcaaccggtttacatgtacttcgacccgtcggattcaatcccgaagctgcacacggactcgagctgttcggagcacgtggtatcgccggaattcgcgagcgaggtgcagagcgagccaaagtggaaggagtgggagaaaagcctcgagtttccgtttaattacgtggatgccactctgaacaacagcaacagcttcacgacgcaattccagggcaataatcagatgatgtcgccgctgcaggacatgttcatgtactggcccaacaagcccttctgaacaaaccgatccacgccgcccattcgcatttgcacggtagcacgagactcaaggtctatgagtgtgcctgtgcgaccacacacagacgattatttatcaagttagcttagctagggcaaagaaagataaaaacattgaagctggaaacgcatgtgtttgttgggtccaccgtctgcaccggttctttttggtgttttgctatgtgacgacgacgacgacgatgacgatccaacggtgcatgtttgttgacctgtccctagtagtagtagcatgtgtacagctattgtatgtagaatgtagataggtacactactacacgttgttgtcatgtgatcatagaagctctcttaccgggaaaaataaaaattgatagaaggatggaaggtgtatttggaccttccctaattaatatttgttgaattattatcattagtatgtgttacatctaatttagtaggtgctcctttctcttgttttttaggtcctttttaatcgagtatcgtgatatcctactgtgtgtttacttttttattttctatctttagtttaatttattatgtaataatgtaattaatagtctaaaacaagtttagcttttttttttcttt

SEQ ID NO: 28581 - DNA, 1146 bp, Glycine max
  Clone ID: TF_GmC7703_2
ctcgagccgacgcggccgcacacgcacccaccacccaaccttcagtttctcagcaacttcgctttaacccgtgacggaaaaactcaaaaagcagcgtaaatcaaaatccttggaatccctttgattcccccacttcggttttcaccttattcatctcaaagatttctcctttctctccttttttctctctttgcccttctgggtgtttttgaaacgtgcttaaaccgtgatgggtgctgttgtggagtgctacccgccgcctcgcacggcggtgctgtccctcaacacgctgccgttagggttccgtttccgtcccaccgatgaggagcttattgactactacctgcgctcgaagatcaacggaaatagtgacgatgtttgggttattcgtgagattgatgtctgcaaatgggagccttgggacttgcctgatttgtcagtggtacggaacaaggatccagagtggttcttcttctgtccgcaggaccggaagtatccaaacgggcacaggttgaaccgagctacgaatcatggctattggaaggcgacggggaaggatcgaaagattaagtctggctccaccttgattggaatgaagaagactcttgttttctataccggtcgtgctcccaaggggaagaggaccaattgggttatgcatgagtacaggcctaccttgaaggagcttgaaggaaccaatcctggacagaatccatatgtcctttgtcgattatttaagaaacaagatgagagtcttgaagcttcaaacggtgatgatgtggagcggactgcttcaactcctacaactgccaattactgtcccgacgaaatacaatctgattcagctctggttccagcatcttcctcacaggttactgaagatgataagcctctaccagttatttccgagaactccgaggaagcaatatccaacattataacccctggtgatattcatagtgacgaatgtgatgcttctgatgcacaatatcaaattgttgaaccaattgcaaaggaggatcaactgccgaacgtggacatattttatgacccaacaaatcagcaattagacgacaaattgttctcccctgtccatgcacatttcccagcagatttttattatcaagctaacaatcaatcagaact

SEQ ID NO: 28582 - DNA, 700 bp, Glycine max
  Clone ID: TF_GmC195_4
cacgcgtccgcatagttggtgttagtcttggtgtagtgtagctagggagggatatatatctgagtaagatggcatcagagcttgaattgcccccaggcttcagattccatccaacggacgaggagctggtgttgcactatctctgccgcaaatgcgcgtcgcagccaatcgccgttcccatcatcgccgaaatcgacctctacaaatacgacccctgggacttacccggattggctacttatggagagaaagagtggtacttcttttcaccacgggaccggaaatacccaaacggttcgaggccgaaccgggcggctggcaccggttactggaaggcaaccggggcggataagcccattggtcagcccaaaccggttgggattaaaaaagctttggtgttttacgcagggaaagctcctaaaggggacaaaagcaattggatcatgcacgagtatcgtctcgcagacgtagatcgctccgttcgcaaaaagaacaccctaaggttggatgattgggtgctttgccgtatttacaacaagaagggcacgatcgagaaactgcaaccaagcaagcgatgttgctcatagccgaaatatcgaatcctcgggagatcgaagacagggaagccggagattctgaaaagcgaaggaaggttgtctttccgccgcctgtgccccggtgcctggcgccgccgcaaggc

SEQ ID NO: 28583 - DNA, 739 bp, Glycine max
  Clone ID: TF_GmC14820_2
cccacgcgtccgtctctgtaagccttgctttcaattttctccttacaaaaaaatcctttcccttctctagtccccataactagcaaaagaagccaatagaaaactgttccatatagtttcccattcaaacttgttttgattttcattttaactcaatggagaatagaacaagctctgtactcccacctggcttcaggtttcaccccactgatgaggaactaattgtgtactacctttgcaaccaagcctcatcaaggccatgccctgcatcaatcattccagaagtggatatctataagtttgatccatgggaattacctgataaaacagactttggagaaaaggagtggtacttctttagcccacgagagaggaagtatccaaatggggtgaggcctaatagagcaaccgtgtctgggtattggaaggccactggcacagataaagcaatctatagtgggtctaagcatgtaggggtgaagaaggctttggttttttataagggtaagccaccaaagggtctcaagacagattggattatgcatgagtatagattaattggatcaagaagacaagccaatagacaagttggatccatgagggtaagcctttgccttacttgttagtatatattttttggtacaaaacaacatattttttatcagaagtaattctcttcaaatcaggtaagattattaaaacaacaaaattctttttttttaatcagataggactgttg

SEQ ID NO: 28584 - DNA, 1715 bp, Glycine max
  Clone ID: TF_GmC473_1
ggaattccctttcacttacgcgcccgagtcacgtagctaagcggctcgagaaagctacaagagaagaaaaaaaaaaagagagaaaagaaaaaatttgttttataactttttaacttattgttcacttcttcttcttcttcttcttcaatatcttggttctttgatattattctattgagcaaaaaatgggagttccagagagagaccctcttgcacaattgagtttgcctcctgggtttaggttttaccccacagatgaggagcttttggttcagtacctttgccgcaaggttgctggccatcatttctctcttccaatcattgctgaagttgatttgtacaagtttgatccatgggttcttccaggtaaggcagtgtttggagagaaggagtggtacttttttagcccaagagacaggaagtacccgaatggttcacgaccaaacagagtcgcgggttctgggtattggaaagcaactggaacagacaagatcatcaccactgaaggtagaaaagttggcataaaaaaagcacttgttttctacattggcaaagcacccaaaggctccaaaaccaattggatcatgcacgagtatcgccttctcgattcttcccgcaaacacaacctcggaaccgcaaagcttgatgattgggttctatgtcgtatctataagaagaactcaagttcacaaaaggttgaggctaattttttggctatggaatgcagcaatgggtcatcaccttcttcatcgtcccacgtggatgacatgctgggatcgttgccggagataaatgaccggtgcttcaccctgccacgagtgaactcactcagaacaatgcaccagcaggatgagaaattcgggtctccgaacatgggatccgggtttttctcggattgggttaactcgaccgatctcgattcgatttccgaattcgagtcgggttgccaaacccaaagaatggtgaattatgattgcaatgacttttttgttccttctctgccgcccttgggccatgtggactacatggtggatgcacctttggaggaggaggttcaaagtggtgtgagaacccgacgggtcgacgggccggggcattttcaaccgaatccagatacccgattgttaccgggctcaggtgacccattcgggtttgggtttattatgggtcagcaagttgggttcggggttagggagtgaagtgaaggatcagaaagtgtaattgtgtaaataattggggattttagtttaatttgaattctatgaccattgttatggtttgtgttattgattcccgcttggaaaggaaaaattgcaattttggtcatacttttcggctagaacaagatgaaggacggttgacacattatgaaactgagaaaggacgcaatggtgattgcaccacaaccacaacaatgcatgctgaaaagtaattgctttgtaagacattattgcctaaacatgaatcacgttgtacttcaaagcattaatacatagcaactattttccaaagtttagtttagaactttagatattggtatttttatttggctagtgtcccatgcatccttgtagacaacctgattaacatgtaatgaagatatgtccaccatttgctataaagttgtcttgcctcgctgattgtgaaaaaagtgagatcaacgtgtgaaatgaaccctccattttatgtatgaaacaaatggatttggattgatt

SEQ ID NO: 28585 - DNA, 1888 bp, Glycine max
  Clone ID: TF_GmC499_1
gcccacgcgtccgcccacgcgtccgacggctgcgagaagacgacagaaggggggggaaacaaaaacaaaacatttcgtccgaaactaatataacgtgttcctccttggaagaagccatagccataacatagccaccagaaaacaaaacccaccttagttattaaaagaaaagaaaactacataaaattaagctttgttcggtggtgaccatggggagcaccgactcatcaagcggttcacaacaaccgaacctgccacctgggtttcggttccaccccaccgatgaagagcttgtagttcactacctcaagaaaaaaacagcttctgctcctcttccggtagccataatcgccgaggttgatctctacaagttcgatccatgggagctacccgctaaggccgcgtttggggagcaggagtggtatttctttacaccgagggacaggaagtatccgaacggcgcgaggccaaacagggcggcgacatctgggtattggaaggctactgggactgataagcctgtgttgacctctggtgggacccaaaaggttggggtgaagaaggctttggttttctatggagggaagcccccaagagggatcaaaaccaattggatcatgcatgaatataggctaactgataacaagcctaacaataggcctcctcctggttgtgacttgggcaacaagaaaaacactctaaggcttgatgattgggtgctgtgccgaatctacaagaagagcaacacgcataggtcacccatggagcatgacagggaagattcaatggatgacatgattggagggattcctccatccatcaacgtgggccacatgagtgcgaggtttcatcatctttcaaagatgacgacagcctacaacaacggtgcattgttggaaaatgatcaccacaacttgttggaagggatgatgataggtaacagcaacggagggatgaacacaactactactactacacctggtcccatgtcatctcacttagggggatccaaggaagagctttcttttgttccaaccatgactcactcttcaaacacttctaagagaacactttcatcactgtattggaacgatgaggatgtggcgggtacctcatcttcgaacaaaaggttcaatttggaattaagtggggacaataataaccatggaagtgttgtgagggatgatcaagagaatggcactgcttcctctattgccactctgcttaatcaactccctcaaaccccttcattgcaccaacaatcaatattggggtcaataggtgatggacttcttagaacaacataccaaataccaggaatgaattggtatgcttagaacaatttcaggtttgttttaattattgatgaacaaggagatattgaattactataaagaaggatatatgatatgatcctcgatcagctggtggaaaccctacactattagattgtaatgattttaatgggatattgagattttggttgttaggaatttggaagcagttgttagagtttgatcatttagatgggcctcattatcatccaatgaagttcttcaaccattggagttagctgcaagcaataacaacaccaaaggtcaggccatgggatacttttagttaaactttaatatagctttatacgtatatatagatatttgctttttttattggtatgtaaataaaaaaatggtggtgtgctcttaattaatgtatacaaatattcaaatgagaaaagagatttcaactcctatttcgactcagctgttatatgcataccttgatcaattaggatacaaatgagctttgtgtggatcatatactgtagaagaacgatctattgatattttaattaaagccaaattggtgactatggtttgtcacgtgt

SEQ ID NO: 28586 - DNA, 529 bp, Glycine max
  Clone ID: TF_GmC424_7
ttcgatcttcttcttctttttcatcaatcatcaccagtggttcttttccttctgagaagatcgaattgtgttttgcaaaaatgggagttccagagaaagaccctctttcccaattgagtttgcctcctggttttcggttttaccccaccgacgaggagcttctcgttcagtatctgtgccgcaaggtcgctggccaccatttctctcttccaatcattgccgaaattgacttgtacaagttcgacccatgggttcttccaataaagcgattttcggtgaaaaagagtggtactttttcagccccagagacaggaaatacccgaacgggtctcgacccaacagagtagctgggtcgggttattggaaagccaccggaaccgacaagatcatcaccaccgaaggtagaaaagttggcataaaaaaagccctcgtcttctacgtggccaatgccccaagggcaccaataccatttggaccatgcacgagtatcgcctcccgtctcttcccaaagaaccctggccccaaactt

SEQ ID NO: 28587 - DNA, 589 bp, Glycine max
  Clone ID: TF_GmC79805_1
aaatccttatactatttttctcgggggctggagtatttctcttgaagcctctccaatttgccttcacttcttaataataataatatcctcttttcttgtaccaaaccaaattgatattttgaactcaatggaaggtagcacaacaagctctgaactccctcctggctttaggtttcacccaacggacgaggaactgattgtgtattacctttgtaaccaagccacctcaaagccatgccctgcatctatcatcccagaagtggatctctataagtttgatccttgggaattgccagataaacagaatttggagaaaatgaatggtatttctttagtccaagagacaggaagtacccaaatggggtgaggcctaaccgagcaactgtgtctgggtattggaaggctactggcacagacaaggcaatctacagtggatctaagcatgttggggtgaagaaatctttagtcttttacaagggtaggccaccaaagggtgccaagacagattggatcatgcatgagtatcgattggctgaatcaaaaataccatctagcaggaaaattggatccatgaggcatcaatactggg

SEQ ID NO: 28588 - DNA, 2344 bp, Glycine max
  unsure (1)..(2344): unsure at all n locations
  Clone ID: TF_GmC54821_1
ccacgcgtccgcatcatccaaaccaaatctctcccattcacaatcccaaattcccaattctctcttccttctccacaccaattgacaaaaccctaacccccaaattctccttcagcgattcatctctcttgaatcgaatcgatggcacggatgggcccagggttccgattccaccccaccgacgaagagctggtggtgttctacctgaagcgcaagatgaccggaaacctctcccgctacgaccacatcgccgtcgtcgacgtctacaagctcgagccctgggaccttccccctctgtcgaagctgaagacgaaggacttggaatggtacttcttcagcgcgctggaccgcaagtacggaaacgggtcgaggacgaaccgcgccaccgataggggctactggaagaccaccggaaaagaccgtcccgtcacccacggcgaccgcaccgtcggaatgaagaagacgcttgtttaccacagcggccgggccccacagggccgtcgcaccaactgggtcatgcacgagtataagatgctcgacgatgaattggcacgttccggcacagtgctggatgtgtttgtggtgtgtaggattttcgagaagagtggttctgggccgaagaatggggcaaagtatggtgctcccttagatgagaaggagtgggatgttgaggatgggacgaggatgaagaggatgagcagaaggaggtggctcccttgctcgttccttataatgcggtggctcctcctcctcccttgtcggcggttgctgataatgtggtggctcatcctcctttgctggcggcgactgctgataataattatctggtggctcctcctcctcctcccttgcaggctattgttgatggggcctatgtttcaaccgacgaccttgacatggaacttgattggagtggtataattgacagtgatactttgccatcattgaactttcattacggggagtgtagtagccatgctgagtattccaaagtattcatcaaggatcaggagccattggcagacacttttgaaatttcttgtcctgaaaatgtctggcctcttgatatgactgggcaacatggcgtgggtacaaattcaggggaagatggagacagtggtgagctgagcaatattggcaattttgatctttcatcgaataatatgaatctggatctttactgggatgccaacgagaatcttccgatggatgatgatggatttttggaatacaatgatattgcaattgggaatggggataatcctaccgaggctgatctttctgcaaatgccatgctagatgagtatgctgcactcgctgatgatgatatttacaagtatatatcttttgattctcctcagattcaagagagtgaaaactttattcccaaccaaggatcacctttcacccagcagaatgtggagggagaaaccgctgatagagctgtggttagtaatgagggttcttcagtgcagaatacacaggaggcaatgcttgcatcaggaagtacaaatccacttgttaagcaggcatatggatggttagccagcatacctgctgcgcctgcacatgctatggagtttcctgctaaggagattgctcttggacttcatcctgtagctcagtcttcccatccagctcatataactactacaggtatgatcagcataacagacattacttttagagacaatgcaatggattggacgatgggcaaaaatggagggtttagcactatcatatccactgggttttcgcaatccgatgttaattcggctgctttgatgcctgtttctggcaagactgcatttgtgttgtcacatggctggattttcctgactggtttctcagttcttattctttcactgagttgcaagatcggaagcatcatgtatactggtaaatgactacctgtggttggcggctactagagaataagcagcagtcagttaagtataatttagtgtttggtggtactcattgaatgactaggatcccgtgactttgtagattttttatatggtaccttagtcaaactgatctatacattcttcatcgtaacttatacaacatttttagagtgcctacagatagagtaatagtaatactgtcttcgataagattcgtaatatatattattagttcatactttcaatagtaatactagatgcaaagttctgactgatagaggctgtccattatttattattattaggttccatatgtaatttgattcacttggtaagaacaagtcatcgggtttttgtctgattgaggctgtctattatttattagttctctcgtttaatttgattcactnngtataggagcaagtcatcgggtt

SEQ ID NO: 28589 - DNA, 1452 bp, Glycine max
  Clone ID: TF_GmC625_21
ggctcgagagcaaagcaaagcagagccaacaacaagaagaacaaaaccaacatcaacaaccacaagaagaagaagcttgcaaattagaagaatcttcagttgaaagggaagaacacacaagaacaaagagaggaagaaacgcgaatgaagggagaattagagttgccaccagggttcagatttcaccccactgatgaagaattggtgaatcactacttgtgtaggaagtgcgcgggtcaaccaatcgcggttcccatcatcaaagaggtcgatttgtacaagtttgatccatggcagcttccagaaattggctactacggcgagaaagaatggtacttcttttctcctcgggatcggaaatacccgaacggttcacggccgaaccgtgccgccggaagcggctattggaaagccaccggcgccgataaggcgatcggaaaaccgaaagcgctagggatcaagaaagctctggttttttacgccggaaaagcccccaaaggagtgaaaaccaattggatcatgcacgaatatcgcctcgccaatgttgaccgatctgcctccaagaaaaacaacaacaacttgaggcttgatgattgggtgttgtgtcgaatctacaacaagaaagggaagattgagaaatacaacacgaccgcaccgaagatgaatcttgaaatgattcatagttttgagcacgagaacgagacgaagcctgagattcataagcttggaaatgagcaattgttgtacacggagacttcagattcggtgccaaggttgcacacggactcgagcagctcggagcacgtggtttcgcccgatgtgaggtgcgagagggaagtgcagagcgaccccaagtggaataacgatgattatgatctgggcctacagctagaaaacgcgtttgattttcagtttaattacttggacgataataacctttccgtcgacgatgacccctttggcactgttcagtaccaaatgggtcagctctcgcccttgcaggacatgttcatgtacctacagaagatgtgaaaacgatacgttttttttggacaagatgatgggacccgcaaatatctttattatttttttgtagtaaaagtcagcatttgtgtgcaattgcattgcacctaacattttgtggactaggccaagcttagtaaactattcttattctttgttctagagagatcagggaatgtggaattcggttgaaatgagctagtatttggattggatcttggtgtaaagagaacaaaaaaaaaaaaggagaaaaggagttaggtgttgcagtaagtaaaaagtaagccgaatgatggatgataggatattggagggttaatgagtaggtgtaaggaaaattcttgttccattgctattccagtatgattttttcatatattttgtaatataccaacttctgcttttcaattcaaaggaaacaattgaatg

SEQ ID NO: 28590 - DNA, 1473 bp, Glycine max
  Clone ID: TF_GmC625_20
ggctcgagcgcagagcaaagcagagccaagaagaagaagaagaaaaccaacataatcaacaacaacaacaacaaaaagcttgcaaattagaagaatcttcagttaaaagggaagaagaacacacaagaagaaagagaagaagaaacgcgcgcgaatgaagggagaattagagttgccacctgggttcagatttcaccccactgatgaagaattggtgaatcactacttgtgtaggaagtgcgctggtcaaccaatcgcggttcccgtcatcaaagaggtcgatttgtacaagtttgatccatggcagcttccagaaattggtttttacggcgagaaagaatggtacttcttttctcctcgggaccggaaatacccgaacggttcacggccgaaccgcgccgccggaagcggctattggaaagccaccggcgctgataaaccgatcggaaaaccgaaagcgcttgggatcaagaaagctctggttttttacgccggaaaagcccccaaaggtgtgaaaaccaattggattatgcacgaatatcgcctcgccaatgttgaccgatctgcctccaagaaaaaaaacaacaacttgaggcttgatgattgggtgttgtgtcgaatctacaacaagaaagggaagattgagaaatacaacacaggcgcagcgaagatgaatgttgagatggttcatagttttgagcacgagaacgagacgaagccagagattcataagctaggaaatgagcaattgtacatggagacttcggattcggtgccaaggttgaacacggactcgagcagttcggagcacgtggtttcgcccgatgtcacgtgcgagagggaggtgcagagcgaccccaagtggaacgatgatctggacctaaagctagaaaacgcgtttgattttcagtttaattacttggacgataataacctttccgtggatgattacctttttggcactgttcagtatcaaatgggccagctctcgcccttgcaggacatgttcatgtacctacagaagatgtgaaaactgaaaacgaaacgttttgagcaacatgggacccgcaaatatctttgttttattatttttttaaaaggaaaagtcagcatttgtatgcaattgcattgcacctaacatgtgatgtgggctaggccaagcttagcaactattcttattctttgttctagagagatgagggaatgttgaattcggctgaaatgggctatttggattggttcttggtgtaaagaaaaaatgagagaaggagattaggtgctgcagtaagtaaaaagtaagtgagcaaattgatgataggttattggagggttaatgtgtgggtgtaaggactcacttaggaaaattcttgttccattgctattccagcatatgattttttcatatattttgtaatatacaactttctacttttccattcaaaggaaacaactgaatgaaaaatcttgctttcc

SEQ ID NO: 28591 - DNA, 706 bp, Glycine max
  Clone ID: TF_GmC705867_1
gaaactaattgacacttgagttttgatttatatttattccacaaataacacccggatcacctcgagatagaggttagtacaaaaatgtataaaatcaatgctataatatgaccctaattaacaagcccaccaaaccaaaacaaaccaaaccatcctcaccaattaagtataataataatcagaaaaacaaaagttaaatctcttaataacagttatatggcaaaggtataaatattttattatatgatgaaatgtatgtatatatatatatatatatccagctcccaagttattcaccaccaatctggcctgccattagatcttcaaaatatattagtttgtaaatgtaacatgtgacacttcttcactaccaaccattgctgcattagaagaataccatgcatcttctgtaatgaactgcatccatgaatcatctttgtcctcctcttccaagcatgatgatgatgcccctggtatgtcaggtgacatggtttcacactcattaattatggtttgggagctttcaattagtgatatattacattgtccttgctcttcaatatcagaacagattccatttttcttgaacacacgacacaatgcataagtatcctgtaatccagtggtgtcttcacactctttgtcatcaaggcgatactcatgcattacccagtcagttctgatcccttgaggagctcggacgcgt

SEQ ID NO: 28592 - DNA, 990 bp, Glycine max
  Clone ID: TF_GmC2540_9
gaataataaacagttgcttcttattagaaaatttatgagcccatacacaaaacaaacttccatatacacagatcatgactagaaggatatataaagatttttttttttactgcctacggggcttcacaattaatttcttacactattgaaggttttgagcaacttgtagtctaactaattaggaagcttcactggtagcaggagagggaggaccagtcacagtgccattctccattgtgaaatcaatgacaatgggtgtctcatccatagcttcttcctcactgctgctgctgctagaggtctccccttcagacctttttgccttctttccctttcttccttccttcttcgtcttgaatatgcgatacacagccatagctgacaccatggaaggatgcgatttcgagacgaggcgaaattcatgcatcacccaattcgatttggcaaaaccattgcccttggcttcccagaaagccaaaacgttctttcttgcaacaacctgttctttagagagctcaaaatcttgagctttctctattgttctccattgaccgttcccggcttctctcttgttgaggttttcgaacacacgggtcctcaaatcatggaagaaaaacctctgccaattcaaattcttactaccacctcctggcagctcccaaggcactgtttggtaaacatcacagtcttgaatgaggtcattaggggatggttgggccatgatcctcttcctgagatagtaaccagcaagaatttcatcacttggatcaaatctgtatccaactgggagcttgtaggtcttgccttcaatcgggtttaagacttccatctcaaagacctttgcctttggagaagaagaagaagagaagggaagggacttgttgtctcagctcttagagtgaatcactgtggcaaggcatgatgtaaggaatttaatttatagatacaacaagacatgcagagtgatggatgtgtctgataagagagagc

SEQ ID NO: 28593 - DNA, 1641 bp, Glycine max
  unsure (1)..(1641): unsure at all n locations
  Clone ID: TF_GmC5673_1
ggctcgagaagaaattctaattaaaaagcaaagtccgatatctttctaactatatatatatatataggcgacaccaacctttctacggctgcgagaagacgacagaaggggataccttaatatttcaaatacccagagggagtaacctctccaagcttcaattatctacattatccacattccttgctagctttatccacatctacaaaatagtccttagatttccctctctctttctctttataactgtgccatatcttataggatctcctttcacttccttcaaaaacaacaaaatcatgggtctgagagacattggtgcttcactgcctcctgggtttcggttttatccgagtgatgaggaattggtctgccattacctctacaaaaagatcgcaaatgaggaagttctgaagggtaccttggtcgaaattgaccttgcatgcgcaataatattaatgcacgcagaggtggctaagctcaatgcgaatgagtggtacttcttcagtttccgggaccgcaaatatgctactgggtttcggaccaaccgggcaactacatcagggtattggaaagctacggggaaggatcgtaaggtggaggatccagccacgcaagaggttgtagggatgaggaaaacactggtgttctacaggaacagagctccaaatggcatcaaaacgggatggatcatgcatgagttccgcttggagaccccacatatgcctccaaaggaggactgggtgttgtgtagagtcttccacaaaagcaaagaagatgacaacagttccaaactcctacagtatgagacgacaccatcatccctaactttgttggcttcgtcatctcccaccaaccaagccatgcctcatggtgttgggtataataaccgacttgccacctctttctctaattcattcatgccaacccaccaatatcatcatcacttcaaccctacccaaaacgctaattctttgatggatctccttcacttctctcgcgaaaccaacaccaacaatactggctttcttactcaaattggtgccaaaggtgatgacgaatatggtttcttatgggacatggatctagaagaaaatagcctagatgatggcgtggcttcaaacttggacgcaataagattcgaggttgataataataatactaataacaacaatatggtattgctataattaaatgtgtaagatgtgttatgtgtgtacatatatacacatatatgttattcatagctcgtaaattgtcgtaagattcgtttatttgtggtgtatttatggtgcttcgctatgaggggcatgtcacatgatagattgggtttagttgttacaagtttgtgtggtatattgttcaagtagtagggtaatactattgtggtccattaggcttttcgtaatcaattactattatttacccattattattgggaactattcctttgtatacagtttgtatatgtaattagaattggctataaaaaaaaaaaaaaaaaaaacccaaacaaaaaaaaaaaaaacccccccacatataagaaaaaaaaaaannggccccccccataaaaaaaaaaaaggggggggcccctttaaaaaaacaaaatttttttcccgggggttggaaattttttttttt

SEQ ID NO: 28594 - DNA, 804 bp, Glycine max
  Clone ID: TF_LIB5119-023-A1-PF1-B5
cataagtacaatccttccgaaagaatcaatatgcatgccaaaaggttgtgcctatataaagaacataagcccttgcaaattagtagtcatgcaaccatgacaacaaattaagaaccaaagctttgtatatagctagattttttaaggagagctagatgaacagtaataaagtatatttataagaggagaaatagtgttgaagaaagtgctctcaaactacctgggaggtcccaaggttcacacttgttgagatcaacaactgctatagctttggatgtgaagctagaatcataaaccttccttgtaagataacatgtgatgagctcttcatctgtagggtggaacctaaatccgggaggcagattttcctccatcagattgatgaaaccaaccagcagattttgatacccccttgaattgaagaagtttagtttaccaaaaactgaagagggagcaccacaaatatatgagaagtaccaatgagttgtcctcacagtaagctcaatacatcaccaataagagcttttaaaggcctctttactttatggttttataactcacccttcaacaagaagcatttcatagatagccttcttcatgtttttgttaaatatacagctaaccctttgacaaacatggtatcatatcttaattaaactttttttttcctttttaaatattactatgtagcttcagctataaagggtatagatttcccaaattgatgcttggatttacttatatttactggacaaaccaagaattaggttgcgaccttgactctactggaaaaaaaaaacaaaa

SEQ ID NO: 28595 - DNA, 772 bp, Glycine max
  Clone ID: TF_LIB4392-037-R1-K1-F9
gttttcttctaccaagctagcctagcttcttcatctccttcaatttgtcttctcttcattaattccaattgtctttaaaccgctatctcatcagtaccagtaattgctatcatggagtcgatggagtcatgtgtcccaccagggtttcggttccacccaacagatgaagagcttgttggttattatctgaggaagaaagtttttttttagaaaattgaccttgatgttatcagagagatcgatctatatcgtattgaaccatgggatctccaagagagatgcaggatagggtatgaagagcagaatgagtggtatttcttcagccacaaagataaaaagtatccaacagggacaagaactaatagagctaccatggctgggttttggaaggcgacaggaagagacaaagcagtgtatgaaagagcaaaacttattgggatgaggaagacccttgttttctacaaaggaagagcccctaatggacagaaaagtgattggatcatgcacgagtataggcttgaatctgatgagaatggacctccacaggaggaaggttgggttgtgtgcagagccttcaagaagaaaaccactgggcaaacgaagactataaatattgaaggatgggagtcaagctacttctatgacgaagcaagtggggcaacaagcactctggtcgatccaattgaactcatttcaaggcaatctcagagctttctggctcataatttcatgtgcaagcaagagctagaagcagataacttgacttgcatgc

SEQ ID NO: 28596 - DNA, 1397 bp, Glycine max
  Clone ID: TF_GmC1208_1
cacccctttctttctttcttcacttcattccccttatcctctcttcagttacacacattctcagcaaaactttgtgagcattgtctattgctacatgcttatctaatcttgttacagggcttaaaagtgtgtgatgcaagcaatggagaacattcatcagagggaaatattggaagagcaaaggtttgaattgccaccaggattcaggtttcatccaacagatgaagaactcatcactcactacctctcacagaaggttcttgatagctgcttctgtgccagagccattggagaggctgatttgaacaagtgtgaaccatgggatttgccttggatggccaaaatgggtgaaaaggagtggtattttttctgtgtgagggacagaaaatacccaactggtcaaaggactaatagggccactggtgttggctactggaaggcaacaggcaaggacagagagatatataaggcaaaggcactgattggaatgaagaaaactcttgttttctacaaaggaagagctccaagtggtgaaaaaactagctgggtcatgcatgaatacagattagaagatgaacattctgtgcacaatccacccaaaaaggccatgaatgattgggccatctgcaggatttttcagaagagtaatggtgggaagaaaatgccaatttctgggttggtgagattcagcaattttgcaaaggacatgccttcattgatggattcttctccatacaacgacagtgaatcaaaacctgttttgggggagtcatcacagccaacatgcttctctgatccaaaccaaagtgaggaccaaaggacacaagatgaaaacatagcggatagctatgaaactctcatgttggcatcttcatattcttcaaacccctctgatatttcccctgcctcatggactttttctaaatctgcccctaccgtgtcccaccaatcactccaagttgggaattcacacagctcagattacttcatgcttcatcaggaacagtccatgttggggatgttgattgaaaaccatggagcaagtgctggccaaagaactcagaaagctcaggatagtaaaggctctgatgctgacatgtcctctgtgatgtacaacaactatgaaatgttccaaagatcatttgggaaccaggaatattcatcaccttccgtaggacatgtgtattctagtggcctatggggattttaaagaaggttgaaggatacactatatgcagattaaaattagagaaactttagggattaaatgctattatacatgtaaataaattgctcttaagctaatgttatcctacaaagtacaggaaatggatgttacggttttccaaagttgtatggcttgacagttttatattatattagtaaatttttatagt

SEQ ID NO: 28597 - DNA, 287 bp, Glycine max
  Clone ID: TF_LIB3242-501-P1-J1-E5
gagctggttccgctgattgtttcagccagatgatgtcgtcgatgccgggtttttgcttccatcccacggatgaggagttggtgatgtactatctgaagcggaagatttgtgggaagaggctgaagctcgacgtgattcatgaaaccgatgtgtataagtgggatcccgaggatctgcctggttagggtaccaatcgttgacttgggtttgcttcaataaaggcaatctatattgaaaacgggagataggcaatggttcttttctttgacctataaataggaaatatc

SEQ ID NO: 28598 - DNA, 362 bp, Glycine max
  Clone ID: TF_uC-gmropic088h01b1
aacggacggaatctgaagcctgggggcaattcaagctctgatgccatcttactcagatatatatccctccctagctacagattccatccaacggacgaggagctggtgttgcactatctctgccgcaaatgcgcgtcgcagccaatcgccgttcccatcatcgccgaaatcgacctctacaaatacgacccctgggacttacccggattggctacttacggagagaaagagtggtacttcttttcaccacgggaccggaaatacccaaacggttcgaggccgaaccgggcggctggcaccggttactggaaggcaacccgggcggatagcccattggtcaagccaaccggttgggataaaaa

SEQ ID NO: 28599 - DNA, 1085 bp, Glycine max
  Clone ID: TF_701123582_FLI
gatctcccaccaggttttcgattctacccaacagaagaagaattagttttcttctatctacacaaccagctagaaggccaaatacacgacacaagcagagtcattccagtcattgacatcaatggcgtagagccatggaaccttccatcacttgcaggggagctttgtcgtggagacacggagcaatggtttttcttttcaccgagacaagagagagaggccagaggaggcagacccaacagaaccacagcaagtggttattggaaggccactggttcccctggccatgtttactcttctgacaacaaagtcattgggatgaagaaaaccatggtcttttacaaagggaaagctcccaccggaaggaaaaccaaatggaagatgcatgagtataaagccattgaacactctgatcaatccaacactgcccctccaaagttgaggcacgaattcagcttgtgtcgtgtttatgtgatatcgggaagctttcgatcgtttgatcgacgcccactggatatgccaagagttgagctacgagttgttgatggggacagaggtgctgcttcaacaagtgctcaagctcaacagagaagttcttctcatacttcccactctggtggtgatgctcatgtcacagatgctggagcagggtcaagtggaacaaattggaatgcaagtaatagggttgaggaaccactttgggaatgggaacaacttgattggccatgacccaaaagtcaagaacatgctcaaacctagcaagactttcttaattgaataacgtcgtttcaattaaattaatcatataagttgtaggcgtagtttggttcgatttccttcacctcgaagggccatgtaatgtaacataatcattagtatttgttgtttaacataggattggttttccccgggaaaataagttgggaataagatccaagcataaaaaggaaggtggtgtggatcttgtaattttgtttttgtgacttgttgtcttgtaacgataatcaatctccttttcaaccctagaaattttctttcttgtttaggaattcaaatgaaattaatcaatctactatttgcttatg

SEQ ID NO: 28600 - DNA, 1228 bp, Glycine max
  Clone ID: TF_GmC5683_1
aattcgccacgcgtcccatcggttttaaaaagtactttggcgtgtggttggaaacaaataatagagaaaataaaaaaatgaatgttaaggtgcatagctctgatgataccaagaaggatgaagaggttgtgcttcctggctttagattccaccccacggatgaagagcttgttgggttttatctgcagagaaaggtggacaaaaagcctctaaaaattgaactcatcaaacaggttgatatctacaaatatgatccatgggatcttccaaaggtgaattcttttggggacaaagagtggtattttttctgcataagagggaggaagtacagaaacagcgtgaggccaaacagggtaactaggtcagggttctggaaggccacagggattgacaagtccatatattgcgtgaaagaaccccatgaatgcattggcctgaagaagtcattggtctattaccgtggaagtgctggcaaaggcaccaaaactgattggatgatgcatgagtttcgccttccacccaatgcaaaatccagccccaatgatgttcaagaagcagaggtgtggacactctgcaggatattcaaacgcatcccatctttcaagaagtacgctccaaacttgaaagactcaacaccagccaccaaaccaaaccctgtgaattccaacgcatccaccttagattctgacaattgctgcaagccatatttgatttgcagagaccctatgatgatgcaacaaatagaaagaaaaccagttattggacaagttgatgaaaagaaacacttgtttttgggccaatttggcccactatcccatcttcaggccccatcaaccaccccttacccaaatttttggaaccagaataatgttgaggaccacgcatttgccaatgagaattgggatgacctaagatctgtggttcagtttgcaatcgatccatccacggtgtttgattgtaccgaaacatatattccaccctacttttcttagggttggagtgagtaactttggtagatatgttatatatgatgtatgaacatatatagaggttataattgtcattattcttacagttttttaatttcttgtatgagaacacgtatatgttgaaatttgctggttttactagttttgttgtaaaacctaatattgacttgtatcttgtcatttttatcccttttccattgattgagtcaataaatacgtttataccttgatttatcaaa

SEQ ID NO: 28601 - DNA, 1691 bp, Glycine max
  Clone ID: TF_GmC389_1
aattcggctcgagacgacttaacccataatagttcttaaattcacatgtataatcgcttcatcgtcaaacagtcacttctcaccgtcactttagcagtctcttgcggtggcacaaactgtatcacgtttcaaaagactaacttggtgaccggtgaggtgttcctagttaccatacgaaagaggattttggtgtaggatgggatcgatagagaacgcttccaaaccaaggaaggaaaatccgaaatttgaattgccagcgggttttagatttcatccaacagatgaagaactcataaatcaatacctcacaaagaaggttgttgacaactgtttctgtgctatagccattggtgaggttgatttgaacaagtgtgagccatgggatttgcctgggttggctaaaatgggtgaaactgagtggtattttttctgtgtgagggacagaaaattcccaacaggtataaggactaatagggccactgatattggttattggaaagccacaggaaaagacaaggagataataatggagaatgcactcattgggatgaagaaaaccttggttttctacaagggaagagctcctaaaggtgaaaagacaaactgggttatgcatgaatataggttggaagggaaacataatcaacccccccctgcaaagagtgaatgggtgatttgtagagtctttgagaagagtcgttgtgggaagaaaatgcatgttccaaagtgtgggaggttcaacaacccctttggagaggaaccatcatcaggtgcttctctattgcctcctttgatggattcttctccatacaacagtgaaacaagaaccaccactgctggggagttgtctcaggtgacatgcttctctgatccaaatcaaactgaggatcagaacaacacacatgatgacattgttgatagcatggaaactcctattttgaacttctcacccttttcaaggcctgatgatgcatccactttggccaaagcaaccctttcttcagcctcaaaccaatcagcacagattgcacaccaaattggggactcacagttcccagattattgttatgcgcctcaagaaccgtccatgttgaggatgctgatggaaaaccatgaaccctgtgcgaagcaaactcagaaagaagagtttcctgagggaagagactttgatggagatatctcatctatgatatacagcagtgacatgataaacagaatgtttgggaatcaagaacattcttcatcagcttctgcagggcctgtggacactgatttcctatggaattactgaaggttaaggaatattatttagtgttaagacagaaaatatgttaattatatttatattcatatgatacatacaggttggttacctgcaacttcatgaacttattgtaggaattatgggaaatgcatgaaattgaatttcccccctctggttgataactttgataaaaactagtgctgaatagtccatatgttatatatgatctgttaatctttattttcatcattgcagcccaattacaggttgttaccaccaccttttcttaggacttgtttgtgcaacttttgggttaccatctgctttagataatgtggtcatattcatagccagtttactcaagataatgttaggggtgatttattttaaatcaatttaaagttaaatatataatttgctctttttg

SEQ ID NO: 28602 - DNA, 402 bp, Glycine max
  Clone ID: TF_LIB3242-161-Q1-J1-A7
ggcttgtggtcaatctgagctacaacaacgccgaaaccaacgtactctcatattacaccttaaacgacatcgacggaatcacgctcattatgactctgggccggcttttctccttcgtcgtgctcaaactaatgactgtgggcatcatctacattcatagattcttgcgtgcatacttgacccaaactacatatctcacatgactagcttgcggcgcattacctacttacgacgataaactcgctgaggaacgatctacatgttattgttgagatggatctgtacaaaacgtatccatgtgacatacatgatacgagcgagctatgctatgatctgaagaacgaatggtacttttttatccataaagacacgatttgtgctacgcggacacgaactaacaag

SEQ ID NO: 28603 - DNA, 356 bp, Glycine max
  Clone ID: TF_LIB3092-046-Q1-K1-D7
cccacgcgttcgcgcgaatgtttgtagaattttagacgccaccagggttcaggttttatttgactgattaagaattggtcaatcactacttgagaaggaagtgcgcggatcaaccaatctcggttcccatcatcaaataggtcgatttgtacaagatatattcatggcatcttccacaaattgactactactgctagaaagaatggtacttcttttcttctcgggatcagaaatactcgaacggttcacggcctaaaccgtgccatcttaagcggatattggtaagctcacccgcgctgataagccatcggaaataccaaagcgctagggatccaataatgctttggttttttacg

SEQ ID NO: 28604 - DNA, 1614 bp, Glycine max
  Clone ID: TF_GmC388_1
ccgggctagacacgaatctctgtgcatgtattttctcactacaaaagcacactcactctcctcctctcgcctctttccttctttctttctcccattctcctaaattcctccaaaaaccctaacactctctcattctcagtttttctcaatcttatgattaatggaagaccacgcgcatgctgcactacctcccggttaccggttctacccttccgaagaggttctcgtcggttactacttaaccaagaagaacgagaaccgggaggagggtttctacggttctgatttgatcagagaacttgacctctacgatcacgatcccttcgaattaccggacgctgctgcttgcttttcgtacggttacaaagggaggaagaagcattggttctgttacgctaaagagaccaaacgcagaaacagaagaaaggtgaaaagcgggttctggctccggaagggaaaggttcgggatatttccgaccacaacggcgacgacgtcgttttgggcacgaggacgcgtttcgttttctacgtcggcaattccctgaaaaacgctgccagaaccgattggattttgtacgaatacgcattggttgatcgctttctggcttcgtttgtgctttgtcgtgtggtgaataagcctcctcataagaatagtccgtcggagatcggtctgagttgttgtgctgaggagagtgttgtggcggtggtgcgtcacgttggtgttcagtgtgatggatgtgccgaaagtgatgttgttgaagctaaggtgtgtgatgaaggctttgttaatagagagaatgagattgctgagaatccaattagtggtgaacatggtgatccagctgcacctgtttcagttgctcagggaagtcatcaggttcaggaaaggctttctaaacttcccagtggcagtgcattgttcgtaggagctatgacatctcagcaacttatgctttccattctagaggaggatttcatagaattggatgatattgcatgaattgattggttttaagagattttgtgaattctaatactgctctgaggagtaattatcacctgaaacaattgtattcagaatggattattgacccagctaaaggggagaaagatttatgataatgagtagctattattccactcaaacgaagaaacatactgtcgaatggggttgaggcaaatgtcatgaaatgatcacttcgcatgttaagattttctcctgtgcctactgcagggcaattggctccagagggatagagttagagttagatattggtattggtaattggaatatgcgatttactctagtatgctatgagcaacttcaccgtacttcatgctttcattgttcccttgatcgacctgttcctatttaaatttaattagcattcctgggatcatcagaatttcctatctgcaccttagtagcaagacctatttgttactgtctgtgctactttctttttcctatattgttcaagaggagaatcagatgaattccaaattgtaagtgttacaacataatgatagtttatgaattgacttaacctttatacttttgaggttatgctgactaattttatgttcttcatggtatttttgtttggataaaaa

SEQ ID NO: 28605 - DNA, 748 bp, Glycine max
  Clone ID: TF_GmC572_1
ggctcgagaactaattcaataacatagaagaatatggaagatggaagcgtcaaccttcctcctgggtttttcttctctcctactgatgaagaacttgttcttcactttctctattgcaaggcttctctcattccatgccatcctaacatcatccccgatctccatccgtctcagcttgctccttgggaattaaatggtaaggcgttgttaagtggaaatcagtactatttctttaccaaagtgaatgaaaacagagccagagaaaatgggtattggaaggacacaggtgtcacggaacctatattgtcaacctttgataagaaagtgggaatgaagaagtacttggtgttccacataggtgaagctccacaaggtactgaaaccagttgggtaatgcaagaatattatatatgttcctctgggtttgacactgcctcatatcgaagtgctaggagaagaagaaaacatgatcaaagttggagcaagtgggttttgtgcaaagtctatgagaagatcaggtctcaacaaggtgtaaactgctatagcgatgatgatgacagtggatcagagctttcttggctagacgaagtttatctgtcgttggatgatgatctggaagaaattggcatgcctatttagattgaatgtatactacccaatgctaatatatatatatatatatatatatatatatatggacttgtatattaattactatgtctcaattaaatacgtgcattgtttgaac

SEQ ID NO: 28606 - DNA, 824 bp, Glycine max
  unsure (1)..(824): unsure at all n locations
  Clone ID: TF_GmC473_3
caactagagaattaaatttagagaaaaaaaaaaaacttggttttatcttctttgttattattatattcacttcttcaatatcttggttctttgatattattattcgattgagcaaaaaatgggagttccagagagagaccctcttgcacaattgagcttgcctcctggatttagattttatcccactgatgaggagcttttggttcagtacctttgccgcaaggttgctggccatcatttctctcttccaatcattgctgaagttgatttgtacaagtttgatccatgggttcttccaggtaatttatttcatcatttatcataaaaaaaaatctaaaaacgatctttaaccacgatttttgtcacaatatcaaagtttttagagttcgcaatcacaattgcgaccgcttagatcacatttgtcttcaatttcttgccatattaaagattgtaatataattgtagttgtgattacaacggtaatttaaaaaatttataaccttggttaatgtctatttgcacatgcacaaaaatgaggactactagtattattattattatgtttttaattgaatgtggttatggtggtgtaggtaaggcagcgtttggagagaaggagtggtacttcttcagtccaagagacaggaagtacccgaatggttcacgaccaaacagagttgcgggttctgggtattggaaagccactggaactgancaaatcatcaccactgaaggtagaaaagttggcataaaaaaagcacttgttttctacgttggcaaagcacccaaaggctccaaaacccattggatcatgcacgagtatc

SEQ ID NO: 28607 - DNA, 726 bp, Glycine max
  Clone ID: TF_GmC195_5
ggtcgaccacgcgtgcgccactcgttcgccacgcgttcggattctttatttttatttattaattgttactgtgttactgtacaggattggctacttatggagagaaagagtggtacttcttttcaccacgggaccggttttacccaaacggttcgaggccgaaccgggcggctggcaccggttacttggttgcaaccggcgcggattagcccattgtgtatcccaaaccggttgggattaaaaaagctttggtgttctcgagccagttggtgttagtcttggtgtagtgtagctagggagggatatatatctgagtaagatggcatcagagcttgaattgcccccaggcttcagattccatccaacggacgaggagctggtgttgcactatctctgccgcaaatgcgcgtcgcagccaatcgccgttcccatcatcgccgaaatcgacctctacaaatacgacccctgggacttacccggattggctacttatggagagaaagagtggtacttcttttcaccacgggaccggaaatacccaaacggttcgaggccgaaccgggcggctggcaccggttactggaaggcaaccggggcggataagcccattggtcagcccaaaccggttgggattaaaaaagctttggtgttttacgcagggaaagctcctaaaggggacaaaaaagcaattggatcatgcacgagtatcgtctcgcagacgtagat

SEQ ID NO: 28608 - DNA, 1902 bp, Glycine max
  Clone ID: TF_GmC160_1
gagccactggtcgtgcttggcggagatctgtgttgttctctccttctcgcgcggaccctcacaattcggcacgagggccttcaccttgactttggatgggtaaataaagctacatatcatacatagcgaagatgtgtgttgttctcttcttcttgtgtgaagccaaagccacaacaacaaccattggaacaacccaacaacatagtgaacaacaaccttggtaataataaccatggagagcaccgaagactcatccacgagttcacagcaacaaccgaacctgccacccgggtttcggttccaccccacagacgaggagctcgtggttcattacctcaagaagaaagtagattctgttcctctccctgtttcaatcatcgctgatgttgatctctacaagtttgatccatgggaattaccagccatggcatcgtttggggcggaagagtggtactttttcagcccgagagaaaggaagtacccgaatggcgcgaggccaaacagggctgcaacttcagggtattggaaagccacgggtacagataagcctatatgtagtggaactcaaaaggttggggtgaagaaatctttggttttctatggagggaagccaccaaaaggggtcaaaactgattggatcatgcatgagtaccgtgttactgaaaacaagcctaacaataggcctcctgggtgtgacttgggccacaagaaaaactccctaaggctggatgattgggtgttgtgccggatctacaagaagggcaacacacaaaggtcacatgagagggatgattccatggatgacatgattggagaagtacctccttccatcaacgtgggccacatgagtgcgaggtttcacctttcaaagatgtccacgagctacagtggtgcattgttggaaaatgacagaaacacgttagaaggggtggttataggcaatggtagtgtgaatgggatcagcaatactaataatattacaagtgtcatatcatcatctcatcagtttggcacctcaaactccaaggcagagcttcttccttttgtcccttcaaacaacacttctaattcggcctccaaaagaacactctcatcactctattggaatgttgatgatgataatgatgatgatgatcacaaacacttcaatttggacagtaatgggaatgtgagtgttttgaggactgaagagaataataataatactaatggtacttctggctcctttgccactctgcttaaccagcttccacaaacaccttcattgccccaaatagatgggttacttcgaacaccatatcaaatacaagggaccaattggtatggttaactccattttgggggatacgtacgatatgatatgataatttcataattataatgcacaaggagatccaattgaactaaggtgtggcaagggatatcttcaacttgtgctagatcgcaaggattttaaaagggtcattgagattgtggtttaattgttaggagaatggaagaatgttagagcacactaatcaatgttttctttcaaccatttgcaggtagctaagggcaattaataccacatgaggtgagggtgtaagaccttggaacttttagtttaattattatatagatcggtatagtaacatagataaagatagatatatagaagcatatttgcttgttttattagtgtgtaaagaaacaaaatgagggtaaaaactttcgagagaggataaaagaaagagttagccacagttctatatatatatactttgctttatgatacagaatgaagagtatagaaaatatacttcagaacgatataaattgatgcaagattttaaaatatgtatattgattgtatttatggtttgtctatctataacttgttcatgaagagcttgatattaatct

SEQ ID NO: 28609 - DNA, 476 bp, Glycine max
  Clone ID: TF_jC-gmfl02220079g06a1
ggctcgagctcctttcttagttgctacttctgcatctccccttcccttctttcattctttgtcacaaaactacaaagtcactgagtttagtgtttcgccaaaaccaatggatgatgatattgtaggactcggttttcgtccaacagaagaagaacttgtggacttttacctcaaacacatgttgctcggcaatgatccccgtgcccacgtcatccctgtcattgatctttgcgatgtggaaccttgggatgtaccagccctgttgatttcaagtattcaagaagtaaaaggtttaacaggacaaccaagtgtggcttctggaaagccactgggaaagaccgtgacattaggacaggggacactaacaccgtcattgggactaagaagactcttgtttactatcaaagccgtgtttcctgtggtgtcaagtccaactgggttattcacgaatatcatgctgttacctttcatgaaag

SEQ ID NO: 28610 - DNA, 2476 bp, Glycine max
  Clone ID: TF_GmC434_3
gaaacacagtgagttaagtgttcacaaaaaacaatggatgatattgtaggatacggttttcgtccaacagatgaagagcttgtgaagttctacctcaaacacaagttgctcgatgatgatccctgtgtccacttcatcctcgacgttgacctttgtgaagtggaaccttgggacttaccattgttattagcagattcagctgtgcgattcaatggccgtgaatggttcttcttcagtcctgtcgattacaagtattcaaatagtaaaagggttaacaggacaaccaagtgtggcttctggaaacccactggaaaagaccgtggcattaggagcaaggacaccaacaatgtcatcgggactaagaaaactctagtttactatcaaggccgtgtttctagtggtgtcaagtccaattgggttattcatgaatatcatgctgttacctttcatgaaagccagaggacttttgttttatgtcgcttgatgaagaaacctgggaaaacaactgaaggtggaactgatgcactgatctgtgatgaaggggggcccagtagaagcatggtttctgactatgaaaatcaggcaacaacacaaggaattccatctgtaagctgaagcatccttcatggacatattttacactctgccatgtgaaacatgctaaggagatataagggtggttggatgattaagatagaagggaatgggggaaaggtcgcgggttcgattccccagctaacaaattaacaactaacatttgccgataaaaaaaaatgtgaaacatgctaacaactgattcttgattgtgtgtatattttttttttttcagggaggtacttttacaggaatggaaacaacctttcagggaatgcatctggctgagaaatacttctccccaacacaacagtctcccactggtattgagcaggaagaaccatcctttacaaactatccatttaacaatgcctattttagaaatgaagacaactttatgcagactccatttgaaactaaggaggaagatgcgttcctgaattcaatttttgttgatgagaatttagttatcaatgaagaaagtatgcatgcttttgtcaatagctccacccaatcagagtcattgagaagggtatattgtgaaagcagtgatacagatgctgaagtagtctctgaaagggtaaagaaatattgtccaaagtccaaataatattggggagcagatctccatttgtttctgaaccgtcatattggtttattaagttaaaattgcaatgtgcattgtggcgatgtaaatttttgctacattttttcaatgtttagtgattttctactatatagtctgaaagggaactctagtgaaatatttggtttgagttggttttgatgctttgttgtgagtcatgattgattcacggaacattactgagttagtgaatgcttggacaaagggaatatttgggataggaaataaaatgtcgataaagcaatctctttctataccaatttttacccttccttgcatctcttccctaaaataaactttaggtcttcaaaactactcttttcttgggtttgtgatatttttttattttattttgagcacttcaagaattgaattcgtctgtttgtcttctgaaatgatcacaggatgataatattgttgatgtttcaacaatgtgcaacgaatatcctaattcagacggatactattcatcagaaaggtttgaatcatcacatggtgctgtccaagatagcttatgtcttctatctactaaccacgaagcaaaccaagagacaatggaaagtatactccaaaataatttctggggaatggagcaatcctattgtgactctactgcaaataaacctttggagatcaattatactgaaatttctagttctccttccactcggaggagatggataaatcagtatcatccaagaccagactacttcacatcccaaaagactgatgaagatctgagacacagaggaaggtttcaaacaatgcagtatcgcatgtagaggctcagaaggaattgctcattgtaaaatcagaaaaatgctcaaaatactagttcaagagagaacttagaagccagaagccatcatcctctgatgacaataggaaaggttctttcatctatgtgaagactgaagattacttcatcaagccagagcctatttccatgcttactatatcttgtcaatttaatggtagggattttgttgttaatagtcataagattggagtgggaagtattatcatgttacaacttcgaaatacaagtactatgcatgaagggcttgtgagtgtgtcaccatggttccttttcatgtagtgctactacatggcaagctctgttttaggaatttcatcattataagataggtgaggcttatagttcatatgtattttgcaatgagttatcctcattgcttctttcttatcataatgaaatatctctgcttaccattt

SEQ ID NO: 28611 - DNA, 1150 bp, Glycine max
  Clone ID: TF_GmC36703_1
aattcggctcgagtttcactccaaaccttccttccttccttgtttgctccaaaaaatgggagataacaatgtcaacctcccacccgggtttcgcttctaccccacagatgaagagcttgttgttcatttccttcaaagaaaggcaaatcttcttccttgccatccagatgtcatccctgatcttgaactctacccttatgatccttgggaacttcatggtagagctttggcagagggaaagcaatggtactactacagcagaaggacacaaaatagggtcactagcaatggctattggatgccaatgggaatggaagagccagtgatttcaaactctagcaacaagagagttggcatgaagaaatattatgtgttccatttgggagaagcccctgatggcaacacaaccaattggataatgcaagagtatcgtctattagattctgcttcctctagcatatcatccagaagaagatcacaacctaaaccggaccataataaatgggtgatatgtcgagtttatgaacaggataacgatgatgatggtgatggtacagagctctcttgtttggatgaagttttcttgtcattggatgatcttgaagaaataagtttgccaaattagatgattatgcaagtgatctagttagctgcattttatatccaaataggatattagtttaagctaattgttgttatcattattattaatattgttatttactggttgtagttaaatgcattagcagtttttagctgccattgtaatcagtgaagtcgctatagctagatttctatatagcagcctttcaagtggggcactaaatgaaattcgtggccaaacaatatgcagtgtgacgttatgctttcaaagatcccattcactactacaagcaaaggtcaatcttggaaaattctacgctctttagtcctttttccaacacgtggatattcccatatctagtatctattttcagccattaatataggagttttctttcccccaattcaagataaaatatgcaaaaggtcaatttcttgtttcttaatttaatttcccaggaatcaccaatttagcaaataatccctttacaactggtgcataaaagttttgtgcacttaaaaatattttcatagaagatcagccccc

SEQ ID NO: 28612 - DNA, 1445 bp, Glycine max
  Clone ID: TF_GmC560_1
gttatttttagagctagtataagcttgtaacctattatgactttgatgaagagcaacgcataaccaatggccactgaatttttttccttatcttccagtgctgcctttactcttaggccttggccaaaagaatgagagagatcatcatcaattgacatggaatcatgtgtgcctccaggatttagatttcatcccacagaagacgagcttgtggggtattacctcaagaggaagataaactcgctaaaaatcgatctagatgttattgttgagattgatctctacaaaatggaaccatgggacatacaagataggtgcaagctaggatatgagcagcagaatgagtggtactttttcagccataaagacaagaagtatccaacagggacaagaactaacagggcaactgctgctggattctggaaagcaacgggaagagacaaggctgttatgtccaaaaatagaatcataggaatgaggaagaccttggtgttctacaaaggacgtgctcctaatggaaggaaaacagactggattatgcatgaatataggcatcaaacttctgaacatggccctccacaggaagaaggatgggttgtgtgccgagcatttcgaaagcctagtccaagtcacaggccaggctttgaccacccatggtgcagtactagtagtcaacaacaacactttttcagagaccaaattcaaagctattcatcaagacccttatcaattgctgacattttggatgaaacaaataatgtgcctcaccctaatgctgaaggtacaagttttagtcaccccttcagctcggatcatcagcaacacctgaataatcttctatcaaaccaaactgtggctattatggacaaacaactcattgagcttccacagctagatagtcccactgcaagtttggcaatcaaagaatgtaaccaacaacaacataatggcttaacaaatgaggaatattgcagtgatgaaaggagtaacaatagcaatgcacaagggatcgattggaagagcttggacaacttgtttgggtctcaattgagtgataatgcagcttatttttcacatccaaacttgcccttgatgatgccccataaccatgatcaagctagtcatatccttggatgcttccctgattcttcataattaacttgtgtgtcacgtaccaaccataatccatagccaaattaataaataaagtctctaagtaagatatgatggatatataatattcattatatcatagttttccatttatcttaccataagctaatttagaagttgttgctgggagattgaatattaccaaaaagctttttaggtgatgatgatattatatatatttttacgtgataaaggagatttgcttgaagagtgaatctctgatcctttgtattagagttcagaagatcataagccttttctttttttctttt

SEQ ID NO: 28613 - DNA, 1632 bp, Glycine max
  Clone ID: TF_GmC473_2
gaaaaaaaaaaagagaagaaaaaaaaacttggttttatcttctttgttattattatattcacttcttcaatatcttggttctttgatattattattcgattgagcaaaaaatgggagttccagagagagaccctcttgcacaattgagcttgcctcctggatttagattttatcccactgatgaggagcttttggttcagtacctttgccgcaaggttgctggccatcatttctctcttccaatcattgctgaagttgatttgtacaagtttgatccatgggttcttccaggtaaggcagcgtttggagagaaggagtggtacttcttcagtccaagagacaggaagtacccgaatggttcacgaccaaacagagttgcgggttctgggtattggaaagccactggaactgacaaaatcatcaccactgaaggtagaaaagttggcataaaaaaagcacttgttttctacgttggcaaagcacccaaaggctccaaaaccaattggatcatgcacgagtatcgccttctcgactcttcccgcaaacacaacctcggaaccgcaaagcttgatgattgggttctgtgtcgtatctataagaagaactcaagtgcgcaaaaggttgaggcaaatcttttggctatggaatgtagcaatgggtcatcaccttcttcatcgtcccacgtggacgacatgctggaatcgttgccggagatcgatgatcggtgcttcaccctgccgcgagtgaactcagtcagaacaatgcagcagcaggacgagaaattcggatttcagaacatgggatccgggtttttcaccgattgggtcaacccgacggatcttgattcagtttccgaatttgggtcgggttgccaaacccaagggatggtgaattatgattgtaatgacttatttgtcccttctgtgccgcccttcggccacagccatgtaaactacatggtgggggcaccaccgtccgaggaggaggttcaaagcggtgtgaggactcaacaggccgatggggccgcatgttttcagcagaacccaaatgcccgattgttaccgggctcgggcgacccatttgggtttgggttcatcatgggtcagcaagttgagttcgggtttagggactgaaggatctgatagtgttgttctgtaaataattggggattttaatttaaattctatgctcattgttatggaaaattgcaattttggtcattcttttcggctagacacatacaatgaatcggtatgaaactgagcaaggatgacccaatggtgctttcaccacagcaccgcatgctgaaaaattaattgctttgcaagacattattgggctaaatatgaatcacgttgtacttcaaagcattacatagcaactattttccaaatttaagtttagtttagagcattagatattgatatttttatgtggttggtgtcccatgcatccttgtagacaacctgatcaacaagcaatgaaccagctgtaaaattgtctagccttgctgattgtgaaaaaagtgagatccacgtgtgaagtgaacccccgtttaatgtgttaaataaatgggtttggattgattagttgaaaaaagttttcaactataaaatcatctcgtttcactgc

SEQ ID NO: 28614 - DNA, 1067 bp, Glycine max
  Clone ID: TF_701130443_FLI
atcatcttctctctatctttgttgcaaacttaccaacacagtactgagtttaagtgttcaccaaaaaaaacaatggatgatgatattgtaggactcggttttcgtccaacagaacaagagcttgtcaacttttacctcaaacacaagttgctcggcgatgatccccgtgtccacgtcatccctgtcattgatctttgcgatgtggaaccttggaatgtaccagccctgttgatttcaagtacttgaaaagcaaaaggtttaacaggacaaccaagtgtggattctggaaagccactgggaaagaccgtgacattaggacaggggacactgataacactgtcattgggactaagaagactcttgtttactatcaaggccgtgtttcctgtggtgtcaagtccaactgggttattcacgaatatcatgctgttacctttcatgaaaaccagaggacttttgttttatgttgcttgatgaagaaacctgggaaaacaactgaaggcggaactgatcccctgatctgtgatgaaggggagcccagcagaagcatgatttctgactatgaaaatcagccaacagcagaaggaattgcatctgaaggtacttttacaggaatagaggcaatctttcaggcaaccccttgggcagagaattgcttctccccaatacaacagtctctgactcttattgagcaggaaggagcatcctttccaaactatgcatttaacaatgcctattttagaaatgaagacaacattatgcagactccatttgaaactacaaaggaagatgaattcctaaatttaatcttagccgatgaaagtatagtgatcaatgaagaaaataagcatgattttgtcaatagctctacccaatcagagtcattgaaaagggtatactgtgaaagcagtgatacagatgctgaagtcatctctaaactggtaaagatttatcaagttcaaataatactggggagagtatctccatttgtttctgaagtggcattggatctataggttaaaattgtagtgtgcattgtggttatgtgaatgttgccacatttttgc

SEQ ID NO: 28615 - DNA, 1321 bp, Glycine max
  Clone ID: TF_GmC1823_1
ctccgcagaaaaataaaaagtaggtaaagtgcatagtagcactagctaaacagtacgtagtgatcataagcaagcatactgatgattaatatggcaaccatggaagacatgagcaacatgagtggtgaaattacacttccagggttccgattccacccaactgaagaagagcttctggatttctatctcaaaaacatggttgttggcaagaaacttcgttacgatgttattggtttcctcaacatctatcagcatgatccatgggatttgcctggtttggcaaaggttggggaaagagagtggtacttcttcgtgccaagggacaaaaaacatggaagcggtggaaggccaaaccgcaccactgaaaaagggttctggaaagccaccggttcagaccggaaaatagttaccttatctgatccaaagcgcataattgggttaaggaagaccctggttttctatcagggaagagctcctaggggatgcaagaccgattgggtcatgaatgagtaccgtttacctgacaattgcaaactacccaaggaaatcgtgttatgcaagatatatcgaaaggcaacttcgttgaaagtgctggagcaaagggcagcactagaggaagagagagagaagaagcaaatggttgataattcccctgcttctcctccttcctccacggacaccatgtcctttagcagcccacaggaagagcaaaacgtgcccttgcccttgttgcagcatgttcttaagaaagagtctgaaacaactgaagacatggtagtgtcaaaacaagaaaaaacaacgaaccaattgaccttaaaagacaccaaaagcacttgtggcacatcacttcaaatgccctttgggaaagagaagctgccagaccttcagcttcctatgctctcggattggacccaagataccttttgggctcagttgaatagtccttggctccaaaactttactcccaccaatattctaaacttctactgactccactctatgtgcatcattactcaaatataatatatcaactgcaacttaattagtcaatattacctatttattttggaatgtatatgcagtgaattagtaattaataacgtttttattatattaactcaattaactagacatgttttcatgcacatatatgttttttcctatcaagttcagtctagctggaacttgttgtcaaccctttacccctgtcccttgaagatgtttcactctttcaatgaatgttcaagaagtaaaattcatcagcagattcacagcggaagcctctcggcgggggcaacaaaaaaaaaaaaaaaaaaaaaaa

SEQ ID NO: 28616 - DNA, 740 bp, Glycine max
  unsure (1)..(740): unsure at all n locations
  Clone ID: TF_GmC1823_2
tacgggggaattcggcgtgagctccgcagaaaaataaaaaaagagtagctagcactagctagctaaacacagtacgagtagtgatcataggcaagcaaaagcatattcataatatggcaaccatggaagacatgaacaacatgagtggtgaaattacacttccaggcttccgattccacccaactgaagaagagcttcttgatttctaccttaaaaacatggttgttggcaagaaacttcgttacgatgtcattggtttcctcaacatctatcagcatgatccatgggacttgcctggtttggcaaaggttggggaaagagagtggtacttcttcgtgccaagggacaaaaagcacggaagcggaggaaggccaaaccgcacaactgaaaaagggttctggaaagccaccggttcagaccggaaaatagtgaccttatctgatccaaagcgcataattgggttaaggaagacactggttttctatcagggaagagctcctaggggatgcaagaccgattgggtcatgaatgagtaccggttacctgacaattgcaaactacctaaggaaatcgtgttatgcaagatatatcgaaaggcaacttcgttgaaagggctggagcaaagggcagcactagaggaagagagagagatgaagcanatggttgggtcccctgcttctnctttctncacggacaccatgtnctttagcagcccacaggaagagcaaacatgcccttgc

SEQ ID NO: 28617 - DNA, 1830 bp, Glycine max
  Clone ID: TF_GmC1395_1
cctcgtgccgagcaaattcttcatcagatggaatcactaacaacatttcaggacaaaccttcttcaatgctgatcttattaatagtgttaacacaaacatgaacttgaccatgaattggccagttgcaagtgaggtaattcaggttcccactcttccatcacttccatggccttctgggttgttaaatccaagtatttctgtattttctttgcttctcaaggcattgcaacttagctgccatcaacgcatagaaacccataaagtaaagaggcctttaaaagctcttattggtgatgtattgagcttactttcccagcaactcattggtacttctcatatatttgtggtgctccctcttcagtttttggtaaactaaacttcttcaattcaagggggtatcaaaatctgctggttggtttcatcaatctgatggaggaaaatctgcctcccggatttaggttccaccctacagatgaagagctcatcacatgttatcttacaaggaaggtttctgattctagcttcacatccaaagctatagcagttgttgatctcaacaagtgtgaaccttgggacctcccaggtaaggcatcaatgggaaagaaagagtggtacttttttagcttaagagatcgaaagtatccaacgggacttcgaacaaaccgagccactgaatcagggtactggaaaaccacagggaaagacaaggaaatttttcgtgctggggttttggttggaatgaagaaaaccctagtcttttataggggtagagctccaaggggcgagaaaagcaattgggtcatgcacgaatatagactagaaaacaagcatcactttggaccttcgaaggacgaatgggtggtttgcagggttttccagaagagcttgcaagtgaaaagaccacagcaaacaccctcctcacaaccagagtccccatgtgacacagcctcaatggtcaatgaatttggtgatgttgagcttcctaatctaataaataacattgcaaattcatcaggtggactcactaacaacatttcaggacaaacctgcttcaatgctgatcttattaatagtgttaacacaaatatgaacttggccatgaattggccagttgcaagtgaggtaattcaggttcccactcttccatcactcccatggccttctgggttgttaaatccaagtatttctgtaaattctttgcttctcaaggcattgcaactcaggagttatcaacaaagagaagcagcaacagatcatttaatagcatcatatgtgcctcaaggagtgtcccatgttggaactgacctaagttcaaatctcactgcctcttcttctaaagttttagaatgtatgccacagcagcaacagctggagcaaccattcaacttggactccatttggtgaatctgtttagaacatgaagctaggcattgtgtaattacatcaacaaccctccagctcccataaataaaatggtaccatttccaaacttaacacaattgctgatgttgtaaacattgctcttcagatattattgtaagtaggtgttaaaataggcagcttttaaattactgttgaaagtcctttgatgtgcaatcattaggttcgttccaagtttcatgttctagtattaagtaaattcaaaggaataatttgtatatcttgcccaatctctttgctttgtatccaacccctcattcagcatgcagttatgcatggatgtaatcatgatgacaagtgatgactatcccagtatatgaaaacaaaggatatgcatggatcatataatatttagatccatgcatgcccgtatccaaatcgatcaaaaa

SEQ ID NO: 28618 - DNA, 599 bp, Glycine max
  Clone ID: TF_uC-gmflLIB3275P064b07b1
atcttcttcttctttttcatcaatcatcaccagtggttcttttccttctgagaagatcgaattgtgttttgcaaaaatgggagttccagagaaagaccctctttcccaattgagtttgcctcctggttttcggttttaccccaccgacgaggagcttctcgttcagtatctgtgccgcaaggtcgctggccaccatttctctcttccaatcattgccgaaattgacttgtacaagttcgacccatgggttcttccaaatttgattgattaattttgcaggtaaagcgattttcggtgaaaaagagtggtactttttcagccccagagacaggaaatacccgaacgggtctcgacccaacagagtagctgggtcgggttattggaaagccaccggaaccgacaagatcatcaccaccgaaggtagaaaagttggcataaaaaaagccctcgttttctacgttggcaaagcccccaagggcaccaaaaccaattggatcatgcacgagtatcgcctcctcgactcttcccgaaagaacactggcaccaagcttgatgattgggttctgtgtcgtatatacaagaagaactcgagtgcacag

SEQ ID NO: 28619 - DNA, 357 bp, Glycine max
  Clone ID: TF_LIB3242-526-P1-J1-E10
ttcgatttctgattcttaatttttatttattaattgttactgtgttactgtacaggattggctacttatggagagaaagagtggtacttcttttcaccacgggaccggaaatacccaaacggttcgaggccgaaccgggcggctggcaccggttactggaaggcaaccggggcggataagcccattggtcagcccaaaccggttgggattaaaaaagctttggtgttttacgcagggaaagctcctaaaggggacaaaagcaattggatcatgcacgagtatcgtctcgcagacgtagatcgctccgttcgcaaaaagaacaccctaaggttggatgattgggtgctttgccgtatt

SEQ ID NO: 28620 - DNA, 1227 bp, Glycine max
  Clone ID: TF_GmC250956_1
ccacgcgtccgctcatccatagtttcctcttgtttgagtgttagcacaaattaaaaagaaaagggtcatgttggcaatggaagagctactgtgtgaacttagtgatcatgaaaagagaaacgagcaaggtctgcccccgggtttcaggtttcaccccactgatgaagaacttataaccttttacttggcttctaaggtctttaatgacactttctctaacctcaagtttgctgaggttgacctcaatagatgcgagccttgggaacttccagatgtggcaaagatgggggagagagaatggtatctgttcagcttgagggacagaaaatacccaactggactaagaacaaacagagcaaccggagctgggtactggaaagccactgggaaggacaaggaagtgtacagtgcatccagtggaaccctacttggaatgaagaagacccttgttttctacaaaggcagggcccctcgtggtgaaaagaccaaatgggtcatgcccgagtaccgtttggacgctcacttttcccttccccatacttacccctctaaggaggagtgggtgatatgcaggatttttcataaatctggggaaaagagaactccagtgctccaagtccaaggacattcagatgctttcttcgtccccaataaaaagttctttacctccattacttgcaagctcatctcattctcagctgcgagacttccaaagcccggttctgattcaccaacaagaccaaaatggcctctctcaccctcatcttttcccattggaaatctccaacgccagaaaccacccatcggacctactcttcaagcccctccagcaaaattgcaccctgaagaccaaggaacaaactattattccaaaagtgatcaaaacggaggacgctacattctatcatcaattactagatgaccataataacatgcgctgtgtgaacaagttgaatcaaaatccaagtaatttcctcaacactttccctcttgaggtggacgctggcttgatggcattctcaggagctgcaaatgctcaagctagggaaatatccacagcttcaacaccctttaatagggtagccttgcagcagatgcttgattcttggcctctgacctagcatgtttaaaatatgtgtgtatgtatatatataattactgttcgatatacagaccccctagtaattaaggtgtttgaaccatgcataatatactacatgattaatt

SEQ ID NO: 28621 - DNA, 1324 bp, Glycine max
  Clone ID: TF_GmC169_1
cgcacgagaaaaattcgcacgtgcacgatttctcacttcaactttgaacttcttttctctattattattatctttctctttttcttcatctcttatcttccttcacctttttattgaaagaaaaaaaaaatgagcaacataagcatggtagaggcaaagctgccaccaggattcaggtttcatccaagagatgaagagcttgtgtgtgattacttgatgaagaaggtgcaacacaatgattcccttctcttgatagatgttgaccttaacaagtgtgagccatgggatattcctgaaacagcatgtgttggagggaaggagtggtatttctacacacaaagagaccgtaagtatgcaacagggttacgcacaaatcgtgccactgcctcagggtattggaaggccacagggaaggacaggcctatcctccgcaagggcacccatgtagggatgaggaagactttggtgttctatcaaggaagggcacccaaagggagaaaaactgagtgggtcatgcatgagtttcgtatcgaaggacctcatggacctcctaaaatttcttcttccaaggaagattgggttttgtgtagggtgttctacaaaaacagagaagtttcagccaaacctagaatgggtagctgctatgaggacacgggatcttcaactcttcctgcgttaatggactcttacataagttttgaccaaactcaaacccatgcagatgagtttgagcaagtgccctgcttctccattttctctcagaaccaaacaagccccattttcaaccacatgaccactatggagcctaagttccctctcaaccatgcaactacaacatatggaggagcaccaaatttgggttattgcttagaccctttatcttgtgacagaaaaatgttaaaagctgttttgaatcaaatcacaaagatggaaaggaatccacttaaccaaagtctaaaagggtcaccaagcttaggagaaggaagttcagagagttatttatctgaagtggggatgccccacgtgtggaattactgatgtgagactttagtacttaaaccctctcctccacctatgccaccatgaaatttttttttttaaaaaaaaaacaagaaaaaaaaaggtataagggggaagataaaatcaatccattgttttaagtcatggtgagtacttatgttttacctgtggtgttttagctattaatgtatacccatccatgatgtgtccctatatattaggaaaatgggacttgtaatttaaacttataaatatttgtagttaattttatttagtggatgatttttttttcttctttgttaaa

SEQ ID NO: 28622 - DNA, 408 bp, Glycine max
  Clone ID: TF_jC-gmfl02220085a06a1
ggctcgagatgtgtttgcctcttgttctatgctgtcgagtacggcacaaaggcaactaggggggagtgttcaagaatttgttcattgcaaccgtgagaaatcaaccccctacacatgtatggatctagctagccaatttattaataaggcacatattgggaagcccaaaatgcaatatgtcactcggatttaggttccacccaaccgatgaggagctgattcttcactaccttattgaagaggtagcattcatacccttgagcgataccattattggtgaggatgatatctacaacgttgatccatgggacttaccacctaaggccacctttggggagaaagaaaggtatcttttcagacctagagaccgacagtacccagatggtgcaaggatcaacagggcatttt

SEQ ID NO: 28623 - DNA, 1437 bp, Glycine max
  Clone ID: TF_GmC14820_1
gcgtggactatttctctgtaagccttgctttcaattttctccttacaaaaaaatcctttcccttctctagtccccataactagcaaaagaagccaatagaaaactgttccatatagtttcccattcaagttcgctctaagctttgctttcaatcttctccttacaaaaaaaaatcctttccctctcttgtcccaataattagcaaaagaagccaacagaaaactattccatatagttttcaattcaaacttgttttgattttcattttaactcaatggagaacagaacaagctctgtactcccacctggcttcaggtttcatcccactgatgaagaactaattgtttactatctttgcaaccaagccacatcaagaccatgccctgcatcaatcatcccagaagtggatatctataagtttgatccatgggaattacctgaaaaaacagactttggagaaaaggagtggtacttctttagtccacgagagaggaagtatccaaatggggtgaggcctaatagagcaaccgtgtctgggtattggaaggccactggcacagataaagcaatctatagtgggtctaagcatgtaggggtgaagaaggctttggttttttataagggtaagccaccaaagggtctcaagacagattggattatgcatgagtatagattaattggatcaagaagacaagccaatagacaagttggatccatgaggctagacgactgggtcttgtgtaggatctacaagaagaagaacattggaaagtcaatggaggcaaaagaggaatacccaatagcccaaatcaatcttacaccagcaaacaatgacagtgaacaagaaatggtgaaatttccaaggactagttcccttactcatcttttggaaatggattacttgggtccaatatcacatatattatctgatgccacatacaattcaacctttgattttcaaattaacactgccaatggtggaatagacccgttcgtaaaaccacagccggttgaaatcccttatgcagcagattcagggaagtaccaagtgaaacaaaatagcaccatcaaccccaccatatttgtgaaccaagtgtattatcaaagaggataatgccaaaaaaaatattaaaaaaaatgaaattggattatttggacatgacgataagcgtcaccaattaaataatcctgaagattctttgtaaatatatatatatatatatatatatatataaatataagaattttcagtgatatccaatcagatagctcccatagaaattgtatatatatatatactctttgtaagaaataccattcattaagtaacacttttctcaacacttttttttatattatttagtaaaattgcacatgagtcccattattaagagtaatcaggttattcaataaaaaatctaattattgtgaaaaaaa

SEQ ID NO: 28624 - DNA, 1819 bp, Glycine max
  unsure (1)..(1819): unsure at all n locations
  Clone ID: TF_GmC195_3
cgatttctgattcttaatttttatttatttgttactgtgttactttacaggattggctacttatggagagaaagagtggtacttcttttcaccacgggaccggaaatacccaaacggttcgaggccgaaccgggcggctggcaccggttactggaaggcaaccggggcggataagcccattggtcagcccaaaccggttgggattaaaaaagctttggtgttttacgcagggaaagctcctaaaggggacaaaagcaattggatcatgcacgagtatcgtctcgcagacgtagatcgctccgttcgcaaaaagaacaccctaagggtatatacactccgtacttctttctagttcaagattattgctcgaaattacgactttgtccctacgctctcatcggctgaggataagtccaggattttggtggaaaccatgcaaaatgtatggtcgtaatatgttatcatgtgaaaactaccgcgcggaaccttcactagttgaagacttgccagcatgtggtctgggcttgggcccaagaaacttagccatcacattagatccaataaaaaaacaataattgatgcggaaagaaataaatcttctgccaatcgcaattatcactttccatttttagaaaactattccttctttatctctctcacctgcctccgattgcaatacttataataataaatgaaaatgaagaaataatcttacggtggttgtgattttttttttttttttgtcgcagttggatgattgggtgctttgccgtatttacaacaagaagggcacgatcgagaaactgcaaccaagcagcgatgttgctcatagccgaaatatcgaatcctcggagatcgaagacaggaagccggagattctgaaaagcggaggaggttgtcttccgccgcctgtgccggtgcctgcgccgccgcaagcgacggcgaattcggctcgagcttcgacccgtcggattcaatcccgaagctgcacacggactcgagctgttcggagcaggtggtatcgccggaattcgcgagcgaggtgcaaagcgagcccaagtggaacgagtgggagaaaagcctcgaatttccatttaattacgtggatgccactctcaacaacagcttcatggcccaattccagggcaataatcagatgttgtcgccgctgcaggacatgttcatgtactggcccaacaagtccttttgagcacatcatgatggttttaaattacgatccgcaattgctcttaagattttctgactcaccatgcgaccacaatcgtaatttaaaaccatgtcacataaaatccacgcgcgccgcccattcgcatttgcacggtagcacgagactcaaggtccatgagtgtgcctgtgcgaccacacacatacgattattgatcaagttagcttagctaggccaaagtaagaaagaaagaaacattgaagctggaaacgcatgtgttggctccaccgtttgctttggtattttgctatgtgatgatgacgacgacgatccaacggtgcatgtgtgttgacctgttcctagtagtagtagtagcatgtgtacagctattgtagaatgtagataggtacactactacacgttgttgtcatgtgatcatagaaaggtctctcaccgtacaaaaaaaaaaaaaagtgatagaaggtctatttgatagaccttctaattaatatatgttgaattattattagcaaaaaaaaaaaacaacgccntaggcgtgccctttgcttttctaattttctaggtctttttaaattgagtatcgtgaaagtccactgtgttactttttcattc

SEQ ID NO: 28625 - DNA, 1101 bp, Glycine max
  Clone ID: TF_GmC1826_1
caagaactaaccgtgcaacacaagctggatactggaaagctacagggaaagataggccagtgcactctcaaaagaagcaagttggcatgaagaagacattggtgtactatagaggtagagcaccacatgggattagaaccaactgggttatgcatgaataccgtttaattgaatcagttcctggtactgctctctcatctttgaaggattcctattcgctgtgtcgcattttcaagaagacgattcaaattccagccaaacctaataataacgaagaagaacaacctgagattgcaaataagaaggaatcaatgtggatctcagaagaacaaatgttaggggaagactcaagtggcactgagatttctagagaaatggaaaatgtggatgaaaaaattctcaatcatgaacaccctaaatttccttgtgatgcttcttcctctgatctcactcaaggagcatgtacacccacagataccggcatagcagaagattttcaaccacaatttgcatgtgatgaagcaaacagtgcagctaattcatatacaatgggaataggatactccacaaatatatttcaggatgtagaaatgcctagctatgctgacatgcattatcaactcccatacacacctttggtgatggaagatttcccacaaataaatttaccagagacaaagacaacgaagccagaagtcaccgatgactgcatgttatatgacagatacagggactgcatgaatggaacactagaagagatcatctctttgtgttgcactcaagataattccgtcccttttcctatgctagaatgattacactaaccaagatgactcaaactatagcatcaaaatattcattagacacagagaaacttgtgttggctaaaataacgacacaaatgggggattgtttttccagccacatagaaaaggctacacatataatgtactaaacatatagtagaatatgctgagccaaggggggctcgcatacaattggttttcaatttttttttgttttatcttttttcattctgtgttcttcgttttttgtaggggttgttcttcctacttttataggagttcttccttcttttaa

SEQ ID NO: 28626 - DNA, 1732 bp, Glycine max
  Clone ID: TF_GmC434_2
gaaacacagtgagttaagtgttcacaaaaaacaatggatgatattgtaggatacggttttcgtccaacagatgaagagcttgtgaagttctacctcaaacacaagttgctcgatgatgatccctgtgtccacttcatcctcgacgttgacctttgtgaagtggaaccttgggacttaccattgttattagcagattcagctgtgcgattcaatgaccctgaatggttcttcttcagtcctgtcgattacaagtattcaaatagtaaaaggtttaacaggacaaccaagtgtggattctggaaacccactggaaaagaccgtggcattaggacaggggacactgataacactgtcattgggactaagaagactcttgtttactatcaaggccgtgtttcctgtggtgtcaagtccaactgggttattcacgaatatcatgctgttacctttcatgaaaaccagaggacttttgttttatgttgcttgatgaagaaacctgggaaaacaactgaaggcggaactgatcccctgatctgtgatgaaggggagcccagcagaagcatggtttctgactatgaaaatcagccaacagcagaaggaattgcatctgaaggtacttttacaggaatagaggcaatctttcaggcaaccccttgggcagagaattgcttctccccaatacaacagtctccgactcttattgagcaggaaggagcatcctttccaaactatgcatttaacaatgcctattttagaaatgaagacaacattatgcagactccatttgaaactacaaaggaagatgaattcctaaatttaatcttagccgatgaaagtatagtgatcaatgaagaaaataagcatgattttgtcaatagctctacccaatcagagtcattgaaaagggtatactgtgaaagcagtgatacagatgctgaagtcatctctaaactggatgacaatattgtggatatttcaacagcatgtaatgattatcctaattcagatgaatactattcatcaaaaaggtttaaatcatcacatgatgctgtccatggtggaatatgttttctaccttctaaccttgaagcaaaccaagagaaaaacgagagtatgtttcaagatagtttctggggagcagagacatcatcttgtgactcgacactagataaacctttggagatcaattatattgatatttctagttctcctttcactccatggagatgagaaaattaatatcattgaagaccagtcaatttcgtatgatgggaactaagatctaagttagctccattagattggtagtagctattttggagtatgtcataaaatatgactagttctacaatagcaaatttattagaaaacaattctgtattagaaattgcataatggtagttatgcataaaaaataactatgggcagttatgtattaagatttaggagcttatatcctaacagtaaatctattagaaagtattaaaaactgcatgatagcagttatgcatagaaaacagccactagtagttatgtattaagagcatatatgtgatggtattagtagattgtgtaattaggaagtatgtgtagttgtttgcagtttatggacagagaatactctatgtaggagacttttgtctctaggacaacaagtgtattttgtatcaatgtattttgtgtgattttagtatttcaataatatatttcattagtttttggagggtgaaaa

SEQ ID NO: 28627 - DNA, 2324 bp, Glycine max
  Clone ID: TF_GmC627_1
atgccaagaaccaccttattaaggcccacgaaattagccaccgcccaacccttaaatcttgccaattttccatcaaggtttaatcctagacaatcctaagtcaacctttgtgcaatgaatgttcatatcatgaatggtaagttgagcttagcgcagaaactaaaaggtgcttttaagaatgacgtagttctaagaggttcaagttgttcacaactttgtgggcatcaacactctcatgtattacagcctaaccattgttcagtttgctggaattgcctccaactccacaggtcttgcactctctcttattacatctggtctaaatgcgcttggcactatcttgagtatggttttcattgatagatatggaaggagaagactcatactggtttccatggttgggatcattgttttcctcgttgtttcaagtgctatatttttacctggcagtgcaaaatgctccttggaatagtaaccatgacaccttggcttttggtcgaaactctacttgcgaggcttacccaactgcccttattctctcttcatggaacttcatgcaatgcttacaggaagattgtgccttctatgccaacagtgataatcaagtatataataagttaacttcttccaacctcctcttatcatttccttaacccgctctcatcatcactaattaacttacataaatatgtcctcatgcatgtaccagaaattattatatggttcacaagtaccatgatatgactaatttccatataatatataattgagtttttttttaaaaacgaaaactagaattgagaaactcactatatattatatagagattagtcgcgaccataaacacgtaatgatttgagactatctaatatagtaatttctcttactaagaatttgtatagattatgtatttctcctaccatctaccatgcttacagcaaagtatccatgaaggaatatatcaaaaacattacatatttcttttatttgctcttcctgtccagttttttgtatcatgcactttctagtttttagatgtttgctaccagttcttttattgcttttcttgttactaattaatggcttatactttattgcaatttcccctaaggcatttaaacataaacatttggcaggttcgtcggttccattttctccattagagaagcaaacccctcgttcttggtcaataattgagccaagtcccttcagagtcagaggcaaaaactactttaggtaggcaccaacttcgtattttgtactaaacatttatgggtcgatgattgaacctgttgttagggatgtccctcatatacaagtcattcgttatgttaacaatgaagcactgttccatttttgatgattccataatttatttgttgcatggttgtcagggataagaagaaagattttgcaccgggcaatgctgctttttatcctcttggtgctgacctatttttgtctttgcaagaaattgatcatattgctagctttgtacaaattcagtaggaagccaacatagctatgccacatagctatatataaaattaagatatatactccctgcaatgattttgatgtaaaattaacatacttatttttttctttcaatcttgacaacaaatagttcaattaaaatcagcttggtttctggaaatcatgcaactacagaatatgatgcacgagtcatttcagttttatatatgattactttccttcgtatttatgtaaaattaaacacacaagcacatctttgcagtgttggtgcaatattatttgatcttcttacaagaacaaccccaacaaatggaaataatcaaatacatgtatagaatttatattagtgcctttttctttgtagtgtattgagtattctttcaatggtaacaaagtagttctttcaaccaaaatgaagggtcatgtgttgtttcttttacttgttatgctttgattttattgaagattgaaatttcacacataaatgaagggtcaatctataagccaatttaacatattcaacaccatcatgaaagagtgtgtaccctggaataggccaatctttagctaattgtggggtattctgaatcaaagtaggtttactcatttgtaattgctagctattatttcaattcaaaataaaatggggtaattgtgggggtattcttccataagctctcataagtcataaacaactttttattattaagtattacctcaatgaaccagtatcttgagcctgcagccttgtttggcctcaatccatttggatttttcctgtctcttgggctaaagaaataccattgagccttaatgacttatttgcc

SEQ ID NO: 28628 - DNA, 831 bp, Glycine max
  Clone ID: TF_GmC217080_1
accagaaaaaacggctgatccatccgtccgctacaccttctcaggaatcacataaccacttcaatcatcataaactccacatgcccttcttccacgcttctcttcttcttgttcaaaacttttaaggtcatatatctctttgaaagcagcttccacttttttctagttgtgttgttggttgaaatttcttttagggggaaaggatctctcactttctctctctttctttttccatattaataattaagagggttatattagaacaagatatatagctaggtttagatatgatggaagagagaaataataatgatgctgctgagaaactggatgaagttatgctaccagggtttaggtttcatccaactgatgaggagcttgtagggttttacctcaagagaaagattcaacaacgccctttgactattgagctcatcaagcagcttgatatctacaaatttgacccttgggatcttccaaagttggccaccacaggagaaaaagagtggtatttctactgtcccagggacagaaaatacagaaacagtgcaaggcctaatagggtaactggagctgggttctggaaagctacagggactgataggcctatctactcctcagaaggttcaaagtgcattggcctcaagaaatccctagtcttttacaaaggtagagctgccaaaggagtcaaaactgattggatgatgcatgagttcaggctaccttctctcactgactcactatctccaaagtacatagaccagatcaccattcctgctaatgaatcttgggctatctgcaggatattcaagaaaccaatgctacagctca

SEQ ID NO: 28629 - DNA, 1455 bp, Glycine max
  Clone ID: TF_GmC415_1
aggagccaaattggtattatcgcacttattgattcccttggtctctccttttgtcaagaacaaagtattttctttgatggagggagatcaacatggctctaattactcttttccacctggctttagattccacccttccgatgaagaactcatagttcattacttggaaaacaaagtcagttcacgtccacttccagcttgcattattgctgaaattgatctctataagtataacccgtgggagctaccgaataagtccttgtttggagaggaagaatggtatttctttagcccgagagacaggaagtacccgaatggattgaggccaaacagggctgcagcctcaggatactggaaggcaactggaactgacaagccaattctttcttcttgcggatcgaggcgcataggtgtgaagaaagctctggtgttttattcaggtcgacctcctaagggtgctaagacagattggatcatgaatgagtataggttggttgacacaaccatcaaatcctcaaggctaaaaggctccatgagattggatgactgggtactatgccgggttcgatataaaggctactctcagaagaattcatgtgaaaatcaagagagtcctagtgaactaaacttgtcagcaaaactactgaggagtgaagaaaacccaacaaaaatgaactgtcgggctgacatgatccctgattatcaatataaagactatcaaatcatagcctctattcttgttggtggacctattcctcccattgaaagcatgccaaatctgagctttaagggttgcaaaggcaacaatgtagtttcagattatgaagatggtttcactaaagggaattctcaaacgacaattccttcattggaaagttacttcaacccactgacaagaaaatccaatgaagatgaacagtatggaaatctcatttctttcaacaggaagttcaacactgataacagaatggacggatctactagcaaagtgttgaacagtagagaattgaattgctacaaccaaaaccattctcaagatgacattttcaatgggaacccaccagatcctaccatcaattttcaagagctaaacgaattagacttttcaggaaggtaccatcagtgatgaaggtatttattataagacagtcaacgtccctttacttcacaggtagattttcatggattatacaacttaagacgtaggagaaacctgaaggataatgggccctattccggcgaattattgctgtatttctttatgcatagtcaacatggggcaatagctacatatagaagtttccatgcattcatgaaattccttgtaaacaatgccccggccaactagcttcttgagcgtgccctgtgtcagttcaactagaactttatcctacctagtaattataacgtgtaaatacaatttgtattctgtatttctgcaacttacaggagtta

SEQ ID NO: 28630 - DNA, 1429 bp, Glycine max
  Clone ID: TF_GmC1307_1
ctctcgagccgaatcggctcgagcttcaaatcgattaagttcatagagagaattgaaatatctatttggtaagtgattgagagtttgaatttgtagataataagatgggttcgtcgactaatggtggtgtgccgccagggtttagatttcatccaacggatgaagagctgcttcattactacttgaagaagaaggtgtcctttcagaagtttgacatggatgtcattagagaggtcgacttgaacaagatggagccttgggacttgcaagaaagatgtagaattggatctactccacaaaacgagtggtatttcttcagtcacaaggatagaaagtaccctacaggttcaaggactaatagagcaacgaacgcagggttttggaaagcaacaggaagagacaagtgcattaggaatagcttcaagaagattggaatgagaaaaacccttgtgttttacaaaggaagagctcctcatggacaaaagactgattggatcatgcatgagtaccgcctagaagatggcaatgatcctcaaggaagtgccaatgaagatggctgggtggtgtgcagagtgttcaagaagaagaatttattcaagattgaaaatgaaggtgggtctacacataaaccagatcaccaaatcaacaattcttcaaacactaatgcacggtcctatagagaaaatcactacttactacatcaacagcaaaatcctaggaactcatcagggcttgagcttgataagcctgagctggctctccattacccgccgccacacttgcaaaaccctccatactcactcttccaatcccagcctcttcttcagacccaaaagcctatggtttatgattattcatatacatcagacacccctatcatggcaaagcaactcatgacaaaccctagagactgtgagagcggcagtgatggcctaagatatcaagtttcggagtcaggtatggaagttgggtcgtgtgaaccaaatcaagaaatgggaaccggaagaggtgaaggaataaacgaatggggtgttcttgataggctagtgacctctcatcttgctggaaatgaggactcatccaaaggggtcaggtttgaagaggcaaatccacagtctgtccaccagatcaatcaactttcattgaggggagagatggacttctgggcctatggaaaacaatgattaatttccctttattatagtgaaatttataaacaaattaagtgcattcaaggttggagataattacaaaggctctaaccattttaaaaaggacatatattttgatactgatcgatttaagattgtttgttatgtttttcacttgattagaagacttcattagttgtaatatttcaatccattgtttgtcaagtaccatagtgtcaattgaaaaaaaaatgcaattattgattgtatgataaaaa

SEQ ID NO: 28631 - DNA, 798 bp, Glycine max
  unsure (1)..(798): unsure at all n locations
  Clone ID: TF_GmC424_4
tacggctgcgagaagacgacagaagggggaaaaaaaaaaacattttcatcagcttcttcttctttttcatcaatcatcaccagtggttcttttccttctgagaagatcgaattgtgttttgcaaaaatgggagttccagagaaagaccctctttcccaattgagtttgcctcctggttttcggttttaccccaccgacgaggagcttctcgttcagtatctgtgccgcaaggtcgctggccaccatttctctcttccaatcattgccgaaattgacttgtacaagttcgacccatgggttcttccaagtaaagcgattttcggtgaaaaagagtggtactttttcagccccagagacaggaaatacccgaacgggtctcgacccaacagagtagctgggtcgggttattggaaagccaccggaaccgacaagatcatcaccaccgaaggtagaaaagttggcataaaaaaagccctcgttttctacgttggcaaagcccccaagggcaccaaaaccaattggatcatgcacgagtatcgcctcctcgactcttcccgaaagaacactggcaccaagcttgatgattgggttctgtgtcgtatatacaagaagaactcgagtgcacagaagacggcgcacaacggcgtggttccgagcaacgagcacactcaatacagcaacggttcctcttcttcttcttcgtcccagctgggagacgttctggaatctctgccatcgattgatgaaaggtgtttcgcgatgccacgcgtcaacacgctgncacaacacagcaccacg

SEQ ID NO: 28632 - DNA, 1915 bp, Glycine max
  unsure (1)..(1915): unsure at all n locations
  Clone ID: TF_GmC363_1
cccacgcgtccgcccacgcgtccgatttagtgctgcgtactaagtttttggtttcatcagatccacaccggaattctattcagactctatacatagttacatcgatcctcgcggggagagccaaataacgagatacacaggttttaattctttgagagcggaaatggatacattttcacatgtaccaccaggctttcggtttcatccaaccgatgaagagctcgttggttactaccttaggaaaaaggtagcgtctaaaaggattgatctagatgtgatcaaagatgtcgatctctataaaattgaaccatgggatctccaagaactatgcaaaataggaaccgatgaacaaagtgactggtacttcttcagtcataaagataagaaatatccaactggaactcgcaccaatagagctacaaaagcaggattctggaaagccacgggaagagacaaggcaatatactctaagcattgcctcattggcatgagaaagactctcgtgttttacaaaggacgagccccaaatggacagaagtctgattggatcatgcatgagtacagactagaaactaatgaaaatggaacttctcaggaagaaggctgggttgtgtgtagagtgttcaagaagaggatgacaacaacgcagaaagtgggagagtatgatcaatcaccctgttggtacgatgagcaagtttccttcatgcaagatcttgaatccccaaggcgcaatatttctcagacttatgcatcataccaccatcaccaacaacagcaccaccaccatccctgcaagcctgagctcatggaattgcaatacaacaacattccccacgatgcattcctccaacttccgcaactcgaaagccccaaagttactcaatcatcatgctcagttgtcccttatggctatgaaagcaacaacaacaacaatggaagcaccttgcaattctcatcactcactcaggaagaacagctacaatattgcaataatcaacaaagtcaccattctctctatggtagcaatgatcatgcagttgaccaggtcacagattggcgtgtgcttgacaagtttgttgcttctcagctcagtcacaacaaccaagatgtttccaaggaaaccagttattccaatgcacctatcttccatgtggctgaacaaatttctgtggctgcaaatggatccaaaaaggagcaagtttctcaggagtatgcttcaacgtctacctccagttaccagattgacctgtggaagtgaatttttatatatatatatatatatatagtaactataaataagatacgatgcataataccaattataggaagtacgtacaagtgaatgttggaaaaaaaagaccatagtgttgttgctacgtgttgttgtacataagaagcctaaaatgttttatatatcattagttgttgaacctcttgaggctggagtatatggactgaaaatgtatccattagttgcaattcttcagttgcaaaagacacgcctatatacagcaaacagattggtgcttcaaggtcaactcgatctacagcaagaagtgatctatatgatgggaagagttctatgaattaatgttacaggtgatttgttcactacagcttaatgttgcatttattataaaagttacatatgttttcagtttgtatttgaaatagccaattacttggatatatgattggatctaccagaagtttaagaatggagggatgagatttgagaatctaaactaagcatgcttctgatatatcgttcctccactgtgccagtttagaattgactgtaatatggccttttctgcaagcgttcaatttctgtatagcncataagatgtgaaatttcaaacaccaagttaaagagattataaatcactgaaattgactgaaaatcattaacttt

SEQ ID NO: 28633 - DNA, 1109 bp, Glycine max
  unsure (1)..(1109): unsure at all n locations
  Clone ID: TF_GmC111_1
catgaatctcatacatgcaaatttagaagatcgagtttctctatgtaataataaaagatatatgaaacattaattaatattccgggaagaattacaggtgtaagaaaagatgggcaaatccgccacttctttcacaggccatctaaagcatacacaaccggaacaaggaaaagaagaaaggttcacactgataaagaaggaagcgagacaaggtggcacaaaacaggaaaaacaagaccagttttcgtaggtggtgctgtgaagggtttcaagaaaatccttgtcctctacaccaactatggaagacaacagaagcccgagaagaccaattgggtgatgcatcaataccaccttggtactagcgaagaagagaaagatggagagttggtggtttcaaagattttctaccaaacacaacctcgacaatgtggtaataattccattataaagcaggatctttatgatgaagaaagattgatgtctaaccaaattagtgtccataatgatgatgacaataatataatacctagaagtaataatgcaagtgctctcatggactactacaatccttctttcataaattatgaccaattaggtggtcgtagtaatagggaaagttcagctcaacttattccaaatttggccatgcaaggtgatagctcttctttcattcgattagcaatggatgcaaccaaagccatgctggacagaaaatagctccaattgatgaaagaactttcttggtagaattctatagtagtgacaatgaccatatattgatgttgatgttttttatattaatttcaatatacgtaatagcatgtatttattctatatatgggatgataaggtgaaagaaataataagacatgacttttattattattattataattattattattattattattattaatatatatgtgtgtcgaggattacccatttgacgaccctggttgcaattgagaggagataaccggttgttcccggtactgtggtgttnttatcttagagtttaagtgtaccaggtaaattntgtaaaatctgttcaccatgtgattctnatatgtcaaaattatgcagaagtatgtttgttttaaagttca

SEQ ID NO: 28634 - DNA, 899 bp, Glycine max
  Clone ID: TF_GmC806574_1
ctatttgcttcaatgggagataacaatgtcaaccttccacccgggtttcgattttatcccacagatgaagagcttgtggtccatttccttcacagaaaggcatctcttttaccttgccacccagatgtcatccctgatcttgaggtctacccatatgatccatgggaacttgatggtagagctttagcagaggggaaccaatggtactactacagcagaaggacacaaaatagggtcactggaaatgggtattggaaaccaacgggaatagaagaaccagtggtttcaagcacaagcaacaagagagttggcatgaagaaatattttgtgttccatgtgggagaagcccctgctgctggtatcaaaaccaattggataatgcaagaatatcgtctatcagattcttcttcctctaccagatcatccaaaagaaaatcacaaccaaaaatagtcagtatacatattttcatacataatcaggaagcacatcaaacatgaactcttcttatagtaagaaatgagaattaaaaatataaactattagctaatacataagtgattaaaattaaaaaaatacatataacttttttaaaatagctagtcgtgtgaacagttaccactgacgtatattcgagttggaaaactattgtacaacacattgatttgattgctgattttatttttccttttgtgtttgattcaggaatacaataaatgggtgatatgtcgtgtttatgagcgcaatggcgacgatgataatggaacagagctgtcgtgcttggatgaagtattcttgtcattggatgatgatcttgatgaaattagcttaccaaattattagctattaatgcaagtgatctagctagctagccgcagtatacaactggataattaattaa

SEQ ID NO: 28635 - DNA, 760 bp, Glycine max
  Clone ID: TF_GmC56379_1
gcgaaggaaagcccggaattcggctcgagaaagaacataaatagtatatacgagtcctagtttcatataatagttccatataacaaacattatggaagaagattatccacccgggtttcgtttcttcccaacagaagaagagcttgttggcttctacctacacaacaagctagaaggccaaagaaatgccatagccatagccatagacagagttatcccagttattgacatcaatggagttgagccttggaaccttccaacacttgctggggagctttgtcgtggggacacggagcaatggtttttcttttcgcccggtcaagagagggaaaccaggggaggcagacccagcagaaccacagcttgtgggtattggaaggctacaggttctccttgctatgtttactcttctcacaacaaagtcattggggtgaagaaatccatggtcttctacaaaggaaaagcacctatgggaacaaaaaccaaatggaagatgaatgaatacagagccatccatgtcccttcccaatccacccctgccacccttcatttgacatgtgaattcagcttgtgtcgggtatatgtcatatcggggagctttcgagcatttgatcgacgaccattagagaaagaaggagcagagtcgcgggttcatagaattgagaatattttgggtggggcacgtgctcaccaaacttgccctcactctcagatgctagaagctggagaatcaagtagcacaaagtgggatgtgaataat

SEQ ID NO: 28636 - DNA, 785 bp, Glycine max
  Clone ID: TF_GmC130308_1
taggtagtagtagttgtagcccctgcctgagattaactatatactagttgttagttacttacttacatacatagagatagagtcaatggcaattgcagctgcaaactcatcacccaccatgagcctcagccatagccagagccaagaggatgccaccaccgcctccaccaccaacaagcccgtcgacgtcgacgataatgatgatcacgagcacgacatggtcatgcccggctttcgcttccacccaactgaagaagagctcgtggaattctaccttcgccgtaaggtggagggaaagcgtttcaacgttgagcttattactttcctcgatctttatcgctatgacccttgggagcttcccgccttggcagctattggtgagaaggagtggtacttctatgtgcccagagataggaagtatcgcaacggtgatcgtcccaatcgtgttactacctctgggtattggaaggcaacaggagctgataggatgatccgaaccgagaattttcgctctatcggcctcaagaaaaccctagttttctattctgggaaagctcctaaaggcatacgaaccagttggattatgaacgagtatcgcttgccgcaacatgaaactgaacgatatcaaaaggctgagatatcgctttgccgtgtgtacaagagagctggagtggaggaccatccttccctccctcgctgcctcccaacgaggccatcctcgtcaagggcttctcatgacaataataagaagcacaatgaaatggttcagcacaacatcaacatgg

SEQ ID NO: 28637 - DNA, 1425 bp, Glycine max
  unsure (1)..(1425): unsure at all n locations
  Clone ID: TF_GmC1131_1
agccggaantggctcgaggtaagcaactgcttaatttattgatcaaacgtacagctcctaattttcaagtatttttctttctcttcttgaagaattaagaagaaagtttttgtagttaatttttctccaaaggaaggaaaaggaagcaattatcaaggaggggactacggaaatagaaatggaaggaactcgtgcaaaagagggaaccctaccaccgggatttcgatttcaccctactgatgaagaacttgtcacttgctatctcgtaaataagatatcagattctaattttacaggcagagcaataactgatgttgatctcaacaaatgtgagccatgggagcttccagggaaagcaaagatgggagaaaaagaatggtacttcttcagtctgagagaccgtaaatacccaacgggtgtgagaacaaatcgagcaactaacaccgggtattggaagaccacagggaaagacaaggagatcttcaacagtgaaacatcggagttgattggcatgaagaagactttagttttctacaaaggcagagctcccagaggagaaaaaagcaactgggtcatgcatgaataccgcattcactcaaaatccagctatagaactaacaggcaggatgaatgggtggtttgccgggtattcaagaagagcggtggtgcaaagaagtaccattcctccaaccatgcaagaacagtgaatccatacagcttggaaattggaccaagtatcatgccaccaccaatgatgcaactgggagatcctagtgctcatttcctttatggaagaaactacatgaacagtgctgagttagctgaacttgctagggttttaagagggggtggatcaaccagtagtgtcaacctcccaattcagtctcagttgagctaccctacatcatcatcagctggaggaggaggattcatcatttcagggctcaatttgaaccttggaggaggagcaacagccacaacacaacccattttaaggccaatgcaaccttctcctcctgtccatacaatggcccaagtacttgatgtgaattccagcatgatgacaaccagttctcttggtgctgagaataatgttggttatggaacagaagtgagtaacaatatgaattctcatgggaataggtatatgggcatggaccaccattgcatggatcttgacaactattggccttcctactaaattatgatgagagatttttatttagttaattaggcataatctattactatatatttagctttagttggatcagctaccataaaattgaagttctgctattttcttgtgtttcgaagttttatgccggaaaatgacgaccggtatggtattctagtgatcgtgtaccttttcaatccaataatattttaaatgtttgtttatcgattaaaaaaaaaaacgaaaaa

SEQ ID NO: 28638 - DNA, 204 bp, Glycine max
  Clone ID: TF_LIB3242-679-P1-J1-C10-F1A
aattcggctcgagcaataataataactgcattgttgcctctggcttccccccctgctctacacaaaaatatatgtattagcatgtgagaaggtgaatttttgtgaagaatggagagcttatattgcctccggtgtttcgatttcaccctactgatgaggagctgtttttgtaatacttgaagcgcaaggtatcttactgtcctg

SEQ ID NO: 28639 - DNA, 1526 bp, Glycine max
  Clone ID: TF_GmC1474_1
ctcatatccctcaaggtttggcttgtgcctttgtgtgctcatttttcactaaacaccaacccaaaccttatacacaaacattcttaattttgatatttttgtttatatattctaggtttttgttaattaattatattaagcatcatgggaaccccacaatccaataacttgccaccagggtttaggttccaccctacagatgaagagctcattcttcactacctaaggaagaaggttgcctccattcctttgccagttgccatcattgctgaggttgatatctacaagtttgatccatgggagctaccagctaaggccgcgtttggggagaaagagtggtacttcttcagtcctagagaccggaagtacccaaatggagcgaggccaaacagggcagcagcttcagggtattggaaggccacaggcactgataagaacatagtggcatcactggcaggaggagtgagggagcactttggtgtgaagaaggctttggtgttctacaaaggaaaacccccaaagggtgtcaaaaccaattggatcatgcatgaatatcgccttgttgacaccaatagacccattaggatcaaagacacctccatgaggttggatgactgggttctatgccggatatacaagaagttcaagcatgctgtatctccaaccacagaggcagcatcaacactgcaagtgatcaatgagcaattagatcaagcagtggtagaagaagaggagcaaatcaaagacacccttttaccaattttgaagaataacaacacttttgtccctcctccacaagccacaatactcatgtctcagaaatccttatccttctcaaatctcttggatgccacagactactccatgcttagcaccatcttatctgagaaccactccaataattaccctactccaagtgaaaccagcttattcaataattgtgagaatctggatcaggaaattaccccccaaaactactacatcaacgatactaatagtattaataataatagctacttgtttcagaagaacccttccaacatggaaaacattgctaggccaaaacgccaccttccaaacatggatcatgaggacaacatgttattataccctttaaagaaatatcatagttcctcttgcaatttccccaacaccaacctccaaaaccagaatccacaatggaacttcatgttcaagcagccactcatgagtcctcaatatcttcaatttcagtgataaatagcaaacaattatacgagtcacataaagaaaagaagaaaaaaaggttagggagaaaataaaaatgaaaaaaaaaggtgaaatatctacaagatgaatgtgctacatggtatccacatcaacctgttcactacgtaaggattagcacacagaaagatagcattttttttctttttcttttatgttgaaaaatgatgaaaagagacttcattggatcatgaactattacggaatcacagaaaaatcgtgtacaaataaaaatgttaatttgtacgtgttgggttggg

SEQ ID NO: 28640 - DNA, 417 bp, Glycine max
  Clone ID: TF_LIB3051-059-Q1-K2-D5
cccacgcgtccgcacaatcccaaattcccaattctctcttccttctccacaccaattggcaaaaccctaacccccaaattctccttcagcgattcatctctcttgaatcgaatcgatggcacggatgggcccagggttccgattccaccccaccgacgaagagctggtggtgttctacctgaagcgcaagatgaccggaaacctctcccgctacgaccacatcgccgttgtcgacgtctacaagctcgagccctgggaccttccccgttagcacccaattatcttcttccttccccttttttgtggtctcaatagataggcttttgagaattttggaagtgttttaatttgtttcggtgtttcagctctgtcgaagctgaagacgaaggacttggaatggtacttcttcagcgcgct

SEQ ID NO: 28641 - DNA, 2064 bp, Glycine max
  Clone ID: TF_GmC6673_1
tcgaagtcgcctcgaaaaatttctccttgtttgtacggcacacaagtgagatcaaagatggaaaatatgccaccaggttatcgtttctaccccacagaagaggagctgatttcgttctatcttcacaacaagcttgaaggagaaagggaagacatgaatcgagttattccagtcgttgatatatacgactacaacccatctgaactcccacgtaaaaatcttatatatatatatatatatacatatatatttccctcatctccctctttctcttttcatttttctaatttttttttcctttcaatcaaaatcgagcttgacttgaaagctatggtacaagttgatttattgcatatatatagaagcaaagcacattctggataatttaaggttacatacttttcttttaatttttcttaatgactgtaataccgtaaatgctgttgatatattattattctgtgatcaagattggagaaaaggatatacagtccttttggcttcatgaagattgctcataaaattaatattgatagatatatagatatacactagttttgcgtaactgactggtatatttgatattaaacatgatttactgaaacaaagatatagatgcattgatatatttttatttggtgttgaattgcagaaatttcaggagaggcaagtatgagagacacggagcaatggttttttttcattccgaggcaagagagtgaagcgagaggagggagaccaaagcgtctcacaactacagggtactggaaggcaacagggtctcctaatcatgtttattcttcggataatcgcatcatcggaattaaaaggactatggttttctatagtggaagagctccaaacggaaccaaaaccgattggaagatgaatgagtacactgccatcaaaacatcatcctctagtcccacggtaccttatatttactatacgtgtgtctaagaattagggttggctacattttaattagttgcctattaatttaatttgttaaatcttcaaggtttatcttctctactctccatattctcttcttccttcttctcaaatatcagaatttgagcacccttctgaacaaaaaaataaaataaaaattgagcatttttatttcttacgaatgcattgacacagaggcatttcactgaattttatcaactaataaaataataaaaaccaaaataaattgtgctcgatcgtgatatttcataagtatttcgtacgaaactaactcgtacattaaaaaaattgatcatagtactcaatattattctcagtcgataattaacttacaattaatcaaccattcagtcagaacaattaggtttgaattatatagtatatactatatatatagcatggaatttcatggatgcagtgcaattttaaatatttgttacgtgacagtgcagttttatatatatatattgtatacagatcatatatagttgcacttcttaatataactaaccttctgattctactatatattaattgcagctaaggaaggaattcaatttatgcagagtgtacaaaaaatcaaagtgtttgacagcatttgatagacgaccaccgccaaggagggacacagaaagctattcgggtgctcaaaatgtagaagagcaacaaaagggttcaacatcatatgatgattatcatcataaaatggtggagagaagtgcaacgtgttcaccagcagagagctcttcctccggagaccatgaccaaccccctcttcacggtgaggaagctactcaaatggatgttgacaacaacgatgacccttttttggattgggagaaagtggatatgttcttgggatcagaaccatgaacacatccaatccaatctatctgtgctttgttggtatgctacaacaaagttgactctcaagtctcagctacaccgatgactgaataagtagtaggttatgttaattaattgtgtatgtcgcaccgcatgcagaacaactactttaaatatttgttagatttcttgctagctttataaagttgtgtatagtggctaatttgtctgataaattatcac

SEQ ID NO: 28642 - DNA, 377 bp, Glycine max
  Clone ID: TF_7685641
agcttgttgatttttatctcaagagaaaaattcagcagaagtctcttcctattgaactcattaagcaagtggatatttacaaatatgatccatgggaccttccaaagctggcaggtactggggagaaagagtggtatttctactgtccaagggacagaaaatacaggaacagtgcacgtccaaatagagtcacaagagctgggttttggaaggccactggaactgacaggcctatatattcctctgaaggaaagtgcattggtttgaagaagtctcttgtgttctacagaggaagagctgctaaaggaatgaaaactgactggatgatgcatgagtttaggcttccttgcatatcagactcatgccctgccaaaaaa

SEQ ID NO: 28643 - DNA, 226 bp, Glycine max
  Clone ID: TF_uC-gmrominsoy158g10b1
ttgtttttacacacttttactctttagtttctgcaagatgctttttcaattctcaacagtggccactacaacataactttacttaccccctggattcagattccatccaacagatgaagaacctcttcatccacgtatcttcgttgcaaatgcgcttcggaacatatttgtgggtgccataaccgtcgaaattgatctgttcatgtaccacccttgggaccttcca

SEQ ID NO: 28644 - DNA, 383 bp, Glycine max
  unsure (1)..(383): unsure at all n locations
  Clone ID: TF_jC-gmle01810075f03a1
agaaacagcgtgctcctatctgatactcaaaaaccaggattaangttttcggcacgcttccgaatgctaggaattcgtttcgaggagagaccctcttgcacatttgagttttcctcctgggtttaggttttaccccacaggtgatgatcttttggttcagtacctttgccgcaatgtttttggccctcatttctctctttcaatcattgctgaaattgatttttacaagtttgttccatcccctcttccatttaaggccgcgtttggggggaaggagtgctatttttaaaggccaagattcaggatttacccttttgttttacgcccaaacagtcaacgtgatttctgttttttgtaaagacccctgatatcagacttttatt

SEQ ID NO: 28645 - DNA, 145 bp, Glycine max
  Clone ID: TF_11412668
tcaattgcccccatgcttctaatttcatccaactgaccataatctggtgttacactatctctgccgattatgcgcatcgcagtctattgacgttcccctcatcactgaaatctacctatacatatactacacttggaacttacct

SEQ ID NO: 28646 - DNA, 247 bp, Glycine max
  Clone ID: TF_LIB3093-046-Q1-K1-A1
tatgctttcaagttttaccaattgggcactttgaatagtgtcgtcattaatgctttcatggtcatcaattaaaccccctaaacagcatttatcttgctagccaaattacttattaattaggcacataatgttaaacccataatcctatttgtcacctgattttaggttccaccctaccgattatgaactcattcttcactaccttagtaaaaaggtatcatccatacccttgctctattccatcatt

SEQ ID NO: 28647 - DNA, 505 bp, Glycine max
  Clone ID: TF_uC-gmflminsoy078f11b1
ttagatttggctttgtgtctttgtgtgctcatttttcactaaacaccaacccaacctcatacacaaacattcttaattttgattttttgttattattttctttgtttgttaattacttatattaagcatcatgggaaccccacaatccaataacttgccaccaggttttaggttccaccctacagatgaagagctcattcttcactacctaaggaagaaggttgcctctattcctttgccagtttccatcatagctgaggttgatatctacaagtttgatccatgggagctaccaggtttgtctacgtttaaataagatctatattcttttttatattttaaaacttataaagataagaattgctttaatatctagaaaaaaattatggattttgatataattaattttagaaagattggacactctagaaaagtttttcaataatagcattaaaatctttaaattttctatcatgtcatagaatttctcttaagatataccatg

SEQ ID NO: 28648 - DNA, 648 bp, Glycine max
  Clone ID: TF_jC-gmro02910073d08a1
tgactttatgcacactacctagctcggaattcggctcggctctcttctgctctatttttcgtttctgactcagcctttcgaatcctctcacccagaggtacgattcgtaccatgtagttgtgggatttcggctttgccacttcttgattccaataattttggtttctttttttcccctaatttgatttccccagttagggtttttaactctattcgatcggcgatttcgaatactcggaggctcgaatcgtgttgggggttttccgttttgattaaaaaagtttccgtttttggtgttgggtgatcaagggttgtttgattttttcttgcgatcgagaatgggtgaggcttcgggagctggttccgctgattgtttcagccagatgatgtcgtcgatgccgggttttcgcttccatcccacggatgaggagttggtgatgtactatctgaagcggaagatttgtgggaagaggctgaagctcgacgtgattcatgaaaccgatgtgtataagtgggatcccgaggatttgcctgtgcaatctatattgaaaacgggagataggcaatggttctttttctgtcacagagataggaaatatcctaatggtggaaggtctaaccgagcaaccagacgtgggtattggaaag

SEQ ID NO: 28649 - DNA, 1127 bp, Glycine max
  unsure (1)..(1127): unsure at all n locations
  Clone ID: TF_GmC165789_1
gctccgctccacctccctgtcgtgcttccggtcgtttcctccgccgtgtagtgttcccgttttcacggcgctctctcgctctctctcttcccttcgggccctcgtgaataattatatctttctttcaattcctatcctcttccttgtagtgtacccattttgaatgtgttctctctctctctctctttctttaggtccctggtgaatatctagaaccactctctagctagtttctctcttcttgctagctagctatcgccgatcactctcttggtttaaaccacctgaatgccggaaaacatgagcatatcagtgaatggtcaatctcaagtccctcctggcttcaggtttcatccaactgaagaagagcttcttcagtactacttgaggaagaaggtctcttacgagaagattgacctcgacgtgattcgtgacgttgatctcaacaagctcgagccatgggacatacaagagaaatgcaaaataggaaccactccgcagaatgattggtacttcttcagccacaaagacaagaagtaccccacaggaacgcgcaccaatcgcgcaactgctgcagggttctggaaggccactggccgcgacaaagtcatctacagcaatggaaagaggattggaatgagaaagactctggttttctacaaaggaagagcgccacatggccagaaatccgattggatcatgcatgaatacagactagacgacaacaacaccgcggacaccaatattgtgtccaatgtgatgggggatgctgctcaggaagaagggtgggtggtgtgcaggatattcaagaagaagaaccatctgaaaaccctagacagccccttggcttccggggaaggtagaaggagccacttgttcgactcgtgcgacgagggagctttggagcaaatacttcagcaaatgggaaggggttgcaaggaggagagcagctatgaaggcaactacaacagctatggaaggtttgcaatggggttgaacaatggcggcggcggtggatacaatgataggttcatgaagctcccgagcctcgagagcccaaaatccgcaagcatggagaaccaccacaacaccaacaacnnntgcaacaataacatgaagagtaataa

SEQ ID NO: 28650 - DNA, 1988 bp, Glycine max
  Clone ID: TF_GmC206_3
gtaataataagtaactctcataataatccacatataaatttcaaatatacccagacctgacaaattttagtcgattcttgacccattttctactcaccagtttcaagaattgtgcaggtcgatgaaataaccggttctcgatccatagttgcataccggttattcaggacacatgtttatttatcgaacaatattaatctaatgctaatgtttttttttttttttacaagttacaaccaacaaaagatcattacaaatacaaagacagattccacaagataagatcttatccatgtacaatcaatctccaaaataaagtgctctccgggttaataaagaacaatatattacatggggccaaaaagaacaaactaaataaacttatccaaaaataagattagacaagcataaaaacttgctaaagtttttatgaatcaagttagcaattcaccctgcaaattcctttacagcgccttctcttgaattaaggttcattagaattaccctacaccttatattgcctccagtattcacaaagatttttttttattttgagaatatgttaggacagcactgtttggtaattctggggagatcccagacaacagtcattctgggaggtcccagacaaaatacctagcagcaaaactttggatttacataaatatattcaaggagaaatacttctacctactagtcttaagtttccaacaaaaacccaacaaaaagcacataaagcaataagaatagagaagaaaaggaatggaagtccctttctgccagctctcttcatagttccagtgtctttacctgatgcagcaatgttggtgtgcttgatcttcaacctgctgaagctagacattcgattcaaagctcggttcaccaatgcactttcagcagctgatgcaggagtagtaggtattgactcaacaaaggcccagagagcagaggacaagctacttgtagcaacatcttccacagtgctactttgattgttattgccttccgtaggaaagccaacagattcatatacaacacctggggatgatagctgattactttcaccatgcatccagaattcaccaacagtttgattggcatcctctggatttggcagcaattggtaactttgacattcaatattgctgctgacaagggcatttgtatatgcatgtgaatctgtttcatgaataattggccccaagtcacgaagaaacatctgtgcatcttggaacaaatcaagttcacttaacccatcttcaaaatgctggtactccacagaattttcaacatttgacaatgtaggttcagtatcaatgagatcattaatttccaagaagccatcctcattaaagtcaagctcctttgttttaatgttggaagcagaagtgacctcagatgtttcagaaacatgcagatgagaagtaactggccgattgaagtcaaagctaggctgtgcatcaaaaaattggttgctaggctgtgtgattctgactggctcagggaacatcacagcctcagagaactgatccacaacagtactttgtgtttcttcactaacaacctgaggaaagtcaggataaccattcacatgctgctgatcaaggacaagctcatcatccaaaattcccctaatgatgttgtcgatttcatcatcaagcaaaggctgcagtacattaccattatcaacatcatttggagcctcctgatcagctgagttgatattaaaatctactatgtcatcatctgcccactgttcttcattaaatggtgcgccatactgttcaccattttttggaccaggtccacttttcttgtaaaccttgtaaagtgcataatagtccttaacacccaggcatctcttaagctcctcttcatccaaggtatattcatgcataacccaatcagtccgctcaccactaggagctctgccagcatagaaaaccagggtcttttacactccaactgacctagaattgcctcgagcc

SEQ ID NO: 28651 - DNA, 913 bp, Glycine max
  Clone ID: TF_GmC625_11
caaagtaacactagaactcacaaaggacagaagaaacgcgaatgccaggagaactccaattaccacccgggttcagattccaccccactgacgatgagcttgtgaatcactacttgtgtagaaagtgtgctgcacaaaccattgctgttcccatcatcaaagaaatcgatttgtacaagtttgatccatggcagcttccagagatggctctttacggtgagaaagagtggtactttttctctcctcgagaccgaaaatacccaaacggttcgagaccgaaccgggctgccggaagcgggtactggaaggctaccggagctgacaaaccgatcggaaaaccgaaagcccttcttgaagctgggagtcaagactcgcggctgtaacggcttatcctacaccctcaattacgcagatgaaaaagggaagtttgatgagttggttgaggataagggtgttatgatactgattgatccaaaggcccttatgcatgtcattggaactaaaatggattttgtagatgacaaactaagatcggaatttattttcgtcaatccaaattccaaaggtcagtgtggttgtggtgaatctttcatgacaacaggaagtagtggatcttctaagccatgaaatagttaaaattgctatccaagccgtggatcctcacgtaatgaagtcgtcctttcatgatttaattgatagatagacatacaagtacaactaatggatttctattattctgcctgcgagaacaagggaaacgaaaactttggtgctcagaacaaaaggatactgaggactgacatggtctcgatatacagagttctctgaagctgatggtaataggcttatttcaacaatttttattgtcatttgttttgatgattcttatttctaatataaaattctttgtatc

SEQ ID NO: 28652 - DNA, 1458 bp, Glycine max
  Clone ID: TF_GmC1311_1
tacctcgagccgaatcggctcgagataagagaatctaaagaaagaaaaagccaggctcaaaaagttgtgttattgtatgcatgagaattgaaggagagaggtgaagactcattatcatcatcatcatatcatcgtcatgtatagcatggattcatcatcttctggatctcagttttctcagcacccacaactccctccagggtttcgattccaccccacagatgaagagctagtggttcagtacctcaagaaaaaagcagactctgttcctcttcctgtttccatcatcgccgaggttgatctctacaagtttgacccatgggaactcccaagtaaagcaacttttggtgatcaagaatggtactttttcagcccaagggataggaaatacccaaatgggacaaggcctaacagagctgctacttctgggtattggaaagcaaccggaactgacaagcccatacttgcatctcatggtcaccacaacaaagttggagtcaagaaatcacttgttttctatggtggaaagcctccaaaaggtgttaaaaccaattggatcatgcacgagtacaggcttgctgatagctcctcaaactctagctcaaaacctccttcttcggcttcagatcatgcacacagtggcaagaaaaactccttgaggcttgatgattgggttttgtgccgaatatacaagaaaagcaacagtacccacctgccaaggttacctttgatggagcagaataaggagatttctagggagatttctatgctaccaatgatgtcaactttgtcaatggctaatgataacaacactcctcaggattccaaaactgcgtcttctagaagcacaagttatggaccccttggagtagaaaatgatgataatttctttgatggaatctttggagttgatcatcagagcatgcagcaagatgtttctgatcattcccaacaagtgtcttcaaagggaaacttccctatgaaaagggaactttcgtcacagttttggaatggcacagggtcatcctcttcaagcaggagattccattacgatcttaattatgctggaaacagcactactgttgaggaagacaattccttcgtttctctgcttagccaccttccacagaacacaacaacgtttcacccaaatgcgcttcttggccctgttggtaatggtgtattgaggcaacagtttcaacttccaagcatgaattggaatacttagggtggttaatttggcttagggtatatataccgggtaagggttggataatgtagctgccattgtaggtttatattataagttaatttaacttgggttttattagccatatatacataacatactagagagagagagagatcatgaccgtacgcttgtatttttgtgagtttttttttttgaagcttatattaaactgaatacgatataatactgctgttctgtatcaaagg

SEQ ID NO: 28653 - DNA, 462 bp, Glycine max
  Clone ID: TF_LIB4127-116-Q6-J1-E9
tggccctggggagcataagatgtttcccttgcctgagactaactatatactagttgctagttacttacttacatattagagaagagtcaatggcaatagtgctgcacctcatgatcctccctgagccttagctcatagccagagcctagaggatgcctccaccgcgtacaccaccaacaagcccgcctacttctatgtataatgatgatcatgagcacgacatggtcatgccctgctttcgattgcatccaattgaagaagagctcgagtaattctacctctcaccctaagagtgcagggatagcgtttgaacgatgagcttattattttcctcaatctatatcgatatgacccttgggagcattccgccttggcagcatattagtgagaaggagtggcacttatatgtgcccatagataggaagtatctcaactgtgatcgtcccattcgggtaactactc

SEQ ID NO: 28654 - DNA, 3243 bp, Glycine max
  Clone ID: TF_GmC434_1
gagtagttgctctgcttcatcatcttctctctatctttgttgcaaacttacaaacacagtactgagtttaagtgttcaccaaaaaaaacaatggatgatgatattgtaggactcggttttcgtccaacagaacaagagcttgtcaacttttacctcaaacacaagttgctcggcgatgatccccgtgtccacgtcatccctgtcattgatctttgcgatgtggaaccttggaatgtaccaggtaactaactcaacacccctttgtcctttttcttcctcttctctttacttcactgttgtttgtttgattctttccttgttttcaaaattagtgatattagcatcgtcatcagctatacgatttggtgacccagattggtttttcttcagccctgttgatttcaagtacttgaaaagcaaaaggtttaacaggacaaccaagtgtggattctggaaagccactgggaaagaccgtgacattaggacaagggacactgataacactgtcattgggactaagaagactcttgtttactatcaaggccgtgtttcctgtggtgtcaagtccaactgggttattcacgaatatcatgctgttacctttcatgaaaaccaggttcgtttcttttattcaataaattttaacactgcttgaaaataatctttctactaaattataggctttgatgttagagggccatatatgttgtactagtttgtactttttaggctttgatattagaggttttttttttttttttttaatgatacaagaatgagaggaataaatctagacatataatgatacttggattataaaggtttaatatcatgtgaccatttaaaaaaagttatgtgattatttttaaatctcatatgacttgtatgttttaattgtggccaatatttattctttttacactcatatcaaaaaggtcatctcactagatatgtctccttatttgcaatcctattggttgttctgagttctgactttagcagattgctgttattggatactttgtttgaatctcatttattttttttgccgtctcatattgctgttcatggcccaattttctacatttagggtcttgcttgatgaatgatgacaaagggggcatgaaagaaatatttagcttataaacgtgactgatgaccttcctataacctctttttaagcttatttcaatgaattttacatgggagcttatcaaaacaagttctttttagtttatcaatgagctcctcgacaaagcttatggataatctcatgtgatttattggataagtgtttaattaaatcttttatctaagcactctcaaaattcatcatcagtgttcatcaaagactgtcaatttcttctgtataaattagtctgaatttccttgttcttttatttgtgtgaattgcatcaaataaatgctgattatactcaaaaaattatgcagaggacttttgttttatgttgcttgatgaagaaacctgagaaaacaactgaaggcggaactgatcccctgatctgtgatgaaggggagcccagcagaagcatgatttctgactatgaaaatcagccaacagcagaaggaattgcatctgtaagatgaagcatcctttgtggacatatttacactctgccatgtgaaacatgctgagaactgatacttgtttcgtatatttttttttctttttcaggaaggtacttttacaggaatagaggcaatctttcaggcaaccccttgggcagagaattgcttctccccaatacaacagtctccgactcttattgagcaggaaggagcatcctttccaaactatgcatttaacaatgcctattttagaaatgaagacaacattatgcagactccatttgaaactacaaaggaagatgaattcctaaatttaatcttagccgatgaaagtatagtgatcaatgaagaaaataagcatgattttgtcaatagctctacccaatcagagtcattgaaaagggtatactgtgtaagcagtgatacagatgctgaagtcatctctaaactggtaaagatttatcaagttcaaataatactggggagagtatctccatttgtttctgaagtggcattggatctataggttaaaattgtagtgtgcattgtggttatgtgaatgttgccacatttttgcattggatctataggttatgtcatgttttgttgtgattcatgatcatgaatgattcacggctgatactttagagcatgcttggatgaagggaatagttaggaaagggaacaaaatggagataaaccaatctatttctgtacccatttttacccttccttgcatctcttccctaacatacatcctaggatttcagaatcacaagtactcttttcttaggtttctgatatttgtttagtttattttgagctcttcaagaattgaattcatctacttactttcttctgaaatcattacaggatgacaatattgtggatatttcaacagcatgtaatgattatcctaattcagatgaatactattcatcaaaaaggtttaaatcatcacatgatgctgtccatggtggaatatgttttctaccttctaaccttgaagcaaaccaagagaaaaacgagagtatgtttcaagatagtttctggggagcagagacatcatcttgtgactcgacactagataaacctttggagatcaattatattgatatttctagttctcctttcactccatggagatgagaaaattaatatcattgaagaccagtcaatttcgtatgatgggaactaagatctaagttagctccattagattggtagtagctattttggagtatgtcataaaatatgactagttctacaatagcaaatttattagaaaacaattctgtattagaaattgcataatggtagttatgcataaaaaataactatgggcagttatgtattaagatttaggagcttatatcctaacagtaaatctattagaaagtattaaaaactgcatgatagcagttatgcatagaaaacagccactagtagttatgtattaagagcatatatgtgatggtattagtagattgtgtaattaggaagtatgtgtagttgtttgcagtttatggacagagaatactctatgtaggagacttttgtctctaggacaacaagtgtattttgtatcaatgtattttgtgtgattttagtatttcaataatatatttcattagtttttggaaggtgagccac

SEQ ID NO: 28655 - DNA, 1329 bp, Glycine max
  Clone ID: TF_GmC1127_1
gaacctgtttgaatcatccacggtagcaactcagcacaatgcaagatggaagtgcttcccacttcttccatagagcaatcaacgattacaacaccggcacccgaaagcgccgaaaaatactagggcaagattttggtgatgtccgctggcacaagactggaagaactaaaccagttgtctttaatgggattcaaaaaggctgtaaaaagattatggttttgtatgttagcaatgtaaggggaggaagagctgagaaaactaattgggttatgcatcaatatcacctaggaacaaacgaagatgtataggaaggagagtacattatctctataatcttttacaagtagcagtaagtcaaattgggtgataaatatgatgaagatgttcctgaagcctctgaaattaatgtattaacaattgtgaaagtggatccagtcactcccaaatttgtgactcctgaaactccttgtaatgaaaggtggtgtgcagatctagaccttggacaagaaacacataacagtccgcagcttcctcagatggattgtttagatgagattcaagctgattaccaagaccttgcaaatgaatcatctatggtagaaactcaacacaatgaagggatggatgataaagaaaaaaataccgaggaaggccaaaaatggtgggacagtgagtcacagaatctgttggattcacaacaactggtcgaggcactatcactgtgtgacgatctactccaaagccagtctcccagtagagatggaaaacatgaagatcataagaaccaacccggtctttctgtttatgctcagctaggaccagaaaatctgaagaaggatattgaagagtgtcaaaatcttgcccttgataaagcaaatatagagaatgatacaccttcagagtttcgactaagtcagctggaatttggttcacaggacagctttatttcctggggctatggcaaggcagtgaactaatatggttcttcacctcagctgggcaagctgatgtttttgtaactacattttgttgttgagattcctttcaaaattatgggctaatccttttccccttttggttgaagggctaaactcaactgttgctcctttgcttgactaattgagctgtaatgttaaagcaatgaactttgttgcttgatactttgatcaagtagtattgtaattataccttgttttggcttgttgaagttattgtatcttccaggttctctttatatcttggatgtgtggacctgacttggccacatataagcatacaactctcatgctgaagtaatggacgcaggtgcatgtcactatgttgtaggaa

SEQ ID NO: 28656 - DNA, 238 bp, Glycine max
  Clone ID: TF_6454111
ggataaacgggggggttttccgagaccggtggggatcaataaagcgttggttttttacgctggaaaagcgcccaatggagagaaatctaactggattatgcacgagtgtggtcttgcagacgtggatctgtttcgtcgcaaaaagaacagctataggctgtattactgggtgctgtaccgattttacatcttgaaatgtgcaattgattagcaacatctgccatcaccgaatggggtc

SEQ ID NO: 28657 - DNA, 509 bp, Glycine max
  Clone ID: TF_GmC94853_1
gtatgatccttgggatttgccagggaattgtgatctacaagagaggcactttttcagcccgaaggaagcaaaatatcgaaatggtaatcgcatgaaccgaacaacaaagtgtggctattggaaggcaacaggatcagacaaaagaatatcatcttcaacgtgtaacaatggtattgtcggggtacgaaaaacattgatattttatgaaggcaaatcaccaaaaggctccagaactcactgggtcttgcacgaatatcgtctcgtcagtgtagaaactggtgctgccaactcatcccataataactatgtgaacgagataggagattgggttctgtgtcgcttatcgatgaagaaaagaagtctagaaagtgatggcagcgccactcatcagaagcataggcaaaataatacagttcaaactagtcgtccaagattaatgtttgattttatgatggtagggaagaccaattcttctacatcctcatcatgttcaagttccagtaacatca

SEQ ID NO: 28658 - DNA, 1933 bp, Glycine max
  unsure (1)..(1933): unsure at all n locations
  Clone ID: TF_GmC398_1
catttttcaataacaagagagagagagagaggcgtagttcacttcacttcaccactctcgcaacttcaattcttcattcttcttctctctctttgacaggtgtcaacaattctcctgtctcgttccgtctcccgaatccgtacgattttctttgagggtttgatcgcgccgatgtctgtttaccacgaaatcggaggctcttcatccatcatcggcttccgatcctgcttcaccaaccgcgccaggcttcgctgtcccgctaagatacgctttcgcttttgagggttttttttttcttttttttttttcctctcacacatgaaatagtaataatcgcacgaggtttcctttccactcaaattaacaaaaaaaaactgctagattctgaagcaagcgttgtgttgtgttttattttcgattccatggccaaagctgttggagttcggttccaccctactggtgttgaattagttgtgtactttctgaagaggaaagtgatggcaaaaaaaatctgtgatggtttcattgctgaacttgacatatacaagtatgctccttggggtctcccagataagtcttgtctgagaactggagaattggaatgggacattttctaaccacctagaaagaaatatgaattatgggtttagctgattctgtgcattgaaatttggcaactcaagttccgcgagtgattgtgtatatgtgtttttattttttaattcgtctcgaggataaagacactgatatttcacacgggtaaatcgcctcgtggcgaaagaactgattgggttatgcatgagcataggcttgaagataaggacctcgctgacaaagggattgctcaggattcctatgtagtctgcaaggtattccaaaaggaaggtcttggtcccgggaagggaacacactatgcgagaccatttaatgaggaagagtgggacgatgaagaaattggaataccttgtgctgctttgactgcacaagttcccaccttgcctattacatctgatggttctgttgcaaatgacaatcatctccctgctagtggatgtattgggtcagcatccacatcatgtctatcaggatcagtgccttctctgggcacagtaaatcctactggtccaaatgatcaagctgttaatgatgatattttaccaatgcttcatatttttaatgatgacaaatggtttgaggagatttataatcctggtcaggaaaatattgttgaaggtgcaccaccttcagatgatttttttgcgggcttggaagactactttgctggtttctcctctggccagaatacaggtgatgttgggaactctgatgacttggacttcttagagttgaatgacctagacaccccattattctatccgaccacacaaccttgaagttaataagagtcgcaataaaggggttgttttggttatgacttacgactgacctttggcaactagctagaggacaatttaaattattgttttttttttcttattctgtgctttgaacattgactctcaagtcccgtgagtgattgtgtgtatatgtgcttgtttttttcattttagaacttccttctcataacgaaaaaaaaaaaaaaaaaaaaaaaaaaaaaaaaaaaaaaaaaaaaaaaaaaaaaaaaaaaaaaaaaaaaaaaaaaaaggaccattcataaccctaatttagcatagtgtgactctttggataattttctctttaagcagttccaaaattaagcttctgtcctaaactctaattcttttatgaactatatttctcttttacgttcttttatttactttctccaaattggtgcctccgttaatggttagtctccgnagaatttttgttccttttctcttcgtcctttttgaaaaccggatctcttaacgtcctttggttgcttgccctttatgagggtttacttttt

SEQ ID NO: 28659 - DNA, 1874 bp, Glycine max
  Clone ID: TF_GmC424_1
aattcggctcgagcttgaccatgatgatactgaaaagcagatgctgagaaagttaagtaaacaacttagtggtgaggaccagatatagatcctattgcccagcacagtgtgttcaaattgttccatcttcttcttctttttcatcaatcatcaccagtggttcttttccttctgagaagatcgaattgtgttttaaacatttccctgctacttcatcttcttcttcttcttcttcatcaccggtggttctgttcattcttccttgcaccttcttctttgaagatcgaaattgtgtttttgaaaaaatgggagttccagagaaagaccctctttcccaattgagtttgcctcctggttttcggttttaccccaccgacgaggagctcctcgttcagtatctatgccgcaaggtcgctggccaccatttctctcttccaatcattgctgaaattgatttgtacaagttcgacccatgggttcttccaagtaaggcgattttcggtgagaaagagtggtactttttcagccctagagacaggaaataccctaacgggtcccgacccaacagagtagcccgggtcgggttattggaaagccaccggaaccgacaagatcataaaccaattaaggatcatgcactagtatcgaaacatcgcctccttcccgaaagaacactggcaccaagcttgatgactgggttctgtgtcgtatatacaagaagaactcgagtgcacagaagacggcgcaaaacggcgtggttccgagcaacgagcacactcaatacagcaacggttcctcttcttcttcttcgtcccagctggaggacgttctggaatctctgccatcgattgatgaaaggtgtttcgcgatgccacgcgtcaacacgctgcaacaacaacagcaccacgaggagaaggtcaatgttcagaacttgggtgcagggggtttaatggattggaccaacccttcggttctgaattcggtcgccgatttcgtttcggggaataatcaagtggtacaggaccagactcaggggatggtgaactacaactgcaatgacctttatgtccctacgttatgccacttgggcacgtcggttccgttaaagatggaggaagaggtgcaaagcggcgtgagaaaccaacgggtcgggaacaataattcctggtttcttcagaatgatttcacacaggggtttcagaattcggttgacacgtctgggtttaagtacccggttcaaccggtggggttcgggttcaggaattgaaccctgttatcgattaataatagtagtaatcttttaaatcggtaaataggtgggggattctttgggcttaactcgtgggggttttagattaatcctttagaaaagggaagaagaagaagaagaagaaggtgaaaattttggtcctcattttcagctaaagatgtagggtatacaaacgttcaatgaaccaatccacgagataaagcaatgacgggaccattttaatttgttacgacgtagttttcggcccacacaagcccttactcagccacatgaatcacatttgtacttcaaatgaacagcaagaattttttttactatatgttaggtttcgttaaataattccaatcatgatattactttgttaactaactaaagtccctaaagaaatgcaactcattagaagtctgagaaaaaacatgtctaaagtatttggattgaaaatcatctacctttaaaaagacaccgggggggggggtctaaacccaatctgctttttccagactgtgaaaacactgcctttggggcccctgatgacacttacgttctggatacacctgggggtgctcgagttgaacctccctactcatgctccccttgggcctgc

SEQ ID NO: 28660 - DNA, 384 bp, Glycine max
  Clone ID: TF_LIB3242-682-P1-J1-F9
gcaattcctacacattgatactgttcagtgtctccacttatctttataaattctcaacaagggggggtacaacacagcgtcactgaccccatgaatgcatattccattcaaccgatggagaactagtactccgcttcctatgctgcaaatgcgcttcgcaacatatcgtggataccataatcgtcgtacttgatctgtacaggtacgaccattgggaccttccaggactgggtttgtacggagagaaagagtggcattttttcacgcggagggaccggacgtacctgaacggtttgagggcgaaccggtcacggggaaccgggtactggaaggcaaccggagcggataaaccagtcgggaaccgtgaccgggctgatcaagaaa

SEQ ID NO: 28661 - DNA, 1787 bp, Glycine max
  Clone ID: TF_GmC432_1
ggttgaacaaaaaacaatggagaacataatttccatatgtgatcacatgcctgtaggattcagattccgtcccacagatgaagagcttgtcgactattacctcaaacacaagcttctggctgatgatttccctgtccacatcatccctgaaatcgacctttgcaaggtggaaccttgggacgtaccaggaagatcagtgatcaaatccgatgacccagaatggtttttcttcagtcctgtggattacaagtacttgaagagtaaaaggtttaacaggacaaccaagcgtggcttctggaaagccactgggaatgaccggaaaaaagatcagcgggcaactccaatgaccatgaatggtttgaagactctcgttttccttccaagccgttgaagaggaaaaggcataaccagctaagcaagcgaggcttctgataatccactgggaaagaacggaaagttaggatacggtttgtgccgaatgatgaagaaacctaagaaaaaatttgaagggagaattgcggtgccgtctttggatgaaagggaaaccaggatacacatggtttctgactagggaactccgacaagagcagaaggcatttcatctgatgacattattcctggagtagatatggatgaaatctttcgggcagtggatcaagctgagaaattctcccccccagtacaacagtctccaactggcattgggctggaagattttttcccaaactctccattgttcaatgcccgttttggaagtgaaaacatcaatatgcaaacttcacttgaagttacggatgacgaagatgagttggtaaattcatttttggtttatgatgaagaatttgttatcaatgaagaaagaagacactgttttgtcaatagttccacccaaccaaagtcattgagaagggtatacaatgaaagcagtggaaattggttcagacttcaggaaagagtttatttttattgttttccctctctttttctagaactaaactgaatttggtttataaaatactgtcattgttgaaattaatggatcgaggattggatgaccagaaagacatgagagagaaacacgttagagagagagagaaagagagacagggagagagacaggcactctgtagaggaagagcgcctgagagagggagagcacgccttttagagagacagagaggttccctgagaaatcgagagcctacaagagactgttcttatgacaacaacagaatatacagacgcagcagggagagggggagagatagagataggcgacacgaggaatatctcccacgttgtcggagcatctctagaaactcgagccgaatcggctcgagtacgcgacagaagggggggaaccaggaacataatagacaggatgctgaacctgatcaggaagtatggaccaaggtgataagaaggagggaagcaaaggcagcaaagaagaactatacccagaacagatcactacataacctctcggcaaaccaccccaactggagagacaaggaggatattacatccttttacttcactaatttcacagacaacgttaatgaagtgaggctctgggggaagtttaagatttggggagatgtgcgtgaagttttcattgccaaacgtcgtaacaaggagggaagaaggttcggcttcgtgaggttcaaggacgtttcggacgtaaagcttttggagacgcacctggacaatatcttcattgatgaccataagctgttcgttaaccttcccaggttcacaaggctagcgtcgaatgttcatacgcatac

SEQ ID NO: 28662 - DNA, 1196 bp, Glycine max
  Clone ID: TF_GmC525_4
gggagcaagggggccccccacccttccaattattaataaccccctttttccctctccatacccttttgctttctttatccaataataagaacttcccacgagtggctttaactggtctggtctggtctggtcggacacacaaaaatattagtatggagaaggtgagttttgtgaagaatggagagcttagattgcctccggggtttcgtttccacccgactgatgaggagctggttttgcagtacttgaagcgcaaggtcttctcctgccctctgccagcctctatcattcctgaggttgatgtttgcaagtctgatccttgggatttgccaggttcctttctgctcacacccaccccccttctctcttctcatcttatttactaactaattgcaatgccatggcccctgtttaggtgatttggagcaagagagatacttctttagcaccaaagaggccaaatatcccaacggaaatcgctctaacagagccacaaattcgggttattggaaggcaactggcttggacaaacaaattgttacttcaaaagggaaccaagttgtggggatgaagaagacacttgttttctacagaggcaagcctcctcatggatccagaactgattggatcatgcatgagtatcgcctcaacatccttaacgcctctcagagccatgttcccatggaaaattgggttctatgtcgcatatttttgaagaagagaagcggtgctaaaaatggggaggagagcaacaaggtgaggaactctaaggtggttttctatgacttcctagcgcagaacaagactgattcctcatcctcggccgccagtggaattacacatgaacatgaatcagatgaacatgaccatgaagagagcagtagctccaacaccttcccttatactattagaacgaaaccttaacaaccaagtcaacaaccaccttccttaaaaagttgattatcacctagtttttttttttttaattctctttccctttccctgtaatcatcatcaaccacttgttgaaaggaagcatccctcccaatgagaccggcattagttaaagggtagcctgcagagtatggtactgatagtagcagtgtgtaatggactccccattttccttcaatttaacctttttttctaatgcccatgcttcttcttttagcaaaaagctactcattttcagtttc

SEQ ID NO: 28663 - DNA, 1660 bp, Glycine max
  Clone ID: TF_GmC83_1
gattccaatcctttccctcttgttctatgctttcaagtagtaccaattgggcactttgtttagtgtcttcattttttttttcatcctcatcaaattaaccccctaaacatcatttagctagctagccaaattaattattaattaggcaaataatgggaaacccagaatccaatttgccacccggttttaggttccacccaaccgatgaggagctcattcttcactaccttaacaaaaagggtaaaaaggtagcatccatacccttgcccgtttccatcattgcagaggttgatatctacaagttagatccatgggacttaccagctaaggcaacctttggggagaaagaatggtatttttttagtcctagagaccgaaagtaccctaatggtgcaaggccaaacagggcagctgcttcagggtattggaaggccactggcactgataagaccatagtgacatcattgcaaggaggagcacaagagagcgttggtgtgaagaatgctttggtgttgtacaaaggaagacgcccaaagggtgtcaagaccaattggatcatgcatgaatatcgccttgtagacaacaacaaacccatcaagctcaaagactcctccatgagattggatgattgggttctttgccggatttacaagaagtccaaacatgctctaacttcaacagaggcatcaataggggtgggtgaggtagatcaagcagaggagcacttattccaagagacccttttgccaatctcaaaatctccagcacctccacctcaaaacacattgatatctcagaaatctgtgtccttctccaacttgttggatgccatggactactctatcctaagtagtttcttatctgagaatcataccaaccacccaccatgggttggatcaagtgctggattcaacactgggaatttggatcagcaatgctctccaatcaataacaacaaccctaccaataattacatgtttcagaagaatccccaattgaacccttcagtctccaacatggaaaacatgatgaggccaaagcgccaagtttcaaacatggatgaggaaacgttgtacccatcaaagaaataccttagttcctcttgcaacttccctactaacatcagcaaccaatacgagaacccacaatggaactacctcatgaagcagtctttgatgaatcagcggttaatgcttggtcctcatcttcaatttcaaggataatccaaaaatatcaaaagattaaatgaaataggaaaattaaagtaaaatattcagaagctgagcacaccaaagaataccaccaatttgatcattagataaggaatagtagctaggggtttagtacatagcaattatagtgttttctttttttatttctctttaattaatttgtgattgaaaatgaagaatagaatgttagcttggaagcaagaactatttggtagggaatcaaagaaagattccaccattcaaggatcaagaaactgttaaaacaaaatatccaagtttctatgacaaattagaaacaatttgtgtacaaaaatgttaatttgtacatgttgttggggtttgtttggaggttagctttataatatactttgtagataaggtattgtccttaaaaaaaaaaagaaagggcggccaccacaaatgagctc

SEQ ID NO: 28664 - DNA, 390 bp, Glycine max
  Clone ID: TF_LIB3056-003-Q1-N1-G7
tgaagagagaaggcttaattaataagcaaatggaaaggctaaattttattaaaaatggagtgagtagattgcctccaggttttcgtttccagccaacagatgaagagcttgtgtttcagtacttgaaatgtaagatattctcgtgccagttgccagcttcaatcattcctgagattaatgtcagcaaaaatgatccttgggatttgccaggaaattgtgatgagcaagagaggtactttttcagctccaaggaagccaagtatcgaaacggcaatcgtatgaaccgaacaactaactctggctattggaaggcaacaggatcagacaaaaaaatttcatcatcaataagtaatattggttttgcggggcttagaaaaactctaatattta

SEQ ID NO: 28665 - DNA, 1708 bp, Glycine max
  Clone ID: TF_GmC207_2
ctctctctctctgaacaagacccagccagcagttagggaaatcaagcacagctcaatcattgaatcttagcataaacacatacagaagaaggaaaagtggcaccctggtacgattaaattctctctctttctgcaaatagagaagttgattcagaagaaacgagtccccaaagagacaaagctactagctctacctttcttcaccccttttcatctctatatatttttttttttttttgtattttattagggaggagctgatattgtaggagggtttggaagaaaaagaattttgttttgagatatatatacatatatgtgcaagtgcataggaaattaacacaaaaagatgacatggtgcaatgactctgatgaggatagggttattgaatcaatgacgccaacaataactattactcctaacactgatggcataaagctcaccgaagaaattagaaccataacatgcccctcgtgcggccataacattgatttcgtgaaatattagggtggaatccatgacttgccggggttaccagctggagtgaagtttgacccaaatgaccaagaaatattagaacatttggaggcaaaagtggcgtctgatgcatgcaagcttcatccccttattgacgagttcataccaacgcttgaaggcgaaaatgggatctgttatacacacccagaaaagctaccaggtgttagcaaagatggacagatccgccacttctttcacaggccctcaaaagcatacacaactggaacgaggaaaagaagaaaagttcacactgatgatgaaggaagtgaaacaagatggcacaaaacgggaaaaactagagcagtttttgcagctggtggtgcagtaaaaggttttaagaaaatactagtactctacaccaactatggaaggcaaaagaagcctgagaaaacttactgggtgatgcatcaataccatcttggcaatactgaagaagagaaagatggagaactagttgtttcaaaagtcttctaccaaacacaacctagacaatgtgttaatcccattatcataaaggacccgtacgaaaaaatgttgaatggtggaagtgtccaagacagcacaaatacatcaataactaaaactactgcaactcttttggattgctacaatgctccttacatagattatgatcatgcccatgcgagtcataatagggaaagttcctcacaactaataattcccagctcggttgttcaggttgatggctcttatattcgctcaacaatggatgcaaagaaagcaagatttgaaagtaacactgggaagagcttctaggtagacaagcagtgacaatgatttacagcatgtcctccatattgtttccattactaattgagtaatagtatttatatgtgaaattagactgaaggaattccaagggttggaaaaatataggtttttccttgaattattgagatcaatatggcgcaggcatgatggactttcccataattgaccctggttgaagttgagagacaagcaagaaggtatatatatttgcggtactgtagtttgattttaattttagggtacatgtatattcgtaaaatgtgtttatactttatagatattacaatacgtggtagggttatcgtttattgacaactcttcagaactatgtcagtctatatattatgttttgtctagaattgaacttttcaccccctc

SEQ ID NO: 28666 - DNA, 1783 bp, Glycine max
  Clone ID: TF_GmC423_1
ttttctaaccccacaattttatggccaccacacaatttcatttcatttttccttttcacttcactttcccccaattttctttctcaacaatggccgcagcaacacaactccacttaccccctggattccgattccaccccaccacaattcctacacatttctactctttagtttctccaattttctttctcaattctcaacaatggccactacaacacaacttcacttaccccctggattcagattccatccaacagatgaagaactcgtcatccactacctttgtcgcaaatgcgcttcgcaacatatcgcggttcccataatcgccgaaattgatctgtacaagtacgacccttgggaccttccaggaatggctttgtacggagagaaagagtggtattttttcacgccgagggaccgcaagtacccgaacggttcgcggccgaaccggtccgcgggaaccgggtactggaaggcaaccggagcggataaaccagttggtaaaccgaaaccggttgggatcaagaaagcgttggttttttacgctggaaaagcgcccaagggagagaaaactaactggatcatgcacgagtatcgtcttgcagacgtggatcgttccgttcgcaaaaagaacagcttaaggctggatgactgggtgctgtgccgaatttacaacaagaaaggtgcaattgaaaagcaacaactaccaccaccgagtggggtccgcaaaattgaatgttacgaaatggaggacgagaagccggagattctgccgcccgacatatacggcggcgacggtggcggattgcctgtacttcgaggcttccgactcggtgccccggctgcacacgacggactcgagctgctccgagcaggtggtgtcggcggagtttgcgagcgaggtgcagagcgagccgaagaggggcagcaacaacaacaacgagtttgcgtataattacgtggatgccactctcgggaataatcagatgtcgccgctgcaggatattttcatgtacctctccaagtccttctgcaattaacacgcaccaccacacgacgagacgacgtcgttctgtgttgtgtgtatgcattatgcatttttgcagtagctgctccacgcacatttgcacggaagcacgagactgagtgaagatccgtgagtgtgtccgtgctggttcgtgtagatgattattactataaaaaaacaaaaaagcaaaaaagagaagcattcttatatgaacatgatgaatccaactgtttacatgatctagtcgcaattaatagtttgatattaaaactgagtatgtgtcgccacaacaatggaggatgcatcatcggaaaatgcaactgccgttggatgaccgccggcaggcaaattaatccttagaaacttgaaacttttactcgaagcatcatccaacttgaatactctcacaactccatcagcgcaagcagttgccaaatttcgtccatcgcgggagaagcatacccctgtcactgcatcaccatgacccttcaaggtattcaaatccaacggatggtgacgcttgttttgatccttgtcggaggaatggggtttggagagaggcttcttgggagggggtttggaagacacgagtttgggattcgaatttgaatttggatttggatcggcgatggatcggatttcggattggcgcttgcagaagtaggtgttgaagatgaggaaggcgatgatggcacccaagagaagcgacagcgctacaatgggtaacgctggatccattgtcagagtgaaggcacc

SEQ ID NO: 28667 - DNA, 1786 bp, Glycine max
  Clone ID: TF_GmC74085_1
aattcggctcgagctagttctagattcgcgagcggccgaattcggtctaggccctattcccttctctttctctgaaccttcttcttctctctttcacattctcataagatataagacccatacacacacacacacacatatctgcttcttgtagaacaagttaagtttgttttgttttgtcgtttgcttaaggattaatcaatcaattatctgatgatggaagagccggttgtggttaacaaaggagattatgatcatgatcatgatcagcctttggatttacctccaggtttcaggttccaccccacagatgaagagatcatcacttgttacctcacagagaaagtcctcaatagagccttcagtgcaactgctattggagaagctgatttcaacaagtgtgagccttgggatttgcccaagaaagcaaagatgggggagaaagattggtacttcttttcaacatgggataggatgatcccaacaggcatgcgaaccaatagagcaacccaatctggctattctcaaacactaagcaccagcctgtggtctgtccctcgcaagaacaaccttgttggcatgaagaagacccttgttttctatagaggaagagctccaaagggtgagaagacaaattgggttatgcatgaattcagattggatggcaaattcgcatgttacaaccttcccaaggctgcaaaggatgaatgggttgtgtgcaaggttttccacaagagcagcactactactacagatgttaacaaaagggtactcccaataattaaccctggccttctgagaatgaactcaagtaatggagaagatctattatttgatttctcttctctcccacctctcgtggatcctctctttgaccaaacctcaaacaagcacattgacaatgatttcaagggtactaataacacaccttcatcttcatcagctaaactaccatcatcaagtggctactatcttcccaacttcaacaacaacaacaacaatcagcaaatgcttatgatgaagccagaagaacacaaaatatatgagattcccatcaacaactatgcctccaccagtcaagtggatttcactacaactaataacccaatgggaattagcacaagcaataataatatccttctttctcagcctcaaattcgaacccaaaattcaacctcagtacccttcaacatgttccaagattgttataatcatacgcaccaaggaaaacagtgcaagatggagcaattctccattgacagtactaagaaacagcccgtggtcagtgcctctcaagacacgtgcctcagcaatgacacttcctcggtggtttcaaagcaagacaataacatgggaaggaacaaggcattgtacgaggataattttgaaggtccttcatcagttgctactaccctctcagatttggaatgcctgtgggatgattactgaagaataactgaaaaacctgatgcatgaagagagagattaaagcaagttaatttgttggtttatggttttttctatagttactacaacataccatatattttctgattttaggcagtcatatatacagatatatgttatatattagacatggaaaaagttctggtgggatacccgtatactgtatagatttatgattgatcgattagattatccagggtcttgttaaagttcggtttatatttcgtagaccaaggagaaggattcgatcatgttcatgtacatctttcttttgttatataattagtgggtttgttttattgatttattatttttttcc

SEQ ID NO: 28668 - DNA, 760 bp, Glycine max
  Clone ID: TF_GmC44609_2
ccacgcgtccgtcaaattcgccaaagcttgacatctgattacggcgtctcgcgcttccttcttccaccttccccgggtttcaccgtgccgatgactttttttctgagaaagagatcgtcatccatcgcgtgccttcgttttcccttcatgaaccggggcaggctttggcgttcttggaacttcttcttccgccactggacttgacccaattagtgttatctattattattcactttcttccatttttttccttactaaaaaaaaaaaaacgtggttcttcttctctctctgcggacgagttttctttctcttcgattcgttctggttgctacattctgaagcacttcatatttcgctttttctttttcattttcttttatattatttggatggccaaaccaaaaatgccagggtatcggtttcaacccactgacgttgagctgattgagtattttctgaagaggaaggttcggggtaagaaattcccttccgaaataattgctgaagttgacttgtacaagtttgctccgtgggatctcccagctatgtctttgctcaagaatggggatttgagttggtacttcttttgccctcggggaaagaagtattcgactggtgggaggttgaatcgggccacggaggctgggtattggaagactactgggaaggatagagcaattgaacacaataatagagttgtggggatgataaaaacactggtttttcacactggtagagcccctaagggagatcgaactgg

SEQ ID NO: 28669 - DNA, 1447 bp, Glycine max
  Clone ID: TF_GmC206_4
tatattgcctacaatattcacaaagttttatttttttttttatattgagaaaatgttaggacagcactgtttggtaattctggggagagatatcagacaacaatcattatggaaggttctagagaaaatatacctagcagcaaaactttggatttatatatatatatatatatatatatatatattcaaggagagacacatctccccaatagtcttaagtttccaacaaaaatttttcaaatagcacataaagaaataataatagggaagcccaggaatggaagtccctttctgcctgctctcttcatagttgcagtgtctttacctgttgcagcaatgtatgtgaagctcatcatccaaaatttccctaatagacattcggatttcatcatcaagaaaaggcagtggtacattaacattatcagcaacatcatttggagcctcctgatcagctgagttaatattaaaatctactatgtcatcatctgcccactcttcttcattaaatggtgcaccatactgttcaccatttttaggaccaggtccacttttcttgtaaaccttgtaaagtgcataatagtccttaacaccctggcatctcttaagctcctcttcatccaaggtgtattcatgcataacccaatcagtccgctcaccactaggagctctgcctgcgtagaaaaccagggtctttttcactccaactgacctagaattgcatatcacgttacgatcctttcctgttgctttccaatacccacgtctggttgctcggttagaccttccaccattaggatatttcctatctctgtgacagaaaaagaaccattgcctatctccagttttcaatatagattgcccaggcaaatcctcaggatcccacttatacacatcggtttcacgaatcacgtcgagcttcagcctcttcccacaaatcttccgcttcagatagtacatcaccaactcctcatccgtgggatggaagcgaaaacccggcatcgacgacatcatctggctgaaacaatcagcagaaccagctcctgaagcctcacccattctcgatcgcaaaaaaaaatcaaacaacccttgatcacccaacacaaaaaacggaaacttccttaatcaaaaaccaaaacccccaacacgattcgagcctccgggtattcgaaaccggcgatcgagtagaattaaaaaccctaactggggaaatcaaattagggggaaaaaaagaaacaaaattttttggaatcaagaaatggcgaagctgaaatcccaccactacatggtacgaatcgaacctctgggtgagaggattcgaaagactgagtcagagaaggaagctaatagcagtggttgcgagagagagagagagtgttgaaaagaaagaaacgcgtggtgtgggcaatttgtgagggtttttgcggacgctgggtcgagcgggaatccg

SEQ ID NO: 28670 - DNA, 602 bp, Glycine max
  Clone ID: TF_GmC499_2
aagttggctcgagcgtttctcgagatttcgtccgaactaatataacatgttcttccgtggaagaagccatagccataacataactaccacttgaaaacaaaacccaccaccaccttagttaaaaaaaaaaaaaggttagataaaaattaagctttgttcggtggtgaccatggaaagcaccgactcatcaagcggttcacaacaaccgaacctgccacctgggtttcggttccaccccactgatgaagagcttgtagttcactacctcaagaaaaaagcagcttctgctcctcttccggtagccatcatcgccgaggttgatctctacaagttcgatccatgggagctacccgctaaggccgcgtttggggagcaggagtggtatttctttactccgagggacaggaagtatccgaacggcgcgaggccaaacagggcggcgacatctgggtattggaaggctactgggactgataagcctgtgttgacctctggtgggacccataaggttggggtgtagaaggctttggttttctatggagggaagcccccaagagggatcaaaaccaattggatcatgcatgaatataggctaactgata

SEQ ID NO: 28671 - DNA, 236 bp, Glycine max
  Clone ID: TF_701070486H1
ctctcttccttccttctccacatcatttcaaatacacaaaaaaccctaacccccaattcatctctcttgaatcgaatcgatggcacgcatgggtccagggttccgattcaacccaccgacgaagctctggtggtgttctaacttaagcggaaaattacttgaaaactctcccggtacgaacaaatcgccgtcgttgacgtctaaaagctcgagccctgggaacttccctctctgtc

SEQ ID NO: 28672 - DNA, 1377 bp, Glycine max
  Clone ID: TF_GmC525_2
ccacgcgtccgcttttctttctttttgttttgttcaaggaaggaacactgtgacagtagaagcaagcaagaattggaattggaattggaattggaatgaattctcctcctcctccaagaccaagagtggagaggtcgagcggaactaggctagcagcagtttccacacaagccaaaaccaaaaccaaaaccaaaaccaaaataaaaactgtagttgtcaaagtaaaagaaaggttgagtctagtttacgccaaatgtgtcttcttattcttctccttcttgtcagacccattactataaaagaagccacactgcatccttctccatacccttgtattttctttatccaataataataactccattttccctctgtcttccccccctcctctacacaaaaatatattattagcatggagaaggtgaattttgtgaagaatggagagcttagattgcctccggggttccgtttccacccgactgatgaggagctggttctgcaatacttgaagcgcaaggtcttctcctgccctttgccagcctctatcattcctgagcttcatgtttgcaagtctgatccttgggatttgccaggttcctttctattttccattcacacccatcatcccctttctctttctctaatttcaattccatgcccccatttttaggtgatttggagcaagagagatacttctttagcaccaaagtggccaaatatcccaacggaaatcgctccaacagagccacaaattcgggttattggaaggcaactggcttggacaaacaaattgttacttcaaaaggcaacaaccaagttgtcggaatgaagaagacacttgttttctacagaggcaagcctcctaatggatccagaactgattggatcatgcacgagtatcgcctcatccttaacgcctctcagtctcagagccatgttgttcccatggaaaattgggttctgtgtcgcatatttttgaagaggagaattggtgctaaaaatggggaggagagcaactctaaggtggttttctatgacttcctagcgcagaacaagaccgattcctcctcatcggtcgccagtggaattacacatgaatcagatgaacatgaagagagcagtagctccaacaccttcccttatactattagaagaaaaccttaacaaccttccttaaaaatttaagttcattatctagttgttgtttttaattgtctttccctttccctgtaattatcatcaatcacttgttgaaaggaagcatcctcttcccaaatgagaccggcattaagggtagtctggagagtatggtactaatactagtagtagtgtgtaatacacttctcatttcccttcaatttaacccctttttttcta

SEQ ID NO: 28673 - DNA, 1532 bp, Glycine max
  Clone ID: TF_GmC5702_1
ctcccgcacatgctcccttggcctcatcttgcttcgccttggtcatccttctgtgctctcaaaacctcctgaggctcacttcctctactggccggggccctttcctcgtgctccggcctcgtctgcgaggcgagcggttctggcgtggctcctctttcctcgccttccctctcgcatccccccttggcacccacgtccgccgcccttgaagctaagaaacagtgcaaccgtccactcctccaagctgtctgttttcctgtgtagttcttttgtctgctttcctttgtccttgagagggtttcatttttttgcgtatcacaaaaggtaacagagtcaaaaccctgcaaaaagtacaaaatgatgccaggcaatggacagttaactgttcctccgggcttcaggttccaccctactgatgaggagcttctctactattacctgaggaagaaagtttcttatgaagtcattgatcttgatgtcataagagaagtagatctcaacaaacttgagcctggggacctcaaagataagtgtaggattggatcagggcctcagaatgagtggtatttcttcagccataaggacaagaaatacccaacaggaaccagaacaaatcgagcaactacagctggtttttggaaagcaactggaagagacaagtccatataccacactaattccaagaggattggcatgaggaaaaccctagttttctacactggtcgtgctcctcatggccagaagactgattggatcatgcatgagtatcgccttgatgaagatgatgctgatgttcaagaagatgggtgggtggtatgcagggtcttcaaaaagaaaaaccaaagccgaggtttccaacaagaacttgaagaagaagagcacttaaccacccacatgagagcaagtggtccatgccaggttctagagcagaagcatcttcacatgcaaggaggaccatatgatcattacaactttgatgggacaatgcacctcccacagttgttcagtccagaatcagctattgcaccacctacaaattcttccttggccttatccatgaatgccatggacatccttgagtgctctcaaaacctgttgaggctcacaaccactggctgtggacttaatcttatgcagcaacaacaagaagagaggttcagtggtgactggtctttcttggacaagctactagcatcacaccatggcatggatcaaagcaaatgtaaccctcctactaatcatcatgctgcaactgctgtgggcacttctgctcaaaaattcccatttcattaccttggctgtgacaccacccatgatatcatgaaattttccaagtaggaagggatattgcattttaatgtgttattatacttaaggtgatcatgaggtgagaaatatttggtttctaagtatgtgtaatatgtagcaccttgttagatactcattgagattccactcattaatttagttatttcttgagtgtcaattgtatatatgtctatgatatcttttacgtttaattaaaaaaataa

SEQ ID NO: 28674 - DNA, 488 bp, Glycine max
  Clone ID: TF_LIB3242-060-Q1-J1-E1
ctcgagccgttgaagaattaagaagaaagtttttgtagttaatttttctccaaagggtatgcatgccacctcctcttgagtagtggaatattcataaaacgaagagcttaattgaactttctttcaacattttctaaagttttttcctaagatgtctatcatgtcactttttgtatggtacagaaggaaaaggaagcaattatcaaggaggggactacggaaatagaaatggaaggaactcgtgcaaaagagggaaccctaccaccgggatttcgatttcaccctactgatgaagaacttgtcacttgctatctcgtaaataagatatcagattctaattttacaggcagagcaataactgatgttgatctcaacaaatgtgagccatgggagcttccagggaaagcaaagatgggagaaaaagaatggtacttcttcagtctgagagaccgtaaatacccaacgggtgtgagaacaaatcgagcaac

SEQ ID NO: 28675 - DNA, 1240 bp, Glycine max
  Clone ID: TF_GmC5682_1
tgccaaaagcaagagaaaaattcacacatacacacacaaagaaaattagagagagagagagaagataagatgggtgtgaacgaagatttcaacaaggatattgatgatcatcatcatgagtatgtggatgatgatgatgttcctcttccggggtttcgtttccaccctacagatgaagaacttgttagtttctatcttcgaaggaagcttcacaagaaacccatcagcatcgagctcatcaaacagattgatatttacaaatacgatccttgggatcttccaaaaaccagtgccactgcagaagagaaagaagggtacttcttttgcagaagagggaggaagtataggaacagcataaggcctaacagagtcactggctctgggttctggaaagcaactggcatagacaagccagtgtactcacatggaggagaaggaaatgactgcattggcctaaaaaaaacactggtgtactaccgtggcagtgcaggcaaaggcatcaaaactgattggatgatgcacgagtttcgccttccttctaacaaagacaacaccaccaaccttcccagctccaagaattacgtagatgttccccaagaagctgaaatttggacattgtgtcgaatattcaagagaaatgtctcacagagaaagcacacgccagacttgaaacaattatctgctaagcgccactccattcatgacaagaactcaagaatgagcaacgtggagttcaacaatactaatcaagaatcatatataaactttggtggccactatcagaatgagcagaaacccgtgattaactacacaaacagtgatcaaaggaatcagtatcatgtgatgactcatcagttgtttgctgctccagtggcacagcatcatcagcaacctcaacaactaacttctccatcttctaacttttggcttaacagccctcctgggaacgacttcttcacgtttgataactgggatgagcttggatctgtagtgaagtttgtggttgattagcctagcttgtagataaaaaagatgtggttcatgttgagttgatcctagttagatacttagatgttacttagaatgaaatatactccctcccgtcttttttataagaaacaagacttatatatactgaaatttgtttcttataaaatgaaccagaggtatatcataagagtgcgtttgcatgtattagagagtattgatgttggtgatcatgacttttagtagccatgag

SEQ ID NO: 28676 - DNA, 1587 bp, Glycine max
  Clone ID: TF_GmC648_2
cccacgcgtccgtacggctgcgagaagacgacagaaggggggatttagacgccattgtcaaacccttttcacttctctctagggttttggctctctctctctctctcccttccttattcctttctacctctcacacccttctcaatgaccaacgacaacatcgccgtgacagatctcacttccgccctcaatgaagagaatcgcgccgacctagtcaatgctctcaagagcaagattcagagtctggctggggctcattctgatgttctggagactctatcccccaatgtcaggaagcgtgttgaatctcttagagagattcagggtaaacatgatgaaatagaggcagacttcttgaaggagaaagaagctcttgaagccaagtaccaaaaattgtatcagccattgtacacaaagcgctatgaaatcgtaaacggtgttattgaagtggaaggggcagcaaatgaaacaacagatgaatcagaagaggataaagagaaaggagtgccttctttttggctcaatgcaatgaaaaataatgacgtgttagctgaagagatttcagagcgtgatgaaggtgctctcaagtttcttaaagatatcaagtggagcaggatagaaaatcctaaagggttcaagcttgatttcttctttgataccaatccttacttttcaaataccatcttgacaaaaacatatcatatgattgatgaggatgaacctatattggagaaagcaattgggacggaaattgaatggtacccgggaaaatgcttgactcagaaggttttgaagaagaagcctaagaagggttcaaagaatgctaaaccaattaccaaaactgaaagctgtgaaagcttcttcaattttttcaaaccaccagaagtccctgaagatgatgctgacattgatgaagatttggctgaagaacttcagaatcagatggaacaagattatgacattgggtcaacattaagagataaaattatccctcatgctgtatcatggtttactggggaggccgctcagggagatgagtttgaagacctggaggatgatgaggacgaagaggaagatgaggacgaagatgaggacgaagaggatgacgaggacgaagacgatgaagaggaggatgacactaagactaaaaagaagaagagtggtaaggcacaggctggtgatggtgatggtgagcgacctccagagtgcaagcagcagtaattgtttgtttcttcggagtatcatgtggctgatgggtgtttttgaggtcctatggtgcctgacgggaaagtgggtttcaatttcatgcaatttttcatagtccttgattcattttcctccctagatccgatagtctgaatttattgagtcaatttctcctttttcccatattttgggagaatgtggttatatatttgtagtcagggatgctgtgatttgttactgttggaatttgtacgtcattccagacacttcacatatattataggttgtgctttgttactattatttttcttattaatttatttattcacaattttgttaacttgtatttatattgaggcaagaagttcattttttccccct

SEQ ID NO: 28677 - DNA, 1602 bp, Glycine max
  Clone ID: TF_GmC532_1
ctcgagccgttcgttttcttttccctccctcgttagcagttttcgttctccattctctccattccttcgccatgtccgatctcggctccgatcttcctgctgccgccgccgctcttagtgctgaggatcgtgctggtctcgtgaatgcactcaaggacaagctccagctcctcgctgggcaacatgtggacatcctggagacactgccacccaaagtcaggcaacgcgtggaaattctcagagatctgcagagtcaacatgatgaggtggaggctaaatttttagaggagcgatcaaagctggaggctaaataccagaagctctatgaaccgctttacacaaaaaggtatgagattgttaatggtgtggtagaggttgaaggagttacaaatgttgcagtaccagaagaagctaacaaagctgcagaagacaaaggagtacctgagttctggctaactgcaatgaagactaatgaaacactagttgaagagattactgaactggaggaggggtctctaaaatatcttaaagatatcaaaaggtatattaatgatattcattagggcatcattctcgattcttagggctttaagctggattatttcaagaattccgagcttacaaaaacatatcacatgattgaagatgatgaccctatattagagaaagcaatagggacggagattgagtggcatccaggaaagtgtttgacacaaaagattcttaagaagaagccaagtaaaggatcaaagaatgctaaacccatcacaaaaacagaaaaatgtgaaagtttcttcaactttttcaatcctccccaggtccctgaggatgatgatgatattgatgacgatgctgttgaagagctcgagaatttgatggaacatgattatgacattggttctacaatccgggacaaaattattcctcatgccgtgtcatggttcacgggggaggctgcacagagtgattttgaggatatagatgaagatgattatgaagatgaagaaggtgatgatgatgatgatgaggatgaggatgaggatgaggatgaggaggatgaggaggaaaagaaagggaagagcaagagtaagtctaaactgcagagtggtggcagggccatacctggtaaagatcagccgatggagcgtcctcctgaatgcaagcagcagtagtgtttggctgtgtacaaacagacctgggtatatttagtttcagagaagtaatcactgtagagtctgggttatttcagtcataatttgcaatttaattattattattattatgattattattattgtctgctcttttttattgggctgggggttggtggtggtaatttttttttttggcctgtgatatggattttatttctctctgcttttagtttttttctgaaaaagaaaaaagtaaagtgataagtatattcatgacgttgtccatatttattgtttgtgttatagtccgttatatgaaactgtacagatttgctaaaaagctgctgattgggttagttgacctgtgtcctgtgccagtgtgatatggattttatttctatctttctcccggggggaaaaaagggggcatatctactatttacccccc

SEQ ID NO: 28678 - DNA, 717 bp, Glycine max
  Clone ID: TF_GmC648_6
cccacgccccacgccacccgccacgggttggagggtcgccacgtttagcaataaccaaaccctctctactcttttttcttctccttctcttcgctagggttttagcttcttcctcttcacttcgttctttttcgcctctacaatgagcaacgacaaggacacattcaacgtcgccgatctcacttctgctctcaacgaggacaatagagcagaccttgtcaatgctcttaagagcaagatacagagtttggctggacaacactcggatattctagagtctctgtcgcccaatgtccgaaagcgtgttgaggttcttagagagatccagggccaacatgatgaattagaggctaaattttttgaagagagagcagctctcgaggccaaataccaaaaattgtatcaaccactttacacaaagcggtacgaaatagtaaatggtactacggaagttgaagaaggggcagtgaaagaaacagcacctgataatgaagaggatcaagagaaaggagtgcctgcattttggcttactgctatgaaaaacaatgaagtgttggctgaggagatttcagagcgtgacgaaggtgctcttaagtatctcaaagatatcaagtggagccggatagaaaaccctaaaggattcaagcttgactttttctttgataccaacccttattttaccaattctgtcttgacaaaaacatatcatatgattga

SEQ ID NO: 28679 - DNA, 643 bp, Glycine max
  Clone ID: TF_GmC532_3
ccctctcttccgctgttgaagagctcgagaatggggtggaacatgattatgacagggggtaagtcagtagtgaatacttgagcgatatttcttattccttttgatctgagtgatgaagacttttggtctatcaataatacttttcattgatattaaagcttagtgtatttattatctgatggtccctagttggaaaaggctttttttttttaattatttgttctcggaaactaactaaataaagatgtaaaaccagagaacaaataattgttgaacttgaaatgtagtttggcatgttgagtataaagttgtttatagtacacgcccaacattatgaattcatgtccttaaaactgtaattacttttgtgccattcttgtaccagaaaaagatcagaatgaacagatattaacctttggaagaaaatgttgacatttatggatgacaccaaatgactgtttatggtgctgttcactactattttttagatgtattttttattgacgtgcaactgcagttctacaatccgggacaaaattattcctcatgccgtgtcatggttcacgggggaggctgcacagagtgattttgaggatatagatgaagatgattatgaagatgaagaaggtgatgatgatgatga

SEQ ID NO: 28680 - DNA, 454 bp, Glycine max
  Clone ID: TF_uC-gmroLIB3259P244c01b1
cccttcccggacgcctggggggtgaacccatatttgagaaagccattgggactggaattcaatggcccccccgaaaaagtctggcacccaaaattctttagaaaaaacccaaaaaggggttggagaatggttaacccattacccaaactggaaattggggaagcttcttttattttttttacccccccccaggttcttgagatgatgaaaacatccattaaaatgtggctgggggacttccgaatcagatgggaccagactatttcatatggtccccaataagagacaagaatatttcccctgctgtatcatgggttactggggaggccactcccggggacgagttttgggatctggaggacgatgaggatgatgaagatattgaaaaggacgatgattaagatgaagaggacgatgaccattattatgattaccattattattaggaagagag

SEQ ID NO: 28681 - DNA, 742 bp, Glycine max
  Clone ID: TF_LIB4203-002-R1-K1-H7
gggcaatccagaagcgagccggagcgcggggcgcgagtcgaggagcccagccgagccgccgccgcctccccgccttcagcgagagccccggccgggggctcgccacaacgcgcccgggcctgcctccgcgtcaggccccgcgggcagtgccaggcagccagggggagggcaggcaagtgagcgccgggaggaggcggccggagcgagcgggcgccgcgcgtgtggcgtgaggggaagccgctggccgcccccttggccgtcccttcgctccccctccccgctccccgccccgatcgcggagggcaccatgtctgcgccgacggccaaagccagtaaaaaggagctcaactccaatcacgacggggccgacgagacctcagaaaaagaacagcaagaagcaattgaacatattgatgaagtacaaaatgaaatagacagacttaatgaacaagccagtgaggaaattttgaaagtagaacaaaaatataacaaactccgccaaccattttttcagaagaggtcagaattgatcgccaaaatcccaaatttttgggtaacaacatttgtcaaccatccacaagtgtctgcactgcttggggaggaggacgaggaggctctgcattatttgaccagagttgaagtgacagaatttggagacattaaatcaggttacagaatagatttttattttgatgaaaatccttactttgaaaataaagttctcttcaaagaatttcatctg

SEQ ID NO: 28682 - DNA, 1290 bp, Glycine max
  Clone ID: TF_GmC532_2
cccatcttccgctgttgaagagctcgagaatttgatggaacatgattatgacattgggtaagtcagtagtgaatacttgagcgatatttcttattccttttgatctgagtgatgaagacttttggtctatcaataatacttttcattgatattaaagcttagtgtatttattatctgatggtccctagttggaaaaggctttttttttttaattatttgttctctggttttacatctttatttagttagtttccactgaaaaatatttgttgaacttgaaatgtagtttggcatgttgagtataaagttgtttatagtacacgcccaacattatgaattcatgtccttaaaactgtaattacttttgtgccattcttgtaccagaaaaagatcagactcgagccgattcggctcgaggtgaaagtttcttcaactttttcaatcctcccgaggtccctgaggatgatgatgatattgatgaggatgctgttgaagaactccagaatttgatggaacgtgattatgacattggttctacaatccgggacaaaattattcctcatgctgtgtcatggttcacgggggaggctgcacagagtgattttgaggatatagatgaagttgattatgatgatgaagaaggtgatgaggatgaggatgaggatgaggatgaggaggaggaggaggaggaagaggaggaaaagaaagggaagagcaggagtaagagtggtggcagggtcaaacctggtaaggatcagccgactgagcgccctcctgaatgcaagcagcagtagtgtttggctgtgtacaaacagacctggatatgtttagtttcagagaagtaattactgtagagcctgggttatttcagtcataatttgcaatttaatgattatcatcattattattattttctgctcttttttattgggctgggggttggcggtggtatttttttaagtctctgcttgggtttctttgagttgccctgttatttggattttatttctctctggttttagtgttttctgaaaaaagaaaaagtaaagtgctaagtatatttgtgtcgttgttcatatttatagtggattataatatgaaactgtacagatctgcttacatttttctgcttctgcttgggtttcctgggttggtagatctgtgtcctgtgtgatggattttatttctctctcgttttattcattttgtattagcatttgaaactgtacagatctgcgtataatttctgaaagaaagaaaagtgataagtatatgtgtgtcgttgtccat

SEQ ID NO: 28683 - DNA, 693 bp, Glycine max
  Clone ID: TF_GmC648_5
ccaatttaccaaaaaccgagagctgtgaaagtttcttcaattttttcaaaccacccagaagtccctgaggatgaggctcgagttgatgaagatttggctgaggaacttcagaatcagatggaacaagattatgacattgggtcaacaataagagacaaaattatccctcatgctgtatcatggtttactggggaggctgttgagggagacgagtttgaagacctggaagatgatgaggatggagatgacgatgaggatgatgaagaggaggatgaggacgaagatgatgatgacggcgatgaagaggaggaagacagtaagactaaaaagaagtcatctgctgttaagaagagtggaagggcacaggctggtgatggtgagcgacctccagagtgcaagcagcagtaattgtttatttcttcggagtgtcatgtggctgatgggtgtttttgaggtcctatggtgcgcctgatggaaaagtgggtttcagtttcatgcaatttttcatggtccttgattcattttcctccttagatcctatagtctgaatttattgagagtccatttcttctttttcccatccattttgagagaatgtggggttatattatagtcagggatgctgtgatttgttactgttggaatttcattccagatacttaaaatatatcataggttgtgctttgttactaa

SEQ ID NO: 28684 - DNA, 183 bp, Glycine max
  Clone ID: TF_700899387H1
tctcgagccgattcggctcgaggtgaaagtttcttcaactttttcactcctcccgaggtccatgaggatgatgatgatattgctgaggatgctgttgaagaactccagaatttgatggaacgtgaattatgacatgtggtatctacaatccgggacaaaattattcctcatgctttcatggtc

SEQ ID NO: 28685 - DNA, 2162 bp, Glycine max
  Clone ID: TF_GmC648_4
accggtccggattcccgggtcgacccacgcgtccgctctctctctctttagggttttggctctctctctctctctccctccttattcctttctacctctcacacccttctcaatgaccaacaacaacgacaacatcgccgtgacagatctcacttccgccctcaatgaagagaatcgcgccgacctagtcaatgctctcaagagcaagattcagagtctggctggggctcattctgatgttctggagactctatcccccaatgtcaggaagcgtgttgaatctcttagagagattcagggtaaacatgatgaaatagaggcagacttcttgaaggagaaagaagctcttgaagccaagtaccaaaaattgtatcagccattgtacacaaagcgctatgaaatcgtaaacggtgttattgaagtggaaggggcagcaaatgaaacaacagatgaatcagaagaggataaagagaaaggagtgccttctttttggctcaatgcaatgaaaaataatgacgtgttagctgaagagatttcagagcgtgatgaaggtgctctcaagtttcttaaagatatcaagtggagcaggatagaaaatcctaaaggattcaagcttgagttcttctttgataccaatccttacttttcaaataccatcttgacaaaaacatatcatatgattgatgaggacgaacctatattggagaaagccattgggacggaaattgaatggtacccgggaaaatgtttgactcagaaggttttgaagaaaaagcctaagaagggttcaaagaatgctaaaccaattaccaaaaccgagagctgtgaaagtttcttcaattttttcaaaccaccagaagtccctgaggatgatgttgacattgatgaagatttggtatgacagtctgtcccaataaacctaaggctaaaaatatgaagcttttgtctattgctataataacttaattttttcaacaggctgaggaacttcagaatcagatggaacaagattatgacattgggtatgcctaattgctaccttttgcttgtatgagctaccttatatatgagctaccttatatttttcttgtccaagctgttgcttgctcttagcataatttttcttgtccaagttgttgcttgctcttagcataatttttcttgtccaagttgttgcttgctcttagcataatttttcttgtccaagttgttgcttgctcttagcataactgttgttgctacttgcacctgtattcttgaatctgttcttagttaatcttgattcctgtgtaggtcaacaataagagacaaaattatccctcatgctgtatcatggtttactggggaggctgttgagggagacgagtttgaagacctggaagatgatgaggatggagatgacgatgaggatgatgaagaggaggatgaggacgaagatgatgatgacggcgatgaagaggaggaagacagtaagactaaaaagaaggtatactgttaattgatatggagtgttgaaaccttggtttattctttattttatttgaggtttgaacgtgagttaatgcatttgtttttcacctgcactgtgttgtcaatttcctctggaatgttgctgcagtcatctgctgttaaggtgagatattttgattttgtgatctgaatgaaattatatggacacatgattttgcccaagatatgtcatgtgttttctgttataaatttgttttgcttgatgttgtatactttacattctttatttttcattgctctggtcattgcattcctgatttccattttgggttataaattttcagaagagtggaagggcacaggctggtgatggtgagcgacctccagagtgcaagcagcagtaattgtttatttcttcggagtgtcatgtggctgatgggtgtttttgaggtcctatggtgcgcctgatggaaaagtgggtttcagtttcatgcaatttttcatggtccttgattcattttcctccttagatcctatagtctgaatttattgagagtccatttcttctttttcccatccattttgagagaatgtggggttatattatagtcagggatgctgtgatttgttactgttggaatttcattccagatacttaaaatatatcataggttgtgctttgttactaaaaa

SEQ ID NO: 28686 - DNA, 1494 bp, Glycine max
  Clone ID: TF_GmC602_2
ccacgcgtccgccctcaacgcgaccacttttctttttttcctacacttttcatttggcttcctctgcctcgcttttgaaaacgcgcgtttcaggcgaagatggttggcgacaacacgaagaagttgaaagtcgccgagaatttggaggatagcatcgacggcgaactcgtcctctccatcgagaagctgcaagaagtccaagacgagctcgataagatcaatgaagaggcgagtgataaggtcctcgaagtagagcagaagtacaatgagataaggaagccagtttacgataagcgaaatgatgtcgtcaaatctattcctgatttctggttcactgcttttatgagtcatcctgccctttgtgaacttctgaacgtagaggatcaaaagatatttaagtatttgggttctcttgatgttgaagataataaagatgtcaaatcaggctactcaatcacctttaatttcaatcccaatccctattttgagaatacaaagcttacaaagacttttaccttccttgaagaaggaacaacaaagataactgctacccccataaaatggaaagagggcaagggattacccaatggacttgatcatgacaagaatgggaacaagcgggctcgtattgatatcagtttctttagttggtttagtgactgtgagcagaaagatgatgtggatgaaattcatgacgaggttgcagaattaatcaaggatgatttatggccaaatccactcacttatttcaacaatgagcttgatgaagaggatgttgattctgaagctgatgatgaggaaaacgatgaggatgactctgaagatgatgaccaagaggagaatgacgctgggagtgaggatggcaatcacagttgaaaaatgcattatggtgctgttccctgtttatttgtctggttgagtatgtaaggcttttaggcgtggtgagcgtttccattttttcgaggtgttaactcaaggtggagctatatagaaagtggttctttgaccatataatttattaattaccctgtgaagttgtttcgctggtttcagccttcatgcactttttttgtgatactagtaacatactagctctctatcggttcttttttgtggaattacatattaaaattacagtatttattgtatatttggatttcttggcataaggattacccttcaaggcattttaccgatatagaaccatttcaaatgctatgttgatctgttttccttcgacctgatggaatgatcctttcatcccttttctaccgatacagaaccattttataacacagtttgctgtcacaactggacataaactgcatgtttcatttgaatttatgttaaacatagatacagtcacacatgcagtcgtggccagttatgactttttctatgcaactagcatcaatacatgttaacgtgtggagccgtcaaattgtgacatgtaattacttaatgttgatgcaataatgagtgtttgcactacgg

SEQ ID NO: 28687 - DNA, 1928 bp, Glycine max
  Clone ID: TF_GmC648_1
aaatctgttgggattagtagatttgaagtgtggttagttctggttattgttttgaattggtcgggactagtagatgtgaagtgttgtgtagccttgcatgtaagtttttatgttgattgggggcatatgcgtcaaggtagcatttttatgttttgtaacttccaccatgtcgtcgtgtgcttgttttcaagattttttcccccctaaccctggtctgcagtcccggcggccacggcatcccgtccctacaaatgctggaaggctgcgaaaagtggtgcaaaggaggaagaggaaaaagaggattggagggtcgccacgtttagcaacaaccaaaccctctctactctttcttcttctcttcgctagggttttagcttcttcctcttcacttcgttcttctggcctctacaatgagcaacgacaaggacaccttcaacgtcgctgatctcacttccgctctcaacgaggacaatagagcagaccttgtcaatgctctcaagagcaagatacagagtttggctggacagcattctgatattctagagtctctgtcgcccaatgtcaggaagcgtgtggaggttcttagagagatccagggtcaacatgatgaattagaggcaaaattttttgaggagagagcagctcttgaggccaaataccaaaaattgtatcaaccactttacacaaagcggtatgaaatagtaaatggtgctacggaagttgaagaaggggcagtgaaagaaacaacaccagatggtgaggaggatcaagagaaaggagtgcctgcattttggcttactgccatgaaaaacaatgaagtgttggctgaggagatttcagagcgtgatgaaggtgctcttaagtatctcaaagatatcaagtggagcaggatagaaaacccgaaaggattcaaacttgagtttttctttgacaccaacccttattttatcaattctgtcttgacaaaaacatatcatatgattgatgaggatgaaccaatattggagaaagcaattgggactgaaattcaatggcacccaggaaaatgcctgacacagaagattcttaagaaaaagcctaagaagggttcaaagaatgctaaaccaattaccaaaactgaaaattgtgaaagcttcttcaatttcttcaacccaccgcaagttcctgaagatgatgaagacattgatgaagatgcggctgaggaacttcagaatcagatggaacaagattatgacatagggtcaacaataagagacaagattattccccatgctgtatcatggtttactggggaggccattcagggggatgagtttggagatctggaggatgacgaggatgatgaagatattgaagaggatgatgatgaagaggaggaggaagatgaagatgacgatgatgacgaagatgatgaggaagaaagcaagactaaaaagaagtcatcagcacctaagaagagtggaagagcacagcttggtgatggccagcagggtgagcgacctccagagtgcaagcagcagtagatgcagaaggtcatttatgtagttgttgagttttgttggtgttcgagaatgtttgatgtgaaagtgggtttcatgttttaatgcttcttaagttgattttcctcactatatcttggtagttcgaatttgttgagagtcccttctcttattttgcgcctggtagagagaatgtggttataggtagagatgctgtgatttgtttatgttggaatttgtactgccgtgtcaggtatacttgaaatatagttcgtgctttcaactagtaatttttgctgttttactgaactcagtatacttgatttatagtttgtgcgccaactagtaatttttgctgttataagaacttgattatagctcaatcaacattgttttaagtattggaaggaagtctatgtaaaggttaaa

SEQ ID NO: 28688 - DNA, 1411 bp, Glycine max
  Clone ID: TF_GmC602_1
tacggctgcgagaagacgacagaaggggactctttgtcttcacactccccttactcgctcgacctagaactgtgttagggttttacgaaaccaccgaagttgcagaaaaaggaagaaagaagaaaaaatggtggctgacaggagcaagaagccgaaggtctccgagaagggcgaaaacctcgatgaaatcgacggagaactcgtcctctctatcgaaaagttgcaggagatccaagacgagctcgaaaagatcaatgaggaagccagtgacaaagtgctcgaaatagagcagaagtacaatgagatacggaagcccgtctatgataagaggaatgatattatcaaggctattcccgatttctggttaactgcttttttgagccatcctgctcttggtgatcttttgaacgaggaagatcagaagatatttaagtatttgagttctcttgaggttgaagattttaaagatgtcaaatcaggctactcaatcacctttaatttcaatgccaatccctattttgaggatacaaaacttgtaaagacttataccttccttgaagaaggaacaactaaggttaattgctacacccataaaatggaaagagggcaagggcatacccaatggagttaatcatgagaaaaaaagggacaagcgtggctcctactgatgtcagcttctttagttggtttagtgacaccgagcagaaagatgatatagatgacattcatgatgagggttgcagaattgatcaaggatgatttatggccaaatccacttacctatttcaacaatgaagaacctgacgaagaggaaggtgatgaggatgaagctgatgatgagggaaaggaggatgaatctgatgatgatgatgacaatcaagaggaggatgacgatgagggtgaggaggatgattacaagtgaaaaatacattatggtcatattacttttttttttttggggttgtaggagtatttaagcgttctttaggggatgatcatggcctccctttgtggttgtcatcttatgtcagctggtggagctaccaaggccagttattggttctctctctgactatagcctatttattgtcctacgaagttatttctggtttcatcccttgtgcactttttcagatactaatgttacatcgtttcttttttcataaccctttgtcgtggaactaaatagtaaaaattgcagtatttagtgtatagcagagtccagtttggtatttcttagcgtgcaggataccatgggaagcatttatcagatacagatgttcaaatgctatttcaatgttatccaatttatttcctcttaccaatgactgttgggattaatctttcaccaaataaaagtaatgctacttgcccagaaaaaaaaaaaaaaaaaaaaaaaaaaaaaaccaaa

SEQ ID NO: 28689 - DNA, 1696 bp, Glycine max
  Clone ID: TF_GmC648_3
gcgaccacgcgtacggtgtcggcgttttagcttcttcctcttcacttcgttctttttcgcctctacaatgagcaacgacaaggacacattcaacgtcgccgatctcacttctgctctcaacgaggacaatagagcagaccttgtcaatgctcttaaggttagtattttctttattctttctctgtgaagttgatattgagatttgaatttctcaatttttacaagttcattttactgtttgcattgtgtgtatttttttttttcaatgtttaattgtgagcagagcaagatacagagtttggctggacaacactcggatattctagagtctctgtcgcccaatgtccgaaagcgtgttgaggttcttagagagatccagggccaacatgatgaattagaggctaaattttttgaagagagagcagctctcgaggccaaataccaaaaattgtatcaaccactttacacaaagcggtacgaaatagtaaatggtactacggaagttgaagaaggggcagtgaaagaaacagcacctgataatgaagaggatcaagagaaaggagtgcctgcattttggcttactgctatgaaaaacaatgaagtgttggctgaggagatttcagagcgtgacgaaggtgctcttaagtatctcaaagatatcaagtggagcaggatagaaaaccctaaaggattcaagcttgactttttctttgataccaacccttattttaccaattctgtcttgacaaaaacatatcatatgattgatgaggatgaaccaatattggagaaagcaattgggactgaaattcaatggcacccaggaaaatgtctgacacagaagattcttaagaaaaaacctaagaagggttcgaagaatgctaaaccaattaccaaaactgaaaattgtgaaagcttcttcaatttcttcaaccccccgcaagttcctgaagatgatgaagacattgatgaagatgtggctgaggaacttcagaatcagatggaacaagactatgacatagggtccacaataagagacaagattattccccatgctgtatcatggtttactggggaggccattcagggggacgagtttggagatctggaggacgatgaggatgatgaagatattgaagaggacgatgatgaagatgaagaggacgatgacgatgatgatgatgacgatgatgatgaggaagagagcaagaccaaaaagaagtcatcagcacctaagaagagtggaagagcacaacttggtgatggccagcagggtgagcgacctccagagtgcaagcagcagtagaagtatttatgcagaatgtcatttatgtagttgagttttgttggtgttcgagaatgtcctaatgtgaaagtgggtttcatgttgttttttaatgtttcttaaattgattttcctccctatatcttggcagtccgaatttgttgcgagtcccttctcttattttgcgcctggtagagagaatgtggttataggtagagatgctgtgatttgtttatgctggaatttgtactgccatcagtatacttgattatagtttgtgcgccaactagtaatttttgctgttataagaacttgattatagctcgatcaacattgttttaagtattggaaggaagtctatgtaaaggttaccgtaaggttcatgttagtgtttattattgttaacgctac

SEQ ID NO: 28690 - DNA, 588 bp, Glycine max
  unsure (1)..(588): unsure at all n locations
  Clone ID: TF_LIB4127-038-Q1-K1-G3
aaatctgttgggattagtagatttgaagtgtggttagttctggttattgttttgaattggtcgggacttgtaaatgtgaagtgttgtgtagccttgcatgtaagtttttatgttgattgggggcatatgcgtcaaggtagcatttttatgttttgtaacttccaccatgtcgtcgtgtgcttgttttcaagattttttcccccctaaccctgcagggccaacatgatgaattagaggctaaattttttgaagagagagcagctctcgaggccaaataccaaaaattgtatcaaccactttacacaaagcggtacgaaatagtaaatggtactacggaagttgaagaaggggcagtgaaagaaacagcacctgataatgaagaggatcaagagaaaggagtgcctgcattttggcttactgctatgaaaaacaatgaagtgttggctgaggagatttcanagcgtgacgaaggtgctcttaaatatctcaaagatatcaagtggagcaggatagaaaaccctaaaggattcaggcttgactttttttttgataccaacccttattttaccaaatnctgtcttgacaaaa

SEQ ID NO: 28691 - DNA, 512 bp, Glycine max
  Clone ID: TF_GmC259_3
gagccaagtgttggacttagccgacgctgtcgtcttcaccgtataagaactatcgcctggttctgaacagtgtgtgattcggattccgacgaggatgtcgtcgttgggttccccgaagaagcggctgagatcccaaacagcagaagagaataaggaagaggtcgtttgttgcgggatttgctacgctgagcgtggggtttcgattacaggggaaatcgattgctgcagccaccacttctgcttcgtttgcatcatggaataggcccaattttccgccaaaggtttatcatcctcatggaaatatggcaactggtccggctgattcttatactgaaaccaaatgtggtgtttgtcatgctggaacagatgagcatcttctactactttgtgatctatgtgatactgcttcgcacacatactgtgttggcctgggctatactgtttctgatggtgataggttttgtcacgattgtgctatttcccgggagaccaatatcaatgaagaatcagac

SEQ ID NO: 28692 - DNA, 593 bp, Glycine max
  Clone ID: TF_GmC126_6
gttttgaaggtattgcaaatgtgagatgccttataacccggatgatctcatggtacaatgtgaagggtgcaaggattgggattatgtgattccagcgcctgcagaatgaacgccgtaaagggtgttaaggtgttgtaaaggtcaaatttggtagtaaaatgagaaggggaatggttgtgacaacaggaagctcatagaaaatgtaccatcctgcttgcatgggcatgactattgaagaagctaagaaactagatcattttgtatgttccgaatgttcatctgatgatgatatgaagaaaccccaagctacattttctgcatcactgggagctgatggcaaggtggagccgaagcggcggaagagatgaccatgtgaggtgtgtgtggttcttgcttaatttggctggctctatggtagcttttgtgtgttgtacggcttcttctagaggctataaacattgatttcatgtatttgattcaggttattatgtatctatccgttttacattttgttatgacaggtcatctgtttttccttttgtccattgatgagaactccgatccaagtgttaattcttgagaaaaaaaaataa

SEQ ID NO: 28693 - DNA, 2799 bp, Glycine max
  Clone ID: TF_GmC1741_1
ggcaaaatgggttaaatgatttccggggggaacgtggtaaagagagacaaaagtagattgtcccagagcaatccatccgctcgaatcaaatctcaccatccacacagaaaaacacactaccaaaccctaatctgaaaccatcgttccctctctttctttctctctctttacattctttctctctctatcaacctccaaactccgatcccgtatttctctcctcgctacccgatccagaggcttcaatcctttccccgtcgagatcttgcttcacgcgcctccaacgctggaccacgcgcctgtttccgcctccatcatggtcgtgagcggagggaagggcctcaaacgcgccgcgaagaagagagtcaccgccgatttctacgacttcctcacgttccccacgccgtcgctcgccgaagctgagaacttcgccggtggaccgttccgctccaacgtgcgcgcctttctgacgaagcacgcgcttcttccgccgccgtccgcgctcttcccgcacctgctgacgtggcagatcgtcttccgcgtcggcgagctcaccgagggccccgacgcgccggtagtgtgcctcgacgtcgtcgaggaggacgtcgccagatccagatctgtttactgtgatcagtgccgagttttcggtgagatgactcgccccttttttttgaggttcattgcttgttttgatttgccttgttatttctgtgttaataaggtatcaccaaaatggtctgaaacaagacttattttggatcaatgcaatgctatcgatcctgatcttacattttggtctattcgctctttctatcttcagatgtttttcttatttactttaatataccactgacgaacccaatcatcatcataaataacgattagagaacacgactcatcttttacatggcgtagtacacaccaatggatatgggcacctcgagccgaatcggctcgaggaagggggctctagatttctttctggtattcatattatggatttctgggatcgcctatgcaagactcttggagtcagaaaagtcagcgtgatggatgtttcaaagaaatatgggatagagtatcgcttgcttcatgccattatgaagggacatccatggtatggtgactggggttataaatttggctctggcagctactgtcttacacatgaatcatacaagtctgctgttgaaagcctatccaatctacccttgtccaccttttcccagggaaagatgcctgactctcgtgtgcaggatatgatcaaatattaccaatctttgtcagaacacgagcttgtaaatataagggacctcttttgtttcataatgggtttgattggtgatgctcacaagactgcatcaaatgttgatgagacaacctgcaagaagcgttgttttaatgcttctggactgtcaatatcatgggataagagtggcattgaacgtgtggagcaagccatgatcatagtgctgtgtgcagtgtctgagtccaagtgggtgagctggcgtgctcttatgggcgcagcctccaagttgggctcttcagagctgcttgattattgccttggagaactgggagggaaaatggtctatggtggaatggttgttaatagctacggctgcgtgaagacgacagaaggggagttcagacttgaggctgcaactggtgcttgctatggaattttagcaaagaataattctctgggctcgaagtatccatctgaagaaaacctcctacaatgcttgagatatttatacgactctttgcttcatcctcagatgatggtaaactatgaagcagggacaaggactcttgcaatgaactcagctcagaagctttttgactgcaagcagtttgtaaaagattataatcctgagatgtggccattgtcagattcgcagatgtttcgcctctcatgtcatgttgaacttgtagatgaatttgaagattcagaagctataactccaccagaattagttgtgctgcccctgaatgccacggtggctgagcttaagaatcaagcagcaaatgcttttcaagatgtatatctaaggttcagaagacttcaagttgatgggctacatggttatagcggtgtcgacgattccacccaggtcaagctcttgttaggatcgagagatgtagtttgtgtccgaggaagatgcatcgggaagaatgggttgagcaagttccgaatggaaaggggacttgagaggtggactgtagattgcagctgcggggccaaggacgatgatggagagagaatgttggcgtgtgatatatgtggagtgtggcgacacaccaggtgttctgacatccatgatactgatcctgttccagctcgttttgtttgcctgaaatgccaaaactgtgaatcaaaactcaaatgtagtgggcactgcaaagatgagaccgtgactaacgttagtggtagtagttgcttcagaaacggcttgccagtgccatctgatgttatttgattagtcagattagatgtgtatgaaaagctccttttttttttgctttggcctgaaagaacatgtacataacacagataggccttagaggtagtaggttcagggatggggcatgtcttgttcatatttcagcaggttctaccttcggttgtttattgtgtgtatatatagtactaactgaaagatgtggacgggggtagtgagagtattcaactttcttttcttctgttcaaaaggagcttcttggtaaatttagagcgaattctaatgattatgggtcttctttttatgctaaaagtgattatggtcttctgac

SEQ ID NO: 28694 - DNA, 614 bp, Glycine max
  unsure (1)..(614): unsure at all n locations
  Clone ID: TF_LIB4391-058-R1-K1-B5
aattggaggacaagtgttctggtgaaaggatccatgctatcgctggaaaaatggatgctgcaagtggctgagtttcatgctaatgctgtagtttctgtgaaacctaaaaagccttcctttaaagaaaggaaacagaagttgcttacctttctacaagagaagtatgaaccagtttgtgctaagtggactacagaacgatgtgctgtatgtagatgggttgaagattgggattacaacaaaattatcatttgcaacagatgtcaaatagccgttcatcaagaatgttatggagcaagaaatgttcaagattttacgtcatgggtttgtaaagcttgtgaaacacctgacatcaagcaggaatgttgtctttgtcctgtaaaaggtggtgctctaaagccaaccgatgttgacacattatgggttcatgttacttgtgcttggtttcgacctgaagtatcttttgctagtgatgaaaagatggagcctgcattgggtattctgagtattccattgaattcttttgtgaaggaaattcatggttcgtgcacacaatgttgcaagtgttccacttatttccatgctatgtgtgcatcaagggctggntatcggatgga

SEQ ID NO: 28695 - DNA, 617 bp, Glycine max
  Clone ID: TF_GmC1741_5
aagttccgaatggaacgtggacttgagaggtggacggtagattgcagctgtggagccaaggatgatgatggagagagaatgttggcgtgtgatatatgtggagtgtggcgacacaccaggtgttctgacatccacgacactgatcctgttccagcacgttttgtttgccagaaatgccaacactctgaatcaaaactcaaatctagtgggcactgcaaagatgagactgtgactaacgttagtggtagtagttgcttcagaaacggcttgccagtgccatctgatgttatttaattagtcagataagatgtgtatgaaaagctcctttttcttctgtttattttgctttggcctgaaagtacctgtacataacacagataggccttagaggtagtaggttcagggacggggcatgtcttgttcatatttcagcaggttctaccttcggttgtttattttgtgtatatagtctaacctgtgaagggtggagaggggaaatgtgagcatattcaactttcttttcttcagttcaaaaggagcttcttggtatatttagagcacattttaatgattatatgggtcttctgacaactcatctatttcaacatttttcttta

SEQ ID NO: 28696 - DNA, 2475 bp, Glycine max
  Clone ID: TF_GmC276_1
agaaaaaccacagccaaaagtcaagtggagcaaaaacaatgggcagctagtgcttccaaatagggtcactgttctctgcaatggtgttgaagtcataatttttccaagccttcatatagttgtgtgcaagtgtgggttttgcaggacagaaaagcaagcacttagtgcatgggaacgacacacaggttccaaattaagaaattggagaacaagtattagggtgaaagattctatgctacctctggaacaatggatgctgcagttggcagaatttcatgctactgctcaggttcccaccaaacctaagaaaccttctctgaaagaaagaaagcataagttgcttaccttcttgcaagagaagtatgaacctgttcatgctaagtggactacagaacgctgtgctgtttgtagatgggttgaagactgggactacaacaaaattatcatttgcaacagatgtcaaatagcagttcatcaagaatgctatggagcaagaaatgtccgagattttacatcttgggtttgtaaagcttgtgaaagacctgacatcaagcgggagtgttgtctttgtcctgtaaaaggtggtgctttaaagccgacagatgttgacacattgtgggttcatgtcacttgtgcttggtttcgacctgaagtctcttttgctagtgatgagaagatggagcctgctttgggtattctaagtattccatcaaattcttatgtcaaggtacgttttatgctggtaaaaattagtcacgcaaaggcacgtttttttcatcgtacaaagattttagacaaaatatattcaatggtatcttattgcgtattgcatttactttattggtttcaaatcgacaatcatagaaatttgataaaagcaagttgttgtagctgtttggcataaaggacattatctagactctgaattacttaatatttttatcattttgtgcaaatcctagaaatagcctctttgtttgcaagagtaaggctgtgttcgtctaccctccccaaactccatttggtgggagctttttgcattgggttgccttttgatgtctcttggtccactactcttaacaaatacctcgagccgaatcggctcgagtgaattttcagatttgtgttatttgcaagcaaattcatggttcgtgtacacaatgttgcaagtgttctacttatttccatgccatgtgtgcttcaagggctggttatcgaatggagttgcattgtttggagaaaaatggcaagcagacaacaaaaatggtctcttattgtgcttaccacagggctcccaatccagatacagttttgattatgcaaacccctcttggggtcatttcaactaaaagccttctccaaactaagaaaaaaactggttcgaggttaatctcatctagcagaaaaaagcaagatgactctcctgttgataacactgagcatgagccattttctgctgctaggtgccgtatctttcaaagaacaaaccataccaaaaagagagcagcagatgaagccgtttctcatcgagtgaggggtccctatcatcatcctttagatgcaatagagagtttaaatacacacagagtagtacatgaacctcaggcattttcttctttcagagaacgcctataccacttgcagagaaccgaaaatgatcgggtttgctttggtagatcaggcatacatggatggggcctctttgcacgaagaaatattcaagaaggagacatggttcttgaatatcgtggtgaacaagtgaggcgcagcattgcagatttgagggaggcacgctatagattagaagggaaagactgctacctgtttaagataagtgaagaagtggtggtagatgccactgataaagggaatatagctcggctgattaatcattcttgtatgccaaattgctatgccaggatcatgagtgttggtgatgaggagagccggattgtactcattgctaagactaacgtggttgccggtgatgagttaacgtatgactacttgtttgatcctgatgagccagaggaaaacaaagtcccgtgcctatgtaaagctccaaactgccggaaattcatgaattaggaaggattatacaaatgaaatgaacaccagatgactagactattgtttcttctccgcaaggagcactaaccccccatcccctcttctgcagggaagctcacagttacaccaaagctgtattttttatcaaaccaaaagaagagaaaacaaagtagggagaaaaaaaaaaggcatagtttagtgtttttcttttacccttttgatttcctttagacattcatcgaattttaataaaaacctagatttggtagcttttggctcttggcgtctctgtaaatgtatcaccttacattttactcattttcttctacttaatgtcaaccgatttcttcccttcatgtacttttccgatgatctaccaatctaattgtattgaaagatagtaat

SEQ ID NO: 28697 - DNA, 534 bp, Glycine max
  Clone ID: TF_uC-gmflminsoy049c10b1
ttctttgcgtccgctccctctgtgttccctggtgggaccgagagcggagattgttgtgccccttctgtcaccttccccactccgaaccaattacaaaaccctcaccgtctgaagtccttgctcatttccgtgccctcagttacagcgagaatgaaaggggggcgatcgcaccgccctcggagctcggacccgccggacgagtgggtggacgggtcctggacggtggactgcatctgcggcgtcaccttcgacgacggcgaggagatggtgaaatgcgactagtgcggcgtgtgggtccacacgcgctgctcgcgctacgtgaagggcgacgacaccttctcctgcgacaagtgcaaggccaggcacaacaaaaacaacaccaccaccaacaacagcaacaacaacagcaacagcactaccaaccccatggagaccgaggtcgcgcagttcctcgtcgaactccccacaaaaaccatctccatggacaataaaaaagccctcctctgcaggcccaggctctggaccgacagccca

SEQ ID NO: 28698 - DNA, 1114 bp, Glycine max
  Clone ID: TF_GmC6775_1
tttcatacgcaaagacctcaatattgagtaatcacgatgttcaagagaatatggtgagatagatatacattacagggtatcacacaaatctgaaagaaatttgtcaaacattctatgattcagaacgctgatatgagactcgaatcagggacttgtaatgtgtgctcagctgcttgttcatcttgcatgcatcctaaccgagctctcatggggtcaaaggctgaagaattctctgatgaaaactgtcgcttaggggaggttaatcagtattgtgatgagagtgatagatcttctcttgggagcagagcttgtgaaaggttgaagcatggtgtcagtgaaaccagtcacaagcctagtgtttcttccactcatgattctctatctgaaaatgctgagaacagtcaagccttatcagagaagtatcaggattccaagtgtttagaaagtcttgatgatagcacttcttgtattagtaggaccagtaatgctaatttagcgagcagttgccatcagataaatacagacagaataaatatatcttgtagttcaacttcagttagtcacttagtggcagaaggatctggaaatgggccaactgttgacatatctagtttgtcagaatgttgtatggaaaatgttgattcatcattgaccaaagagagagtacctattattgttcctggtgaaaaatctctggcagataaggaaaacctaaataatggtacagccaaggtttcaattgaaatatgtccaaagtcagaagaagatactgaaaataatgttgatgttgcggaagatgatgatcataaatattcagcccatgatggattgcatgagaaggttgaggagctgattaaatcatctggaagggctgaacctcaatcagaagatgagagtgatgaatcagatgttgttgagcatgatgtaaaagtatgtgacatctgtggagatgctggtcgtgaggatctacttgccatatgtagtaggtgcagtgatggtgcagagcacatctattgcatgcgggaaatgcttgagaaggtccctgaaggggactggttatgtgaagaatgcaagtgtgcagaggagactgcaaatcgaaagctagatattgaag

SEQ ID NO: 28699 - DNA, 247 bp, Glycine max
  unsure (1)..(247): unsure at all n locations
  Clone ID: TF_jC-gmXLIB3563P061bd07a2
ggaggggatttaatctgttgtgatggctgtccatcaacaattcatcagagctgcttggnaatacatatgctnnctcctggngaatggctttgnctaagtttaaaagtataaaatgatgaaaaggtttgatgttctagcttaagacatatataaaaggcagttccaatgggggggggaaatacacaactccattttacataaaacaatcctataaatagctagaaagagagagaataatcatgaaaaa

SEQ ID NO: 28700 - DNA, 211 bp, Glycine max
  Clone ID: TF_5819965
aagctctcttattacttcataataaacacttatattacttaataagctctactctagcaagaataatcttcacacatttaccataaaaccacttgtcacagatatcacagcaaatccagaattcatcagtaccataattctcaccacataccccacacaagatatctccatagtcatcattatcttactcttctagttcttcatcctcatc

SEQ ID NO: 28701 - DNA, 683 bp, Glycine max
  Clone ID: TF_GmC195872_1
ccacgcgtccggttccctgctgctactgagagcggagattcgtctcccccttctgttaccttccccactccgtaccaatcacaaaaacctcaccgcctgaagtcgctccccatttcggtgccctcaattaccgcgagaattatgaaaggggggcgatcgcaccgccctcagagctctgacccgccggacgagtgggtggacgggtcctggacggtggactgcatctgcggcgtcaccttcgacgacggcgaggagatggtcaaatgcgacgagtgcggcgtgtgggtccacacgcgctgctctcgctacgtcaagggcgacgacaccttcgcatgtgacaagtgcaaggccaggcacaacagcaacagcaacaacaccaccaccaccaccaccaacaccaccaaccccatggagaccgaggtggcgcagttcctcgtggaactccccacaaaaaccatttccatggacaacaaaaaagccctcccctccaggcccaggctctggaccgataagcccatcgaggagcgggtccatgttcagggcccaccgggcggagacccttccatcttcgctggccaaagcgcctcctcgattttcacgccccagctctggaaggcatgcgggtatgtccctaagaaagtcagttttaagtacaatgagttcccttttttgaatatgataac

SEQ ID NO: 28702 - DNA, 697 bp, Glycine max
  Clone ID: TF_GmC1724_4
aattttacaagtggggagagagagatttgttctggtattgttttgatcctcggtcaaaagaacacgcaaagcaaacccagtcacccccaacaaacacgagacaagccgtgtgcaaacaatagtcggtgtgaacccccaaaccctaatcgccaccacctccaatccttcgtttctatgaccgagtgctgttggggtcagcatgcgctagcttcgtcgtcgattttttggttggtgattctcgtgattcttttcgggcagaatttttgggtttgacggcatggatttggtaccgagcgtcaaggaaaaattaaactattttcgtataaaagagctcaaagatgtgctcactcagttacacctttcaaagcagggaaagaagcaggatcttgttgatcgcatattatctgttctctcagatgaacaagtttcaaaaatctgggctaagaagaatgctggtggtggaaaagaacaggtagcaaaattagtggatgatacatataggaaaatgcagatatcaggggccactgatctagcttctaagggacagggtgcatcatatagcagtagtgtaaaggttaaaagtgaatgtgatgatgcctttcaaccagatgtgaagattcgctgtctatgtggaagtagattcaaaacagagaaattggtcaagtgtgaagatgcaagatgccatgtgtggcaacac

SEQ ID NO: 28703 - DNA, 1388 bp, Glycine max
  unsure (1)..(1388): unsure at all n locations
  Clone ID: TF_GmC454_8
ggctcgagcagagttacacactctctctctctctgtcggtcaatttttcgatccgggtctattttattaagttctgaaccttgtggagcgttgtcacattccttgatgggaattgctgaattggggtgctcctgattctgtctcttcctctctctcactcaactttcttggttttgtgatccagttattggcttcattggccaggaatttcatctggggttgtcacaatctgagtgatccatctactttggtggcaaagattgctcttttaaggtcttattcagatccgagcttcaatttctataccaagagaaggagctgattctgaagtttgacttggagtggattagaagagagaaatcttccaaactgatctgagcaattggaaagtgcacaaggcttttaagtaacgtgtgtatcttgttgagcttaaagtatcttttgatccgttattggcatctgaatagagcttagttagagtctatgatggagtcagaaggagaagctggggcaaagccaatgaaaacattgggtggcaaaatctgccagatctgtggtgataatattgggaacaatgtgaatggcgatcctttcattgcttgcgatgtttgtgctttccctgtctgcagggcgtgctatgaatatgaaaggaaggatggaaatcagtcttgccctcagtgcaagacccggtacaagaggcacaaaggaagtcctgcaattcttggagaccaggaagaggatggggttgctgatgagggtgctagtgacttaaattacaattcagaaaatcagaatgaaaaacagaagattgagcgcatgttgggctggcaaatggcacatgggcgagcagaggaggctgttgctccaaattatgataaggaagtttctcacaatcacattcctctgctctctggtggacaagaggtttctggagaattatctgcagcctcacctgagaggctgtcaatggcatctccaggtggccgagggaagcgtgtccataatcttcaatattcctctgaccttaatcaatcaccaaatattagggttggggatcctggattgggtaatgtggcatggaaagaaagagttgatggctggaaaatgaagcaagataagaatgttgctccaatgagcacaggccaagctacttctgaaagaggagctggagatattgatgctagtactgatgtgcttgtggacgattccttgttgaatgatgaagctcggcaacccctctctaggaaggtttctattccatcatctaggatcaatccatatcgtatggtcattgctctgcggctggttatcctatgcatttttctgcattatcggataacanatcctgtgcccaatgcatatgcatttgtggttgatatcagtcatat

SEQ ID NO: 28704 - DNA, 477 bp, Glycine max
  unsure (1)..(477): unsure at all n locations
  Clone ID: TF_LIB3242-276-Q1-J1-D1
ccgggttttgtaaatgtgagatcccttacaaccctgatgacctaatggtgcaatgcgagggctgcactgactggtgagtttcacatgtaaggtgatgtggatcttcaatttattccacgtctgctcttgtcgtttggtttaatgttcctgatctggtccattttctggactcttgtatgttctggtctgtaaatattctgcaccatccctattgaaatttcaggttttttaatcatggtttatcctctttcatctggttcaatcgaagaaaacaagtattttaagtttgtacctacctttcccgccttaattttccctgtgtatgattcttcacttaacttggactgttcttttttcccatgacagaacaaccctgtgtgtttgactattttatgtatnngntatttgttgttctgggtttttcatccttgccagtgcatattttgcttctgtctagactgttgttatttaacttct

SEQ ID NO: 28705 - DNA, 1023 bp, Glycine max
  Clone ID: TF_GmC454_7
aattcggctcgaggaattggggtgctcctgattctgtctcttcctctctcactttctttgagtttcattgtgatccagttattgacttcattggccaggaatatcatctggggttgtcacaatctgagtgatccatctacttttgtggcaaagattgctcttttgaggtcttattcagatccggacttcaatttctataccaagagaaggagctgcttctgaagtttgactaggagtgtattagaagagaggaatcttccaaactgatccgtgcaattggataatacacaaggcttttaagtaatgtgtgcatcttgttgagcttcaactatcttttgatccgttattggcatctggatagagcttagtaagagtcaatgacggagtcagaagaagctggggcaaagccaatgaacacattgggtggccaagtctgccagatctgtggtgataatattgggaacaatgtgaatggcgatcctttcattgcttgcgatgtttgtgctttccctgtctgcagggcgtgctatgaatatgaaaggaaggatggaaatcagtcttgccctcagtgcaagacccggtacaagaggcacaaaggaagtcctgcaattcttggagaccaggaagaggatggggttgctgatgagggtgctagtgacttaaattacaattcagaaaatcagaatgaaaaacagaagattgagcacagccactggcttcctcaaggttcaccagaaggagcagactgagattgctgaaaaagccgttcaacaagaaccaatcgacttcccattttgaaaaatcctttgcacatgcatccatcttttttgagagtgataataatgcatttagtttaatttatccaccacgtaagtggctatagttggaaggaaggcgacctcatacatttgctttcaagttttgacctttttttatgttcttttggttccttacaaaaagtatgttaagctgaatttcaacatacgtatgctgaaatatttatatttcccttgttgcgatagc

SEQ ID NO: 28706 - DNA, 1501 bp, Glycine max
  Clone ID: TF_GmC8684_5
cggaattcggctcgagagcaaacaagtctccttacatctgcacccagtccatattccaattccgtgtgcccattcacgtgtgcggaccgacggcgcctaaatcccaatttcctcccattagggtttctctctctccaattcatgttctctttttcttaattcattctcttctattcgattcgattgttctatggaaccgcagcttcagcccaagctggagcccgcgccagagcttgtgagcgctggcgctgaggattccgagaagtcgcatgtcagtgatgtcacggaggttcgccacgttgccatggctgaggcaaacgccggttgttgcgcttccgttttgaaacggaagcgtggccgtccggccaagggaagccgcgttccgaaagggatgactccgccgtcgaggcagaaaaaggaagaagaggatgtttgcttcatatgcttcgacggtggaagccttgttctctgtgatcgccgtggatgccctaaagcgtatcatccctggtgtattaagcgagacgaagccttttttcgctcgaaggccaaatggaattgcggttggcatatatgtagcgcttgtgggaagggatcgcattatatgtgctatacttgtacctattctttgtgcaagagatgcacaaaaaatgccgattttgtctctatcagagaaaataaaggtttatgtggaatatgcaagaggactataatgctgatagagaattgtgcccagggtgataaggcggagtgtgaggtggattttgatgacaagagcagctgggagtatcttttcaaggtgtactggatgtatttgaaagagaagctatctttgacatttgatgagatccttcaagctaaaaatccgtgcaaaggagttgcaagattagaagcatctggtgttgcggtggatgtttcatcattactcctttctccaaagatggagctgccaatcaacaattttgcgaatgataaaccgtggcattatcaggatccaactgggaaggttcaaggacctttctctttattgcagctgtataagtggaatgcttgtggatattttccttcagatctcagaatatggagggtagacgagacacaaaataactctatattcttaactgatgtgctgaatgggaagtgttcaaaaaatgtgtcattgccaaacaacagccaacagctgtctttgggaaccaatagtacattggaaaataaagaaaatagtcaggatggtggtgagaatgagaacaatgcgacaaggaatggaaattctgcaaaccatcaaattgttgagcagtgtgatgagcaaaaagtggctgatacttatacacaatctaatggtaaagatgaatctgtaaggagcaatggttggaactctcagtctccaggtttgactatacaagcagatgggaataacaatgaggggcaaagtggaaattctgaaaggatggaggagtcacccaaatgtgaaatttcttgtcatgacatcccccatgtatacact

SEQ ID NO: 28707 - DNA, 1030 bp, Glycine max
  Clone ID: TF_GmC77995_1
ccacgccgtccgcacacatatacatacacacgtacacagcaacactctcccacatgtctctgactctgtctcagctctcatcttatctctcttctccgttgaatttccaacccgtgcttgctttgcctagattctctttcttcttccacacatactcacatttctttttacccttttataatgggttttctgataatgctgcaagcttgtgtctttcacaattgacaaaagagtggtagtagcagcctggcaccaccccatctgttagaaaacttggttgctcaagtaaagaatcattttcattcactatatcccccaaaggaaacagctttctttgatttcactcctagtttaaaaacctttctatttttgcttctttttctttcactatatgtgcatggaagaggcaaatttgtgaagtggggtgtttgatatttgaagattgaggtgttgaagagtggtgagttaaggtttcaatggacaccaaagggagattagttgctgggtctcataacaggaatgagtttgttcttatcaatgctgatgaaactgcaagagtagctgtcacagaattaagtggtcaaatttgtcagatctgtggggatgagctggaagttactgtgaatggggagccatttgttgcttgcaatgaatgtgcattccctgtgtgcagaccttgttatgagtatgaaagaagagagggcaaccaagtttgtcctcagtgtaaaaccagatataagcgcatcaaaggtagtcctagagttgagggtgatgaagaagaggatgatactgatgatttagaaagtgagtttgatattgggagtgtgttctctgctcgccttaactatggttcacaggtgaatggttcagtgatccacgcaccatcagagtttgatgcagcttcggtggcttctgagatccctctcctaacatatggtcaagaggatgtcggcatttctgctgataaacatgctcttattcttcctccattcacggcgtcgagggaaacgggggtgtgccatgcctttgg

SEQ ID NO: 28708 - DNA, 1885 bp, Glycine max
  Clone ID: TF_GmC1432_1
agtggtgtgcaatggcatggaaggcttttacatcccaaagcttcatctggtcatgtgcaagtgtggctcttgtggttcaagaaagcagacacttagtgaatgggaaaaacatacaggttgcagatcgaaaaaatggaaacatagtgtgaaagtgaaaagtacaatgctaccactggaaaaatggatggaagaaaacattccacttgatggaatacctgagcaggtagatcaacagcaggtgctggcctttttgcaagagaagtatgagcctgttaatgtgaaatggacaacagaaagatgtgctgtttgcagatgggttgaagattgggaagataacaaaattattatttgtaacagatgccaaatagcagtccaccaagaatgctatggggcaaagaatgttcaggattttacttcttgggtttgtagagtatgtgaaactcctgatgttgagagagagtgttgcctctgcccagtaaaaggtggtgctctaaagccaacggatgttgaaatgttgtgggttcatgtaacatgtgcttggtttcgacctcaagttgttttccaaaaccatgaggccatggaacctgccatgggaatccttaaaattcctcctaattcctttgtgaagacttgtgtgatctgtaaacagagccatggttcctgcataagttgttgcaagtgttctacttattttcatgtgatgtgtgcatcaagggcaggatatacaatggagttacattccatggagaagaatgggactcaagtaacaaggaagctaatatattgtgcaattcacagggttccaaatccagattctgtactggtggtacacacacccctggggattttctctcccagaacttcacttcaaaatcagaagggatgcttcaggggatcaaggctaattttatcaaagaatatagagcttaatgaatcttcaaccactgaaaatgacttagtagagccgctgtctgcggccaggtgtcgtgtgtaccgaaggtctcctaataagagagctgatgtgccaataattcacttgctggggggacccagccttcattctttaggtgcaataactcagttgaacatttttaaggatgctgatgaatctaaagtattcacttctttcaaggaacgtcttcaccatttatgggaaacggaaaaatttagagtttgctttggaaaatcgggcattcatggatggggtctctttgctcgtagagatatacaagaaggagagatggttgttgagtatcgtggtgtgcacgtaaggcgtagtgttgctgacctgagggaagaaaaataccgttcagaaggcaaggattgctatctgttcaagatcagtgaggaagtggtagttgatgcaacgaacagaggcaatatagcacgtttaataaaccattcttgcatgccaaactgctatgcaaggattatgagtctgggtgatcaggggagccgaattgttcttattgccaagaccaatgtttctgctggtgaagaactaacgtatgattacttgtttgatccagatgagcgggatgaattgaaagttccttgcctttgcaaagcccctaattgtaggagatttatgaattaggcttaggcattttttttctctctttttgagcaattgcagttgccaaacccgtgaacatttgtcaattgagccatttttaaaatttttttaaaatagtttagtataatttgtatagcattatattattataaaataaaatagaaaacttctgagcaaatgagctggaggcatttttgtaacttgcacggatgttcttcacattatgacatttagaggcaatttacttgaagacaaaaggtgtatagaggagcacacatgttacataatacattttaggcttttcatgtg

SEQ ID NO: 28709 - DNA, 803 bp, Glycine max
  Clone ID: TF_GmC96941_1
taaaaacacttcccatgcgtccgacctaatctaacccttatcaaggagtttaacacagtttgtttggcattgtatacgagttgttgtaattattcttgtacttgagtttaattccggcgaataaaaaaacctaatctaacccttcgctctgctctcgcttcaactattcacaccaagatggaagctgtttgtcttcactgtggcgacagaggctttccagaaacattggttttttgcagccagtgtaaggcttatgcgctgcataggtactgtttaaaggggcctgtgatttttactgatgctgttacatggttttgtgaggattgtgcaacaaagctatgggtgccacctgctcttgaccaatctacacctatctcatctgtaacaagaaaaaattgcgtactgggagtgaagaaacacaataaacagcaaaaaaagaaggttaaaaagaagcagaaggaaggaaaagctaactctgtcttagttgctgaaacaaaggttgtattatctggtagtcacagttcacctgggcctgagcatcctcaatgtagcaacagaggtgaagaatatgaggtgaaaaatgactgtggaccagctccaagggatgtagctaattttgttgctggtgaagaagaaagtgtggccagggatatagctaattctgatgaaggtttcaaatctgttccagtttctcaaggagctaacaatagtgattcaggttgggtagaataggatggtatgtttatgcacagcctactattaatccaatctggaggggaagtatggatttctgccatgaaact

SEQ ID NO: 28710 - DNA, 1406 bp, Glycine max
  Clone ID: TF_GmC454_10
cggaattcccgcgtcgacccacgcgtccgggtgcccaagtgtgccagatttgtggtgatggtgttgggaagactgtggatggtgaaccgttcgttgcgtgcgatgtttgcgctttccctgtctgcaggccttgctatgagtatgagaggaaggatgggaatcaatcttgcccccagtgcaaaacccggtacaagaggcacaagggaagtcctgcaattcttggagacatggaagaggatggtgctgctgctgctgatgccagtgacttcaattatgattcagaaaatcaaaatcaaaatcaaaaccaaaagcagaagatttcagagcgcatgttaagctggcaattgacatacccacgaggagaggaggttggtgctccaaattatgataaggatgtttctcacaaccacattcctctgctgaccagtggacaagaggtatctggaggagttgtctgcagcctcacctgagaggctctcaatggcatctcctgcagttggtggtggaaagcgtgtccataatattccatattcatctgacattaatcaatctccaaatatcagggctggggatccaggattgggcaatgttgcatggaaagaaagagttgatggctggaagatgaagcaagaaaagaatgttgttccaatgagcacaggccaggctgcttctgaaagaggagctggagatattgatgctagtactgatgtgcttgtagatgattctttattgaatgatgaagctcgacagcctctttccaggaaggtttctattccatcttctaggataaatccatatcgtatggtcattatgctgcggctggttatcctttgcattttcttgcattatcggataacaaatcctgttcccaatgcatatccattgtggttggtatcagttatatgtgagatttggtttgccatatcttggatattggatcaatttcccaagtggcttcctgtaaaccgtgaaacatatcttgacaggcttgcactgaggtatgatcgggaaggagaaccgtcacaactagctgctgttgacatttttgtcagtactgttgatccattaaaggagcctccacttgtgactgccaataccgtactatctattcttgcagttgactatccagtggataaggtctcctgctatgtgtctgatgatggtgctgctatgttgacatttgaagcacttgctgagacatcggaatttgcaaggaaatgggttccttttagcaagaagtatagcattgaaccccgtgcgcctgagtggtatttttctcaaaagattgactacttgaaagataaggttcatccatcatttgtcaaggatcgtagagcaatgaagagagaatatgaggaatttaaagttcgtattaatggacttgtttcaaaggcacagaaagttcc

SEQ ID NO: 28711 - DNA, 251 bp, Glycine max
  Clone ID: TF_700735931H1
gctgatatgttgcgataactgtccatctacttttcacctagcttgtttgtccactcaggagatcccagatggcgactggtactgcactaactgcacttgtaggatatgtggaaatttggtcattgacaaagacacttcagatgcgcatgattcattacaatgttcacagtgtgaacataaatatcatgagaaatgccttgaagatagagataaacaagaagtagcaatttcagacacttggttttgtggtc

SEQ ID NO: 28712 - DNA, 553 bp, Glycine max
  Clone ID: TF_GmC340979_1
caagtttaaatccacaatcaactaatcacaaaggcacagttttaccattacgccatacttataataaaattgtccaagataatgccacatgttaacttagcaaggctttgtttcccaatcaaaacctcaacattttcttagttttattgatgagaattaagaatgcatctgactacagtttcgctttaagatttgcgcagcatgagaagctccccaaaatcacaatgaatggggacatactagggactccaaagagttgcattggataagagatgtacactaatacaagtgattactacgataatgcatccgaagttccttgcagtgagggcatatccatggccgtagaggagggtccatgcaataggaatggatctttcgaatgtggcaaacatcgcaactctcaaggagatcctctggttcccgaccacggcaaactacacaagcatttgactgtgcagactcaaagatattatctggcaaattttgatccacggggataaaaataactggggctgaattgtcacatgggaatcgttgggaggataatttt

SEQ ID NO: 28713 - DNA, 595 bp, Glycine max
  Clone ID: TF_LIB4390-044-R1-N1-E9
ggggggggggggggttttttttttttttttttttttttttttttttttttttttagcaaacaaggacaaaacaataacacccatttaaaaaaaaatgggttcaaaaaccaaattttaaagggacataaaggaaaaaacttcacctttcccaagccaacagggggggggggaaaaattttttctttttaaaaagggaacaacggaatgggagttgatactaacgaaaccaacacagcaaacccccacagactaaaaaaaaaaacccacccaaggcaaacagaaactatccattaacgggaacatcaaggaaaaaaagcaaaaaaacagggcccaacaatgatgggaaaggagggaactgggcccatggcaaacagggccgagccctcttggtacgggaaaaagggcacctgaatgggtggaaaggccccgccctaacaggggggatcttcacacatttaccagggaaccacttctggcagagggcacagcaaatccaaaattcatcagggccaaagggcccaccacaggccccacacaagggccccccagggtcataaaaaactggaacggccaggtcttaatccccaactttggg

SEQ ID NO: 28714 - DNA, 1605 bp, Glycine max
  Clone ID: TF_GmC47902_1
tccatggttgggcccacgaaatcgcgcagcttccgtgcgactccgatggcgtctgcatgctctgcaaactcaaacccagtccctcccaaaccctctcctgtggaacgtgtgccactccctggcaccttccgtgtctcccttcgccccctctctccctctctgactcccattgggactgccccgactgttctgacaccttctgccatcaccccgtcgctcccaccgctcaccttgtctccgccattcacgccattcaggccgacacctctctcactgaccaacagaaggccataaaacgccaacaactcctcgctggctctgcccacccctcaaaggacaaaaccaaagccaaagacatttttgatggaagcttaaactgctccatatgcatgcaactacccgatagacccgtcacgacgccttgtgggcacaacttctgtttgagatgtttcgagaagtggatcggacagggaaagcgcacttgcgccaattgccgtgctcaaatcccgaccaagatggcgagccagccgagaatcaattctcagttggccatggccatccgattggcgaaggcagccaagtcggaaggttcttcgggcccacccaaggtctatcattgtccgcgcaatcaggaccgtcctgataccgcattcaccacagagcgagccaagaagactggaaaggcaaatgcttgcagtggtaagattttcgtgactgttcctcccgaccattttgggcctatcccggctgaaaacgaccccacccggaaccgtggtgttctggtcggggacacgtgggaggaccggatggagtgtcggcagtggggtgcccatttgcctcatgtcgccggcattgctggacagagtgcttatggttcccagtctgttgccctttctggtggctacgaggatgacgaggaccatggtgagtggttcctctacactggcagtggtggcagagatctcagtggcaacaaacgcaccaacaagctacaatcctttgaccaaagtttcatcaaaaatagggcatgtggaggtggacgcactttacgagcacagaaaaatgttatgaaatgcccatcttgttcaaatgacattgctgactttctccagaatccacaggttaatagagaaatgctggctgttatagaatcattacaacgccaggctgaagaaaattctgaagagttaagtgataaaaatgatgaaaatctgcatgatccaacagaggtttctaaacccagtgattctactgataaagtcttggaggaaattaaggacaatgagctgaatcagccacacaagcgaaggaaggagtgaaggatgactgcgaagttattttggtcgtttggattatggattttcattgaatagcaagggacggactgctgatgcaatttttttaagtgctagcatagattgctggatattgacttgtatggatttaaatatattttttagaggttcatgtgatagaaaattggtatctcctttatttgtgggtttcatgtctctagaaggagagaatgagtgcattttacactggaatggatatcttaatgcattatgtgcttttattgaagatgttattttaactactactatt

SEQ ID NO: 28715 - DNA, 2446 bp, Glycine max
  Clone ID: TF_GmC961_1
ccggtcctgcattcccggaattacccagtcgacctatgcgtttagtcagaatgagtctgcagcagctttcggctgacagcgaaggcgcgtgtatggtgtgcaagggcttgccggggcaagaagagagactgttatgcgtcacgtgtgacaccccttggcacgtgccctgcctgttcgcccctccacccactctgtccgccaccgcacgatggctatgccctgattgttccattctggactctgacgttccaccagtccccgctcccgcccgcaaccaactggtggctgcaatgctggccgttgaaaatgacgcttctctcacccaacacgacaaggcccgaaaacgtcaagagcttttgactggaaaggctcccgcagacgacgacgacgacgacgaacaagagaataaatcatccttatcggatattctctccagatctctcaactgctccatctgtatccagttaccggagagacccgtcacgagtccgtgtgggcacagtttctgtttgaagtgctttgagaaatgggttcggcaagggaagaggaattgtgccaaatgccggcagattattccggccaagatgacaagccagccccgtatcaattctgcactggtgtttgcaatacgaatggcgaggcaggcttcaaacagtagtggtagtggccgaggaggagtgaggagtgttaaccatttccttcacaatcaagatagacctgatgagccattcaccactgaacgcgcacagaggagtggtcgtgccaatgcggctagcggtaaaatattcgtgacagtgcctacggatcattttggtccaatcacggcagagaatgaccctctgcggaatcaaggtctgctggtaggtgaaagctggagagacagactcgaatgcaggcaatggggtgctcacttcgtccctgtgggtggcattgctggacaatcagaccgcggtgcacaatctgttgttctttctggtggttatgttgatgacgaggaccatggagaatggtttctctacaccggaagcggcggtaaggatcttagcggcaacaaacgcacaaacaagagtcactcttttgaccagaagtttgagaaatacaaccgtgcacttcaagttagctgtctccagggttatcccgttcgagttgtcagatctcacaaagaaaagcgatcctcatatgcccctgagactggtgtgcggtacgatggaatttatagaattgaaaagtgctggcagatagcagggttgcagggtttcaaagtttgccggtatctattcgtcaggtgtgacaatgaacctgccccttggacaagtgatgatcatggagataggcccagacccttgccggtcattcgtgagctgaaaaaggctacagtcatacatgaaaggaccgaatctccatcttgggattttgatgaggaggattctcgttggaaatggaagaaaccaccgcctcccagcagacaaaaggtacaaaatgttgaacccgtagaggtagcaagggcaaagtcaaataaagaagtaaagaaattccaacttaagtcaatcaaggaacaattgcagagagggttctcgtgcatgatatgcaaggaggttatggtttcaccagtgacaacaccgtgtgctcataacttctgcaagtcctgtttggaaggtgaatttgctggtcaggcttttgtgaaggagagaagtaagggtgggagaacacttcggtcccaaaaaaatgtgatgaaatgtccttcttgttctattgacatttctgattatcttcagaacattcaggttgacatagatttgaagagtgcaattgagtcattgaaagccaaggtcgaagaaattggagaatcggtggagtcaagtgaagatgcagatggattacaggatgatggtgctggcaaggatgaagatactgactccagaaacaaaaattctgtgcaggagttgaatggtctacctgaaggatctgatgttggtgaacttgaagataccaccaataaggagccagatccagcaatgaagtgcaatggaaagagaaagaaaggtgattatggaaatcaatcgcctgatgataaaatggaaaaaagaggtaaaaattacaaaacaacagaggaagaattgcatgaagaaaatgattcttcatcaagtcctctccatcctcaatgaaatcttcatagactgaggaattttaacaactagaccttcagcttgttggattgcaacatgattctctttattttgctgatggttcagtattagtcttagaaatgctataaggactatcattgtatcaagttatactcttttcgttttagtttactttcttagtttgttatcacccttttgtgaatgttcatggttttatgggaaatggaactatcaaagaccttaaaaaaccccaatcaaattaaagaccttttttttagtaagtaatgaaaagaaaaggg

SEQ ID NO: 28716 - DNA, 726 bp, Glycine max
  Clone ID: TF_GmC251796_1
atgaccggctgcgagaagccgaatgcccgggtcgactctgcttccgatgagtttgaggaagaagaatgagaagaaagagcaggggcaaacgtaggcgtgcggcatctgcaacaactctgagtccttcttccctctccgccattcccattctttgggatgcgtatgataccatctgcattcactgcaataacaaaggcgaggaggccaaggaggatggacttttgatttgcagcggaatgggctgccccgtcgctgtccatgccacctgcctcgccaccggacctaaatttgacggttccggtaacttctgctgcccctactgctggtacaagcgcgccgttgacacgtgtcgacgcctcagggagaaggccctggaagccaagggagacttgtcacgctttctggacaatcacgaccacgcacgtgcggctgcacatgtggatctggttgttcaggatagtgaagaactcatggaggaaacaggaacacaagcacagtctaaagataataaagatgaggagggagaggcacgtgtgaatcaggttcatgatagggaagaatctgagacagaaccagaagagaataaagaaaaggagggaaaggttcgggatgatgaagaactcgtggaagaaagagaaagaaaaacagtgacagaagcacaatctcaagagaataaagatgaggaggataagtttcaagatgatagtgaagaactcgtggtggaaa

SEQ ID NO: 28717 - DNA, 268 bp, Glycine max
  Clone ID: TF_LIB3242-613-P1-J1-D12
caccatggaagcttgtactgggctttttgctggtaccccaaacagcaatgagcttgtggtcattcaaggacacgatgagcctaagcctgtgaagaacttagatggtcagctctgtgagatatgtggtgattctgtgggacttacggtggatggagacttatttgtagcttgtgaagagtgtggtttccctgtgtgcatgccatgttatgagtatgaaagaagggaagggactcaagtttgtcctcagtgtcatacaagatacaagcgt

SEQ ID NO: 28718 - DNA, 407 bp, Glycine max
  Clone ID: TF_jC-gmXLIB3563P056bc07a2
ataatgggtgatgtggttacagtttgtgatatctgtggggatcaaggatttgaagagtatcttgctatttgtaacaagtgtcctgatggggcagaacacatttattgtaatgatgaaaagttggaaaaagtgccagatggtgattggtggacctgcgaagactgcaggaagtcaccaggtaatgaattaccaacattgggctcacaaaccgagatagaacatgctcaatgctctcctctattgaattcagaatttaatggacagctgaccaatcgggaggttgagaaaaatgtagctattcatgatactagaaagaggaaaaatcttggattgctgtccaaatctgtgtcatttgataatgctagctcagcgaaattaaatggcaaatgctctgaagttattgcagc

SEQ ID NO: 28719 - DNA, 2618 bp, Glycine max
  Clone ID: TF_GmC838_1
ccgccacgcgtcaagagagagagtgagagatggcgtattgaatgggcgaagattttcacgctttgcttttgcctccaaattgatctctctctgtcacgagctttgatctgaagcgaagcacttcctctgcgaacatggaagcaagtgcgggaatggttgccggttcgcataaacggaacgagctcgttcggattcgccacgattcttctgacagcgggtctaaacccatgaagaatttgaatgggcaaatctgtcaaatatgcggtgatactgttggattaactgctactggtgatgtgtttgttgcttgcaacgagtgtgctttccctgtgtgtcgtccttgttatgaatatgagcggaaggatgggaaccagtcttgtccacagtgcaagactagatacaagaggcacagagggagtcctcgagttgagggtgatgaagatgaagatgattctgatgatatcgagaatgagttcaattatgcccaaggaaaagccaaggccaggcggcagtgggaagacgatcctgacctgtcgtcgtcttctagacgcgaatctcaacagccaattcccctcctcaccaatggccaaacgatgtctggtgagattccatgtgccacacctgatactcaatctgtgcgaactacttcaggtcctttgggcccatctgaaaaggttcactcacttccctatgttgatccaaggcaaccagttccagtaagaattgtggacccatcaaaggacttgaattcttatggtctgggaaatgttgactggaaagaaagggttgaaggttggaagctcaagcaggagaaaaatatggtgcaaatgactggtagatacactgaagggaaaggtggagatgttgaaggaactggttctaatggagaagaacttcaaatggtagatgatgctcgacaacctatgagtcgtgttgtgccaattccttcatctcagctgacaccttatcgtgttgttatcatcctccggttgattattcttggcttcttcttacaatatcgtgtaactcaccctgtgaaagatgcataccccctgtggttgacatcagttatttgtgagatttggtttgccttatcctggctcttggatcagtttccaaaatggtctcccattaatcgtgagacttatcttgaacgacttgctttaaggtatgatcgtgaaggagaaccatcacagttagatcctgttgatgtgtttgttagtacagtggatcccctcaaagagccgcctcttgtaactgcaaacactgttttgtctatactttctgttgattaccctgtcgacaaagtttcctgctatgtatcagatgatggttcagctatgttgacctttgaagcactatctgaaacagctgagtttgcaaagaagtgggtgcccttttgcaaaaagcacaatattgaaccaagagccccagagttttattttgcccagaagattgattacttaaaggacaagattcagccctcgtttgtaaaagagcgacgggcaatgaagagagaatatgaagaattcaaagtacggatcaatgcccttgtagccaaagctcagaagatgccagaggaaggttggacaatgcaggatggaactccttggcctggaaataatcctagggatcatccgggaatgattcaggtgtttttaggtcatagtggggggctggatacagatggaaatgagctgcctagacttgtttatgtttctcgtgagaagcgaccaggcttccaacatcacaagaaggctggagctatgaatgctttgattcgagtttctgctgtcttgaccaatggtgcatatcttctgaatgtggattgtgatcactatttcaataatagcaaagccctcaaagaagccatgtgtttcatgatggatcctgttcttggaaagaagacatgctatgttcaatttcctcagagatttgatggcattgacttgcacgatcgatatgccaatcgcaatattgtgttctttgatatcaacatgaaaggtcaggatggtgttcagggcccagtctatgtgggaactggttgttgtttcaataggcaggctttgtatggttatgatcctgttttgactgaggaagatttggaacctaacattattgtaaagagttgttggggttctagaaagaagggaaagggtggcaataagaagtacagtgacaagaagaaagcgatgggcagaactgaatccactgtacccatatttaatatggaagacatagaggagggtgttgaaggttatgatgatgaaaggacactacttatgtctcaaaagagcttggagaagcgttttggtcagtctccagtttttattgctgccactttcatggagcagggtggcattccaccttcaacaaaccctgcaactcttcttaaggaagcgatccatgtcatcagctgtggttacgaagacaagacagagtggggaaaagagattggatggatctatggctctgtgacagaagatatcttgactgggttcaagatgcatgctcgtggttggatttccatctattgcatgccccctcgcccagcatttaaaggttctgcccctatcaatctttctgatcgtcttaatccagggcctccgtggggccta

SEQ ID NO: 28720 - DNA, 772 bp, Glycine max
  Clone ID: TF_GmC838_2
gaagagagagatggcgtattgaatgggcgaagattttcacgctttgcttttgcctccaaattgatctctctctctctctctcacaatctttgatctgaagcgattaagcgaagcactttttctgttaaaatggaagcaagtgcgggaatggtcgcaggttcgcataagcgaaacgagctcgttcggattcgccacgattcttctgacagcgggtctaaacccttgaagagtttgaatgggcaaatctgtcaaatatgcggtgatactgttggattaactgccaccggtgatgtgtttgttgcttgcaacgagtgtgctttccctgtgtgtcgtccttgttatgaatatgagcgaaaggatgggaaccagtcttgtccacagtgcaagactagatacaagaggcacagagggagtcctcgagtggagggtgatgaagatgaagatgactctgatgatatcgagaatgagttcaattatgcccaaggaaaagccaaggccaggcgccagtgggaagatgacgctgacctgtcgtcgtcttctagacgcgaatctcaacagccaattcccctcctcaccaatggccaaacgatgtctggtgagattccgtgtgccacacctgatactcaatctgtgcgaactacttcaggtcctttgggcccatctgaaaaggttcactcacttccctatgttgatccaaggcaaccagttccagtaagaattgtggacccatcaaaggacttgaattcttatggtctgggaaatgttgactgga

SEQ ID NO: 28721 - DNA, 1260 bp, Glycine max
  Clone ID: TF_GmC1270_1
gtactgaggccttttcttgtgtggccatagacccagagctattcctcaattatcaatatcttctgcttctctctctcgatgagaaacaacaacacatacagcaaaacatgacaaccaaaggaacaactcactctgaacccaacaacactgaatgttgcatgtgtggggatcttggcttctctgatcagctttttcaatgcaaagcctgccaattcagatctcaacacagatactgcagcaatctctacccgaagccagagtctcttggaacctgcaattggtgtttgagtcaaagagaggacaccaaagagaggtcaaccaattcatcaaattcttcctcatctattaggaacaatgatgatgagagcagaatcaagagaatcaggaatggtaatagctacaacagtgctcaaaatattggaccggtgaagaagggagtgaaagggagtgtccttcatctccaaattcataaacccattaagaaaccaaagtcaccggagtcatcaagatcaccatcagcatccaattctccaccgaaatcttcgccggttttggtttcaacccggaagaggattgtcaccaatggtaccttggaagagagactgaggaggactaggtcagaagacatcacaagaagtggtgcaaccaaacaggtcttcaggaataaggtgagaaggtataagcttctggatgaagtttcaagttaaaataatactaaaaattataagaataaaaggtttcgaatgaaagagttatgtaagagatgatcagtctatacacaggaaagaaagaaaaaagggtcatggtttttggttccttttgcgttttttccccttcaaagttttgtcccaatacatgtacagaacaatggtgaattaatgaaggagcaaaaagtgtttgagtttagactcattgtaacttgacagttgccattcccttttttttttttttccattttcttctcgaatgtcatcataatttacaatgaaaattaagattcagtttgtcaattgaatactaaatgcggtttgtggaagagtgagctaataatagtaatggtgaagagtttgataatttccttagttttaggttcaaatcttcattgcagcaaaaaatcacataccctcttctattttcctgcaaaatataatggcataagctgaattcaatgacttgagaggaaaaatagagaagcaaagcttgcttagcatttgtttttccaattttaatgtgaatgagattaaggtcattgaaagagat

SEQ ID NO: 28722 - DNA, 426 bp, Glycine max
  Clone ID: TF_GmC216911_1
acctgcattttctctcacttctccttccctctccgccattcccattctatcggatgaacacaacaacaacgcaccaactgcgtttgataccgactgcgacgatgacaataatgcccttcatcaccgcggctccgaacccgaacccgaacccgaactcgaacctgtggatatatttgacaaaactatctgcattcactgcgataacaaacgcgaagaggcggagggagttttaatctgcggcggaaggggctgccccgtcgcggtccacgccacctgcctcggcttcgaacctgaattcgacgattccggtaacttttgctgcccctattgctggtataagcgcgccgtggacacgtgacaacggttgagggagaaggccatgaaggcgaagggagaattgtgacacttttttggacaatgacgtgc

SEQ ID NO: 28723 - DNA, 494 bp, Glycine max
  Clone ID: TF_LIB3242-327-Q1-J1-E10
tttctttttccccattttttctctttctttttttttttctttttcttttttcattttcattttcccctgggcttcgtctccacaggtgacgccattctcgtctcccttttccaacaaaccgtttcctcgggaattgagagagttctaattctgcccctcgcggcttcgcgaatttaccaatccgagagtcatggctccagccaccaccaattcctcgccctcggctcagcgccacgtcggcttcagtcggcgcacgcaggcgccgcgccagctggacggcgactcgccgccagtgaagaagtaccggatgctgtcagagataatggcgcgcgcgccgtacgcggtggtggagagagaaacttacagcgacctcttgtgcgaccaatgcggctccggcgagctgccggaggagctgcttctctgcgacaaatgcgataaaggctttcacatgaaatgcgtgaggcctatcgtcgtgaggattccgattggatcgt

SEQ ID NO: 28724 - DNA, 3729 bp, Glycine max
  Clone ID: TF_GmC760_1
gtgggtttttgagtctacattcaaaagaggacaaataaatgctgttgaaggaatggaaactttgccgaaaggagttgacatttgttgcatctgccaccacaagcatggtgtatgcatgacgtgttgctatggccattgtcagaccacattccatccatcctgtgctagaagtgctggaatatacatgattgtgaggactactggtggcaaggctcaacacaaagcttactgtgaaaaacatagtttggaaccaaaggcactggctgaaactcaaaaacatggaattgaagagttaaaaagtatcaggcaaattagggttgaactagagagattacgtctcctttgtgaaagaattgtgaaacgtgaaaaaataaagagggaattggtactatgttcacatgacatactggcctttaaaagagatcatgttgctaggtccgtgctggttcgaagccctttcatccttccggatggtagttcagaatcagctacaacgtcccttaaagggaacacagagggatacagatcatgcagtgaaccacttcaaagatcagatgatgttactgtggacagttcagtttctgctaagcgccgtgtcagagtcgccatatctatggacacagactcaaaattggacgatgactgctcaacctctcaaagtcgatacaaccacaggattccagatagattgcaattttctggcaagaaggttcctcatagaactgctgcatcacgtaatatttcagatgaaggtggatggatatccaaatctagaaatcattccgatagattcggaaaagagcttgttatgacgtcagatgaagcatctatgaagaattcaatgctacctaaaggatatgcatatgttcctgctgattgcttgtcaaatgagaagcactctgacgaggacgtatatgctagtgaaccagtggagcatgacaggtagagtgttggatcccagcctggttctttatttttccttcgaggctgacatccataatattcaatgccgtgctatttttcttcgagtggggaagttttatttgagaatggcggatatttttgttatttgcagcatgtactgctttctgtctcttattatgtgttagtggacatcctttgatatgacttacacagtgtggtactctccttgagagtaaagtttaccttatttgaaatgctcaaagaaggatgcaatctctagttacattcatccatacatcaacaagaaattgctgcagattcgtgatggggtgcccttggaggacattatatgttcaatcagtgagggaaattcttctttggttgaatcctttggggctagttcctgctcaagtagccaaaatcagaacttaactcgagttgatttttcaaagcctgatgaagtaaatatggagcagttggttagggctataaaaatgggactttttgaattttctccacaggatgaattggagggggaacttgtttattttcagcatagattattgcagaatgcagttgcaaaaaagaggcatattgataacttaatctacagtgttgccaagagtttgccacatgagattgataaggcacatcaacaaagatgggatgaagttattgttaatcaatatctgcgtgatcttagagaggcaaaaaagcaaggcagaaaagaaagaaagcacaaagaagcacaggcagtgttggctgctgcaactgctgctgcagcagcatctactagggctctccggaaagacaacttagatgaatcaatgcaacaagagaatttgttaaaattggatactctaaatggaagaaccggtgcttgttctcagccgatgtctcgagccaaaagacgacagaagggggtagctgtgacaagaacttcgtccgagaaatattcagaattttgcatgccaacctcagatttgtctaaggagcaatgtaaatcatgtgatatttgcagacgatcagagtttattttaaaccctatcctagtgtgctctggttgcaaggtttcggtgcacttggattgttatcgtagtgtgaaagaaacaacaggtccgtggtactgtgagttatgtgaagatttgtcctctagaagctctggggcagctgctatcaatttctgggagaagtctgttgtagaatgtgctctctgtggtggtactactggtgcttttagaaagtcttctgatggtcaatgggttcatgccttctgtgctgagtgggtttttgagtctacattcaaaagaggacaaatagatgctgttgaaggaatggaaactttgcaaaaaggagttgacatttgttgcatctgccaccacaagcatggtgtatgcatgaagtgttgctacggtcattgtcagaccacattccatccatcctgtgctagaagagctggtttgtacatgaatgtgaggcctactggtggcaaggctcaacacaaagcttactgtgaaaaacatagtttggagcagaaggcaaaggctgaaactcaaaaacatggaattgaagagttaaaaagtatcaggcagattagggttgaactagagagattacgtctcctttgtgaaagaattgtcaaacgtgaaaaaataaagagggaattggtaatatcttcacatgacatactggcctttaaaagagatcatgttgctaggtcggtgctggctcgtagccatttcatccttccggatggtagttcagaatcagctacaacgtcccttaaagggaacacagagggttacagatcatgcagtgaaccactccaaagatcggatgatgttactgtggacagttcagtttctgccaagcgccgtgtcagagtcgccatatctatggacacagacccaaaattggacgatgactgctcaacctctcaaagtcgatacaaccacaagattcttgatagatcacaattttctggcaagaaagttcctcagagagccgctgcatcacgcaatatttccgatgaaggtggatggagatccaaatctagaaagcattcggagacattcggaaaagagcttgttatgacgtcagatgaagcatctatgaagaattcaatgctacctaaaggatatgcatatgttcctgctgattgcttgtcaaatgagaagcactctaacgaggacgtatatgctagtgaaccagtggagcatgataggtagagtgttggatctcagcctggttctttatttttccttcgaggctgacatccataatattgaatgccatgctatttttctcgtggggaagttttatttgagaatatggcaaaatgtaaagataggctttttgctctggcgggggctagttttgttagcattgtacattccttatgagagtaaactgtacagtggatgagcatttcttgcatttacttgtattagaagggtatgcattccgttttattgacacatttgtgggaaggactaaacggaagcattccttgtaatcatacaagggaagatcggggaatcacctgtttttctgtaaagttgatgtgtacatattttatggcagtcttagtaattctgaaagggatcgtgctcgatatcagatccaccgagcatacaaattatacttaactcccacctcataaatttgtatttccccctttatcctgcatttctattatgatgattcttgcgaccactgaattcccttgttataatgtagatgtagttagtgataattgatcctgtttcatttgttatgcaaaaaataaaaaaaaaagaagacata

SEQ ID NO: 28725 - DNA, 4872 bp, Glycine max
  Clone ID: TF_GmC4344_1
gagaagtctatctcaatggaatctttttttacagaagtcaccgcttacccccctgcacatgtggtacatgaaaaattaagtgagatgaaaatggataacaataatgcagatgataaaatgcctattgctgaacctgtcaaatatgatgaacctgctaatttagctaggcctgaaaatataaaaactgagaaagaaactggacaagacaggaaagaaaatgttgtgcagacatctgaaaatgcagctggaaccaagtctggcaagccaaaaataaaaggagtctcattaactgaattatttactccagagcaagtcagggaacatatcactggcctcaggcaatgggttggccagagcaagtcaaaagcagagaagaatcaagcaatggagcattcaatgagtgagaactcctgccaattgtgtgctgtagagaagcttacctttgaaccaccgcctatttattgcacaacttgtggggttcgcattaaacgaaataatatgtattataccacgggcaccggtgacacacggcattatttttgtcttccatgctataatgatgctcgtacagagaacatcattgttgatgggactcccattgccaaatcaagattggaaaagaagaagaatgatgaggaaactgaggaatggtgggttcaatgtgataaatgtgaagcatggcaacatcaaatttgtgctttatttaatggcagaagaaatgatggtggacaagctgaatatacttgccctaactgctatattcaagaaatagagaggggagagcgcaagcccttaccgcaaagtgctgttcttggagccaaggatttgccgagaactattcttagtgatcacatagaacagcgattatttaaacggctaaagcaagaaagactagaaagggcaaggcttcaaggaaaaagttatgatgagattcctggggctgatgctcttgttgtaagagttgtgtcatctgttgacaaaaagttagaagtgaaaccgcggtttctggagatttttcaggaagagaattacccaacagaatttccatataaatcaaaggtagttttgttgtttcaaaagatagaaggtgtggaagtttgcctatttggcatgtatgttcaagaatttggatctgaatgtcaatttcctaatcagcgccgcgtgtatctttcatatttggattctgtgaagtattttaggcctgaggttaaagcagtgactggagaggctcttcggacttttgtttaccatgaaattctggtaaatttggacactaagatcttgctttggagcccttccttagagatattctagttctgggttactatcttcctgtaaattatatttgatatgaattatttctttttagattggatatcttgaatattgcaagaaacgtggttttacaagctgctatatctgggcttgtcctccattaaagggggaagattatattttatattgccatccagaaattcagaaaaccccaaaatccgataagctacgtgaatggtatctggccatgttaagaaaagctgcgaaggagaatattgtggtcgacctcaccaacttatacgatcatttctttgtatctactggtgaatgtagggctaaggttactgccgcaagactcccgtattttgatggtgactactggcctggggctgcagaggatttgatttatcagcttcgccaagaggaagatggaaggaaacaaaataaaaagggaacaactaaaaagactataacaaaaagggctttgaaagcgtctggtcagtcagatctttcagcaaatgcctcaaaagaccttctccttatgcacaaacttggtgaaaccatttgcccaatgaaggaagattttattatggttcatttgcagcatgcatgtactagttgctgtattctaatggtgtctggcaaccgttgggtttgcaggcaatgcaagaattttcagatctgtgacaagtgttatgaagcagaactaaagcgcgaagagagagaacagcatcctattaaccagagggagaaacatactctttatcctgttgaaattactgatgttccttccgatacgaaggacaaagatgagattcttgagagtgaattctttgacactaggcaggcatttctgagtctctgccagggaaatcattatcagtatgatactctaaggcgggccaagcattcctctatgatgattttgtatcatcttcataatccaactgcccctgcatttgttacaacatgtaatatttgtcgtcttgacatagaaacaggccaaggttggcgttgtgaagtttgccctgaatatgatgtgtgcaatgcttgttatcaaaaggaccgtggcgctgatcatcctcataaattgacaaatcacccatcaatggcagatcgtgatgctcagaacaaggaagcaaggcaacttccagtattacagttacgaaaaatgcttgatcttcttgtgcatgcatctcaatgtcgttctgcccactgccaatatccaaattgtcgcaaggtgaaggggcttttccgtcatgggatgcattgcaaaatccgtgcctctggaggttgtgttctatgcaagaaaatgtggtatttgcttcaactccatgctcgtgcttgcaaggaatctgaatgccatgtaccacgttgcagagatttaaaagaacacttaaggaggttgcagcaacagtctgattcaagacgaagagctgctgtaatggagatgatgaggcagagagctgcagaagttgccaacagttctggatgagcattttgatgtttggatatgtacatatgggatgttttggaagaatgctcctgacaaatatagacattagctttgcccgttctccagttagacactgctggaaactagggcttgacatggatccggatcaatccggtgaatctgaatcaattcaaactcaaaattccagattggatcggattgaaaaattgcaattctgatttgtttggattgcatcacggatttcactttgaaaatcctatctaatcctatccatcaaattgcttagtatttttttaaatatttgtttaatctttagagtttgggttttttagcccagcccaatttaattgtattttttttcacttggattgcaaacttaaactaggaaaaaatccattggatccaaatatgttaaaattgattggatcggattaaaaaatgccacagaccaacctaccaggttagttgctcggatgactaactcatacccgcgttacctaaacgtcagtagcatgttggcgtggagctggcgatccacggcaaaaaggcttgggggctctatgaatttcatttcccggcccgggaaattatcagtctgggctaatcgctaagagctcatcccgagagaactcgggacgggataactcgaagtacggcatgaagtaagaagttagccaagttctgtgatcctcgagaatgaactatcagacctaaagcctagactagaaggaaagaactgatctggtcctaacagacccgtgtccacccctgctggaaaccgtattttgaccagctgtgcgtggatggtttctatatgcatgacctgattgttaccatgaggatcatagagttcaaccaactagtgatgcctcaactaactaatcaggtccaactgggtataacggcggtggtgtcttcgtatgctagtcgatttgatgattctttgatatagtcagcttctcgtgttatctctaatggtcattgtgtggcaatttactatagttctaatttgtcaaaagtatattactttctttttttcgcgggggcactgctaagtcgcattttgtcctcgtcttctttaatgttgacactttctgtagtacctttttatttaaagattaagtaattagtagtttcagaaaattgtactaagtggctcaaagggttgtccttgggggatcgggacgctcatcattcacatgagtgagaacaacgagtatcgcagctacggaaaatgcttgatctcctcgttcatgcatcccaatgtcgttctggacattgccaatatcccaattggtcgaaaggtgaagggacttttccgccatggaatgcactgcaaaacacgagcttctggaggttgtgttctttgcaagaaaatgtggtatttgcttcaacttcatgctcgtgcttgcaaagaatctgaatgccatgtaccacgttgcagagatttaaaagaacatctaaggagacttcagcaacagtctgattcacggcgtagagctgctgtaatggaaatgatgaggcagagagccgcagaagttgctaacaatgctggatgagcaatttatacttgtaaatatgtggcactttgaagaaatgctctagacagaggtataccttagtttcacctatgctccgacagcagtgattgtttttgtgaatgaataggaatagatagggtacatgtatccttgcgtccatctcaacatgtttgtcccagaaaaagatctgagttcagccatttagtgctgctgtcctcttctgcaaaggactaaccaggtccggcgggatatttggtggtgcgtctgtttttgtaattctttgattttgttaagttacttgttttatgtcagatgccatccttcttcggtggcgggtgtactatagtcctaaataggtctcaaatttcttagaaatctttgtgggagggagggatgtcatcaagtcgtttttagttgaccgttttaaagattcaatgcattttgtagaatcttttatttaaagatggaagtaaataattagaatcttcacatagttctgcttcctttatgggatagtatctactgtctcttttgcgtacttttttatattcaatattgctattcgattttttgctatgg

SEQ ID NO: 28726 - DNA, 1114 bp, Glycine max
  Clone ID: TF_GmC832_1
gagataacttggatgtggtgtcatgttctgtatgtcagatgggtgttttaattcggcatcctcacaagtgcaatgcatgccaaggttattgtcacgagggctgttcaacaagatcaacagtctcggcaaatgaagttgagtacttgactacatgcaagcaatgctaccatgccagattacttgctcagaaagagaatactaatgaatctccaaccagtccattactcctacaaggacgagagaataactctgggacatttttgaatggatcaaggcctaaatctcatgatcaagtactgaaatcttccaggacaaaggctaataatcccaacgtgaaacaagttactcctgtgacggctttgaaatgaacaaaggctaaatattatgaacaagaaccgacttctaccaggacaaaggataataatcattttggcacgcctcaagttgcttctgaggccactttgacaggaaaaaaacctcgcaaaaattgttcttggggtattatatggcaaaagaaaaataatgaagatacagacaatgatttctggctcagaaacatacttttgaaagggggttcaaacatgccacagttaaaacctgtttgtcacttgtgtcggaagccatatatgtctgatctgacgtatatttgctgtgagacatgccgaaattggtatcacgctgaagctgttgaacttgaagaatccaaaatttctagtgtgttgggcttcaaatgttgcaagtgtcgaaggataaaatcacctgtttgtccatactctgatttgaagcctaagagacaagagggcaagaagtcacgcacaaggactaaaaagaaagagcattctggagcagactccgattctggagcaatctattatgatatgagagattgtgaagttgctactcctgtctttcatgtagaggatgatcccagtcatgtctttcctgtagagggtgatcctactcacgtctttcctgtagagatgatcctcttcttttctctctttcgagtgttgagctgctaacagaacctaagatggaaggggatgttgagtggaacagtgtccctgggccagggcttcggaaattgccagtgagaaggaatgttagcattgag

SEQ ID NO: 28727 - DNA, 465 bp, Glycine max
  Clone ID: TF_GmC154798_1
gaaagaagaaaagacaaaggaataacatagatgttgatgatgcttcacgcttgcgaaggagaacaaggtacctcttaatcaaaatgaagctagagcagaaccttattgatgcttactctggagaaggttggaaaggtcaaagtcgggaaaagattaggccagaaaaggagctactacgagcaaaaaagcagattttaaaatgtaaacttagtattcgcgatgccatacaccagctggattctcttagttctgtgggtagcatgaagattctgccattgctccagatggatctgtttatcatgaaaatatattctgtgccaattgcaaactacatgaagctttcccagataatgatattatactctgtgatggcacttgcaatcgtgctttttaccaaagatgtctcaatcctcctttggatactgaaaatattcctcctggagatcaaggcttgttttgcaagtt

SEQ ID NO: 28728 - DNA, 1452 bp, Glycine max
  Clone ID: TF_GmC28830_1
catttcacataagagaggaatgaaacttagacttatgaatggaatagcatacaatgagacgtggtttggcagttggggttacaaatttggtcgaggatgctttggtgtaactcaatccatgtaccacaaggccatacaagcaataagaagcatgtcattatacttgatcatacaccacattgccaattctagccatggcattccactaatcttctcaaggaaccagacactttcagatcaatccctagtgacccttggtgacctattttgttacatgttagaccttaaatcatgtcttcctcgtgaaacctgaattagttcctataaaacaaatgccttagttgagaccaattgtcgttggtcccctaaaaggattgagatggcaacaagggttattgttgaggccttgaaaagaacagagtttaaatgggtttcaagacaagaagttagagatgctgctcgtgcatacattagtgacacaagtttggtagattttgtgttgaggtcactaggaaaccatgttgaaggaaactacttggttcgctgaagcttgaaccttgtgaccaaagtcttggaatattgtttagaggacatttctgatgtgtacccttataatgaaggcttggttatgagtaacaaagtgaaggacaagtataagaagggctcaactaatgaaggacatgctttatttgtataagtacattcttatagattaaaaccaattatgaggtcagaatttctttcagctataccattggcagctaggataattcttggcactaagtattttattaaagattactttggagatattcctcaccaagttgaattaggctccgatgataaactcaacatttattgtacaatttggttgagaaacaatgttggcagtggttagtacttaaacaaggccattatgccaccccatgaatgtatcacattgaaaagaaatgctactatcaatgacttgaagctagaagttgaaagggattttagagaaatttgttgagagttaaggagttttatggtggaatcatttgggaatttgagtgtcaacaatgagacaatggcttttggtctaattgaagtgggtggaaaagttgtccttgagggttggcatggtgacatatgaataaacatgattgagcaaatatgtgaaagtgatatgaacaatggtataatggattgcacttgtggaactatagaagatgatggtgagaggatggtctcgtgtgatatttgtgaaatttggcaacatactaggtgtgtttgaattcccaatgatgaagaaattcctcatatttttttaatgcaaaaagtgtgagcaagaaattgtcttgtttccttcattgccatagttatacaattataatttttttgatgatgcttaatcattcactttttgtttaaaggacgcctttgagattgaacaattaaaattgcttcttagct

SEQ ID NO: 28729 - DNA, 732 bp, Glycine max
  unsure (1)..(732): unsure at all n locations
  Clone ID: TF_LIB4167-058-R1-N1-G3
gagggggaaaaatctccattcttttaattttcgaaagtaacagaacttacaactattgggaaatattggcttacaacatcccaaccccaaatacaatattctgaatgaaacaagcaaagcagccaattaaacttcatatcaaccatgtctatagcctatagtctatatgctacagtatctgacctgcttactctgacagatggcacttagagcagcttcagattatgccttttgctctttagcctctctagtcatgtctttccatgtgatgtatcaaaatgtcggaaaatctatgaaagttttacagccacaaaattcatgttctctgtaacttgatgtggcttgccgcctctttctcttcaaaattcagagtattggctgcagttaaaagcatgtccattgctccaccactttccaattcccgtgcacgtttattgtgtgtgtttcttttcaagattggcatttggctttgcagcatcttcaccatttcttcttggcttgttaaactcatatgcctttttagcctggtggattgcttgtattccagcatcacattttctgcagaaccagttccctcttggaatagaagtccgcggaggtttcatgcaatagatgtgatatgcatgatcacagccatcacacagaacaatnccgatcatcatcttggatcagttaagcaaacccggcataaacaagaggggcagtaccaacaatgaccatatgacttcaact

SEQ ID NO: 28730 - DNA, 2479 bp, Glycine max
  Clone ID: TF_GmC697_1
ccacgcgtccgggatgattgtagtggtgggtcattagaaagcccgtgtggaatgggatatgttcatgatggagatttggatttgtacactcgcaatatggaattgaaaatgtccaagaaagtagtccccaactgctaccctacaaatgtcaaaaagcttttatcaactggcattcttgacggagctgtagtgaagtatatttacaatcctggaaaggttgagctacaggggattattgatggtggcggatatttgtgtggctgttcaatgtgcaattactctagagttcttagtgcctatgagttcgagcagcatgctggagccaagactagacatccaaataatcatatattcttagaaaatggaagaccgatatatagtattatacaggaaataaaaacggctcgagagatgaggttataaagaatgtggctggttcatctgtcaatgaggagtccttccaggcttggaaagaaagtcttctacaaagcaatggcaaggttcaggctcataaaagttatagcaccaaacttgtcggtatgcctcatacaaacataagtcaatctgtagaaagtacaagccatttgtcatctttgcatgtaccgagtcattatgagcagcacatgtatatgaatcagacaactgatgaatggaagcgtgtggtgaaaaagccaagctcctacacttctaactcaggtgtactgcagaaaagaagtgctgatggttgcactaagagaagggacaatgatttacacaggttgctttttatgccaaatgggctactcattgtttctgagttttcttactatgtcaaatgatgcaaattacttggaggttacaaacagggaaacgggatagtctgtggttgttgtgatatagagataagcccttcacagtttgaagcccatgctggaatggctgctaggcgtcaaccttaccgacacatatatacttccaatggattaacacttcatgacatagctctatcgttggcaaatggtcaaaaccttaccacgggagacagtgatgatatgtgtgcagtatgtggagatggaggagatttgattctttgcaatggatgccccagggcatttcatgcagcctgcttgggtttacagtgtgttccagacagtggttggcaatgtctaaattgtatagataatgctggtaatggaagagaatcttctattgtgaggccaatcatgatacgattgacacgcgttgataaaacaccagaagttgaaatgggaggatgtgttgtttgcagggaacatgatttcagtgttgctaaatttgatgaacgaacagtaataatttgtgaccagtgtgagaaggagtatcatgttggctgcttgcgggacatggggctatgtgagttggaagagctgcccaaggataagtggttttgttgtgatgactgcaatcgaatatatgctgctctacagaattcagtttctgctggagcagaaattataccagcttccttttcagaactaataatcaggaagcatgaggacaagggattatgtacctatggggccatgaatgatatccagtggagaattttaagtggaaaaagtcgttatcctgaacatttaccattgctttcacgagctgctgcaattttccgagaatgttttgatcccatagttgccatttctggtcgtgatctgattcctgttatggtctacgggagaaatatttctggccaagagtttgggggaatgtattgcattgttttaattgtgaattatgttgtagtatctgctgggcttcttaggatttttggccgtaatgttgctgagcttccacttgttgccacaagcagagcacatcaaggaaaaggttattttcaagtgttgttctcttgcatagagaggttgctgtcttctctaaacgtggaaaagttggtgcttcctgcagccggggatgctgaatcaatttggactaagaaattgggcttccgaaagatgagtgaagatcagttatccaaacatctcagagaggtgcagctaacactcttcaataaaacttcaatgctggagaagacagtgcagctggctatagaatgaattttatctggtgttgtaactaatttttggctatttattcatttttttagcattttcctcactgtaacgttgctgcgatgttcatgctgccgtattgttcttttcttaattttttgtttcccacgtagtatgggtggttgtggcttggtcttggttccagccagccatgtctctttttgtacaatgtaggataaaaaggcgtaaaaaatagggaacatggcctagaaggaagtagaggagttccaaagagccagcatgctgaccaattttattttttttaattagcatgcatgttggatatataaaatcctactgtattgatttttttttcctcctaaaaaaagggcggcgtctgtagtgaattataagtggtgaagggggggccccccagttggtgcccgctcccc

SEQ ID NO: 28731 - DNA, 2018 bp, Glycine max
  Clone ID: TF_GmC24_1
ttgaaaatttccagggaatgaagcctgaaagtgtacttgacttttcccgcgtgaattcaaggatgaaggagcaagcttatgaacaatcaccaacactcttcttgtcagatattcaacaggtttggagaaagcttcaagacgctggtaatgagattgttgctcttgccaagagcctctctaacatgtcaagaacttcctactctgagctggtgggaattccagcacagagcacatttcaagatgagaagcaagtggaatttgactgttgcatgaaaccagaacagacacaagcatgtgctatgtacaaaatttgcagttgcaagtgttgtggagagaaggcagatgacacagactgtttggtttgtgattcatgtgaagagatataccatgtgtcctgtattgagcctgcagtgaaagaaataatacctcacaaaagctggtattgtgccaattgtactgctaatgtgattgaatctctccatgagaattgtgtgctatgtgaaaggttaaatgatgcaaagaccctggatgatgtaattggtgatggaagctttcctacaattgaggaaacacaaaatgaatttgaagagaattcaaattgcacctctgatggaattcaagtttccataggtgaggaaaaaacacccaattgcaagatatgtgaaaatgaagtggatggtggaaaaataaaaatatgtggccatcggttttgctccaataaatactaccatgtaaggtgtttaacaattaatcagttgaagtcatatggtcattgttggtactgcccttcttgtttatgccgggtttgcttaactgatcaagatgatgatcggattgttctgtgtgatggctgtgatcatgcatatcacatctattgcatgaaacctccgcggacttctattccaagagggaactggttctgcagaaaatgtgatgctggaatacaagcaatccaccaggctaaaaaggcatatgagtttaacaagccaagaagaaatggtgaagatgctgcaaagccaatgccaatcttgaaaagaaacacaacaataaacgtgcacgggaattggaaagtggtggagcaatggacatgcttttaactgcagccaatactctgaattttgaagagaaagaggcggcaagccacatcaagttacagagaacatgaattttgtggtgggcttcgttaaccttccagttattgttagtagtgactttaacttcatatttgttgactgttaatacacagtattttgcatttgctgcattttttgaatgactgatattttggtaggctgtaaaactttcatagattttccgacattttgatacatcacatggaaagacatgactagagaggctaaagagcaaaaggcataatctgaagctgctctaagtgccatctgtcagagtaagcaggtcagatactgtagcatatagactataggctatagacatggttgatatgaagtttaattggctgctttgcttgtttcattcagaatattgtatttggggttgggatgttgtaagccaatatttcccaatagttgtaagttctgttactttcgaaaattaaaagaatggagatttttccccctcatggtttagaatttaatattttattaccatttctgtatagagcttattctgcattgatgcacttgatagttgatcaaatatattttgccttttcaagtaccacgtaccagcactcttccagttgttgtttgttttgggagttcagaaggggctagttaaggttggtaacatgatatttgatggtaaatggttgcagcccaaaagtcttggtgttgtttaggttcagttttaaatagcttgaggtaagttctagcttacaaataagcccttgtaaggttataggcttttgtagaaaagttagatgaagaaattgctgaaaatgttgaagaatattagttgattttatattacgagagaagtttgatttcaagagggggggggggggggggggggggggggggggggggggggcgcgccgc

SEQ ID NO: 28732 - DNA, 1273 bp, Glycine max
  Clone ID: TF_GmC1699_1
ccaagatgtccattgccgagaggtattcccatgctaagtggaagatggaagaagcaaagaaaatttctgcaccttctacaccttctacaactcacacctctcagcccttgcaaacaaacattgttggaccagttgacaatcgtgtgccatcacatgttcgaatttttccttctgataaatcaagccacccatcaatcccttctatgggtgccatagtgtctattcctgcccatgtttctgtgggatcttctgcagcattgcagtatcaagtgatcagcaatgaagtaagaccagcgtccggacccagtggtttctggtgtgatgcctagcagtcacttggggagaaatgcatcttccttagcattgcctaaagttgaacgcccacagtttaaagttgatggaggatcaaatgggtctccttacatgctgcaagtccaagcaaattcatctgcaaaccaacctttggtgaatgctccaacatggtctatacagactcaagctgcttcattagccagaagtgcatcagaaaacaaggtgcctgttcataactctgtcaaggttgagggaacacctgatgcaactgtatcaagggcagggacacaaataacaacagactcgagctttagaccatttatcactcaaacagcccctggaaatttacctagtgtgcaccagccattgccgcgtacaaacattgttcaggctcctttgattcctagtcacactgatattgctaagattgtccagaaagtgttacaaccaaagcttcctgtccatcccacgtggactcctccatcaagggattatatgaataaggctttcacatgtcagatgtgtgaactcagtgtcaatgaggttgatactgtacttctctgtgatgcttgtgaaaagggatttcacttgaagtgcctgcagccatcagtcttgagaggaattcataatagagttgattggcattgtatgaggtgcttgagtttaagtggtggaaagcctttgcctccaaaatatggtcgtgtcatgagatcctcaaacacaccgccaaaattgccctctaatacaggtggcgttcaaccatgttctgagaagaaagtagagaatatcgatccaaaggtcatcccacagacgttagcaacaaatgggagctctgttccaactgtttccggtggccatcacaatgttgagttgccatccgaatcaaagataccagataccaaagatatgcaagggactggcatttcatccaccattgaagctattgataagaagcctgatc

SEQ ID NO: 28733 - DNA, 1152 bp, Glycine max
  Clone ID: TF_GmC7106_2
tcgacccacgcgtccgaggcttttagcttttctccgtcttcctttgttccttctttccctctctttttccgctccttattactggaaatgctgctttcttcttctcgcgctcatcttcactgactacttctctctctgcaatttccattgttgaagaaggagagaggttttgaggtgtggggtcggtgatggacggtggtggagtgaactacaaccctcgcaccgtggaacaggttttccgggacttcaagggccgtagagctggcatgatcaaggctctcaccactgatgttgaagaatttttccagcagtgcgatcctgaaaaggataatctttgtctgtacggattccctaatgagcaatgggaagttaatttacctgcggaagaagttcctccggagcttcctgagcctgcattgggcataaactttgctagggatgggatgcaagacaaggactggctgtctttggttgccgttcacagcgatgcatggttacttgcagtggctttctactttggggcacgatttggttttgataatgctgacaggaaacgcctgttctctatgattaatgatttaccaacaatatttgagattgtgactggaagcgcaaaaaaacagacgaaggaaaaatcatccatttcaaaccacagcagtaacaaatcaaaatctggttcaaaagggcgaggatctgaatcagggaagtattcaaaggaaacaaaggacgaggaggaagaggtactggatgaagaagatgacgaggagcatgaggagaccttgtgtggggcatgtggggagcactatgcatccgatgagttctggatttgttgcgacatatgtgagaagtggttccatggcaagtgtgtgaagatcactccagccagggccgaacacatcaagcagtataagtgcccctcatgcagcaataagagagcacggccttgatatagttgagaagtgggtcagtcctcaccccttgtaactaaatcatgttggacttctaacttgttagtggcttaggcttcctttgtcatgccatgatggtgtggaatatgtattcagtactttgggtcttgtgaacctttcagtggatatatttattaatattgatagtttgcaggttctgaacatgtctccaaaaaaaaagaga

SEQ ID NO: 28734 - DNA, 816 bp, Glycine max
  Clone ID: TF_GmC931_2
gtccagctctaaggcacagcgagcttcggaatctcaggctagacagtacttgctattgcattctattttggagccagatttgggtttgataaagctgacaggaaacggcttttcaacatgatcaatgaactgccaacaatatttgaagttgttactggtgcagcaaagaagcaagttaaggagaagtcttcagtttcaaaccacagtggcagcaagtctaagtccagctctaagcagcgagcttcggaatctcaggctagacagccaaagccattgcaatcaaaagaggaggatgaagaactggacgatcaagatgatgatgaacatggagagaccttgtgtggggcatgtggtgaacattatggcactgatgaattctggatttgttgtgacatctgtgagaagtggttccatggtaaatgcgtgaagatcacccctgctagggcagagcatatcaagcaatacaagtgcccatcatgcagtaacaagagagctcgcccctgattgacatgagccaagttccatcattgacagtcattgttggactctttgctgatcgtgttattttgcttttcttcctagatgttgcagttaatggatagtttctgtttgacttgtgtaggtttcttttctagtctgtaggattctgctgtgttggttttagtgtcagctgcaattcagttgatgccttcttggatttgatcaatttttagtttatgcattgttgacttgggaaagtgaagtcttttccttaatgtcactctaaaactaggttaattaaacacaaatttatttgaaatggatgtctagttatgt

SEQ ID NO: 28735 - DNA, 774 bp, Glycine max
  unsure (1)..(774): unsure at all n locations
  Clone ID: TF_9985993
caaaattcaatgtagtagttagtagtgaggatggagaaaagggtgaggatgaaaacaaggatggtgaagcggtggaaagtgaggatgaattgttggtaattgaggcaattgacgatgttgctgttgaacaagctcctccccaggacgacaagagtcaggacatttctgattcttctgttagtctagagtggtttttaggttgtaggaatagggtttctttgacttctgagcgccctaccaagaaaagaaggcttttgggtgttgaagctggtttggagaaagttgtaatgacttgtccttttgatgagggccagctgttttgccattattgtggcaggggagacactggcagggattccaataggttaattgtctgtgcttcttgtaaagtggcagttcaccgaaagtgctatggtgtgcatgatgatatagatgaggcttggctgtgctcctggtgcaagcaaaaggttgatgttgatgtgtcggtgaatccttgtgttctttgcccaatgaagggtggtgcattaaaaccagttaatagcagcgccggaaggtgtggggtcagtcccatttgtgcacttggtttgctctctgtggatcctgaggtttatatagatgatttgaagaagatggacctgttatgaatgtnggagaaatcaaggaaaccccgaagaaattaatgtgtantggtttgcaaagccaaatgtggtgcatgtgttccgtggaatcatggaacttcanagcttctttcatccttatgtccaagggaagctt

SEQ ID NO: 28736 - DNA, 1177 bp, Glycine max
  Clone ID: TF_GmC52662_1
gtttttctccatcttaaactgactgaaattgagttctccggtcgagcggacgatcgtgtttttttttttattccatcgtaaaccaaaatttagttctccagttgagcgttcttcccacaaaccctaatgtcgtttcttgaagaatttcatgccaatttggattcactacccgttattcttcggaagaagtatacactgttgcgtgacctagataagagcttacaggatattaaaaggcaaaatgaacagcgttgtgaacaagaaattgaagatattaagcgaggtgttaggtctggaaacatcacgcctgatacttcggcaattagattctctgatgaagcgcttgatgagcaaaagcatagcatcagggttgctgatgaaaaagtagccttggctgtccaggcttatgatttggtagatacaaacatacaacaacttgatcagtatctgaaaaagtttgatgaggagattcggcgtgaaagagaaaacgctgcaataactggagtacctgcttcaggtcctgaaggtaatacaaaatctggaaggggtaatgaaagtggtactggtagaggagggcgaaaaaaaacacggcaaacaacaatggtcacagaagcacaagccacttcaaacccaactggcatggatttagagttaccagttgatccaaatgaacccacatactgcttttgtaatcaagttagctatggagcgatggttgcatgcgataaccccaattgtaaaatagagtggtttcattttggttgtgttggtctgaaagaacaaccaaaaggaaaatggtactgttcgaattgtgcagcaaccaaaaatcggcgtagaagcaaatgaggctgacagaagaataagaataatgttaaaaatgattgaatgtgtatataaattttaatatctctagaagggagttatttatattgggcctagaaactttgttttcgtagctgttattaatcgggaaattatgaaagtacaaatttccaatgacttatagttggtggctgtgtttgtacattccgttggttttgtacacatttgaaagctatggttcttttttattgtagatctgggttgaaaaggcccggaattattgtgtgtatgtgactatgtgtgtaccatacaatgaagtttctgcactaattatagttagcagttgagttaaaaa

SEQ ID NO: 28737 - DNA, 657 bp, Glycine max
  Clone ID: TF_GmC52662_3
tttcaaagaggagggcgaaaaaaaacacgccatacgactgtcacacccgcagcaacagaagcacaagccactgcaaacccaactggcatggatttagagttaccagttgatccaaatgaacccacatactgcttttgtaatcaagttagctatggagcgatggttgcatgtgataaccccaattgtaaaatagagtggtttcattttggttgtgttggtctgaaagaacaaccaaaaggaaaatggtactgttcgaattgtgcagcaaccaaaaatcggcgtagaagcaaatgaggctgccagaagaataagaataaagttaaaaatgattgtattgaatgtgcgtatatatattttaatatctctagaagggagttatttatattgggcctagaaactttgcttctgtagctgttattaatcgggaaattatgaaagtacaaatttccaatgacttatggttggtggctgtgtttgtatatttaattggttttgtacacacttcagagctatgttcctttaaggttcttctcctggccatcaaatgtttccttttcattgtagatctgggttgagaaagcacggaattactgtgtacttgtgtagcataccatgtagtttctgctctaattatataattagcagtttacccatgcc

SEQ ID NO: 28738 - DNA, 1279 bp, Glycine max
  Clone ID: TF_GmC931_4
ccggaaaacccgtcgacctagcgtccgcgacagaagggggttgttgtttgttgtggcattttgcacttgcaaaattttggttgcagaggcagagagaggaggcaacgccacaccgcaccactctcactctgcaacacccgaatctcgtttcacctaaacgacctcgtttttgcgttcttttcccttttcttcttctgatttaggtttcagagagaagaagaaggagcagcaatggactctcgcacgtataatcctcgcaccgtcgaagaggtttttagggatttcaagggccgaagagctggtctcatcaaagccctaaccaccgatgttgaagatttctacaaccaatgtgatcctgagaaggagaatttgtgcttgtatggctttcccagtgagcagtgggaagtaaatttacctgctgaagaagtaccaccagagcttcctgagcccgtactgggcattaactttgctagggatggcatgcaagaaaaagactggctatctttagttgctgttcatagtgatgcatggttacttgctattgcattctattttggagccagatttgggtttgataaagctgacaggaaacggcttttcaacatgatcaatgaactgccaacaatatttgaagttgttactggtgcagcaaagaagcaagttaaggagaagtcttcagtttcaaaccacagtggcagcaagtctaagtctagctctaaagcgcaggcttccgaaactcagggcagacagtcaaaggcattacaaacaaaagatgaggatgaagaactagaagagcaagataacgatgaacatggagataccttgtgtggggcatgtggtgagaattatggtactgatgaattctggatttgctgtgacatctgtgagaagtggttccatggcaaatgtgtgaagatcacccctgctagagcagagcttatcaagcaatacaagtgcccatcatgcagtaacaagagagctcgctaagcaaatttccatcagggacaataaaccatttgagtcttaacgaatctgattaatattttttttttctagatgtagctgatggatagtttttatgtttgacacatgtagatttcttgtctttctgtgggatttatgctgtgttggttgtctgggggaagttcattctttttccaagccttgtcctagctatggatccacatcggcataagcttcatatgaatggggttgaaaccataatctcctggccaccttaatactatggaaatgaaagtacttcgacatttgcaccaaa

SEQ ID NO: 28739 - DNA, 1678 bp, Glycine max
  Clone ID: TF_GmC1724_2
ccctcgcgtccgaatcaccgttccattttcatttcgctcagttccatagttcgctttttttttttttaatttgatttaatcagaccgagtgctgttggtgtcagcatgcgctagcttcgtcgtcgtcgtcatcgattttccggtttgtgattctcgtgattcttctcgggccgaattattgggtttgacggcatggatttggtaccgagcgtcaaggaagttgaactattttcgtataaaagagctcaaagatgtgctcactcagttacacctttcaaagcagggaaagatgatctggtaccttactattaggtctggtttaagtcgattatagtgctccatatatgctgtaatttattgtctttgactttgttatcttttattcacattcttgtatttccttttatgcaggaaaatgcagatatcaggggccactgatctagcttctaagggacagggtgcatcagatagcagtagtgtaaaggttaaaagtgaatttgatgatgcctttcaaccagatgtgaagattcgctgtctatgtggaagtagattggaaacagagaatttggtcaagtgtgatgatgcaagatgccatgtgtggcaacacatcagttgcgttattattccagagaaacctactgaaggcatcccactagttcctgataaattttattgtgaactctgtcgtctcactcgtgcagatccattttgggtttcagtggcgcaccctttgcatcctgtgaagttgaccacaaccagtaatccaactgatggaaacaacccagtgcagagtgtggagagaacatttcaactgactagagctgacaaggacttggtatcaaaaccagaatttgatgttgaggcttggtgtatgctcctgaacgacaaggttccattcaggatgcaatggccacagtatacagacctgcaggtcaatggtgttcctgttcgtgcaactaacagacctggttcacagttgcttggggctaatggtcgggatgacggtccaattatcacgccctatacaaaagatggaattaataagatttccttggctcgaggtgatgctcgcattttttgtttaggggttcgtattgttaaaaggcgcagtatgcagcagatcctaaactcaatcccaaaggagtctgatggtgagaaatttgaagacgcccttgcacgtgtctgccgttgtgttgggggtggaaatgcagttgatgatgctgatagtgacagtgatttggaagtggtttcagatactttcactgtcaaccttcgttgtcctgtatggctttcatcaatagatgaattattttagcaattcatgaagtcctactaatcagttttttatttttggtgaaaattttagatgagtggttcaagaatgaagattgctggaagatttaaaccctgtattcacatgggttgctttgatcttgaagtgtttgtggaaatgaaccaacgatcaaggaagtggcaatgtcctatatgtctcaaaaactatgcgttggagaatatcatcattgacccttatttcaatcgcatcacttctatgatgatgaattgtggcgaagaaattgcagagattgaggtgaagcctgatggttcttgccgtgtaagggtaagagtgaaagtgaacgcctggaatagggaatctacacagtggcgccttctgatggac

SEQ ID NO: 28740 - DNA, 514 bp, Glycine max
  Clone ID: TF_uC-gmrominsoy277f07b1
tttcgttcgcgtgggaaaagaacagcttttgtatgcttcagatgcatgcagtgacgtaacatacttggctgagttcacataaatgatctggtaccttactattaggaaaatgcagatatcaggggccactgatctagcttctaagggacagggtgcatcagatagcagtagtgtaaaggttaaaagtgaatttgatgatgcctttcaaccagatgtgaagattcgctgtctatgtggaagtagattggaaacagagaatttggtcaagtgtgatgatgcaagatgccatgtgtggcaacacatcagttgcgttattattccagagaaacctactgaaggcatcccactagttcctgataaattttattgtgaactctgtcgtctcactcgtgcagatccattttgggtttcagtggcgcaccctttgcatcctgtgaagttgaccacaaccagtaatccaactgatggaaacaacccagtgcagagtgtggagagaacattttaactgactaga

SEQ ID NO: 28741 - DNA, 549 bp, Glycine max
  Clone ID: TF_jC-gmro02910013g08a1
ggctcgaggatcgctgctggaggcggcatgcactagcttccggggccttgcttgcagataggtcttcgtttttttgctgaagattctttgcaaaatggatttggtagccagttgcaaggaaaaattgcaacatttccgtataaaagagctcaaagatgtgctcactcatttgggactctcaaaacagggaaagaagcaggatcttgttgatagaatattagctatcctctcagaggaccaagtttccaaattgtggaccaagaagaatgctgttggaaaacaagaagtggccaaattagtggatgacacgtttagaaagttgcaggtatccggggccattgatcttgcatcaaagggacagggtgcctcagatagcagtaatgtgaaaattaaaggtgaaattgacgattcctatcaatcagatacaaagattcgctgtctctgtggaaatgtattcgatacagagccattggtcaagtgtgaagatacaagatgccatgcgtcacagcacatcagctgtgttattattccagagaaacctatggatgg

SEQ ID NO: 28742 - DNA, 994 bp, Glycine max
  Clone ID: TF_GmC2696_3
ccacgcgtccgcgacgcagaaacgagaaccacttcgctatgcatttgcaccctctccgtcacattcccattccgttaccttattttttatagacacacacgaatcccccttttctctgaataataattcaattcaattactcctaaattaaacaagtagacgaggaggaagaaggagaacagcaacaagtagatgaggaggaagaaggaggacagcaacaaggagacgaggaggaagaaggaggacagcaacaaggagacgaggaagaagaagaagagcgacaaggagaagaagaagatggtgatggtggaatggcaatggcagaagacacagaggagaagagtgctgctgtgagtggtgggaagaggaggcgtggggctgggaagaatgctaaggctacagggagagttgcatccaggaaaaagatggaggaggacgtttgtttcatttgcttcgatgggggtgaccttgtgctttgtgaccgcaggggatgccccaaggcttaccatccttcctgcgttaatcgtgacgaggccttctttcgagctaaggggaagtggaattgtggttggcatctttgcagcaactgtgagaggaatgcatcctatatgtgctatacatgtacattttctttgtgcaagggatgcatcaaagatgctgttatcttacgtgttaggggaaacaagggcttttgtgagacttgcatgagaaccgtaatgttaattgaacagaatgaacagggaaacaatgtgggacaaatagattttgatgacagaaacagctgggagtatctcttcaaggactattacatagatataaaaaaaaaactatctctcacatttgatgaactcactcaagctaaaaacccttggaagggatctgatatgcttctttctaaagaggaatgactggatgaaacttttgatgccactaacgatggaggatcagattgagatagctgctatgagaatgcagattggaggggggctgaaag

SEQ ID NO: 28743 - DNA, 1419 bp, Glycine max
  Clone ID: TF_GmC5215_1
ctcgagccgcagacacagtccttcagtctgtctgtcgttctatttaattcccctctccaaatttcaacctctgtctcctctccttaacagcatcatcacatgcacccgcgattcctacgatcccttcccatggtctcttctctgcaccctcgccgtaccttctagaaccttccctcagatctcaattccccttccgctttctcctttcatggaaatggcttccactccccgcaccgtcgaagagatcttcaaggactacaccgcccgcagaaccgccatcgttcgcgctctctctcaagatgtggatgaattctacggactctgcgatccagataaggagaacttgtgcctctatggacatccgaatgaaacatgggaggtgactttgccggcagaggaagttcctccagagcttccggagcctgcactcggaatcaattttgctagggatggcatgaaccgcagggactggctttctctggttgctgtgcacagtgattcgtggttgctctctgtggccttctatcttggagctcgtcttaaccgcaacgaaaggaaacgtttatttagcttgatcaatgatcttcctactgtttttgaagttgtgactgacaggaagtccagtaaaggacaagcccactgcagacagtggaagcaagtctaggggcagcaccaagagatcaagtgatgggcaagttaagagcaacccaaagtttgcagatgaaggttatgaagaggatgatgatgagcacaatgaaaccctttgtggtagctgcggcggaaattacaatgctgatgagttttggattggctgtgacatatgtgagaggtggttccatgggaagtgtgtgaagattacccctgcaaaggctgagagcataaagcaatataaatgtccatcatgcagcctgaggcggggcaggccttagactgaacgatggaatgggtacatgtgaggtgagtgttgtttcatggctgacaagatactgtaattttgttacatctcttacagaagttaatgtaatgggcatagtatcgatgctcaagggcaaatttatcagggattaagtttgtttttccagatgaaccattggtgcatgccacagggtatagaatagaacatgacaaattttaattttatgattagtttatatttagtagaatatttgcttgaactttaaatattgtaatttttttatttttaacattgtttaagaaaacaaaccttttcaacagattattctaattgaactttcattaaaaaaaaaaaaaaaaaagggcggacagacaactaaagaaataaaaaaacgggggggccgattcttggggggttcttgaacccggaaataatttccgtaccgggacttgaaggagaccctgttttccttatggggatagcttttaaacttggggaaattg

SEQ ID NO: 28744 - DNA, 1306 bp, Glycine max
  unsure (1)..(1306): unsure at all n locations
  Clone ID: TF_GmC5215_2
cccacgcgtccgagaagacgacagaagggtacggctgcgagacgacagaaggggattgtagtttgatcaaattcccatggtctctctctctccaattaattcgatttagcttttccccaaatcccaaaccctttctttcgcttagatcccaatccaattgggttatggacatggcttccagtccccgcaccgttgaagagatcttcaaggattacggcgccagaagaactgccgttattcgcgctctcactcacgacgttgatgaattttacggcctctgtgatccagataaggataacctgtgcctctatggacatccaaatgaggcctgggaagtgactttgccagcagaggaagttcctccagagcttccggagcctgcactcggaatcaattttgctagggatggcatgaaccgcagggactggctttctctggttgctgtgcacagtgattcgtggttgctctctgtggccttctatcttggagctcgtcttaaccgcaacgaaaggaaacgtttatttagcttgatcaatgatcttcctactgtttttgaagttgtgactgagaggaagccagtaaaggacaagcccactgcagatagtggaagcaagtctaggggcagcaccaagagatcaagtgatgggcaagttaaaagcaacccaaagtttgcagatgatggttatgaagaggaggatgatgagcacagtgaaaccctttgtgggagctgtggcggaaattacaatgcagatgaattttggattggctgcgatatatgtgagaggtggttccatgggaaatgtgtgaagatcactcctgcaaaagctgagagcataaagcaatacaaatgtccatcatgcagcttgaggcgaggcaggccctaagccgaaggcaaaatgtgaagtgaataatgctgtttcatggccgacaaagatactgtaatattgttgtatcttttatagaagttcttgtaaacggtatagtatctatgtctgatcataatctttcagattaagttaatttcttctaccaagattaatcatcagtgtatgttatataattttatagaatagaattctatacattttatttttgtctattaatctatattttgcttgaatttacccggtgtatgtatggttattttaccttgtgtctgaattctgagatacaaggtagctggtaaaatactgaggtgagaactaccaccttttccggattgttcaaaaaaaaaaaaaaaaaaaaattataaaaaaaaaaaaatannnnnnnnnnnnnnnnnnnnnnnnnnnnnnnnnnnnnnnnn

SEQ ID NO: 28745 - DNA, 1351 bp, Glycine max
  Clone ID: TF_GmC37050_1
gtgacttataaatttgggcagggttgtttaaataaagaatagcgctatagaattgaatggagagaaaggtggttcattaggattcaaaataattgtgtgtttttggaacaagatcgatcaaaaaactgaagggttattggctttggggcattaatggtgcggtgcctatatagatgcgaaaggaagggacggatttaaaagttaaaacctattcgtgttgtgtgttggggcgtggcacgacacactttgtctgtgggtctcaactcaatgcaagcccttcgccttctcctttcccatttctgatccgattgggtggccattagtgtgttgactggatgagattgatggacatgcttctaaaagttcaataatctttaattccaaacactgttgccttgactctatctcaggggccctgtagcaacatacaacattttttctgaatttgattcaggtgataatgttaatacaaacttctgtccttagttcagttgaagctggtctatgttatgtatctgatgatgggaaagatgttctatgtgaccggatgcctagtggtgaaacttggcaggtgggtctgaaatgcaataagtaccctcttgactggtgtagaaaagctgaaccagtagaagaagataaaaggaatgctgatgatcctcgcgccgcatccgctcgaggtagctttggtcagccgtcaactgctagtataatgacagaaaatactacacctaatatggtatacaggagaaagaagctctgtaaggactcaaatttcgacctagggccaactaatgtgcaggcaagtgcaaactgcccttcagtcataagttccgctgcacatttatcatcagcggaggatcagccaactggttttcaagttaagcatgaaattgaaatggttaaagatcctaccatgccttcagtcttatttgatagagtagccaaagatagcacacataaaaacttaggtattaatagtgtaaatgatagttgctcctcttcaaagccaaatatggaaactgaaatggatgaaactggtgaatgctcctccagtataatagtcatggattgcacaagggaagaagtaacagaaaaggatttctgcattaatattttaagaagccatggacttcttaaagaagattcccctgtagataatgtggcttctggggaagatgctgttaccactggtaataactgctgttccaggtcatgcaaaatatgtggtgatttagacagttcattgaacatgcttttatgtgatcattgtgaagatgcatatcatctgtcttgctacaatccacgtttgaaaaaattaccaattgatgagtggttttgtcattcatgtcgt

SEQ ID NO: 28746 - DNA, 2156 bp, Glycine max
  Clone ID: TF_GmC1309_1
gggtcttccccggtatagatatgttaatgaagccgttagcggaacaatgaaaccatgagggttctgagaaattggatagtggagacaatgattgtatcaagaccaaaatggaaaataagtcagatatgggttcttcaactccacaagatcctcatggaagtgatgatattagttcaagtcttgctaatgagatgaatgatgaatgcagtgacgcttctcaagaactaaacaaccaagttttggttgatggcattatctgttccaaatctcattctggggaaatgatgtctgatccagtttcagataaatgtatttctccttctagaactagtcacagtgaactagaaatgaagaataaagtagtggctgctcctccttgtggtatttgtggagatggaggggatttaatctgttgtgatggctgtccatcaacatttcatcagagctgcttggatatacagatgcttcctcctggtgaatggcattgtccaaattgcacctgtaaattttgtggcatagccagtggaacttctgataaagatgatgcatctgtgtatatcctacagacttgcatcttatgtgagaaaaaatatcacaactcttgcactaaggagatgaatacccttcctaataaaatcaattcatcaagcctttctttttgtgggaaagagtgcaaagagctttctgaacacttgaagaaataccttggtaccaaacatgagctagaagccggtttttcatggtgtctcattcatagattagatgaagactcagaggcagcttgcagggggcttagccagagggtagaatgcaattccaagttggccattgcactgactgtgatggatgaatgttttttacctgttattgatcgaaggagtgggatcaatttaatccgtaacgttttatataatagtggatcaaactttagtcggttgagctatagtggcttttacactgctactttggagagaggggatgaaatcattgcttcagcatctatcaggttccatggaactcagattgcagagatgccattcattggaacacgccatatatataggcgccaggggatgtgccgccgacttttttctgccattgaatcggccctttgctctctgaaggttgaaaaactagttattcctgcaattgctgaactcacacatacatggacaacagtttttggcttcacatatctagatgaatcactcaggcaagaaatgaagtcactgaatatgatggtcttccctggtatagatatgttacagaagctgttagtggaacaaggaaaccgtgaaggttctgagaaaatggaaaatggaaacaacgattttatcaagaccaaaatgggaaataggtcagatatgggtttttcaactccacaaggtcctcgtggaagtgatgatgttagttcaaatcctgctaatgagacaaatgatgaatgcagcgatgcttctcaagaactatacaaccaagttttggttgatgggattatctgttcccaatctcattctgaggaaatgatgtctgatccaatttcagataaatgtgattctccttctagaactagtcacagtgaactaaaaattgaggtgatccatgtcccgcagaagaaaaccttgacaagaagtgtcactcgtccactgctatgaattgtgattcatcggccaggttggattctgaaatggcagtcaatactctgcctactaaagaggtttgtatgaatgacgctcttgaagttgttccccctttaagccccttttccttgctgactcttttttgagatttctgaccttttctttagggcaaactgcagaaacaatagaagttgggagagtgaaaggtttttcagttgcaattggattgaaagtccacccactttccagatctaccttagagaagtgagggaactaaggaaaattgaaaagatgttgacacttgacaagggactccttgtaccatgtgccttcattcaccactactccaacgaacccttcactgctcggtccgacgccttcttcttgccggcggcagcgaggccctcttcgccacgtccttcatcccggtcgaaacggcgccgcttgcgcctcctcgccagtcctctagcgtgcctggtaggatgcactccctcactggcttggtggacgcgatgatcc

SEQ ID NO: 28747 - DNA, 1326 bp, Glycine max
  Clone ID: TF_GmC121288_3
ccacgcgtccgcgacacgaactggagaagcagtggttgatatccaggatcgactacctgaagctcgtgttgtttattgctcagcaactggagcatctgaacctcgtaatatgggttatatggttcgacttggtctttggggagatgggacttcattcactgatttccgggaatttctaggagctcttgacagagggggtgttggagctcttgaactagttgccatggacatgaaagcaaggggtatgtatttatgccggacacttagctatgagggtgcagagtttgaagttatcgaagcaccattagaggataaaatgatggacatgtataaaaaggcagcagaattttgggctgaattacgtgtagaattgctgtcagccagtgccttcctaaatgacaaaccaaattctagtcaactatggcgattatactgggccagccaccaacgtttctttagacacatatgtatgtctgctaaagtccctgctgctgtgagactagcgaagcaagcattagttgaagaaaaatctgtagtcattggtcttcagagtactggagaagctaggacagaggaagctgtaacaaaatatggttctgaacttgatgactttgtttctggacctcgagaattgctgcttaaatttgtggaagaaaattacccgttaccagaaaaacctgaacttctcccaggtgtaagaggatggggtaaaagaactccaacggaagaaggcattctgcaactcccggtgtttcagtaaaaggaagggttagaaaagtagccaagtggcagcctcctagtgatgctgaaagtgatgaagaatctgaatctgactctggcattgaatctactgactctgatgatgagtttcaaatatgtgaaatttgtactacagaggaggaaaggaaaaaattgctacagtgttcctgctgcagtaagttagtccattccacatgcctgatgccaccaattggtgatatagttcctgaagagtggtcatgccatttgtgtaaggagaaaacagatgaatatcttcaagctagacaggcctacatagctgaacttcaaaagaggtatgatgcagcctcggaacgcaagacaaaaatattagacataattcgtgctctggatcttccaaataatcctttggatgatattgttgaccagctaggaggccctgacaaagttgcagaaatgacaggaaggagaggcatgcttgtgagggcttcactggaaaagggtgttacttatcaggctcgtaatacaaaagatgtactatggaaatggttaacatgcatgaaaagcagctctttatgggatgtaaaa

SEQ ID NO: 28748 - DNA, 1615 bp, Glycine max
  Clone ID: TF_GmC1708_1
taaaactactgcctgcaaggatgctgaaactaagaagtatgtttcagaattgaatgctgaggaggatgatgttgatggcaatggagatgaatgtcgcttgtgtggcatggatgggaccttgctttgttgtgatggttgtcctgctgtttatcattcaaggtgtattggtgtgatgaagatgcatataccagaaggggcatggtattgtccggagtgcaaaatagatatgattgggcctactattgcacggggaacatcacttaaaggggctgaagtattcggaaaggatttgtatgggcaagttttcatgagtacttgcaaccacttactggtgtatgtttaacttcttttgtgtttcttccactccttcatttgttatgctggatgattctggctcaatgtcaacagtgatggcttttgtcttaaatactacaatcagaatgacatacctagagttctccaagtcctttatgcatctgagcaacatagacctatatacaatggtatttgcatggcgatgttagaatattggaatatttcagaaaagttcttacccatttgtgtcagtagactaactcctatggtcgaagaagagcataaagctgttagttcggtgaaggaagaatacagtttaatgtttgggaatgggatttgtggtgataatttggtgccatctcttgatgcttcattggttacaactcgaagtcctgctcctggaagcagtggcaatgcaagaactactgtgaatctgaagcttaatgaggaaactgcaatggattcgactgtttcaactgttaaccatcatcactctgacccaaagtgccaaaattctgttaataggtcagctgcagtaagccctgtcaagtgctccttggtaagcagacaatttaataattatgggcacgcaaatgacgtagggttgcctatgaatttgtctttgcaaactaaaggcgaccaatctggttttggaaagtgcaaaggcagtttaactaatgattttgtgtacatgggttgctcctataaaccacagtcatatattaattactatatgcatggtgatgttgctgcgtctgctgctgctaacctggccgttctttcttcagaggattctagatcagaaggtcatgtgtctggcaacttggggaaagcaacatctggaaacacttatttgctagcaaaagcattctcccaaacagcttcacgcttcttttggccaagttctgaaaagaagcttgtggaggttccaagagagaggtgtggctggtgcatttcttgcaaagcctctgtttcaagcaagaaaggatgcatgttaaatcatgctgctataagtgccaccaaaagtgcaatgaaaatcctttctggtcttgctcctgtaaggagtggagaaggaatcatccctagcattgcaacatatgttatgtatatggaggaaagtttacgtggcttaatagttggaccctttctgagtgaatgttatagaaagcattggcgtaaacaagttgaacgagccaaatcatttagtgatataaagccccttttactcaaagtgagtgattgttattttgaatcaaggagatttattaatttttaatgtctggactattgcttgcatttg

SEQ ID NO: 28749 - DNA, 3160 bp, Glycine max
  Clone ID: TF_GmC256_1
ggctcgaggaatgctgattctccaaaggcacctggctgccaggatcttggcaatatgggaaatacaaattcgtctggtcagaagcctgctctgcatggcgacatctcagagtctaagaaattgacaagtgacttgagagcaccttctgcaagtgctgttggagttgcacattcaaatgaaaagcttagaactgtgagttattctacgaagaaccaaaacggatttactctcccaaggatcttagatgaaagctcaggcagagaaggcaacaactgtgataacaataaggttaaaagggctagtaagggtgtcaaatctatcagtgttgaagtttctgggaaaggaaatgattttattaaagaagatgagccaattagtttattgcctcaaaagaggataaatgaagcttcttttactaaattaaaatcgagaaagaagacttgtgtcccgtcagcaaatggtaaatctcaaggattaaaagtgacatctcaggttgatgagccacctgaagtcgatgactatttttctataggcaaagatggtataaataactcaaacacttgcttagttttgaaaccttcaggctctacctccaactcactggcatttgatgagcttttttcaagaaatgcaaacccagaatctgttcagtgtgataatgtctgtcagaattcaccaaaaacggctgttcagagcttaagtgaatctaaaattaatggcaagcctgatatcacagattctggaatgcaacaagttgatggggatgaagcagagcaacataatgtcactagaaatctagattgttcttctctgggaaacaaaaagtcatgtaatgtggaatctgctggttgtactaaattggatttaatcactgaagaaagtaataaactggttagaaactcaccccgaaagaagtcggttgccaagagaagtttgggttctaaacctaaattaggtgccactgctaaacagaaaaaatcactttccctgactaaaacttccctgcaaggtgaaggtgtaacttgttccagtggaagcaaagagattgcaacttgtgatgcgaagatgcatcagggatgtcccaaaatctttgatgttaataaaacaacagagcaagaaattgttggtaaaaatgcagaagatgctggtgacagaactgagtttttggacgatgaaaccgaggctccagatgacaaatgtgaatatgagttaggaatggcccttgatgaagacttggttcatctttcaaaaaagccatatacagcaaaagaagagaagtcagaagcaatctgccctgcaacaaaatgtgaagaggcaatgcctcctaagaaaggcacaaataaaactgaaaaacagaaaacatcttcactgccagtaaagcatcaagcaagaaaaggttctgcgggtaaagtcaaggccacagttagtaaatatgctgaagatgatggtgacagaactgagcttgtgaacgatgaaattgaggccccagatgacaaatgtgaatacgagttacgaatggcactcaatgaagaatctcatctttccaaaaagtcagatacagcaacagaagagaagtcggaagtaatttgccctgcaacaaaatgtgaagagacaatgcctcctaagaaaggcacaaaaaaaactgaaaaacagaagccatcttcactggtagtaaagaatcaagcaagaaaatgtcctgctggtaatgccaaggcaacagttgccaaggaattatcgaaatctaatatggcagtatcaggggagaagattcctaatgagactgggcatgagccagagatagaaaccatggaagaaatgtcccttcctgatgataaaagtgacgagtcagctgttcaaagaaataagtcagagaatttttctgaagagaaggagaataagccaattgatggagagcagggcagaagcaatggtaatccaactattaaatctagtgtaaggccagcaaagatcaagtctaagaaatcggggctcaatccatctataacagaatctaacacgagagtaaaaactgaagccgcatgttttatattaagtgggcatcgtctacagagaaaagagtttcaacaagtaatcaagcgtttaaaaggaagggtttgccgggattctcaccagtggtcatatcaggcaacacacttcatagctccagaccccatacgcaggacagagaaattttttgctgctgctgcatcaggaaggtggattcttaaaactgatttcctaactgccagtagccaggcaggaaaattgttggcagaggagccttatgagtggcaccagaatggtctcagtgaggatggcacaatcaatatggaggctccgagaaagtggcggttgttgaaagaaagaacaggtcatggagccttctatggaatgcgtattgttgtgtacggcgattgcattgctccacctttggatactctgaaacgtgtcatcaaagctggagatggaacaatattagcaacttctcctccttatacccgcttccttggtaccggaatcgactatgctgtagttagccctggcatgccacgtgttgacacgtgggtccaagagttcttaaaacatgagataccttgtgttgtagcggactacttggttgagtatgtttgcaagcccgggttctcccttgagagacatgtattatatggcagtcatgcttgggcagagaaatcatttgataaacttaaaagcaaggcagaagagattgttgaagaactcgttgctcctgaagattcccgtgatgatgatataatttgcaaagtatgtggatcccgggatagaggagatgtaatgctgatttgtggtgatgaaagtggttccgtcgggtgtggaatcggtacccatatcgattgctgcgatcctccactaacagctgtccctgaggaggattggttttgcccaaagtgcagtagcacccgaaactgctcaaacaaacccagtaaaaggaaaaagactgtcttatcttcatccaagtgtacgtaatatcatattccctcccccttttgagtcagtcatcgtttcatttagggaacatacctgaattgtgccaacattatccctggtccctagattaaagttgtaataataataataataattttgtacaatccttagtaattaacaaaataatgctgatttc

SEQ ID NO: 28750 - DNA, 2921 bp, Glycine max
  Clone ID: TF_GmC310_1
ggaactgcctgagaagttggggtcgaaatagagatttgtttcattggagttcatggacctgtcctctttgccggatttgtgaggcttgcagaaggactggtgatccaagtaagttcatgttttgcaaaaggtgcgatggtgcttaccactgttattgtcttcaacctccacacaagagtgtttgtaatgggccttatttgtgcacaaaacacgcaagatgtcacagttgtggatccaatgtccctggaaatggactaagtgtgaggtggtttatgtcatataccaactgcgatgcatgtggaagattgtttacgaaagggaactactgtcctgtttgtttgaaggtttacagagattcagaatcaacacctatggtttgttgtgatagttgccagctctgggtacattgccagtgtgacaatatcagtgatgaaaaatatcaccagtttcaattggatgggaatttgcagtataaatgtcctacatgtcgtggggaatgttatcaggtcaagaatcctgaagatgctgcccgagagatttggaggagaaggaatattgctgagagagatttgattgctagcttgagggctgcagctggtttgccaactcaagaagagatattttctatttcaccattttcagatgatgaggatagtgggcctttaaaactaaagagtgaatctgctcgttcctttaagttctctctaaagaatttggccaatgactcaccaaagaagaaatcttctagcaaaaagactgctaagaaaaaagactcacagttatttatgactagtaaaattgacacacacaatagttgtgaaggacatagtgatattaaatctttgcatagcttagatgatgataagaatgatgatatacaatcccagagaaatgaaggtccagatgtatactcatcccctgctactggaagcttgagtcaaactgaagcatcttttcctattaatcagccagggattttgaaacaaaagtttgttgatgaggtgatggtcagtgatgaagagaggaaaccaagagtagttcgaattaaaagcaacaaggcacttattccagatagtgaagaggaaagtggaaaacacagtcttaagactcagaatgtgaaagggaagaagttggttataaatttgggagcacggaaaattaacgtggctagttctccacggtctgatacttcaagctgccaaaaagatcaagatccggtgactgttaatggaaatgatgattcattttgttggtcttgtcactatatatttgcttgagaagttgtaattgtgtgatttgtgtaaaagtggtatggggctgatttttcagacattacttctttctgcccatgaaatcagtgacacattttacacattatccaggagaaaacatttaattatcctgtcaaataattactattgtgcaacaaaatttatagtaattgtataatttgtaactgctttttgtgtgtatgtatatgttcttgaatggtttgattgctttatttggttttgcttctttcctcttttatttttgtgtgatttttccaattcaaattttctttcaggaaatgaagatataagccaatggaggaagggagacaagtttgcattagatagacaagatgacacagctaggcatattgacggtaaaggaatcaaagttgattctgggcaatcaaaatttttcagggtttcgggaagagaagggaatttgattaagctgggaaaagttaagccagatgtttctgaattcaacctgacctctggtagaggcaatatgtctgatgggcggataaaacatagtattgatggaatgattaatcaggttggaataaaagccccatcaagaggtgaaaggacatatttggggaggcagtcagaaggcagctctgatgcatatgagacagatgacaataataatcgtacaccttcacattctttgccaaaagattccaaacctttactaagatttaaattcaagaaacccagcattgaaagtcaaaattctcctcatcaggaggaagagaagatgacaatcaagggccagaggtcaaaaaggaagagaccttcaccttttaaggagaaagcatcttttaatgagtctgaaggtgtaagtcaatcacgtcaagacagtgcaatggatgggataatggatgcaaactggatattaatgaaattgggcaatgatgcaattggaaagagagttgaagttcatcagacatctgacaattcttggcacaagggagtggttactgatgtagtggaaggcacttcaaagttatatgttgcattagacgatgggaaagtgaagaacgtggaactcaggaaacaaggggtccgttttgttcctcaaaagcagaagagatctaagacatgaactaaacttgtccaccctttgtgatcatttaatgtggatacttttcttaattgactttgaagatttttcatctttgaggcctcttactgaatttatgttcgtagctgctcacattgccgctgatttttgggtgaagcattcttgattggagcaaatttcagtcgaaagaattaaccatttacctcagtcctttttctgggctgcaggttcttgatctcgagttagatttttgttccttttctacatgtatctgatttcaaagtagattctacctgtgatgtataggttcaccatttctgtagaatagattagtaaaggccaaggtgttagctgtatgattaatattgctagtatatttgtgaattccaggtttcatgatttgagatattatcttgaaagatgaaattatcgtcaactttttagagttgatggttgttcctgcccttgcccccccccccaagattcaacccataaaaataggtgcttgggtatcaaggcggaacaaagcccggacatgtgttaataatagtgggtctgggatt

SEQ ID NO: 28751 - DNA, 592 bp, Glycine max
  unsure (1)..(592): unsure at all n locations
  Clone ID: TF_GmC126_7
tatcgtacggctgcgagaagacgacagaaggggattctggatttctttgtttctatttatcaatatgtgtcagccaatccaaattgaatgatgcaggggctgatttcttgtgctctgataagctttgacctaatttggctacaagaattcatccattgtaaaagattgttaaatttaaggagtatctgagaagtagtgctacttttatttattttttttctgtttgtgaccctatagattttatgaaagaaacactgttcaattttggtaggttttttgtaggtaccatcctgcttgcgtgggcatgactattgaagaagcaaagaaattggaacattttgtttgttcagaatgttcatctgatgatgacatgaagaaaccccatgctacattttctgtatcaccaggatctgatgtcaaggttgagccaaagcggcggaagagatgaccatcacgaagaataactcatcttgcgaatgcaactcttgctgaatttcgcgggctatgtggtagctgttgtgtgtgtattgtacagcttctaccagaggctataaacacatcattttatgtatttgactcangctatgtatgt

SEQ ID NO: 28752 - DNA, 1191 bp, Glycine max
  Clone ID: TF_701130201_FLI
atccacaccaccaaatccaaattccaatgcttcttcttccttcttcttatttcaatttcaatcactactacttcacgcttttgtttctccatttttaaaccctaaatctatctatctaatagagataagatagggcaaaaacaaaaccctagccaaagaaaaaccttgttgagcagcaacagcagcagcagcagagagagaggaatatggaaggagtaccgcacccaatacccagaacagtcgaagaggttttcaccgattttaagggcagacgcgccggtttgatcaaggctctcactaccgatgttgaaaagttttaccagcagtgcgatcctgagaaggagaatttgtgtctatatgggtttccaaatgaaacatgggaagtgaatttgcctgttgaggaagtgcctcctgaacttcctgagccagcattaggtataaactttgccagggacggcatgcaagagaaggactggctatcactggttgcagttcacagtgactcatggctgcttgctgttgctttctattttggtgcccgctttggatttggtaagaatgaaaggaaaaggctttttcagatgataaatgatctgccaacaatcttcgaacttgtgactggaagtgctaggcaatcaaaggatcaaccagctgcccacaacaatggtagcaaatgcaaatcaagtggaaagtcccgtcagtctgagtctcaggccaaggggatgaagatgtctgcaccacccaaagaagaggatgagagtggagaagaagaagaagaagatgatgaacaaggtgcgacatgtggtgcttgcggtgataattatggcactgatgaattctggatctgttgtgatatgtgtgaaagatggttccatggtaaatgtgttaaaattactcctgctaaggctgagcacatcaagcaatacaagtgccctagctgcagtaacaagagggttagagtttgaaagctctaaacctttgaaccaatcaccaattaaacagacaagatttagaatgtttgataacatttttacaagtgaaaattgcttcctgttcaagtcaatgatgcactttaatgactatgcagatggaatttcaagttttgctactgttcattactactgtctaatcttcttgggaattgtgttaagtagtcattggcaacaaggatattatataaatatattctgc

SEQ ID NO: 28753 - DNA, 1316 bp, Glycine max
  Clone ID: TF_GmC121_1
tgtttctctctcaactctcacaacccatctttcatatccaaattccaatgcttcttcttccttcttatttcaatttcaatcactactattattactctttcacgcttttgcttctcgatttttaaaccctaaatctatctatctgtctaatagataagatagggcaaaaacaaaacaaaacaaaataaaaccctagccaaagaaagaccttgttgagcagcagcagcagagagagagaggcttatggaaggagtaccgcacccaatacccagaactgtcgaagaggttttcaccgattttaagggcagacgcgctggtttgattaaggccctcactactgacgttgaaaagttttaccagcagtgcgatcccgagaaggagaatttgtgtctatatgggtttccaaatgaaacatgggaagtgaatttgcctgttgaggaagtgcctcctgaacttcctgagccagcattaggtataaactttgccagggacggcatgcaagagaaggactggctatcactggttgcagttcacagtgactcatggctgcttgctgttgctttctattttggtgcccgctttggatttggtaagaatgaaaggaaaaggctttttcagatgataaatgatctgccaacaatcttcgaacttgtgacaggaagtgctaagcaatcaaaggatcaaccagctgctcacaacaatggtagcaaatgcaaatcaagtggaaagtcccatcagtctgagtctcaggccaaggggatgaagatgtctgcaccacccaaagaagaggatgagagtggagaagaagaagaagaagatgatgaacagggtgcaacatgtggtgcttgcggtgataattatggcactgatgaattctggatctgttgtgatatgtgtgaaagatggttccatggtaaatgtgttaaaattactcctgctaaggctgagcacatcaagcaatacaagtgccctagctgcagtaacaagagggttagagtttgaaagctctaaacctttggatcaatcaccaattaaacagacaagatttagaatgtttgataacatttttacaagtgaaaattgcttcctgttctagtgaatggttcactttaatgactatgcagatggaatttcaagttttgctactgttcattactactgtctaatcttcttgggaattgtgttaagtagtcattgacaacaaatatattatataaatatattctgcagtttctggttttgatttgaataaatatttcatttatttctaaaaaaaaaaaaaaaaaaaaaaaaaaaaaaaaaaaaaaaaaaaaatt

SEQ ID NO: 28754 - DNA, 681 bp, Glycine max
  Clone ID: TF_jC-gmXLIB3563P058ah04d2
tgcagaaatatttatataatatccttgttgccaatgactacttaacacaattcccaagaagattagacagtagtaatgaacagtagcaaaacttgaaattccatctgcatagtcattaaagtgcatcattgacttgaacaggaagcaattttcacttgtaaaaatgttatcaaacattctaaatcttgtctgtttaattggtgattggttcaaaggtttagagctttcaaactctaaccctcttgttactgcagctagggcacttgtattgcttgatgtgctcagccttagcaggagtaattttaacacatttaccatggaaccatctttcacacatatcacaacagatccagaattcatcagtgccataattatcaccgcaagcaccacatgtcgcaccttgttcatcatcttcttcttcttcttctccactctcatcctcttctttgggtggtgcagacatcttcatccccttggcctgagactcagactgacgggactgttaaaaggtccaaaacaggaagaccaaagggactttccagacaagggcagtgatagaaatgtaaactaagaaacaattgaaaactgaataccacctttccacttgatttgcatttgctaccattgttgtgggcagctggttgatcctttgattgcctaacacttccagtcacaagttcg

SEQ ID NO: 28755 - DNA, 1392 bp, Glycine max
  Clone ID: TF_GmC3892_3
cgaggcctgggaaggagcttctttggcctaagttggatattcttcgacgcaaattgaagagtaggggtctatttcaaagtgtggattcattgtgtgccgaaggaaagtttccagaatctttgtttgattctgcaggagagattgacagtgaggatatatttttacggctgcgagaagacgacagaaggggcactaataatgatataattctttgtgatggtgtttgtgatcgtggatttcaccagctctgtttggatcctccgttgttaactgaagacattccacctggcgatgagggttggttatgcccaggatgtgattgcaaagatgactgcatggaccttgttaacgactcctttggaacaagtctttctattagtgacacctgggagagagtctttcctgaagcagcatcatttgctggaaataatatggataacaacttgggacttccttctgatgattctgatgatgatgattataatcctaatggttcagatgatgtgaaaattgaaggggatgagtcaagttctgatgaatctgagtatgcttctgcttctgagaaattggagggtggttcacatgaggatcaatacttgggccttccatctgaagattctgatgatggtgattatgatcctgatgctccagatgttgaatgtaaagtcaatgaagaaagttcaagctctgatttcacttctgactccgaggatcttgctgctgcaattgaggataacacagcacctggacaggatgggctcatcatgttcggcgaacacatttttatttttattgtgaagctcgcaatttgccatgaattttcactcaggttggcaaatggttcgacaatacacgttggagcttccggcattcatcacaaatggaaaccaattctggtagaaatgcttcaccggaagctaccgatggcagggctgaaaatgagggggagaagcaatgtgaatcaatgtctccggaggtcagtggaaaaaactctaaaaccacaagctctagaaaacggaagcatttgtcagaacccctatttgaagcacagctggatatcaatggcttagcaacaagttcaccaaatgttcatcaaacgcaagtaggcaataaaatgaagccaaggaaaaggaaatgatactttatgcaagagccctgtttaaccttttcctaaggcttcaaattacagtatccatccttttgtgagattgagatcccatgaaatgatcggctaggatctcgatggatttgtttccatttaggaaggtaatcataaaatatgtgccattgtattttttaaaaatagctttccaggtattgatctggtgagttgttttagtgttgcctctcttgcaaacactaaactaaaaatagttcagttattagttatcc

SEQ ID NO: 28756 - DNA, 2144 bp, Glycine max
  unsure (1)..(2144): unsure at all n locations
  Clone ID: TF_GmC931_1
aagtaaactttgaacctttaaaacggcccccccatatttttttgtaaaaatttattctttatttttttttttttattttttattttttttattttttttttttttgtttttttttatttttttttttnnatactttcgtgtagttctcacttctctcgctctcaaacctgaattcggttgtgatataaacctgcgttgcgctaaacgacaccgttttcactgtctctgagaatggaggcactaagtcgctccgtggaagaaatattcgaggatttccagggccgaagagccggcatcatcaaagcccttaccaccgatgttgaagatttctacagccaatgtgatcctgagaaggagaatttgtgcttatatggatttcctaatgagcaatgggaggtaaatttacccgttgaagaagttcctccagagcttcctgagcctgtcctgggcattaactttgctagggatggcatgctggaaaaagactggttatcattagttgctgttcatagtgatacatggttacttgcccttgccttttattttggagccagatttggatttgataaaactgacaggaaacgactattcggtatgatcaatgaactaccaacaatatttgaagttgttacttgaagcaaagaaacaagttaaagagaagtcttcggtttcaaacaacagtggcagcaaatctaagtctaactctaaagcgataatttgtgttcttatcaaattgctggctggtggagcagcgggcttccgaaacccagggcagacaatcaaagccattacaaccaaaattttgcacttgcacaatttttgtgtcagagacacagagaggaggcaacgccacaccacaccattttatttttgtcactttaaacaccgaaagtacatgttttattatagggtacactagtgagcagctagctcttattcactagaaagttacaagacgatacaacaaacatgtagtcacagtttgtagtagccaacagccatagtgcacttacgccctgtcatctttgttttcagcaacaacctcaactctttcaaggcagagtgtaaggtccacacttgtaaccaacagggcgattagccaggttgcaacgcttggggatggtgacagcaacttgagggttgacaccagccattttggctgtgttggagagcagaactgcacagaggcagcttgggttctgcccaattttcttcacctgagcacagcaactctgagaaacactagcattctcatcttgtgctgctgaggcacatggtgcaagcttataagcctcattatctggggtggtagatttcccacattcaccagcactctccacccctgcaatagtactcacaagcaccacaaacccaacaaggcatagcaacttcacacaataagtacaaccctccattatttctcaatattatgcttatgtctctctattagtgaaatgtttctctgttgatttcacaatgccatcatacccattgcgataaaagatgaggatgaagaactagaagatcaagataatgatgaacatggagaaaccttgtgtggggcatgtggtgagcattatggtactgatgagttctggatttgctgtgacatctgtgagaagtggttccatggcaaatgtgtgaagatcacccctgctagagcagagcttatcaagcaatacaagtgcccatcatgcagtaacaagagagctcgctaagcaaatttccatcagggacaataaaccatttgagtcttaacgaatctgattaatattttttttttctagatgtagctgatggatagtttttatgtttgacacatgtagatttcttgtctttctgtgggatttatgctgtgttggttgtctgggggaagttcattctttttccaagccttgtcctagctatggatccacatcggcataagcttcatatgaatggggttgaaaccataatctcatcaatgcttagaagcttagggtttttcatcatattaaattagtatcagctgcaattcagttgatgccttcttggatttgatcaatttttagtttatgcattgttgacttgggaaagtgaagtcttttccttaatgtcactctaaaactaggttaatgaaacaaatttatttgaaatggatgtct

SEQ ID NO: 28757 - DNA, 2291 bp, Glycine max
  Clone ID: TF_GmC259_1
gtcgatccagcgtccgcgctgtcgtcttcaccgtataagaactatcgcctggttctgaacagtgtgtgattcggattccgacgaggatgtcgtcgttgggttccccgaagaagcggctgagatcccaaacagcagaagagaataaggaagaggtcgtttgttgcgggatttgctacgctgagcgtggggtttcgattacaggggaaatcgattgctgcagccaccacttctgcttcgtttgcatcatggaataggcccaattttccgccaaaggttctcctacgttcgctggctccctatgcatggcgtcttttcttcctccagggacgttaaggtttatcatcctcatggaaatatggcaactggtccggctgattcttatactgaaaccaaatgtggtgtttgtcatgctggaacagatgagcatcttctactactttgtgatctatgtgatactgcttcgcacacatactgtgttggcctgggctatactgtttctgatggtgattggttttgtcacgattgtgctatttcccgggagaccaatatcaatgaagaatcagaccaacaaaaattttgcgcaacatgctgagccaagtgtaaccatcaatatctttgatattgtgagggaaacaggcagccgtgtggttaatagacctagggcatctcctttacaacagaacctatcatctcctgttattcctttacctgattggttaagttacttaagtagattaaattgaaaaggttttgtcttaagtgtcaataatatgcagcggaagtgaggcttttttagttaaaactcgaattctttaaaaaggggttcatcttagttccgttgagataaatctaaatagggaagcatagttagtgaaaaacaatgttctggttccttatcatatttcaaattggatggttggcattctatggctaccacaagcccataacaatatactggccaaggtctgccttctaacaaaatgttgaatgagagagtctttaaagatgctgactaggcatggaatatgatggacaggtcaaagaggatacaacgcctcatcatagaacaggcagcattataggggtgtgaatcttgttaatgaacaaaagagattggataaaagctctgaggatagaaaaacaattctccgaactgaatgatcaacatttcaaagcattagtcttgaggaacactaaaatggagaagcagtgtgactattctagtctcaaccagaatttggaaaatcgctctactctaaatttggaagagaaaaagcaaagtagggttacatgtgagggaccatactactcactcaaaaggatattgtgaacgtccattgttatcaaatttctttttttccttcatatctacatgatcattgtaggctgaaatatttataggtgttttgtgtaccctttttacaatccaaacctgatctttaattaggttgagtgtgtgtctagttcagcttattttggagaaataataggttatttttgtcaatgtctggagaaaacttttgaaaaataacaattgttttcttaaaaccatttccaaacatgcatcaaatgcattaggtttgcattcaacatttagcatatcaaccttatatcatatttctgttcattcgatgcgaggtggagagacagagtgcacctctatgccaggcacaaattctatccctcattacaaaaagtgttcatgataaatttctaatgttgtttttcctgtatgtatgttgtaagctgttaaacaggttgcatgtaaattccaaatggtaactgttacttgaatgaaagtaatttcacttcaagctattatcttgatgcaggtgttgataccttcaaggtagttgcaaggcaggccactcataccatcttggctacttgcagttctgatcagcaaaagtctagtacatcctcctctagctcagtatgcagccatgccgacaatactcctcagtttcagaaatctactttaatgcctaattgttgcaggcaatgcttttatgactttgtaaacaatgttgtcaactctaccatattggagaaagtgggttgcgcttgatctacattattttttttttctttggagagtgcatcatgtatttctcttgctgtgattattgttctcatgcacctactctgtaaaaaatgttacttcgtggcccaggtaactgcattgtaaaatttatgtcgtaggtaggggatagcagtgtaatgtaatctatttatttttcacctgaagggaatagttgaggatataaatggaaaattagagtattttgttt

SEQ ID NO: 28758 - DNA, 1283 bp, Glycine max
  Clone ID: TF_GmC1473_1
ctcgcgccgctctgcagcatccatggcttcttcactgggtcgaagaagaacccacgctcccaaatcatcctccaccctaaacgacgacgtttcctgcgaggaatgcggcggtggccactctccttcgaagcttcttctctgcgacaaatgcgaccgtggctaccacctcttctgcctccgtccaattcttccctctgtccccaaaggctcttggttctgcccctcttgctccaatcacaaacccaagtctttccctcttgtccagaccaaaatcattgacttctttcgaatccaacgctcccctgaggcattatcaaatcaagacacgcggaggaagcgaaagcggggtgggggcttggtggtatcgaagaagaagaggaagctgttggcgttcgtgccgagtgaggatcccaatagaagattggaacagatggcgtcgctggcgacggcgttgaccacaactaaaacggagttcagcaatcagcttacttacatgcttgggatggcaccaaggtccgctaatcgtcctgctcttgagcgcggtggaatgcaggttttgtcaaaagaagacaccgagaccttaaacctgtgcaagcgtatgatggaaagaggagaatggccaccactcatggttgtttttgatcctctagaaggcttcactgtagaagcagatagatccatcaaagatttaaccataataacagaatatgttggagatgtagactttttaaaaaatagggaaaatgacgatggagatagcataatgacacttctctcagcttctgatccttcgcggacgcttgtcatctgtccagacaaacgaagcaacatagctcgattcattaatggcatcaataatcacacgccggaagggaaaaagaagcagaacttaaaatgcgtgaggtttgatgttggaggtgaatgccgggttcttttaattgccaatagagatattacaaagggggaaaggttatactacgactacaacggagatgaacatgaatatccaactgaacattttgtctgattgcgttcaaatataaattataagcaaatcaccctaacagggagggattgtaagctcgtgattttttcatttctaagttgatttggtcaccccttaatatggttgccttgtcactaccccacatgtatcatgtggatactcaatatatttcacagtagacttgtggtttatatcatattgttcaattatttttttaattgtttattgattagattaattttctcacatatgcaatggccaatgcatatttttagcc

SEQ ID NO: 28759 - DNA, 1296 bp, Glycine max
  Clone ID: TF_GmC727_1
gcgtgcggctgctagaagactacaattcggcacgagtgtaggtgtgtgtgttgttgcacactctccacacttacacagagagaaaagagagagaaagaaaaggatcaaatagttaaaacctttggttctttccctccatagttccatttttccattcaacaacacaacacctcagacagacatcatggaggcaggttacaatcctcgtaccgtcgaagaggtctttagggatttcaagggtcgcagagctgctttgattaaagccctcaccaccgatgttgaagagttctaccagcagtgcgatcccgagaaggaaaatctttgcctttatggatttccaagtgagcagtgggaagtcaatctgccagctgaggaggtgccccctgagcttccagagccagcattgggcattaactttgccagagacgggatgcaagaaaaggactggctgtctttggttgctgtacacagtgatgcttggttgcttgctgtggctttttattttggtgctaggtttggatttgacaaggctgataggaagcgactatttaatatgataaatgatcttccgacaatatttgaggttgttacagggatggccaagaaacaaggaaaggaaaagtcatcagtttcaaatcatagcagtaccaaatctaagtcaaactctaagcgaggttctgaatcaaagtatacaaaagcaatgcaatcaaaggacgaggatgatgagggtggtgcgggtttgggtttgggtttggaagacgaagacgaagaggaacatggagataccttgtgtggggcatgtggagagagctatgctgctgatgagttctggatttgctgcgacatctgcgagaaatggttccatggaaagtgcgtgaagattacccctgcaagggctgagcatatcaagcagtacaaatgtccttcttgcagcaacaagcgagctcgaccttgacaaacatggctaggatggtggtgactataatcttggcaattttatgactactaatttgtttagtaggtcaagtttattagtcttgctgtgaatttcaggtatattgtttcagatgttacattaggtatattatgagctgctgtcgattcatctaccattaggatgtttatttcataagtggacttgaatgttgttctgttatgtgtttctttaaattttatgtagctgtgtaactgtgttgtgtccatagcttattatctgccgtggtgtaattctgctctattttttttttttttgggatacatatatatattttttaattcaagttctaactcatgttt

SEQ ID NO: 28760 - DNA, 1276 bp, Glycine max
  Clone ID: TF_GmC727_2
tacggctgcgagaagacgacagaaggggacgctatgttaatgtagttgtgtgtgttgtgttgcacactctccacactccacagagagagagaaaagggtcaaatagttacaacctttgcttctttccctccatagtcccattttttttatttttttttccattcaacaacacaacacaacaccgcaacctcagacagacaaacatcatggacgcaggttacaatcctcgtaccgtcgaagaggtctttagggatttcaagggtcgcagagctgctttgattaaagccctcaccactgatgttgaagagttctaccagcagtgcgatcccgagaaggaaaatctttgcctttatggatttccaagtgagcattgggaagtcaatctgccagctgaggaggtgccccctgagcttccagagccagcattgggcattaactttgccagagatgggatgcaagaaaaggactggctgtctttggttgctgtgcacagtgatgcttggttgcttgctgtggctttttattttggtgctaggtttggatttgacaaggctgacaggaagcgactatttaatatgataaatgatcttccgacaatatttgaggttgttacagggatggccaagaaacaaggaaaggaaaagtcatcagtttcgaatcatagcagtaccaagtcgaagtcaaactctaagcgcggttctgaatcaaagtacacaaaagcaatgcaatccaaggacgaggacgatgaaggtgtgggtgtggaagaggaagacgaagatgaacatggagagactttgtgtggggcatgtggagagagttatgctgccgacgaattctggatttgctgtgacatctgtgagaaatggttccatggaaagtgcgtgaagattacccctgcaagggccgagcatatcaagcagtacaaatgtccatcttgcagcaacaagagagctcgaccttgacaacatcatggctaggatggttggtgactataatcttggcaattttatgactactaatttgtttagtaggtcaagtttattagtcttgctgtgaatttcaggtatattgcttcagatgttattacattaggtatatgagctgctgtcgattcatctaccattaggatatttgtttcataagtggacttgaatgttgttttgttatgtgtttctttaaatttaatgtagctgtgtaactgtgttgtgtccatagcttagtgaagtttatattatcccccgtggtgaaaaaaaaaaaaaaaaaaaaaacaccccaa

SEQ ID NO: 28761 - DNA, 1721 bp, Glycine max
  Clone ID: TF_GmC86936_1
accacgcgtccgaacaaactcatttttcttttccccatttttctctttctttttatttattttttttcattttcttttccccttcgcttcgtctccacagttcacaccattctcgtctccctctccaacaaaccgtttcctcgggaattgagaattccaattctgcccctcgcggctccgcgaatttacctatccgagccatggctactgccaccaccaattcttcgccctcggctcagcgccacgtcggcttcagccgccgcacgcaggcgccgcgccagctggacgacgactcgccgccggtgaacaagtaccggctgctgtcggagataatggcgcgcgcgccgtacgcggtgctggagagagaaacatacagcgacctcttgtgcgaccaatgcggctccggcgagctgccggaggagctgcttctctgcgacaaatgcgataaaggcttccacatgaaatgcgtcaggcctatcggcgcgagggttccgattgggtcgtggctttgccctaactgtcagggagggaagagagtgcggactttctctcacaagaagataacttaagagtaccctttacaaattaacattaagaacatgatgtcaaagcattatcatataatatctgattggaacttttttttcttgatttatctgttctgaacttctagatgctaaaaagcgtaagaaatgttcacgacctctggtattacataagaaaaagaggagattgttaccatttgttcctacaaaagatcttaaccggagattgaaacagatgggttctcttgcttctgctttaacagccttaaatatggaattcagtgatcacctcacatacttgcctggaatggctcctagatgtgcaaatcaagccttacttgaaaatggcggcatgcagactctttccaaggaagacatggagaccttagaacaatgcattgctttgtctaaaagaggcgaattccctccctttatggttgtttatgattcacgtgaaggctatactgttgaggctgatgacctaatcaaggatatgacgattattgctgaatacactggtgatgtggattaccttgacacacgggaacgtgatgactgtgacagtatgatgacccttcttcttggagcagaaagttctcaaagtcttgttatttgtgctgataaacgaggaaacattgctcgctttatcagtggcataaataatcacacacaggaaggtaggaagaagcagaattgtaagtgtgtgagatacaatgttaatggtgaatgcagggtctttttggttgccattcgtgatatttccaagggagagaggctatattatgattataatggtcatgagtatcaatacccgactcatcattttgtgtgagtggaagacaaatacatcctaaacagcctagggtggttgggacacaattttacgacctagagtggttgggacgcaattttagatcctcgggaaaggattttatttatattcttgaaagtttcaactaattgtagcagattcaacaattttgcccctaaattatcgccatgggccattcattgtaatttatgctgtagagctgcccaattatgtggctttagagatgaatagagtaccttagaaaaaccttgttcatgtaggttatgtctcagaagatgagatatacattttttttttcaatacagtttcaaggaatttaaaagattctcagatttttactttgt

SEQ ID NO: 28762 - DNA, 1416 bp, Glycine max
  unsure (1)..(1416): unsure at all n locations
  Clone ID: TF_GmC1161_1
agaaaatactctgcaaaggacaatgatgatctatgcattgtttgttgggatggtggtaatctattgctttgtgatggatgcccaagagcatttcataaagaatgtgcagctctatcaagtattccacgtggtgactggtactgccaattttgccaaaacatgttccagagagaaaagtttgtggcgcacaacgccaatgctgtggcagctggaagggttgaaggagttgatcctattgaacagattgccaatagatgcattcgcatagtcaaagacattgaagctgatcttagtagctgtgctttatgcaggggtgttgatttcagcagatctgggtttggtccacgcacaataatactctgcgatcagtgtgaaaaggaatatcatgttggttgtttgagggatcacaagatggcatatttaaaggaactgccagaaggtaattggctttgttgcaatgattgcacaagaatacactctactttggagaatcttttggttaagggggctgagagactccctgaatctctcttgggtgttataaagaagaagcaagaggaaaaaggattagaacccatcattgatgtaagatggaggcttcttaatggcaaaattgcttctcctgaaactagaccattgcttttggaggctgtttcaatctttcatgaatgctttaatcctatagttgatgcagctagtggacgtgaccttattccagccatggtttatgggaggaatgtgcgaggtcaggagtttggaggaatgtattgtgcattactaatagtcaattcatctgtggtatctgcgggcatgcttagaatttttggctcagatgttgctgaactccctttagttgcaacgagtaatgggaaccatggaaagggctacttccaaacactcttctcctgcatcgagaggctgctggctttcttgaatgtgaagaatcttgtactgccagctgcagaagaagcagaatcaatatggactgataaatttgggtttagcaagatgaatccagatgagctcaccaactatagaaagaactgccatcagatggtaagtttcaaagggaccaatatgctgcataaaatggtaccttcgtgtcgggtcatcaataatcaatcatgacatttttttttatagaaacgaaatcaatcgtgaaaggggaaaacccctagctttctcgcttcctttttccctttcttctggttttgtatatattaaacttttggctatttgaagccattgttgaagcgttcctgccatttgtttaaacatttataatgccatgtattctatttttattttaattttaattttagtaatatacaagtttagaagttcttgtctcggacaagtactcgaatataaaatatctttacccganaaaaaaanaaaanaaaaaaangggggggg

SEQ ID NO: 28763 - DNA, 1994 bp, Glycine max
  Clone ID: TF_GmC6778_1
gaaatattttacttgcaaaaattgcagagggtgtttcccttcttccaatgtggaaagagtggggcttttatgtctatcttgcgtggaatcaaggaaatctgaaaaaagttctattcatgctgttggcaaaagaatcaggtcccctcggccagtattattctcccgttcatgttcatgttgtgcttctgaatctgaactatgtatcactcctcaaactaagaaacagtggaagacaagaacaaagtcatcaaaactgtcggtaaaattgaagactgcaccaattacttcaaagtgtttatctccacaaaataaaagtcagtggaggatctctaaaaggtatcaacgattacataaattaatttttgaagaggatggattgcctaatggagctgaagtagcttattatgcacgtggacagaaattgcttgagggtatcaaaacatgctctggaattgtctgtcgatgctgcaacactgagatcagcccctcacaatttgaggtccatgcaggctgggcttctcgcaggaaaccttatgcattcatctacacgtcaaatggggtgtcactccatgagttagcgatatttctctcaaaagatcacaaatgcactacaaagcagaatgattatgtatgtgttgtttgttgggatggtggaaacctgttgctttgtgatggatgtcctagggcatttcataaagaatgtgcatctgtatcaagtattcctcggggtgagtggtactgtcaaatttgtcaacacacattcctcagagaaaggcctgtgttacacaatgccgatgctgtggcagctggaagggtagaaggtgttgatcctattgagcagattgccaagagatgcattcgcattgtaaaagacataggagctgagatgggtggatgtgttttgtgcaggagttctgacttcagcagatcaggatttggtcctcgcacaattataatttgtgatcagtgtgaaaaggaatatcatgtgggctgcttgagggatcataagatggcatatttaaaggagttgccagaaggggattggttttgttgcaatgattgcacaagaatacattctactttggagaatctcctgattagggtggctgagagacttcctgaatctcttttggatgttataaagaagaagcaagtgggaagatgtttagaaccccttaatgaaattgatgtacgatggaaacttcttaatggaaaaattgcatctcctgaaactaggccattgcttttggaggcagtgtccatgtttcatgaatgctttgatcctatagttgatccagctgccggacgtgaccttattcctgccatggtttatggaaggaatttgcagactcaggattttggaggaatgtattgtgcattattgattgtcaattcatctgtggtatccgcgggcatggttcgaattttcggtagagatattgccgaacttcctttagttgcaacaagatataagaaccgtggaaagggctacttccaaacacttttcgcgtgcattgagaggctgctggcttttttgaatgtgaaaaatcttgtgctaccagctgctgaagaagcagcatctatatggacagaaaaattcgggtttagcaagatgaaacccaaccagcttaccaactacagaatgaactgccatcaaatcatggcattcaaagggacaaatatgcttcataaaacggtgcctcaatgtcgggtcatcaatactcaattgtgagaaatttgtatacaaaaaagtgaatcgtgaaaggggaaaaccctagctttcttgtcgccatctttttttcattcaacctagtctgtacatgtatcgactttaggttatttgtagccaatcctgagccgcctatacttgatatttgtttgacgtttataatgtcattttcctattttaagttttggttagtcttgagcatcctcgagttcttgatcttggaccttgtgctttgctgcggtataatataatgctgttttatata

SEQ ID NO: 28764 - DNA, 2319 bp, Glycine max
  Clone ID: TF_GmC1266_1
ctcgagccgaatcggctcgaggaagaaagaaaagtgtgaagatgaggataattttatggataatggcacaaccatcgggacaacgactgggagaaagcggggccagaagagaagaagggtgcttctttcagattcagattatgcatcttctggatcatctgattttgagtttaccatatctgaagaagagagagaacaggtgagagaagccaagagattgtgtggaaatttgagaaataacttgaggagttcatcccatccaataaataagaagaggttggagtccatgagtatcaacatccgcagcggaagcctccagctcggaagggtaaggaaaagatagaagaacctctgggaagaaagggtaaggaaaaggtggaggatttaaaaagtaagggaaagcaaacatgtggaatttgtctatctgaagaagataaaagaagagtaaggggagtactaaattgttgcactcacttcttttgttttgcttgcattatggagtgggcaaaggtggaatctcgctgccctttgtgtaaacagagattcaaaacaatcagcaagcctgcacggtcaacgacggggattgatttaagagaagtggtgatacaagttccagaacgtgaccaggtttatcagccctctgaagaagaactaaggagctatattgatccatatgaatatgttatttgttcagagtgtcatcaaggtggagatgatggcctcatgctactctgtgatatctgtgattcccctgcacacacatattgtgttggtttggggcgggaagttcctgaaggtaattggtattgtgatggatgtagaccagttgctttgggacttcaagaagtccaaagaagggaaggtgtggctgatccaagggtatctgtccagagccatcctgttagaccaccccctgttctacatgtacgagaaagtatagacctcaacttgatttcgtcaccccgtgctgcttttaatcaaggttttgggcatcttccatcttctagatttagtggcagaagtgctgaaggagcctctcctgtatctggaggggcaccaactttatcagagagacgctggatacaccgtcagattcaacaactactttcaatagataggatggcctctacacctggcagaaccaatggtatttctgctaccagttcaactagtaacttatatagctctcactttgatcaaagtaggggaaccaccactctgcatgcaaggacacaggatgtgggaacatcataccacacattttttgatgagagattatgcaacaattcctctccattaatgcagaatggggcattatggcctggacttatggggacaaccccagtaccagattgtgaactagctcatcagttcagtagatcaaacattgttcctgatagtggcttatcccctgctatcagagaagaaagtaactttcacattgcaaaggagcaattgcagtcaatggttaaaagccacttgaagaacttgtctcaaaatattgatttagttaagtatattctttcttcttgtggtcacagatattgtaatagttaccttttctctttgccttcatcatacggggagggacgtattgtggcgacatttgggactcaaaacacataaagtgggtccttccccaacctttagagacacggtacatgtctatgaaaccacaaggcccggatcattacaaaaattgaggacaggctttcttgtctgtgaagagaaccttcgtagaggtacctgtgcgttaatccttttctaatcaagccttggaataattttccaacatgatatctaatagggaaattgcatcatggttccattgaagtgttttttgctcattttactgcagtcataaaaaaaattcaaaatgccttttatcttttttattcaggccacaatactatcaaggatattgcaaggagttctatgcacaccatactagcagcttgtgatcttgagcacatgaagagtgaagtttgcactgtgcctcctccatctgcctgttcccatatggagctaatggctggtgggcaaacgagtctaattaaaggttgctgctcatcttgctttgattcctttgtaggagatgtggtgaagaggattttggacacaagaatttcgtcacagtggttacgattaggtctttaggcataaaatcattgttatgtgtccaaagacaccttttttgttagttcagaaagacaaggaacatttcatttacttgtttatacataccatatgaatatgatttcactacaactgaacagaaaggctgttgcttctaacattttatttgtttaattgatacag

SEQ ID NO: 28765 - DNA, 2137 bp, Glycine max
  Clone ID: TF_GmC38836_1
ccctcgcgtccgcccacgcgtccgatgccattggaaaacataagttgcggcaggagcaagtgcaacatttttttggtctaagccctagagaacgttctttgtcttccatattgcagctcaaggaacatggagataccattgccttcagttgctctgaactggatttgattttatctgaagttgagaaggtggaaaattggaagactagatgcatggataaattaagaatgttggtccaaaatggaaattccctacttcatgcactggatgaagataaaccagactctagatagatcattgtttatgtatgacaaattgcaagatctgaaggaacaaaatctatgtatatgctgctatgatgattctgaagatcaggaatttcttacttgttccacttgtatggactgctatcatgtgcgatgcgttggactaacagaaaaagacgcaggcattgaaaactacaagtgcccttattgtgaaattttgaggggtgaattccattatcagaatggaggtgccctcctgaggtttgtgaagaagcgtgttgaattgaaagttcttactgaactcatgtctcatgctgagcatttctgtttatggattgatgaaaaagattttttgtgccaacttgttgagaaagccctttcatgcaaatcttgcttgagagaaattgtgatccttgcatcagctaatgttgatgaagatattagcattgtctccgaaaaattggccactgctgtaaaggctagcaaagtggctattgtctatgatcagcatgatacttgtgaccttgagctgactttagcaaaaaacttttggaaaattcaagtcagtagattgttaaatggtgtacctaagcccactagccctttcatgcaaatcttgcttgagagaaattgtgatccatgcatcagctaatgttgatgaagatattagcattgtctctgaaaaattggccactgctgtaaaggctagcaaagtggctatcgtctatgacccgcatgatatttgtgaccttgagctgactttagcaaaaaacttttggaaaattcaagtcaatagattgttaaatggtctaccaaagcccactatccagcaaattcagaagcatctgaaagagggactggctatggacatatcacctgaagatcactatatgttgaaacttacgaatgtgaattgcttgggtttacagtgggcagaactagccaaaaaggtggcaactgattctggggcactcagcctggataaagtttttgaacttgtggtggtaggtgaaaacttgcccgttgacatgaacgaggaactaaggatattaagggcacgatgcatgctttattgcatttgtcgaaagccctttgatccagaaaggatgattgcatgttatcactgtaatgagtggtatcactttgattgcatgaaattgccttgcacagaagaggtctacatttgtcctgcatgtaatccgtgtaccgaaacgtgttgaacttagaagtgtttgtccatttctatgcatactacgatagctaaacatacggagaaatcattggtcattaaattgattcaaatgatttttatggtgtcatctcggtcatttttaatccatcttaatgcgaaaattccatttttaatttcttgttcgcatttcaccatttgaaggcttgagttattaggataaagatggcgtaaattaacgtaggaagcattagttttatacagctgacaaaagtaggtaggattttttttttaatagaattcagttagtttttaactttttatggtggaaattagataaaacagtggtaacaatcattcatccattgttggattaaatcttcagtgtctgtaaataagatgatgtttacatttattttctaacaaataaattgtctccctttagttgttgtttaaaaaaaaaaaaaaaaaaaaggcgaagttttatacagctgacaaaagtagggaggatttttttattttattttataggatttagttaatttttatgggggaaactaaataaaacagtggtaagaatcattcatccattttttttttttggattaaatgtttggtttctgtaaataaaaaaatgtttacatttagtttctaacaaataaattgtctccttttagggtcc

SEQ ID NO: 28766 - DNA, 2654 bp, Glycine max
  Clone ID: TF_GmC4485_1
aattcggctcgaggaagaaggaagctgtagataatggggtggcggttgaaggtggagatggtcttgctgaaggtgaagaagttcaggacttgaagaatgaaactgtaaataatgggatggaaactgagggtggaaatggtgttgctgaaggcgaagtttggaccttgaagaatggcgttataaatagtggggtggcaattgctgatgggagtgctgctgctgaagatggagaggtttcaggctcaaagaatgaagttaacggggtggcatttgctgatgggaatggtgttactgaacatggagaagtttggggatcaaagaatgaagctgtaaataatgaggtggcaattgttgatgggaatggtgttgcttacggtggagaagttcatggctcaaagaatggagctgtaaataatgaggtggtcattgcagatgggaatggtgttactgaaggtcaagaggatcactgcttgaagaatgaaactgttaataatgtagtggcaaatgcagatgaagggaactctggtgcagttgagtgttttcaaacatacaagaggcgcaagcatgcaaagtcaagttcagaatttaaagtccaggagaacagcagaaaacatatgggagctgcaagtcaactgttggcggtgaggaaaccatttgatttagctgttggcaacacttcaaaagatcattcacatgaccattgggggaatgttgtactaaagcatttatatcattcattaggcaatgacaatggtggcatgaagtggtgtataagggaagcactcatgagctgtcctaaaattagttgtgcccctacaatgaaggaaactcttaaaattgtcaaagatggtcaggagtgctctccgcaattagaaagtttgttttatagattacagagtgaagctaatggacatgaaaatgttgtgcacaacggattttctagtgagtcaaatggccgtgatacaactgaggggtgtcagcgtgtgttccgcgatatcttagcctctgaaaagttcagttcattatgtaaagtgctacttgaaaatttccaaggaacgaaacctgaaactgtatttgactttagtttgataaactcaaggatgaaagggcaagcttatgaacaatcgcctacacttttcctatctgatgttcaacaggtttggcgaaagcttcaaagtactggaaatcagattgttgctatggccaggagtctctccaacatgtcaaaagcttccttctgtgagcaggtgggaatttcagcgcagagttcctttgaagatgaaaaggaagtgctctgtaaccaggaatccatctctcacatgaaaccagagcagacagtagaatgtgttgcattcagacttggcacttgctggcattgtggagacaaagcagatgggacagactgtttggtttgtgattcatgtgaggagatgtatcatctgtcctgtattgagcctgctgtgaaggaaataccctacaaaagctggttctgtgccaattgtactgctaatggaattggatgtcgacacaagaattgtgtggtgtgtgaacggttgaatgccctgaagaccctggatgatattgttggtgaggaaaacatccctacaaatgaggaaacactgaatgaattagaagagaattcaaattgtacttatgatgggattcaaatttccacagataggagaaactcatccgactgcaaaatttgtaaaatggcggtggatggtgaaaaagtaaaaatctgtggtcactctttttgccctagtaaatactaccatgtaagttgtttgtcaagtaagcagctaaagtcatatggtcactgttggtattgcccttcttgtatatgccaagtttgcctcaccgacaaagatgacaataagattgtactctgtgatgcctgtgatcatgcataccacgtctactgtatgaaacctccacaaaattctattccgaaagggaaatggttctgcataaaatgtgaggcagggatacaggcaatacgccaggcaagaaaggcatatgagagtaacaaagggaaagttggtcagaatgattcaaagccaaatgaagatattgacaagaaatggaacaaaaagcgaggacgggaattagacaatgttggaggaatgatggacatgcttataactgctgcaaatactctgaattctgaagaggacttaaatgcaatgctgattgactcaaagaaagcattaacatgagggcgtgtgtgctaactgctaatacctaatgttttctatttcctgcatttgtttaagtctttagataactgattttgttaccgttggagagaaaggattatagaggccaaggagcaaaaagcatcaatagaaaaaaaactgtgataagtgaagtatgggatattttgcaggccagatactgatgcaatatgtggttgatatgaaatttaataggttgctttgctccctgcagtatataatgttttggattgtcatgattacttaagcgaagacttcaaattagaataatatcgatttccaatttgtggataatcaaaagggatgatgttttaccctttagatttcaatgtttcagtgccaattttgcacaagccttgaacagtattctgttcttgattttcttatccgttcaatgaatgactctgggagtgtttg

SEQ ID NO: 28767 - DNA, 676 bp, Glycine max
  Clone ID: TF_GmC180828_2
tttttagaacaaagttgtcacgtcgattcatatttttcgttgagcttgataaaacctagctgcacttaccctggcctaagctctcaaaaacagagacttgcaaaacaatcgacttcttctggcctcatttgctattaacataaaatcctagccgaagacaaccaaaaactatacagatacatacaaaagctatacactcaacgtacaccaaaattcacagctatgttacatgaaaccgttgcacactcccttgctactgcctcatctctgcaagatgtggtgaatttacaggtctcgttagcttcctcaccaggtgttggtaattttttagtctcctcacggtacgagttgacacatctcatacaaacaaacttagacggcattccatcagtattattatcaattccagcacatcttgtgtgctgccaaacaccacaggtatcacatgctaacattttctctccatcgtcatccttagccccgcaaatgcaatccaccttccacacctctgttcctcgttccattcggaatcggcttagcccatgtttagctggacatctaccttgaatttgaattgatccacttgttccaagcaagaactttatggtgagcgaatcactgattgatccataccctaggagttcctcagcttgaaacctcttatacattgcatata

SEQ ID NO: 28768 - DNA, 1167 bp, Glycine max
  Clone ID: TF_GmC7106_1
ggaaatcctaaaagcacacccccttaaactatctctgtttatttcttcactcccttttttcttcttcaagggcaatggacagtggaggacactacaacccccgcaccgtcgaagaggttttccgggacttcaagggccgccgggctggcatgatcaaagccctcaccactgatgttgaggaattttaccagcagtgtgatcctgaaaaggagaatttatgtctgtatggattccccactgaacaatgggaagtaaatttgcctgctgaagaagttcccccagaacttcccgagccagcactgggcataaattttgctagggatgggatgcaagaaaaggactggctatctttagttgctgtacacagtgatgcatggctacaatcagtggctttctactttggggcaagatttggttttgataaagctgacagaaagcgcctgttcactatgattaatgatttgcctacaatatttgaggttgtaactggatctgcaaagaaacagacaaaggagaagtcatcagagaacaatggcaacaaatcaaagtccagttcaaaagggcgaggatctgaacccccaaagtattcaaagcaagtgaaggatgaggaggagggattggacgaagaagacgatgacgagcatggggagaccttgtgtggagcatgtggggagaactatgcatctgatgagttctggatttgttgcgacatatgtgagaagtggtttcatggcaagtgtgtgaagatcactcctgcccgggctgagcacatcaaacactacaagtgcccctcatgcagcaataagagaccaaggccttgatatcatagggatgtggggttagttatcacggccctgtaaatcatgctggactgctaactagttagtggcttaggcattctgtattgtgccatgttggtgcatcgtaggtattcactagtttggtcttgtcaacttcttaatgtggatagaattatttaatatttgatggtttctgattctgaacgtctctaacatttgtcctgcattgggatatttatgttcttagtacctgataacatattcgtgcagcaggcttcatttgtgcttggtatattgatagtttgcaggttttgaacaaaaaaaaaaaaaaaaaaaaaaaaaaaaaaaaaaaaaaaaaaaaaaatga

SEQ ID NO: 28769 - DNA, 656 bp, Glycine max
  unsure (1)..(656): unsure at all n locations
  Clone ID: TF_LIB4164-036-R1-K1-G5
ccacgcgtccggtgatgttgatggaaatggagatgaatgtcgcttatgtggcatggatgggaccttgctttgttgtgatggttgtcctgctgtttatcattcaaggtgtattggtgtgatgaagatgcatataccagaaggggcatggtattgtccagagtgcaaaataaatttgattgggcctacaattgcacgggggacatcacttaaaggggctgaagtatttggaaaagatttgtatgggcaagttttcatgggtacttgtgaccacttactggtactcaatgtcaaaagtgatgacttttgtcttaaatactacaatcagaatgatattcctagagttctccaagtcctttatgcatccgaacaacatagacctgtatacaatggtatttgcatggcaatgttagaatattggaatatttcagaaaacttcttacccctctgtgtcagtaaacttcctcctatgattgaagaagaacataaagctgttagttcggtgaaggcagactacagtttaacgtttgggaatgggatttgtagngataatttggtgccatctcttgatgcttcattggttacaactcgaaatcctgctcctggaagcagtggcaatgcaagaactactgtgaatcttgaacttcacgagggaaact

SEQ ID NO: 28770 - DNA, 766 bp, Glycine max
  Clone ID: TF_uC-gmflLIB3275P110a05b1
ttttccccttcgcttcgtctccacagttgacgccattctcgtctcccttttccaacaaaccgtttcctcgggaattgagagagttctaattctgcccctcgcggcttcgcgaatttaccaatccgagagtcatggctccagccaccaccaattcctcgccctcggctcagcgccacgtcggcttcagtcggcgcacgcaggcgccgcgccagctggacggcgactcgccgccagtgaagaagtaccggatgctgtcagagataatggcgcgcgcgccgtacgcggtggtggagagagaaacttacagcgacctcttgtgcgaccaatgcggctccggcgagctgccggaggagctgcttctctgcgacaaatgcgataaaggctttcacatgaaatgcgtgaggcctatcgtcgtgaggattccgattggatcgtggctttgccctaactgtcaaggagggaagagagtgcggcctttctctcagaagaagataatcgatttcttcgggattcggaggagttctgatgatgctaatgataagcgttcctctcaggatgctaaaaagcgtaagaaatgttcacgacctctggtattacataagaaaaagaggagattgttaccatttgttcctacaaaagatcttaaccggagattgaaacagatgggttctcttgcttctgctttaacagccttaaatatgggaatcagtgatcacctcacatacttgcctggaatggctcctagatgtgcaaatcaagccttact

SEQ ID NO: 28771 - DNA, 3750 bp, Glycine max
  Clone ID: TF_GmC1724_1
ccacgcgtccgcccacgcgtccgcccacgcgtccgcccggacgtgttgccgtagaaaaaccggattggatagtcggcgataggtccgaattttgtaagtggagagagagagatttgttctggcattgttttgagtctcgttctgggtagacccacgcggccgcctcgatcggtcaaaagaacacgcaaagcaaacccaacccagccacccccaacacaacacaaaccgtgtgctaacaatagtatagtgggtgtgaacccccaaaccctaatccttcgtttctatgcatgcgctagcttcgtcgtcgtcgtcatcgattttccggtttgtgattctcgtgattcttctcgggccgaattattgggtttgacggcatggatttggtaccgagcgtcaaggaaaagttgaactattttcgtataaaagagctcaaagatgtgctcactcagttacacctttcaaagcagggaaagaagcaggatcttgttgatcgcatattatccgttctctcagatgaacaagtttcaaaaatgtgggctaagaagaatgctggtggaaaagaacaggtggcaaaattagtggatgatacatataggaaaatgcagatatcaggggccactgatctagcttctaagggacagggtgcatcagatagcagtagtgtaaaggttaaaagtgaatttgatgatgcttttcaacgagatgtaaagattcgctgtctatgtggaagtagattggaaacagaggatttggtcaagtgtgatgatccaagatgccatgtgtggcaacacaccagatatgaaattattaccgagaaacctgccaaagacatctcagatgttcctgatactttctcctctcctcgctgaagtatgttcagtacggccccgcttgtagctttccattgaataacctttgcagcataggtcgtacattacgtccagtaaatcttcggttgtattaaccccagatttcagatttagaaaaattgtagaacgttgtgaggcatttatggtcctcgatgaaatggcaattaatacataatgataatgggtctgaggcatctcatggtggaacagagctacaaattaccctgtgccaaaatgcttgcacccaccccctttggcaaagatgttgtggccgtaatgattctttatgcttgatatctaaattgtccttgtggcagatgttgatagatggactttatcagccaaaaactctccattatatctgctaagagctattatctcccgttaattgtttaggggttcgtattgttaaaaggcgcagcatgcagcagatcctaaactcaatcccaaaggagtctgatggagtttcaaatgaagaagctcttgcacgtgtctgccgttgtgttgggggaggaaatgcagctgatgatgctgatagtgacagtgatttggaagtggtttcagatactttcactatcaaccttcgatgtcctatgagtggttcaagaatgaagattgctggaagatttaaaccctgtattcacatgggttgctttgatcttgaagtttttgtggaaatgaatcagcgatcaagaaagtggcaatgtcctatatgtctcaaaaactatgctttggagaatatcatcattgacccttatttcaatcgcatcacttctatgatgatgaactgtggcgaagaaattgcagagattgaggtgaagcctgatggttcttggcgtgttaaggtaaagagtgaaagtgaacgcctggaattagggaatctagcacagtggcgccttcctgatggaaccctctgtgtgtcaactgctggagatgtcaagagagtggatacattgaagcaggttaaacaggaaggtgtttcagacagtcctgctggtttaaaacttggcataaagaagaattgcaatggagtttgggaagtcagtaaacctgagggcacaaacacctcttctggtaataatttgaaaagggtttttggaaatcccgaacaggttgttattccaatgagcagcagtgccactggaagtggtcgggatggtgacgatcctagtgtaaatcagggtggtggtgggcatattgactattccactacaaatgggattgagatggattctttgtgtctcaataatgttgatttagcatatgaatatactgcacccaacacttctgcccaggtgggtggtgcagaagttattgttcttagtgattctgaagaagacaatgatctgttggcatctcctgcaattgcatataagaacaacagaaatgatgctacagatggttactctgtaccaccacctgtaattgttgattcatatactgaagatcataatcttggtggaaattcatgcttgggactctttcctaatgatgatgaatttgggatgtcttccctatggccattgccttctggaagtcaggctggtcctggattccagttatttggttctgatgcggatgtgtctgatgcgttggtccatctgcagcatggtcctatgaattgctcctcgtcactaaatggttatgcattggctcccaatactgctttgggatctggtagtatcttgcaagagtcctctgctggtcggtcagatgctgatttgaatggtggtttggtggacaatcctttggcctttggtggagatgatccctcacttcagatttttctccccacaagaccagcagattcatccatgcacaatgaattgagagatcaagcaagtgtggctaatggtgtctgcactgaggaggattggatatcccttagtcttggaggtggtgctggtggtaacaatggtgatgctcccactcaaaatgggttgaattctagacatcaaatcccaaccagagaaggcgccaagaatactttggatgatactgcttctttactccttgggatgaatgatgttagatctgacagggcaagaaggcaaagatcagatagccctttctcctttcctcggcaaaagcgttcagtaaggccccgcttgtacctttctattgattcagattcagagtaaaggtcagaccttgtgtctcaagaactttaggtactcttaacatcagatttcgtatttagaaattgaagaaagttgagaggcatttttggtcctcatgaaatggcagttaatacataatgataatgtggtctgaggcatctctggtggaacagagctacaaattaccctgtgccaaaatgctttcacctaccccattggcaaagatgttggccctaatgattctttgctcttgatatctaaattgtccttgtgacagatgtttgctgggggtatagtgctggtttgttgtatagttaatcattcaaatctgtagttcaaactttcaaatttggtggtatattatttctgcatttttgtctctgctgagagcaataacctgtaaatgttttagccacatatcagatccaacagtgaaatcaaagatattgtttctggccatttttctagaatactatgttgtctcaagtatcatgcctcatgatcggccaagatagacgcccatttcataacacctggacgttgatatttatttaacatgtttaggcacctatgatgcctccccgtaaggatctatctatatttcttgcctggctaagtatttggtttcagatgagcttcttgtcattatactttgtttgcatagtcgaatagagacaagagaaaagagcccctaaacgttattgattagcctactattattgacaattatcaagaaccaggaaaagtgaactgcttctagg

SEQ ID NO: 28772 - DNA, 505 bp, Glycine max
  Clone ID: TF_LIB4164-031-R1-K1-A11
ccacgcgtccgctattgcaagccttgtgcaaagttaataaaatcgaaacaatactgtggcatttgcaaaaagatttggcaccattcagatggtgggaattgggtatgctgtgatggttgtaatgtttgggtgcatgctgagtgtgataaaatttccagcaaacatttcaaggatctggaaaatacggattactattgccccgattgcaagggaaaattcaactgtgaatcatcaacatcacaaacatacaagtcaaaaaatatatcattggagactggcccaaaacctgcattacctgagaatctaggggtggtatgcaatggcatgaaaggaatctatattccaaatgatcatatgattatgtgcaagtgttgcttgtgtggttcaaggacgcatacacttactgactgggaaagacatgcaggttccaaagccagaaaatggagatatagtgtgaaagtagaaagcacaatgcaaccgctcaaagaatggatcgatgaacaca

SEQ ID NO: 28773 - DNA, 1283 bp, Glycine max
  Clone ID: TF_GmC38836_2
gtgccaacttgttgagaaagccctttcatgcaaatcttgcttgagagaaattgtgatccttgcatcagctaatgttgatgaagatattagcattgtctccgaaaaattggccactgctgtaaaggctagcaaagtggctattgtctatgatcagcatgatacttgtgaccttgagctgactttagcaaaaaacttttggaaaattcaagtcagtagattgttaaatggtgtaccaaagcccactatccaacaaattcagaagcatctgaaggagggacaggctatggacatatcacctgaagatcactatatgttgaaacttacgaatgtgaattgcttgggtttgcagtgggcagaactagccaaaaaggtggcaactgattcatgggcactcagcctggataaagtttttgaacttgtagtggaaagtgaaaacttgcctgttgatatgaacgaggaactaaggacattaagggcacgatgcatgctttattgcatttgtcgaaagccctttgatccagaaaggatgattgcatgttatcattgtaatgagtggtatcactttgattgcatgaaattgccttgcacagaagatgtctacatttgtcctgcatgtaacccgtgtacagaaggattgccttcaaaccatgacagattaactagtggtaaatttgaggagcctaaaaccccatctccgaggcattcaaatcctagaaagaaacagaagagagatgtgcccagtctcacttgcaacatattcgctagcaggaatcaagataagcttaggtattcgagtgggatagaatgtctaaggtggcaaaatcgaaagcctttcagacgagcagctaagaaacgtgttgaacttcgaagtctttctccatttctatgcatacaacgatagctaaacataggagaaatcattggtcattaaattgattcaaatgatttttatggtgtcatctcggtcatttttaatccatcttaatgcgaaaattccatttttaatttcttgttcgcatttcaccatttgaaggcttgagttattaggataaagatggcgtaaattaacgtaggaagcattagttttatacagctgacaaaagtaggtaggattttttttttaatagaattcagttagtttttaactttttatggtggaaattagataaaacagtggtaacaatcattcatccattgttggattaaatcttcagtgtctgtaaataagatgatgtttacatttattttctaacaaataaattgtctccctttagttgttgttt

SEQ ID NO: 28774 - DNA, 1172 bp, Glycine max
  Clone ID: TF_GmC1740_1
ccccttttgtctgaacaagcaagttttcctcataggctcgcaatcggaaaccctaaccctaaccaattgcgataatctttccccaaaatggcaattgcacgcactggagtctacgtcgacgactatttggagtacgcgagcacattacccgctgaacttcagagactgctcaacactgtccgggaacttgatgatcgatcccaatctatgataacgcagaccaggcagcagacgaagtacactatggggttctcatcacatggctccaagaagggtaatcacagttataataacaattatgggaatgaggacgatgatgcagctattgagaaaatgcggaaagaaatcgaggtgaatcaggatagtgcattgagtctttgtactgagaaggttttgttggcaagacaagcatatgacttgatagatagccatataaaacgacttgatgaggatttaaacaactttgccgaagatttaaagcaagagggtaaaatagcaccagatgaaccagcaattctgcccccgttgcctatagtccctaaacctgaaaagcgtaaacccatatatgtaactcctcaatcaaagagaattgattacagggatagagattgggatagggagcgtgatagggactttgagctgatgcctccaccaggaagtcataaaaaggagtatgctaccccgatggatgttgaccaacccattgatccaaatgaaccgacatactgtgtttgtcatcaggtatcttttggagatatgattgcttgtgacaatgaaaattgccaaggaggtgaatggttccactattcgtgcgttgggctaacgcaagagacaaggttcaagggaaagtggtactgtccgacttgcatattactcccacaatgtcaacgatgaatctttgcacgaactaaattacattcataaatgaccactgtttcaatagaattgtcactttttagtgaattatttgtcttctatatcgcttggtcatttgtgcttggcaaagaggccaagtgggctctatcaggcctcatgtataaagtcttctaagatttgagagaagtgatttcagatatgaattttggagaaagttaattacatgtgaaatgcagaagtaaaaaaaaaaaaaaaaaaaaaaaaaaaaaaaaaaaagggcggcggcttcaaggcaa

SEQ ID NO: 28775 - DNA, 729 bp, Glycine max
  unsure (1)..(729): unsure at all n locations
  Clone ID: TF_GmC1740_2
atttaaagcaagagggtaaaatagcaccagatgaaccagcaattctgcccccatgncctatagtccctaaagctgaaaagcgcaagcccatatatatanactcctcaatcaaagagaattgattacagggaaagagattgggatagggagcgtgatagggacttcgagctaatgcctccaccaggaagtcataaaaaggagtatgctaccccgatggatgttgatcaacccattgatccaaatgaacctacatactgtgtttgtcatcaggtatcttttggagacatgattgcttgtgacaatgaaaattgccaaggaggtgaatggttccactattcatgtgttgggctaacgcaagagacaagattcaagggaaagtggtactgtcctacttgcatattactcccacaatgtcaacgatgaatcttcgcacgaactaaactacattcataaatgaccactgtttcaatagaattatcactttttagtgaatacataatatgtcggttttgaattatttgtcttctatattgcttggtcatttgtgtttggcaaagaaaccaagtgggctctaccagaacttgtataaagtcctctaagatttgagagaaatgattctagatttgaattttggagaagattaattacatgtgaaatgcataagtataggcgcgtgtggctgtataagaatgaagatattttgttgaaaattcttccaggtgagagagg

SEQ ID NO: 28776 - DNA, 726 bp, Glycine max
  Clone ID: TF_GmC180828_1
aattgatgctgtaaataattgcaagttagcacaaacatagaacaaagttgtcaagtcgattcatatttttcgttgagctcgaaaccaagctgtactgaccatagggcctaagctcttcaaaagagacttacaaaacaatcgacttgttacatgaaactgtacaaatacatacaaaagctatacactcaacccacaccaaaattcacagctatgttacatgaaactgttgcacagtcccttgctacagcttcatttctgcaagatgtgttgaatttacaggtctcgttagcttcctcaccaggtgctggtaattttttagtttcctcacggtacaagttgacacatcccatacaaacaaacttagaaggcattccatcagtattattatcaattccagcacatcttgtatgctgccaaacgccacaggtatcacatgctaacattttctctccgtcatcatccttagccccgcaagtgcaatccaccttccacacctctgttcctcgttccattcgaaatcgacttagcccatgtttagctggacatttaccttgaatttgaattgatccacttgttccaagcaagaaccttatggtgagcgaatcactgattgacccgtatcctagaagttcctcagcttgaaacctcttgtacattgcatacacctcttgaaatgcactagtggcttcactcctgaggtcaagcacggtagcattcaaaggcagc

SEQ ID NO: 28777 - DNA, 605 bp, Glycine max
  Clone ID: TF_LIB4280-014-R1-N1-B5
cagtattaagggaacaacttttttaatcaattacccttcttatataaccaattaaaataccggagaaaaaataaaaagaggggagcccaacaaaacccgttccaattaaacgagggggtaattgcattttgacccctaaaggggaaaaccaacaaatccaaaaattgcagcagtagggcctccgggaatgaaaaaaaaaaaccagcaaattgctagagtttatcaatcagggtgggccatttaaacccgtctgattggaaagccaatccctgacctgagtaaaaatggaaggggggataagaaaatggacgggggtaataatggcaacccatcaaaggggcccaaaagcttccttttggggaccccttcccttttttttgggctaaattcacccctaacctcctttgtgggcatgaaatccttaaaacgcttaacataaaaaaacttcactggcttcactataaaatcctttgcaccctcctccaaacatttgtttatgcggggaaaaacgttttcaaatgacataatacccacaggcgtttccttgaaagaaaaggatcccttgattctttggagaaattaataaccggtcattccgggcatac

SEQ ID NO: 28778 - DNA, 591 bp, Glycine max
  unsure (1)..(591): unsure at all n locations
  Clone ID: TF_LIB4164-020-Q1-K1-C11
ccacgcgtccgatggcattgatcttgtcctaacagaggtagctatgcctattttgtctggaataggtcttttgtgcaagatcatgagccacaaaactctgaagaatattcctgtgattatgatgtcatctcatgattctatgggtatagtctttaagtgtttgtcaaaaggcgcagttgattttttagtgaaaccaattcggaggaatgaacttaaaaacctctggcagcacgtttggagaagatgccacagttctagtggtagtgggagtgaaagtgcgacccacaccagaaaatttgcaaagtcaaagaagtaatgatgcatgtgaaaacaatagtgacagcagtgatgagaatgactatggaagcagaaacttgagcgttcgagatgggaagtggcactcagtctagtggtagtgggagtgaaagtgcgacccccaccaagaaaaatttgcaaaggtcaagaaataatggatgcatgntgaaaaacattagntgacaggcagtggtggaggaatgaactattgggaagccagaagacttggaaccgttccgagattgggaaagtgggcaccttcaagaggttcattgg

SEQ ID NO: 28779 - DNA, 1015 bp, Glycine max
  Clone ID: TF_GmC429772_1
gcacgagtgcgccagttgctcagttccatgttctggccgttgttcttcgccttgctgccggatggcggagtgagccgctcctcaactcctctccctttcccggtactgccgggctttctgctgctgaggctgtgcagggtcctggtttcgccgtggagatgtgtagtcgggtgcctcccccctgtgttgctcttctttccctgctggatctagttgttatcccgatcatatctgtctcctgttcccccgcaattcctggatttgcgtacatcataaaatttttcccaaattataaactaaatgtgattactgtggtgctccgggtatccagtattgtacctgaaataatgggatctgacctcagagataacataatcaaatgagatctttgcccacctttcatgacaacatctcacaccctgtggccgctgtcgttgcaaccttcaattacttgtatatcttccctggtttgattttagaaaaataataacatgaagttattgatttgcaggaatctaaatctcttaaagacataccagtggtgattatgtcctcagagaatgtcccagcaaggattaacagatgcctagaagagggagctgatgaattctttctgaaaccagttcaacagtcagatgtaaacaagctgaggccacatttgatgaaatcaaaagttaaggatggggaagaccaacaaatcagtaacaaaaggaaagaaacagaagaaagccattccccagataaaactaggacaaaaatggagcctcaaaaagtggttaatttcagttaaaaattgattataattgatacatcatagatgttccctagaaaattttcctatcctctgtctcaccaactaactagtgagaagagtagatggcatctcaatcatactaaagaaatgtgtagtataggcccctgacattaaacagaatttcatttcaaattcaattttgtctgacatataaattataaattgtttcagctcttaatcttatgtgactaatgcaaaaaa

SEQ ID NO: 28780 - DNA, 470 bp, Glycine max
  Clone ID: TF_LIB4165-030-Q1-K1-D7
ccacgcgtccgatttattacgcgtccttctttctctctcctttcaccatgtaaataaagcccaccattttccatttccatgtatctgtgtactttctattcttagaagaaagaagaaaactcacttttgtagagttcgagttcttattctcatggctattaccggcgaaattttccgacagagcataaaggaaatgcttgaggagtctccttccggtgcgccggaacttcaagttctcgccgttgacgacagcctcgttgatcggaaggtgatagagcggttgttgaggatttcttcctgcaaagtgacggttgtggagagtggaacgcgtgctcttcagtatctggggttggacggagggaacagttctctcgggtttgatagtgttaaggttaatctcataatgacggattattccatgccggggatgactggatatgaattactcaagaaaatcaaggagtcttctg

SEQ ID NO: 28781 - DNA, 476 bp, Glycine max
  Clone ID: TF_LIB3242-109-Q1-J1-E12
cggctcgagcgattcctgagttgcgttggtcttgggggggttacaaactcagcagcagaagaagaagctcctcaattggttaacctcaaattcgagtcgaactatgtaaacgccactttcggggcggggttggtggctctggtttggtggttgggctggtactggtccttaagtcgggttttcccagcctggattttaaccaccggaaggggtccctggtaacggcttctgggaggggtggttttaaattccgggaaggccgtttccgaccagtttcgggggggtttccgggttttggggggggacgatgacccacctggtttaaggatctttgagaagatgctccgaccgtccctttacgaagttccaaaatgcatcgagcaaaaactgctctctcactgcttagagagaacaaaaatgggtttgacattgttataagcgatgtgcatatgccggacatggatggattaaacttt

SEQ ID NO: 28782 - DNA, 664 bp, Glycine max
  Clone ID: TF_GmC161_2
cggtccggaattcccgggtttgacccacggtccgatcatcacagactattgtatgcccggaatgaccggttatgaattactcaagaaaattaaggaatcctccagtttcaaggaaactcctgtggtgattatgtcctccgaaaatgttttgccacgcatagacagatgtttggaggagggtgcagaggatttcatagtgaagccagtgaagttatcagatgtgaagcgtttgaaggatttcatgacaacaaaggaggttataaggggtgaattaagccaagaagaaagggaagggatcaacaagaggaagctattagacacctctgatgtgtcgccatcatcaccaccgtccatttcctcatcaccactcccatcgtcacccagctcagtgattgattctccaatcagacggcttaaaatgaccggcactgattgatattctctagcaattaatttgctgttttccttaattttctcattcctgtaggcactacagctgcaagcctgcaatgtctatctttataattataaatagtagtgtttttttcttcttctttggatttgttgttttactcttttagggttgaaattgcaaaccgttaattgtaacggtttttgttgcgcttccctcttcttaattatctaagttattttaattgtttaa

SEQ ID NO: 28783 - DNA, 1674 bp, Glycine max
  Clone ID: TF_GmC1062_1
gctcgtcatggagaagttattggaaaagctgcgctgtcgcactttgacagttaccaacgggtctgaagctatacggtatgccatgggcgaagtcaaatttgatgtcatcatgatggagtttcgactacctcaggtcaacggcgctgacgttgctcgtatgatacgagatacgaagaatgccaacacccataccccgatcgttgctgtcactggatatctcaaggaactacaggcgcctcactactttgatgcactcattgaaaaaccacctacagtcgccaagcttacggatacgctgagtaggctttgtcagtggaaagcgccgccgccgggctggacaccgaaccaagtttacccatcaatgatgccctcgggacttcgacaggagtcttcgcgtcaagaagatagccccacaacctcgaactcttccggctatccacctgtgccttctgccagctatcgaggctctagccgcgaagattctattagctccagcttctttggcgacaatgacagtcgtgcaggcgaggatatgtcggtgagagtgcacaacgccgacgattggagggagcgcgacatcgcgcgagccatgagtggtttgggcatctcggatgacgcagctaatgccgatcacaaaggagctattcctaaccgtatcggtgcacctgacctaccccacggagaatctgcaccagccgttcttgaagaggcaacgatccgccgtcagcgatcggcggagcaagtaggcgccaaacgtcgcatattagagacacgtaaacacgagtcagcagaatctggagatgacgaggacgatgagttaggtcacgcccctgttcgcacacgcagtccaaagacaagaccgaaatccacgtccaagcttggcattgagatgatgcgaacaaacagcagaggcagtgtgatttctgttgaagatgttgggcaagcggactcggcattaccctcatctccacctccaatgatcacagaagatcccgctgcggaggaacatgaaagcaatcttgacgcacccaccgtcgctccggtgcttcttacaccgccagtaatgttccctgaagaacctggcgacgatgttgccgactttgtcattgaaacacctaagtcgcacaaggatgcaactagtccagatccagatcctacacccaaagcgaagtctgccagaacaccagactctgaacccacaggactcgacagtgcgacagacacctaggcggtgccacgcctggcgtttggtacctgttcagtaaattgtacatttgatttcaaagcttaaacacacttttcgcagcaaggcgttggcggtgtgttcactgggtagtgtaccgggaaagtgccattccagcaagcccttgatgttatttcttatcctccacgctctgactagctgcccttagcagccatttgtgggctgtgtcgagcgcttctttttccaaattatgtctacatactcagcgttttctttcctttacacgtcaggtgtgagtttacgcttcgagagggggaactctcatcattcgctttcaacattgttacccagcccacacacgaagtgctcgttgggtccagactgtcgctcgtttctcagatcctgcttgtactaagtgtactactattgaatcaaatatctagaggccctcaggctctcgtgcattctac

SEQ ID NO: 28784 - DNA, 930 bp, Glycine max
  Clone ID: TF_GmC942_3
ccacgcgtccgggaaacacatgtaatttttttttatagaaaaaaatggtaagaaatgagggtagatttggaaaatgaaccatgattgaccatagtgagagactctttttctgcatattatgtggttcgtcaggagcgatggcaactgttcagtagtcacagacacccttcaacgaccgtagttaaacctcctaactcacttccccttccctcactctatttgctttgtcgagcttcaatggaataagagcagaaagaaaagaacacaactttgggcagagtagttggtggggcattttcttttcagccaaggtaatagctaggaaacaataaaaaaaaaggcttggaaaagaaccactttccgtgtgcatgctgattctaccttgattcatgtgttcagttttggagaaaagggatccagtgttgatcagcaatattgatctgttacttaactaggggaccgagtaagaatgccaaaccagctatggtttgcactgccaatgatttacaagaatggaaagatttcccaaagggacttagagttcttctgcttgaaggagatagtagttctgctgctgagataagagaacaacttgaggccgtggactataatgtttccactttctacgatgagaatgaagccttgtcagcactctcgagtagtcctgaaggcttccatgttgctatagtggaggtgagtacaagctgtagccttggaggtttcaaatttcttgagaattcaaaggacttgcctaccattatgacttcaaaggaccagtgcctgaacaccatgatgaagtgcattgcgcttggtgcagttgagtttctcagtaaaccactctctgaggacaagctcaaaaatatttggcagcatgttgttcacaaggcatttaatgctggggcaaatgtcctgtctgaatcactaaaacct

SEQ ID NO: 28785 - DNA, 477 bp, Glycine max
  Clone ID: TF_jC-gmro02910075c01d1
atgaaatactagataggcttataaattgggccttctgcacattgcacttctctatgcacacacaatagagcactagtatagctactaaatgagagtaagagtcaggaaaattggattacatttctagaatgcatatgtcaagctatgatttcttttatgtttatataataatatgcggaaaacttctatacatttctagttgcctgagccaaccctttgttagtttgatgggccttatgagagagaagtcaagatgttcttttagtgagtgaaagaatggtggacaccatcattttgaagtcaattggctttgttaagtaagcatccatgcccacctccaggcatttggcttcatcacatgacattgcatgtgctgtaagagcaacaatgggaatgtgcctgcttgttcccacttctgatttcctgatagcttttgttgcctcatagccatccatctttggcatctgacaatccatt

SEQ ID NO: 28786 - DNA, 478 bp, Glycine max
  Clone ID: TF_GmC103_3
gaatgccttaacgtcattggacctgctggttcttcctttcaagtcattcttttggatcttcacatgcctgagcttgatgggttcgaagttgcaacgaggattcccaagttcagaagccggaattggcctgtgattgttgccttgactgcaagcacagatgatttgtgggaaagatgcatgcaaattggcatgaatggagtcataagaaagccagttttgttgcatggaatcgctagtgaactcagaagaataatattgcagggaaatagtgtcatgtgaggattcatgctgcaagttaaagcacttgcaacatatcaagaaattaagttataaaaaaaattccagtcacatattccatagaatttggtagctcaaagaactctttggctcctattttccagcaatattccagcttagagatgttgtgttatagccctactttcataagaaaattaaatggtatacaaaatagttcctt

SEQ ID NO: 28787 - DNA, 528 bp, Glycine max
  Clone ID: TF_GmC1391_1
tataaacctgattataacagattactgcatgccaggaatgactggctatgatctgctgagaaaaatcaaggaatctaaatctcttaaaaacataccagttgtgattatgtcctcagagaatgtaccatcaaggatcaacagatgcttggaagagggagcagaagagttctttctgaaaccagttcaacaggcagatgtgaacaagctgaagccacatttgatgaaatcaagagcaaaggaagagcaagaccaacccttcaataacaaaaggaaggacatggaagaaatccattccccaaataaaaccagaataaaatgtagcagttaaaattggtttcaaattaaaaataaaaaaattgatgaaacataggtagtgcctataacattttcctcttctctcgcttgcttggtagtgaaaagttaggcagtcaataatcatgcaaaagggataaagagtacaagtcatttatgtaaatagcctgagaaagaattccattcaattttggtcatcaaatatcatttcatttt

SEQ ID NO: 28788 - DNA, 409 bp, Glycine max
  Clone ID: TF_LIB5118-045-A1-PF1-E9
tggagacgagtcggatgcgcaacagcgaagaggtgcgcctcctttcgaatgatccgcgttctcgtcatcgccaaagagggcggcgaagccgatcgcatcatccagagtctgcgggagctcccggggattgcgctcgaagctctgcacgtgacgtcgctctcggacgcaaggtcccacctgcgtgagacgctgttcgacgccatcgtgctcggtctcgagtcggccgatccttcgggcctcgacgacctgcaccggctgctcgagcgcgccagcgctcccgtcctcgtgctcaccgacagcgacaggcccgagctttactccgcggccatcgaggcgggcgctgcggagtgcatcggcaagggtgattcgccgctgaccatcttgtcgcgagcgctgttgcagcgtgtgc

SEQ ID NO: 28789 - DNA, 946 bp, Glycine max
  Clone ID: TF_GmC48369_1
aattcggctcgaggtgttttcctgcaaccattttcttccttcgtcggttgattggtgatgttgctggtgaccccagaagaaggggtagtgttgaatattatagttaagctttgaactttgaagtagtggcagaaatcattgacccttttttggcagacttacttgtttgtggtccgaaactgctgattgcaactgttcagtggtcacaggaagcaccaccctccaaagccagcacttaaaacctttccttctcttccgtctctcttctttacccttctgttttattaacaattcaataagaggagaaagaacactcagtttaattagcaatggaattgaagaagcattttcttttatgccaagaaggaattggatgctgataagtggtatcgattgatctgttattttctgtgggagactgagaaacgatgccaagccagctatggttttctctgccaatgatttacaagaatggaaagattttcccaaagggctcaaggttcttctccttgagagagacaacatttctgctgccgagataagggcaaagcttgaagccatggactacaatgtttctacattctgtgaggagaatgaagccttgtcagcaatctcaagtggactcgaaagcttccacattgccatagtggaggtgagttcaagcagtggccagggaggtttcaaatttcttgagaatgccaaggacttgccaaccattatgacttcaaacaatcattgcttgaacaccatgatgaagtgcatagcgcttggtgcagttgagttcctcagaaaaccactatctgaggacaagctcagaaatatctggcagcatgtggttcacaaggcattcaatgccagggcaagcatcctgtctgaatcacttaaacctgtcaaagaatctgtagtgtccatgttgcagctccaaacagacgatgaacaacatgaa

SEQ ID NO: 28790 - DNA, 1529 bp, Glycine max
  Clone ID: TF_GmC413_2
ctcttgggttctgatggttgttcttggatatgggttttggcagtgacggtggtggagagtggaagcagggctctgcagtatctggggttggatggagaaaaaagttccattggtcttgatgtgagcaaaatgcaaacttggcttttgaattgttaaaggcacttctttttagtgttttaaacaataggtcttacttggaagtgatgcttatgttgttattttgatgactgtttcggcagagtgtgaaggttaatttgataatgacggattattccatgcccgggatgacaggatatgaattgctcaagaagataaaggtgagaaatgagacatggtcgttcttgttttaatttcttgtcgaagatgaatgtattagaagagagaattgttaatgttttcctgatttcatagtggtggtttccccccttttctccttgatttttaattcttctatctgttaatatctgcaggagtcatctgtttttagagaggttccagtggtggttatgtcgtctgagaatatcttgaccagaattgataggtaagctcttgattaagataagatgctgtttggttcttctttggttttaggagatagaagcctttatttttctggctgatttctttgataaaattgcttgatttatgtgatgatatttactagattgtgatgatgtttgttgatttgcctatgctaatggtttggtgagctaaaatatcagaaagttgatgagttacacattgctgcatccgtatcttgttttcccggacttgattcacatctagacttgaattgcattgatgaaagacatgaatatgtttttggatatgattagatcacgtagggtttggacaaaataggtgtattttgggattaaagttgagagatcttaaaagtacttttaattcaaaagcaacaaatttttccttcatatgtttatacattggaattcacaaaagtacttttgtaactttaatccaaacatatatgagatcactgagggcttgaagtttggacacatcgatagatcacatggtgtttagtcatgcgaaaaagggagggagagtggagacaaggatatctgaggaaattatttaaagagtccaagggaatattatggtgaataattttgattttattagaggtcaatgatattgtgtatcctgtgtagttgatctcacctaatgggataaggttattgatgtcgtgttagatccccatgctttctcattataggttggttctagtaaaattcatctgttaagacttgattcatcaataatctcatcatgttagtcacatgcagcgttttggaaacatgttacttccaacttgcaattgtggctacaaggattgaaacatgatgaaatccagatttcctcttgcctaatggtcaactgttgtaaaggatcctgttggcatggcagcaattattgtcactataattgccacataattatacatctaatcaatacttctattcatctacacatgaaattattggccaacaccgttaggttgtgttcag

SEQ ID NO: 28791 - DNA, 894 bp, Glycine max
  Clone ID: TF_GmC1752_5
caaaaccaatcgttaacaacaagaaatcctgctggaagtggacttggcctggcaatttgtaggaggtttgtaaatcttatggaaggacatatttgggttgaaagcgaagggttagcaggacagtaacaaagggacttcttatgcatttaggatgtgatgtaaccacagcaagctcaagtgaagaatgtctgcgtgttgtttctctggaacatgaagtggtcttcatggatgtttgtgcagggttagatggttatgaacttgcaaatccgtatacatgaaaagtttactaaacatcaagatagaccactaatagttgctcttactggaaacaccaaaaaggtaacaaaagaaaactgtatgagggttggtatggatgcccttatattgaaacctgtttctgttgacaaaatgaggggtgttttatcagaactattggagcgccgagttctgttccaaagtgtttaccctgttagattgttgtacatagctatatcaaatttggagaagagcccaaacttatgaagcaatgaggcaattgacattagttgtcatcctttttgctgttttgagatcccggcaaaaggaacaacgattgagtctgcgttgttaaataattttttgtgaacacaagttcgtatatgttgtgtattctgcattttatagcagactttcgatgttttgcaatggcggtaaaattgcatttatactgtcctagactgttttgattaattgatttaagtttaattacttgttagatctctatacctgtatagtctttgttttagtctctacattcaaaatatttggtttagcccctacgcatatgtacctccgttcctatggataagacttttttcattttagtttttgtccctctttataagattatctacg

SEQ ID NO: 28792 - DNA, 573 bp, Glycine max
  unsure (1)..(573): unsure at all n locations
  Clone ID: TF_jC-gmfl02220070e12a1
ggctcgagctcgagccgaatcggctcgagaaaagattcaggatcaggaattaatccactagatatcccaaagatattcactaagtttgcacaaaaccaatcgttaacaacaagaaatcctgctggaagtggacttggcctggcaatttgtaggagggttgtaaatcttatggaaggacatatttgggttgaaagcgaaggtattgataaaggatgtacagtcacttttattgtaaaacttggaatcccagaccgatcaaatgaatttaagctaccttttgtacctaaagtaccgggaaatcatggatctacaaactttgctgggctcaaagttcttgtcacggatgacaatggggttagcaggacagtaacaaagggacttcttatgcatttaggatgtgatgtcaccacagcaagctcaagtgaagaatgtctgcgtgttgtttctctggaacatgaagtggtcttcatggatgtctgtgcagggctagatggttatgaactagcantccgtatacatgaaaagttactaaacatcaagattgaccactaatagttgctcttactggaaaca

SEQ ID NO: 28793 - DNA, 610 bp, Glycine max
  Clone ID: TF_GmC3451_2
acgtttgctaagccacgcctcgaggtggttgtgggcgaaagctgcttgccagaaactgagcaaagaagcaagtaaagggcggtttggaaattgttactattattttctctcttacatgtgttgaggatgatgatgaagtcaatttcattcactctgttttcttcttcttcttccttgtggccgattagggttattattctttctggctgtggaacgaaccatgctgttgttcgagaatggatgagttgaactgcgcgatgacgacgacgacgacgggagaatagcaatgcggagctggttcaatgggagaggtttctgccgcggatggtgctcagagtgctgcttgtagaagctgatcattccacgcgccaaatcatcgccgcgcttcttcgcaaatgcagttacacggttattgcagttccggatggattaaaggcatgggaaacattgaagaagaaggcatctgagctagatctcatattaacagaagtggagctaccagcaatatctgggatttgctcttctttctttaatcatggagcatgacatttgtaaaagcattcctgtcataatgatggcttctcatggatccgtttacatggcgtttgaa

SEQ ID NO: 28794 - DNA, 438 bp, Glycine max
  Clone ID: TF_14999708
ctttctaatcccccccctctctctctcacacacatcacgcattgtgtgtaatgataaatataaacgaattttcaagtagataagttagctaacaggttaagaagattgtttatctgaacactacgtactgagatggagcttgtgaatagccaaaagctaaaacaacatgagcagcaacagcattttcatgtgttggtggtagatgatagtgtcatagataggaagcttttggagaggctcctaagagattcttcatgcaaagctacctttgtggattctggagacaaggctttgaaatttcttggcctgcttgatgatgaccttgataattcttcctcaacttcttcggaatcattgcaactaaacggaatcaaagtgaatatgatcatgacagactactgcatgccaggaatgagtggctatgatttactcaaacga

SEQ ID NO: 28795 - DNA, 652 bp, Glycine max
  unsure (1)..(652): unsure at all n locations
  Clone ID: TF_GmC597_3
actcaattcagccaacttttcagatattttcactgctcaacttaagactaagcatgagccgcaacttgtttgaaaatgggtgaagtgccggctgtattcgatgcagacgacgcaaggggaacagagcaacaatgcctccgctgttcattgggagcgctttctgcctcggatggtgcttcgggtcttgcttgtcgaagctgatgattctactcgacagatcattgctgcacttctccgtaaatgcggttacaaagtgatgtcttctcatgattcagtaagcatggtgtttaaatgcatgttaaaaggtgcagctgattttcttataaaacctgttcgcaagaatgagctaagaaacttgtggcagcatgtatggagaagacacgccataagcaggcctcctcaaaatttaacactgccggagattgaacttggttttgctgcagaaaaccatgctgcaagcaatgactctagtggttctgtggcttctacaccaaaagatgatgaatgcagtgagaaaacangtgaggctcatgatatattgcagctgaagagctcttcaaatctgagcaatattgacacagtgaagcatgaaaactctaccaaatgtgaaagggagtcagactagcataatgatgaagcttgagagaaatca

SEQ ID NO: 28796 - DNA, 403 bp, Glycine max
  Clone ID: TF_LIB3087-003-Q1-K1-B2
cactcttttattattattattattattattattattattattattattattattattttgggtttgactactttcatgatgccagtttcaaccatgtgaagttgttgtgcgtgctgtgtttgttgttgtgtactgttttggacctttataaccaaccatgaatctcagcaacggcaagggatccacttttagttctcctctgaaagccggagattctgtctctgaccagtttccggcgggtctccgtgtgctcgtggtggatgatgactccactcgcctcatgatccttgagaggatgctccgtgcttgtgtctattaagtgactcaatgccagctagctgaggttgcattgtctctctagagagagaacaataacgggtttgatatcgttttaagcgatgtg

SEQ ID NO: 28797 - DNA, 956 bp, Glycine max
  Clone ID: TF_GmC161_1
gaggattccttcgtctctgtctctgtctttcttactctctctctctctcccgtctttctctctctgttcactttttctatcctcgaagcaagaaatggactctaacagcgtcgtttcttggccgaggatgccagaaaacatcaacggtttcggcctcaaacagaaccaatccgaagaggttcatgttttagccgttgatgacagcaccgttgatcgcaaagtcatcgaacacttgctcaaagtcttagcctgtaaagttactgctgtggatagtgggctgagagcactgcaattgcttggactattggacgagcagaaaataccctctgaaactaatggttttgtgggtttgaaggtagatctaatcatcacagactattgtatgcccggaatgaccggttatgaattactcaagagaatcaaggaatcatctactttcaaggaaacgcctgtggttattatgtcatctgaaaacgttttgccacgcatagacagatgtttggaggagggtgcagaggatttcatagtgaagccagtgaagttatctgatgtgaagcgtttgaaggattacatgacaacaaaggaggttaggggtgaattaagccaagaagagagggaagggatcaacaagaggaagctattggacacctctgatgtgtcgccatcatcaccaccgtccatttcctcatcaccacttccatcttcactcagctcagtgattgactctccaatcagacggcttaaaatgaccaacactgattgatatactctagcaatttgctgtttttcttttctcattcctgtaggcactactgctgcaatctttggatttgttgtttttcccttttagggttcaaattgcaattacctcctcgtttaattgtaacggtttttgttgcgctcccctcttcttatttttagtcagttattttaattgtttatatatgaagggttaa

SEQ ID NO: 28798 - DNA, 2089 bp, Glycine max
  Clone ID: TF_GmC1876_1
cggaattccgggtcggaccaagccttccggtggctatgaagaaaggagtagatattgtgttggacccttgcaatggttctgtactcagatattcgcgcacgaaaggccacagaggaaaactcaaacaagttttgtgcaatttactgagcaatgctgttaaatttaccgaggaggggcacatagctgttcgagcatgggctcagaagccaagcttgcagagctcaatgattgctactcaccaatacgggtccagtagacttttgtcgcgcttgtgttgccgccaaaatgaagcacgtgatgacgtggaagacttgaacatccaacaagatccaaattgtatggattttactattgaagtggatgacactggcaaaggaattcctaaagagaagcacaagtctgtttttgaaaattatgtccaagtcaaagaaactactcttggccaagaaggaactggcttgggacttggtattgttcagtcactggtacgtttgatgcatggagatattgaaatcatggacaaggatattggtgaaaagggaacctgctttaggttcaatgttctcctcactgcccatgagacacagatgaatgatgacacaagagatgaccaagttggatcaggtaacaaaaatcaatctcatggactaaccatgagtcccaagttatctatttggacccgtagtcctagatccgaggcttctcgagttgttttattgattcaaaatgaggagcgtcgagggactacgcagaggttcatggagaggttagggatcaaagttaaggttgtgaaggagtggagacaacttcattacactctgaagaagatcatcaaacaaaagggtctccatccaaatagctcaagctcgccagagtcttcagattctccctctgcatcaagctgcacaaacggagtccctttgagtgcacaagatggaactaattacataagttcaatcttcaagagaacagatattgaagcttcgtcgggttttgtcctgattgtgattgatgctaatgcaggacctttttcagagctttgcaaagtggtagctgagttcaaaagaggcctttgttatccttgtagggtggtttggttggagaatccacttataccttctgtggacaacaaaatccttaacaaggatgtttctaattctaatgacattgtcttgtctaagccacttcatggtcatcgtttattccaagtcataaggattctccccgagtatggaggtgtttggccatgcaattctagtgaaacaaagaaagaaaagggtcaagtttccttaactaatgaaggtgcaattcgacgtgttgaactacaagagtgtggcagctcaagcgttacacagcaatcttatgatagatctagagcaagaaaatctcatatccaccaaggagaaatacaagaatgtgaagagtcaagcaatgaaaaacccttgtggggtatgaaatgtttggttgttgaggacattgttttgttacgtaggataactaagtctactcttgatcggcttggtgcttctgtcatggaatgtgagaatggtgaacaagctgttcagacagttgaagagggtctaactaggaattcttccaatcgtccatgtgatttcatcttaatggactgccagatgccggtaatggatggatatgaggcaacgagacggataagggagattgagaagtctcatggtgttcacattcctatctttgcattaacagctaatacagggaaagaggcaatattgtccattgaagctggaatggacgatcacttaatcaaacccatcaacaaagaggctttacttaaagccatcaaaagaatatatacttaagagtgaacagtaaatcttatcttttttaattgctttatatgattgttatcaagtttttaaattaaacaatgacaggagatatctttttacaccactaactagcctatatataaaacagaaatagtaaataaataaataaagcattcatgtgtcattgtttaatttgacaatttgatggtaatgacattaaaaaaaatatttttaagtattgtccttttctttaattgtttatagattttttttgttttttt

SEQ ID NO: 28799 - DNA, 2947 bp, Glycine max
  unsure (1)..(2947): unsure at all n locations
  Clone ID: TF_GmC1752_1
ctgcttttcatttctttacttctctctctctctctgttctgctcttgtcctgcttttccatccatttatgtgaaaaaggaaaaattgcctgaggtggttcaatcactatggaatcctgcaattgtattgacccacaagtgccagctgatgacttattgatgaaataccaatatatctctgatttcttcattgcccttgcttatttctcaatccctttggagcttatctactttgttaagaaatcagcagtatttccatatagatgggtccttgttcagtttggtgcttttatagttttatgtggagcaacacatctaattaatttatggacctttagaattcattcaagaactgtggctgttgtaatgaccactgctaaggttttaactgctgtggtatcatgtgcaactgccctcatgctggtacatattattcctgatttattaagtgttaaaactagggaattatttttgaagaacaaggctgcagagcttgatagagaaatgggcctgattcgcacacaagaagaaactggtcgacatgttaggatgttgactcatgagattagaagcactcttgatagacacacaatattgaaaacgactcttgttgaaatgaggtagaactttggcactagaggaatgtgcgttatggatgccaacacgaactggtttggagcttcaactctcttacacattgcgacagcagaacccagttggatacacagtacccattcatcttcctgttatcaatcaagtatttagtagcaacagggcagtaaaaatttcacctaattgtccagttgctagattacgaccttatgctggaaaatacatgcctggggcagtagtagctgttcgagttcctctcctacatctttctaatttccaaatatatgattggcctgaggtttcgacaagaagttatgctttgatggttttgatgcttccatcagatagtgctagacaatggcatgtgcacgagttagaactggttgaggtagttgctgaccaggtagctgttgctctttcacatgctgcaatcttagaagagtcaatgagggcaagggatcagctcatcgagcagaatgttgcattagatctagcaagaagagaagcagaaactgcaattcgtgctcgtaatgactttttggcagttatgaaccatgagatgagaactcccatgcatgcagttattgcactctcttcattactacaggaaacagatttgacagctgagcaacgactgatggtggagacaatattgaaaagcagcaatttgttggctaccctcatcaatgacgttttggatctttcacggcttgaagatggcagtcttcaacttgaagcagcaacatttaacctccattctttgttcagagaggtccttaacttgattaagcctgttgcatctgttaaaaagttatcactcacttcacatgtagcctcagatttgccaatgtatgccattggtgatgaaaaacgtctcatgcaaactattctgaatgttgttggtaatgctgtgaagttctcaaaagagggttgcatttccatcactgctttcgttgcaaagcctgaatcctttagagatgctagaattcctgactttcttccagtgccaagtgataaccacttttatttgcgagtacaggtaaaagattcaggatcaggaattaatccacaagatatcccgaagttattcactaagtttgcacaaaaccaatcattaacaagaaatcctgctggaagtggacttggcctggcaatttgtaggaggttcgtaaatcttatggaagggcatatttgggttgaaagcgaaggtattggtaaaggatgtacagtcacttttattgtaaaacttggaatcccagaccgatcaaatgaatttaagctaccttttgtacctaaagtaccaggaaatcatggatctacaaactttgctgggctcaaagttcttgtcatggatgacaatggggttagcaggacagtaacaaaaggacttcttatgcatttaggatgtgatgtaacaactgcaagctcaagtgaagaatgtctgcgtgttgtttctctggaacatgaagtggtcttcatggatgtttgtacagggttagatggttatgaacttgcagtccgtatacatgagaagtttacgaagcatcaagatagaccactgatagttgctcttactggaaacaccaaaaaggtaacaaaagagaactgtatgagggttggtatggatggccttatattgaaacctgtttctgttgacaaaatgaggggtgttttatcagaactattggagcgccgagttctgttcgaaagtgtttaacctgttagattgttgtacatagctatatcaaatttggagaagagcacaaacttatgaagcaatgaggcaattgacattagttgtcatcctttttgctgttttgagatcccggcaaaaggaacaacgattgagtctgcgttgttaaataattttttgtgaacacaagttcgtatatgttgtgtattctgcattttatagcagactttcgatgttttgcaatggcggtaaaattgcatttatactgtcctagactgttttgattaattgatttaagtttaattattttaatattactaaataaattaaattgttgtaaatcaagagagtttaatttaattggttgaacgtagtgtatgaacctccgttcctnnngataagacttttttcatttnngtttttgtccctnngnnaanaaaaaaaaaaaaaaaaaaaaaaaaaaaaaaaaaaaaaaaaaaaaaaaaaaaaaaaaaaaaaaaaaaatatgatttaaaaaaatataatattaattattatgagaaagaaaataaaaaaaaaaaaaaataaagggggcgcccctttttagagaaccaagtttaaatacccgggcatggaaaagtaaaaatttttttttttgggcccc

SEQ ID NO: 28800 - DNA, 829 bp, Glycine max
  Clone ID: TF_GmC123982_1
aaaaaacatactgagagagagagagagagaggtaaacgaggacacagtagtaccatttattcctctgcttatttattagctatcagcaacgcttcgcatggctgcaggttcttcttcaaattgggtcatggaaagtggtgatgttcctcatgttttggccgttgatgacaaccttattgatcgcaaactcgttgagaaactcctcaggaattcttcttgcaaagttacaactgcagaaaatgggccaagggcattggaattattgggcttaacaagtggtggacagaacaccatgaacggtagatccaaagtaaatatggttatcacagactattgcatgccagggatgacaggctacgagctacttaagaaaatcaaggaatcgtcggtaacgaaggaggttccagtagtgatcatgtcatctgagaacataccaacacgaattaacaagtgtctggaagaaggagctcagatgttcattctaaagcccctcaaacaatctgatgtaaaaaaactgacatgtcagttaatgaattgagaaagtgagatttgacttttaagagagtataagctaagcaagaaggcaaactctatgagatctgtggtctggtaatgtgagcagcattccagaaccctgcacttgtcatggctgtctattgctaaaatctatattatataggccttaccctctaattttagtactagttcaggtgtaggaatgcgtttcattgttttgaagatgctttactttctttctttcactctttcttgtattgacctacatattccattttattttcctagaaaataattcatgttcttttttttc

SEQ ID NO: 28801 - DNA, 446 bp, Glycine max
  Clone ID: TF_GmC191_3
attttcaccttttcacaaatggggatggctgcagagtcacagtttcatgtcttggctgttgatgacagtctcatagataggaaactcattgagaggctcctcagaacctcttcttatgaagttactacagttgattctggtagcaaggctttagagtttctggggttgtgtgagaatgatgagagcaacccaagtacaccatatgtttgtcccaacaaccatcaggaggtggaggtgaatcttgttataacagattactgtatgcctggcatgacaggctatgacttgcttaagaaaatcaaggaatcttcatctttgagaaacataccggtggtgattatgtcatctgaaaatgtgccttcaaggattaacaggtaagaaggagaaatatttcagtactttttttaaaaaaataaaattggaaataaaaacaaaaaaaagggcgg

SEQ ID NO: 28802 - DNA, 699 bp, Glycine max
  unsure (1)..(699): unsure at all n locations
  Clone ID: TF_GmC690067_1
ctcgagccgtgaatttagtctcagaattttgagaaagagttctcattcagtggtgttaggggacctaaaaaagttacggaatggcacatcaaaacttgggcaccaaattaacagcacttgtagtagatgacaataaaatcaaccgaaagattcatcaaaagctgttggagagtgttggaatgaaaaatcaaggagtggaaaatggccaagaagcagtggacattcattgccatggacaaagattggacctgattctcatggacatggatatgcccatcatgaatggcattgaggcaacaaaggaacttcgctcaatgggcattggtagcatgattgttggtgtatcatcacgctgtacggaagcagaaatacgaaaatttatggaagcgggactgaatgactaccatgagaaacccttgaacaattctaagcttagttcacttcttgataagatcaaccccagttttactcgtaattagtggaaatttcaaccgggtaatgtatgaaaaagcaaagaagaaaaaaacttaaccttacccgttccttgtttccaaattccatggctagtttttcctctctttttttctttttcttttggtgattctgtagttctttttttactatggtgaagtgtgtgactacgtannngnntaccaatgttacacaaaaataaagaannnannnnnnncataactcctg

SEQ ID NO: 28803 - DNA, 1840 bp, Glycine max
  unsure (1)..(1840): unsure at all n locations
  Clone ID: TF_GmC1886_1
aggaaaagacatgcnnnntggttttnnncatagnttnnnnnatgaaangaanattttgntnnncgatgacaatggggtaannnnnngagttgcagcaggtgcactgcacgagtttggtgcctctgtgctgtggggaagaaagggtgctagttcatgtgaggaaaattgggatatgcttgcatggacttggggaaaccatctaaatagaggctacacattttgcagatttgaagcaaccagccgaattcggatgatggagagcaaggcaaatgaggagatgaataatgggaatgagtggcatgtgcctatactggccatgacagctgatgtgatccatgctacatacgacaagtgcatgaaatgtggcatggatggatatgtctcaaagccatttgaggaagagaatctgtatcaggaagttgcaaagtttttcaaatcaaaaaccatgtcagattcatgacaaatgtgcttccttacttggcaaccaactagatgattggatttggagacaacacattttagtttgatcactgctagcactttcatgtcacatgtaacttgttacttttgctttcttgcatagagtaacacttgtttttgcaacatatttgagttgagttcgttgagggatcattactattactaatcggctgcagtttggcattattagagtaaaatgtataccacgccacaccccccaattgtgtacagattctggctcagggatgactggagtggagggcattttcaatatatgaaacacaatggtcgtacgcttaagatgcctaaaatgatccttctggcaaccaatattagtagtgccgaatttgataaagctaaggccacgggttctactgatactgtgatcaagaagcctcggagagctagtatggtggctgcttgtcttcagcaagttttgggtatggggaagaagaggcagctagggaaagacatgcctaatggttttctacatagccttctctatggaaagaaaattttggtggttgatgacaatggggtaaaccggagggttgcagcaggtgcactaaagaagtttggagctgatgtgaagtgtgctgaaagtggcaaagtctcttgaaatgctgcaattgcctcacaattttgatgcttgcttcatggacatccaaatgccagaaatggacggatttgaagcaactagtagaattcggatgatggagagcaaggcaaatgaggagatgaatggcagtgagtggcatgtacctatactggccatgacagctgatgtgatccttgctacgtacgacaagtgcgtgaaatgtggcatggatggatacgtctcaaagccatttgaggaagagaatctgtatcaggaagttgcaaagtttttcaaatccaagaccatctcagactcatgacaatgtgctttgaacttggcaaccaactagaagattgattggagacaacacattttagtttttttattttatcattactagcactttcacatgtcacttgtaactagttacttatgcatgctctcatgcctagagtaatgcttgttttcctaacatctttgagttgagttcgttgagggatccttacaattaccaaccggctgcgtttggcattattagagtaaatggtataccacgctacaccccccaattgtgtacagattttgggtaagggatgagtgaaattatgtaaattcaatgtttttccccatctcgttacttccccatcagaaggtttttatagcaatagctttttgtgtaaaggcatcttgtattgtaatagatttggtcattatgttaaaaaatgcatgcttatgtgtagtgtagcatatctttggtgcatg

SEQ ID NO: 28804 - DNA, 714 bp, Glycine max
  unsure (1)..(714): unsure at all n locations
  Clone ID: TF_GmC73999_1
tggccgcagacagagagaaagacactttcactgaaattctaaaagaataaaagatttgtgttttgtatttttatgttgaattgaatccctcgttgttttttgtcagtcactgtcatagtccaatttgtgcggttggttttgttaccctccctctccagcctttttcttgagtttctctatctctctctcactcctttttaatttttaataatttgtttgtctgttgcgtgaaagaggccctgaaaacaaggtttctgctgtcaagtttggagctttttgctctgtgattggtngtgttctccaaacaatgcttcattcctccaaataatgcttcattcctcatctgggtacttggttctggtttaagatgggggtgggtgaccgttttccggtgggtatgcgtgtacttgccgttgacgacgacgaaacgtgcctctcagttttggagaacctgcttcgcaaatgccagtataatgtcactacaactaatcaggcaattaangcgctagaaatgttgaggaaaaacagaaacaagtttgaccttgntattagcgatgtaaatatgcctgacatggatgggtttaaacttcttgagctagtgggacttgaaatggacctacctgttattatgttgtcangataccgtgataaaagagcgggtgatgagaggtgtatacanggtgcttgtgactacttaaccaaccagntcgaatt

SEQ ID NO: 28805 - DNA, 2884 bp, Glycine max
  Clone ID: TF_GmC360_1
gcgagatattgtgtgcttgcttagagaggttttggttccgcagaagattctgaattctgatgctctagtgcgattccatgggagaggtggtcatcatgagtggagagaagaagtcagttagagtggagggggtggagaaggaagatagtggtggaagtgggagcaaggctggtgaatttaaggggttgatgaggtgggagaagttcttgcccaagatggttttgagggtgctgttggttgaagcagatgattccacaagacaaattattgccgcgcttctcagaaaatgcagctacaaaggttatgtgatggggatctgggttcaatgaaagtctaaggatctaatggctcctttccacttgctttaagagtcttggcagtctggaaactacaggcttacatgatagtgatacaattattttcttacatgatatgattattttcagttgtctatttgccataaagaatttctattattgacctttgttcttgtatgaaacttttaatgtgagaaaatgaagtacttgaaactaatttacacaatattagaacttcaaaataactttgctcatctgctttgagcagtggttgctgttcctgatggcttgaaggcatgggaattactcaagggaagaccgcacaatgttgatctaattctgacagaagtggatttgccatccatatctggctatgcacttctcacattaattatggagcacgagatttgcaaaaacatccctgttataatgatgtcttcccaagattcaattagcacagtatacaaatgcatgttgagaggtgctgctgattatcttgttaagcctattagaaaaaatgaactgaggaacttgtggcaacatgtttggagaagacaatcatcaaccactggtattaatggcctccaagatgagagtgttgcacaacagaaggttgaagccactgcagaaaataatgctgctagtaatcgttcaagtggtgatgctgcttgcattcagagaaatatagaactaattgagaagggaagtgatgcacagagctcttgtaccaagcctgactgtgaagctgagagtgaccctgtcggtaacatgcaggaattttctctgctgaaatgtggggaagcatatccaagtggaacagagacacaacaggttgaaacaagctttcgcttaggccagacattaatgatgcatgactgtcatgctggaggattaaatgtgagtatccgcaaaaatggtgaggcaagcacgactaatgacaaggatactgatacagagcattttgggaatgctagcatcagtggtgaggctcatgacaatccctatgttcaaattaactcttccaaggaagctatggacttgattggagcatttcatactcatccaaactgttccctgaaaaattccacagttaattgcacaggcaactttgaccattctcctcaattggatctttctttgagaagatcttgtcccggaagctttgagaataaactcactgaagaaaggcacaccctgatgcattctaatgcttcagctttcaagcggtatactaccaggcaattgcaaatatcaatgcctgcagtgttaattaacttctctgatcaacaaagagaacagataacaaattgtgagaaaaacatctcacacatcgctactggcagcaactcagatagttcaacacctatgcaaagatgtattgtgtctccaactacagtccaatcaaaagaatctgaacttgcaacctcacaccccccgcaaggacattctctcccaattccagtaaagggtgtaaggttcaatgatctatgcacagcctatggttctgtacttccttcagtgtttcatacacagtcaggtccaccagcaatgccaagtccaaattcagttgtgctccttgaaccaaactttcaagtaaatgcattttatcagtcaaatatgaaagagagtagttcagagcagctttatgaatctcgtggtccaaatggaaacaccacccaaaaccacattgtgtacacacaggagcacaaatcagaacatgcagaagatcgaggacatatctctcctacaactgatcaaagtgtgtcaagtagtttctgcaatggaaatgcaagccatcttaacagcattggttatggaagcaactgtggaagtagcagcaatgttgatcaagttaacactgtctgggcagcttcagagggaaagcataaagacctcacaaataatgcaaactctcatcgatctatccaaagagaagcagctctaaacaaatttcgcttgaaaaggaaagagagatgctatgagaagaaggttcgatacgagagcagaaaaaaactagcagagcagcgtcccagagttaaaggacaatttgttcgtcaagtgcatcctgatcctcttgttgcagaaaaagatggcaaagaatatgatcattcagatttctgactcactggagaggagagcatgaattccttagagtatatagttgcttcaaaattttgttttcctgaatccttaaataccagaagcacttaatctgtatatgctttctaaaaccgtttttcttatttgcccttactgtagatcgtgatatataatatacctgatgtattatatcattgtaattttacagtcttatagggatcttcgtgcatcattatttatttatttatttatttataaggagttgtttacttacaacttacaagttacaaggaccgactgatttatcttgtaagagtttttacatagtaccatagcattatgattttttataataactgccactaccagttaacttttatattttattcaaaatttgcacctttattttcaagggagggggggggggggggggggggggggggggggggggggggggggggggaggg

SEQ ID NO: 28806 - DNA, 685 bp, Glycine max
  Clone ID: TF_GM342L02.C273.o1.fg
gtatcataattattgggagctagagaccctaagagaagaagacgatttagtgattgctgaaagtttagctaatgagctatctaaatggaattatgaggtgcatgtggttgataattttgaaaagataatggaagattttcgccgagtagaaccacaactcgtattattagatatcaatctaccaacacttaatggcttccattggtgccaagaaatgcgaaaagtatctcatgtgcctattatgtttattagttcaagaacagataatatggatcaaattctggctatccaaatgggtggcgatgattttatcgagaaaccatttaacttgtctttaacagtagctaaaattcaggcactattgcgtcgcacttatgatttatcaatagctcgtgatgaaatagctgttaaaggttgtaaactaattgttgatgaggccaagcttagcaaggataatgaacatgttcaactttccttaacagagctacagatattaaaattgttatttcaaaatgaaaataaatatgtaagtcgtacagctttaattgagaagtgttgggagtctgagaattttattgatgataatacgctcgcagtaaatatgacacgattacgaaaaaaattactttctatcggtgtcgatgatttaattgagacaaagaaaaatgtaggatacagggtttga

SEQ ID NO: 28807 - DNA, 2940 bp, Glycine max
  Clone ID: TF_GM459L07rgnA2.C1.o8.ma
atgggtggtggaggtggtggtggtagcaagatgtggcacaaaaaatggtgggagaagatctcagggcagggttgcaaaatccaccaacagtactaccagtatattggctccaagaaagttaagagagcgttgtggaggaagcttttgctgacatgggtagtgggttggttcatagtatctttgcggatcttctgctacatgagctcgcaaggtactgagaagaggaaagaaactcttgcaagcatgtgtgatgaaagggctaggatgctgcaggatcagtttaatgtcagtatgaaccatatccaagccatgtccattctaatctccactttccaccatgctaagagcccctcagccatcgatcagaaaacttttgcaaagtacacagaaagaacagcttttgagagacctcttacaagtggtgttgcgtatgctgtaagggtgctccattctgaaagggaacaatttgaaaagcagcaaggttggactatcaagaggatggatactctagagcagaacccggttcataaggacgattatgccccagaggcactggagccatcccctgttcaggaagaatatgctcctgtcatctttgcacaggatacaattgcacacgtgatttctgttaatgtgctttctggaaaggaagaccgtgaaaatgtgctgcgtgcaagagaatcaggcaaaggggttttaactgcgccctttaggctgctcaaaacaaatcgactaggggttatcctgacctttgctgtttacaagagagatctcccatcaaatacaaccccaaatgaaaggattcaagcaactgacgggtatcttgggggagtctttgatgttgagtcattagtggagaaattacttcagcaacttgctagcaagcaaactgtaattgttcatgtatatgatactacaaatcgtactcatccaattgccatgtatggctcaaatgaatcaggggattttttctatcacgtcagcactcttaactttggagacccttttaggaagcatgagatgcactgcaggttcaagcagaagccaccatggccatgggtggcaataactacttctattggtatccttgttattgcactccttgttggatatattttccatgccactgtgaatcgaattgccaaagtagaagatgattaccgtgagatgatggaacttaaaaaacgagctgaggcggctgatgttgcaaaatcccagtttcttgctactgtttcccatgagatcagaacaccaatgaatggtgttttggggatgttgcatatgcttatggacacagatctagatgtaacccaacaggaatatgtcaggacagcacaggaaagtggaaaagctctggtgtcacttataaatgaggttttggatcaggctaagattgagtttggtaagctagagcttgaggctgtgctcttcgacatacgggcaattttggatgatgtattgtctctattttctgagaagtctcaaggaaaaagagtagagttggcagtttatgtgtcagatcatgttcctgaattacttataggtgatccaggaagatttcgacaaataattaccaatctcatgggtaactcaattaagttcacggacaaaggacatatttttgtcacaatccatcttgttgaggaggttgtccgttcaatagaggttgacaaagaatccaactcagaaaataccttgagtggttcgcccgttgctgatagtcgccggagctgggaaggattcaaggctttcagtcaagagggacctcttggttccttctcatccccctccaatgatcttgtcaatttgattgtatctgttgaagatacaggtgaaggtattcctcttgaatctcagccactcatcttcaccccattcatgcaggtaggttcatccatctcccgaaagcatggaggaacaggcattggcctaagcattagcaaatgtttggttggcctcatgaatggggaaattggatttgtgagcatacccaagattgggtccacattcacttttactgctgtattcaccaatggacaccgtagttcaagtgagtgtaaaattcagcaaatcaacaaccaacctcagtctgcatcttcagaatttgaggggatgactgcattaattattgacccaagatctgttagagcagaagtgtctggatatcacatccaacggcttggcattcatgttgaaatggtttcagatttaaaacaaggtttgtcaaccataagcaatgggaatgtagttgttaatatggtcctgattgagcaggaggtttgggatagagatttaggcttgtcatctcactttgtcaataacacgaggagaattgatcatggggttcctccaaagctgttcattcttgttaattctagtagttcttttaaagctagcgtaaacttgggtgttcataatcctactgtgatcaccaaacctctgagagcaagtatgcttgctgcctcactacaacgagccatgggtgtccaaaacaagggagctcctcatagagagctccaaagtttgtctcttcgccatcttcttcgtggcaggaaaattctaattgtagacgacaatggtgtgaaccgtgcagtagcagctggtgcattgaaaaagtatggagcagatgtggtttgtgttagcagtggaaaagatgccatctcttccttgaagccaccccatcagtttgatgcctgtttcatggatattcaaatgccagaaatggatggggagatggaagatagtgtgaacagagaagtatctatggatgactttgagaatattacaaactggcatgtacccattttagccatgaccgcagatgtgatacaggctacacacgaggaatgcctaaggtgtggcatggatggatatgtttcaaaaccatttgaagctgaacagctgtatagagaagtctcacggtttttccagtcatcttga

SEQ ID NO: 28808 - DNA, 725 bp, Glycine max
  Clone ID: TF_jC-gmXLIB3563P009ca05a1
caacaaccaacctcactctgcatcttcagaattcgaggggatgactgcattaattattgacccaagatctgttagagcaaaagtgtctagatatcacatccaacggcttggcattcatgttgagatggtttcagatttaaaacaaggtttgtcaaccataagcaatgggaatataattattaatatggttttgattgagcaggaggtttgggatagagatttaggcttgtcatctcattttgtcaataacacaaggagaattgatcagggggttcctccaaagctgttcattcttgttaattctagtagttcttttaaagctagtgtaaacttgggtgttcataatcctattgtcatcaccaaacctctgagagcgagtatgcttgctgcctcactacaacgagccatgggtgtccaaagtttgtctcttcgccatcttcttcgtggcaggaaaattctaattgtagatgacaatagtgtgaaccgtgcagtagcagctggtgcattgaaaaagtatggagcagatgtggtttgtgttagtagtggtaaagatgccatctcttccttgaagccaccccatcagtttgatgcctgtttcatggatattcaaatgccagaaatggatggatttgaagctacaaagcgagttatggagatggaagatagtgtgaacagagcagtatctatggatgactttgagaatattacaaactggcatgtaccca

SEQ ID NO: 28809 - DNA, 2155 bp, Glycine max
  Clone ID: TF_GmC103_1
ggctcgagaataatctataatgtatataggttttctttatagattttgttaacttatttggttaatcattttttaatgtctcaggagggatgtttactgatttttctaatttgttcaagccaaggtcctttaagtgccaatgatcagtatactatatatatcccaggaacagtgaaagtactagtttctatgctcccaattttttttttctctccattgattttgtgctttgcttgtctactatgttactgccagttgatgcaagggaacatatggttagtaccaaatgctcaaggttttcctcaagtcatggccctttttcttcggtttcaactgcggcggtctattgccgtatccatctctgaacctggggaaaattctgagccatccaattcaaattctttctttagaggtctgccaggatgcttgtttgtccatgtttttcatagcttggtgtgacaaaaataactgaatttggttattttgtttcgggttttcattgttcatcttctcgtccctgatctgtttggggcccagctctggggagtggggggggaggcgcgctatcgtgctttgctaccccctacaagggttgctttgttcgcttccccggcacgtcctgcatttcagaaagtccattgcgaggattagagtggagctttccactctctttaggcattgcttctaggttcctttagcattgactgtattctgggcttttttttgtctttccttagtttgtttctaaatttctgtctattatgttttgttatatgcagttcatgcaggggaacatatggttagtaccttgtaatcatggttttcctcaaagcatgacacttcttcttcggtttcaattacgaccgtccattaccatagccacctgtgtgtctggagaaggttcagtgtttagggattccaaattcaatgctgagaagtctgcatggtctttcttgtggacaatgtttttgtaaatatagcagttacgaaaaggatgcttcagaaactgcatcgtggtgtaacaagttcagaagccggaattggcctgtgaacgttgcctggactgcaaggacagacgatttgtgggaaagttgtaggcattttcgcgcgtgatatagacggcttcgaagttgccaccaggattcgaaagtttagaagtggaaaccggcctatgattgttgccttgactgcaagtgcagaagaagatttgtgggacagatgcatgcaagttggtattaatggagttatccgtaagccagttttgttgcatggaattgctagtgaactcagaagaatcctgatgcagggaaatattgtcctgtgagaatggaatggagggtgcaagttgtaatactttagcatctcaagtattattttaaatcacaatattggaagaattccaatacaatgctcagtggtctgcaagttcttttagtcgaaaatgatgatgtaaatagagcagtgacccaaagattgcttcagaaactaggttgtgttgtaactcctgttgcttcaggatttgaatgccttactgtcattggacctgcaggatgttctattcaagtcattcttttagatcttcacatgcctgatttagatggctttgaggttgccacgaggattcggaagtttagaagtggtaatcaacctatgattgttgccttgactgcaagtgcagaagaagatttgtgggaaagatgcatgcaagttggtattaatggagttatccgcaagccagttttgttgcatggaattgctagtgaactcagaagaatcctcatgcagggaaataatgtcctttgagaatggaatggagggtgcaagttgtaacacttaagcatctcaagtatttaagttattattttaagtcacattcttggtagaattagaacacagcactctttggctcccccttgctagcaatttttagcttagagatgttattatacaaacgattttcataaggaagaaaaaagatggtatacagattagtttcttttcaatgtcttcacgttgttattgtcttgtatgtagcttcaaatccaatacatgcgtcctcccacgtatccatacaatcagaagaatgaaataaaaaattatctttgtttttttcaaagaaacaagcacccacgcgaagacaaagaaaagagagggg

SEQ ID NO: 28810 - DNA, 4316 bp, Glycine max
  Clone ID: TF_GmC433_1
agttgttcagggtggaagagtccacggcaagtgccacaacggacttagtcaattaaccgctgcatcattaatcacccccaataataattctcctactttgccatattcccaaacaaatgttgagaaaaaagttaaggtaaatgaaacccaatatctcagcatagaacaagaaattaaattcccacctcatctacctaatcacaatacattagaaagtagaaaaaaaaaggacatgtcattgcatcttatatacattaatgaaaaaagaccaacttactcaactatggagaacttgcatcaaaggattcatctccttttgatctatctccacaggaaacaaacactactaatggtggcacgatgagagaagaggatccgaggttcctctcagcgcaaatataaccaatgtttctcaaccttgacacataaaactaacaggctgaagtgtagtaactaaatttcttgcagctgacatgatcactccgatcccaaactgctctcatctcatcaagtatcttcttcttctttcggttttctttcttctttttcaatgtaagtactagtagtaaatccaaccaacccacttaccccaagaaaaaaagaaaaagaaaaagtagcagaaaaacaataaaaacaaaacctaagcctaaagggaccaaaagatgaccttaattaaacgagggagagagactttcttcttcttcatatgtagctttttgaaaacgatgcttcatctttttctctagaacgccgtgtttttttttttttggtgtgagcgatttaaagtaacgatgcatcgtttctggttctggatgttcatgttcgagcaaagatcttttgtgtgtgtgcagttactgctttgacgttttggattttcagtaagtaaaatccagttagcttacttagggtttggaaagtcacttcatgtagggattagtatttgcactatcctggttagttttgaataatttctaaggttggatttgaagtgaatggttttagaaagggatactctgctagagtgggatatatggtcagggcatttgtttgtcttactttatttcttgctattttctttttgactagtgattttggttctatgtgctcattttctttatgacgggttaatcatggcatctgagctcacttctcgccttaatcacatcacttagttgcagatttttagtttttttctttccagtctttttttactcaccctaattaaacttaacctaattttatattattcccacttttattttttgtatttatttcttttaatattatttgtcttttatggttttcattatagtcgttttcttattatctcctgtggatatattaattataattctttgatgtattttagaataaggccatattatacgttgactatgttaatgttcgggataagatcttttgtgtagagttattttgtgatttgacgatttagattttcacgttgtccagataagtgttgatagcagacagcaaagagctgaaagaactgaatcagcgcttacgagatgggaagaagattgctggtggggagcatggtttatgcgaggaagtgaaatgtaatggaattgctgaagaagttaaggttgaacagggggggactgtggagtcctcctctgtccagcagcatataccacagcctcaaggggcaataatttgttgggagaggtttttgcatattagatcccttaaggtcttgcttgtggagattgatgactctacccgtcatgttgtcactgcactgcttcgcaattgtagttatgaagttattgaagcagcaaacggattgcaagcttggaagatattggaggatttaaccaatcatattgatcttgttttaactgaggtggcaatgcctggcttatcaggcattggacttctatacaagattatgggccacaaaacccgcaaaaatattccagtagttatgatgtcatctcatgattctatgggtttagtctttaagtgtttgtcaaagggtgctgttgactttctagttaaacccatacggaagaatgagcttaaaaacctgtggcagcatgtttggagaagatgtcacagttctagtgggagtggcagtgaaagtggcacacaaacccagaagtctataaaatcaaagagtcttgagaagtctgataataattctggaagcaatgacgaagatgataatgaaagtataggcctgaataatgtggatggaagtgacaatggtagtggcactcagagctcatggaccaaacgtgctgtagaagttgatagtcataaaccagtttcccagtgggatcaaatagctgagtgccctgacagtacctgtgctcaagttgttcactccaatgctgaaatgggtgggaacaaggtggttcctctagctgcaaaggattgtgcagaacagaatgaacaacttgtcaaaactgcaggttctcaacatagcaatgcacctgatgtcggcccctctaaattcagtgagcaaattaatagaggacaactggaccttaattgtgaaaatcaatctagcaagctaaggtgcaaaggtttatcactgtctgatgccattactagtacttgtgattctcagatgcatagtggagaatttgaagccctaaataaaaaacccaagtcctcagatattgaaaataaaggtactaataatgatgaagaattgccatctcttgagctcagtttaaagaggcttagaggagttgaagatgctgatattacaattcaggatgaccggaatgttttaagacgttctgatcagtctgctttctcaaggtacaatgcagcctctaacactaagaaatctcccactggatgtgttggaagcaattctccttataataatagcttagaagttacaaagaaagattcatctcgtgatattcaatctcattcttgcggcaatcctcctaaccaaaactcaaatggtgctagcaataacattgatatgggttccactactaataatgcttatgctaaatctgcagttatgagtgagccagcaggggcatcaacaacaaaatgtttgtaccaaacatctgctttccagcctgtaaaaaacagccttgtttgtacctctcaacaagttgtcttaaataatactgaagatatgtcggcaacaattctggcaccacctaaactagacagacataaagattctgcagctctggacttccatctccattgtgaaaaccataactgtattgctgacaacatgaagcatcagctgccacctgatcatgatgctgaatctataaagaaaatggctactgctgctccacattgtggatcatcaaacgtggaagaagtgctagttgaaggtaatgttggaaaccacagtatcaatagaagtgtttcaggcagcaacaatggaagcaatggacaaaatgggagcagcacagcagttaatgctggagggacaaacacggaaagcaacaatggactcactgggaatagtggcagtggtgatgctagtggaagtggaagtgccaacagagtagatcaaaacaagacttctcaaagggaagtggccttaactaaatttcgccaaaagagaaaagagagaagggagaggtgctttcataaaaaggttcgatatcagagcagaaagagattagctgaacaacgacctcgatttcgtggacaatttgtgcgacagacctctaacgaaaatgcaagtgaggcaacaacagatagctgattcagagcattggccacaatggcataatgatggggatatgcgaaaaaaggttgaggagtcttcatgtagaatttgggaattattctgtgtgttgtgttaatgtataaagaccctggttattccaacttgttcatttggaacctgaatcaatttatgtggaaagagattgttatgccgattgatgctcggataacttactgtaatttaagttactttttcctcgatcttgtgcttggaatcaaatgctttttcacattatcgtcttgttaaggtataatgactctggttattccaacttgttcatttgaaacctgaatcaatttatgtggtgagagattgttatatgctgattgatgctcggatatgggccttcacacacaatgtggctaaaacagatggagcatgtgggtttgaccaccaccaccattgttgttgttgttgttattattattgctccactcaaacctgttttgtccttcacctttcacttcttttgagccaatattattattactatccccttccactcgcaacccttgtagcggtgccaagccatggaaagtattgtcaccttgatcatgatcacgacccttcaaccaac

SEQ ID NO: 28811 - DNA, 684 bp, Glycine max
  Clone ID: TF_GmC1886_2
gaagaaagggtgctagttcatgtgaggaaaattgggatatgcttgcatggacttggggaaaccatctaaatagaggctacacattttgcagatttgaagcaaccagccgaattcggatgatggagagcaaggcaaatgaggagatgaataatgggaatgagtggcatgtgcctatactggccatgacagctgatgtgatccatgctacatacgacaagtgcatgaaatgtggcatggatggatatgtctcaaagccatttgaggaagagaatctgtatcaggaagttgcaaagtttttcaaatcaaaaaccatgtcagattcatgacaaatgtgcttccttacttggcaaccaactagatgattggatttggagacaacacattttagtttgatcactgctagcactttcatgtcacatgtaacttgttacttttgctttcttgcatagagtaacacttgtttttgcaacatatttgagttgagttcgttgagggatcattactattactaatcggctgcagtttggcattattagagtaaaatgtataccacgccacaccccccaattgtgtacagattctgggtaagggatgagtgaaattatgtaaattcaatgtttttccccatctcgttacttccccatcagagaaagtttttaatttttatagcaatagctttttatg

SEQ ID NO: 28812 - DNA, 361 bp, Glycine max
  unsure (1)..(361): unsure at all n locations
  Clone ID: TF_LIB3109-012-Q1-K1-E5
gatgttgaagtacatagcacgtgataaagagtttcgcagaatccctgttataatgatgcccgcacaagatgaggtatccattgttgttaagtgcttgagacttggagcagcagactatctagtaaagcctttacgcactaatgaactattaaatttgtggacgcacatgtggagacggaggcgcatgcttggacttgtagagaagaacatcttgaattacgattttgatctggtagtatctgaccctagtgatgccaacacanacagtaccaccttgttctctgatgacacagatgacaagtccaagagaagcactaatccagaggcaggaatatcagtccaacaggaacaagagtctact

SEQ ID NO: 28813 - DNA, 365 bp, Glycine max
  Clone ID: TF_LIB3242-581-P1-J1-C12
caagaagtaccatatacctatattggccatgacagctgatgtgattcacgcaacatgggatgagtgcgtgaaatgtgggatggacggatatgtctcaaagccttttgaggaagagaatctgtatcaagcagttgcaaagtttttcaaccccaagcctacctcaatacaacaaaatgccagaactggaaaagcaacttaatgttaattgcaaagtttttcactctctcactactgccatttttcctagttggctgctaaatggtaatttcaatgtgcttttttcaatcagttggttttcaagatatctgaggatatgcatgcaatgcaacttgatacacacaccacgcatatgcagtgatcatttt

SEQ ID NO: 28814 - DNA, 1541 bp, Glycine max
  unsure (1)..(1541): unsure at all n locations
  Clone ID: TF_GmC3283_9
attttacaaaatcaatgatgtgccctgatatatggtgtggcaagctatacaccgaatttgatttatgagccacttttttcttgtcaaattcgaatagcatacacaattacacaggaagttgcccattcttttccccacgcgtccgatcatggccgacaataattctactactgatcattatgatatgggcatggaagatgctgaactgtctttggctgaggttaaagaaacttgaaaggcttctgagagaacaccgccttcaaggcaactcatacacgctaattgttggggactttcccaagttcggcaagatgcgaaatgaagccttatccanacccatgaatctcttctctcatgacatagtaaagcgagctgttatcctttatacccatcactgtctacaagcatgccgttggtacttttatctaagcatgagctctgttcccaatatctgaaaaattaatgagatatgcattttttttatcgctcatacctgacaatccattaggatcaagtcatatggacggcaagtcgagaatctctgtttgagatgatcttgtgtttctttccttctggagtgattctcttatacagtcttcagcagtgaacatgcaattgagagcatctactgcctgttgtccatcacctacagctacaacatctgctcccattttttcaagcattatggtagcaaccctttgaagtactggtgtatcttctgcaagcaaaatctttaggccctcaagagatttctttccatctactactgctttacttgagctggtgaccctatttgtgtccccacattcagaatcttcatcctgatcttctgttgaaatggatgatgattctttggtggatagtgatttaggttggttgtcttcagtggcagaactggagctgggactagaagattcttctttcctcaaattatgttcttccaaacattcattttcatttgttaatctaactaggcagttattcatatggtgtggtgatgatggatgagagttttctagcttctcaactggtttatctccattagcactaacgggattagaaccacttatttctgatatgtcagaatcatcagagctagcaccatcaaaatgagtggaatcaatctcaagaaactcatgcaaatcaccctctttcattgtggtccttggagctatcatgtttttcttttgtagctcaagatttctctcatttatgacagcttccaagatatgaatcatttttgctttgtaaaggggtttgttaaccataagtatatgccctttcctacggagctccatttttatggtattggaagtgtcatggtttaacatccatacaaactttgctctaccaaagtacctgtggaggaagttaaactgttccttccatatatctgtactcaagtcaagtagtccaatgtcaacaacaatgacaaaacccgggttcctcatatctcttatgttgagtagtttagacttcaattcctcttttgctggatagtgtgcctcaaagtcagtattattgaacctgaacttcctgca

SEQ ID NO: 28815 - DNA, 1128 bp, Glycine max
  Clone ID: TF_GmC46877_1
tacggctgccagaagacgacagaaggggaccacagttttttctctcatgcacctactaatagcaaaaaaaaaagctaagagggataattacattccacctctccttcccattctcactctctctctctctttctatttctctctccgtgcgtgaccttgaattactgatattttatattttaaccagctatatatattacaagaaaacatagatagtgtgtgttcatcagcttattctcaaacctgatatggagtttgtggataccagaaaactacaattacaacatcaacaacaactgcaacaacagccgcaacattttcatgtgttggcagtggacgacagtgtcatagataggaagctattggagaggctccttagaggttcttcatgcaaagttacctgtgtggactctggagacaaggctttgaaatatcttgggctaatagatgagcttgatgatacttcttcaacctctttagaatcagaatcttctcatcctccacctcaaccattacaacgagagggaatcaaagtgaatttgatcatgacagactattgcatgcctgggatgagtggctatgatttactcaaacgagtcaagggatcttcttggaaagatgttccagtcgtgattatgtcatcagaaaatgtaccttccagaatcagcatgtgcttagaagaaggggcagaagagtttctattgaagcctcttcagttatcggatttggataagcttcagccgtactttctgaaatccgttgataattcctgtgaaaaagaatctgctaacagttccatagattcagacaatgacaatgtcatcaacaacaacagcaataacagtaacagtaacaataacaacaacaatagcatcagcaaaaggaaggccatgtctcctgagcctcatcgggaggagagatcaagacccaaaatgaaagagttagcggtggtgtaaaaaaaaacaacactatagagagaggttgatggatgcatgcataggtattatatattatagtttatgactatgatcctaattatggatatctcctctactctaagagcttaattaatgaattcccagtgcgtactaatgttgttcacagttaccatttaccttcaaaaaaaaa

SEQ ID NO: 28816 - DNA, 441 bp, Glycine max
  Clone ID: TF_LIB3242-407-P1-J1-C7
gatgattcgacacgccatgttgtgcgtgctctgttacggaattgtagttatgaagtcactgctgtttccaatggtcttcaagcgtggaaaggcgctggaagatccagaaaatggcattgatcttgtcctaacagaggtagctatgcctattttgtctggaataggtcttttgtgcaagatcatgagccacaaaactctgaagaatattcctgtgattatgatgtcatctcatgattctatgggtatagtctttaagtgtttgtcaaaaggcgcagttgattttttagtgaaaccaattcggaggaatgaacttaaaaacctctggcagcacgtttggagaagatgccacagtaaaaagtgatctgaaatgctttctccaaagtcagatcccgcaaacccaaattgttattgcaaccctctttttggatcgtgagacagctc

SEQ ID NO: 28817 - DNA, 2568 bp, Glycine max
  Clone ID: TF_GmC413_1
ctcttgggttctgatggttgttcttggatatgggttttggcagtgacggtggtggagagtggaagcagggctctgcagtatctggggttggatggagaaaaaagttccattggtcttgatgtgagcaaaatgcaaacttggcttttgaattgttaaaggcacttctttttagtgttttaaacaataggtcttacttggaagtgatgcttatgttgttattttgatgactgtttcggcagagtgtgaaggttaatttgataatgacggattattccatgcccgggatgacaggatatgaattgctcaagaagataaaggtgagaaatgagacatggtcgttcttgttttaatttcttgcgaagatgaatgtattagaagagagaattgttaatgttttcctgatccacggggtgggcccccaactactccttgatttttctatatctgcaggagtcatctgtttttagagaggttccagtggtggttatgtcgtctgagaatatcttgaccagaattgataggtaagctcttgattaagataagatgctgtttggttttaggagatataagcctttatttttgtttgaattctttgatataattgcttgatttatgtgatgatatttactagatttggatgatgtttgttgattttacctatgctaatggtttggacatgattcacatctagacttgaattgcattagtgaaagacatgatgaacatacttttggatatgcttagatcacctagggtttggacaggattagggcacccagatcacatggtgtttagccatgtgaaaaggggatggagagaggagacaatgatatctgaggaaattattaaaagagtcaagggaatattatggtgaataatttggattttgttacaggtcaatgatattctgtattccgtgtagttgatctcacctaatggaataagattgttgatgttgcattagatccccatatactttctcattctaggttggttctggtaaaattcatctgttgagacttaattcattaataatctcatcatgttagtcacatggagtgttttgggaacatgttgcttccaacttgcacttgtggctacaatgattgaagcatatgaagaaatccagattcccacttgcctaacggtcaactgttgtaaaggaccctgttggcatggaagcaattattgtcactataattgccacataatcatacatcttatcaatacttctatgcatctatacatgaaattattagccaacaccattaggctatgctcaccctcagtgtttcaattgattatgaatatagtttgttaataattacttcaacatttgaacaaagttcataccatattctttatctttacctctcaaatttgataattattttgacttgtagacccaattattcatttttttttttttttttacttttactgcttctttcattttataccattcttcttatttctttttaccaatcactacttattcaatccaaggatggcttccgccggcgatcttttcaggcatggtttgccggaagttggtggtgccgggaagttacacgtgcttgctgttgatgacagccacgtggaccgcaaggtgatcgagcggttgctcaaaatctcgtcttgcaaagtgacggtggtggaaagtggtagcagggctctacagtatctggggttggatggagatcttgcaaagtgtcggtggtggagagtggaagcagggctcgcagtatctgaggtttcaatgacgaaaaagttccattgggcttgatagtgtgaaggttaatttgataatgacggattttccatgcccgggatgacaggatatgaattgctcaagaagataaaggagtcatctgtttttagagaggttccagtggtggttatgtcgtctgagaatatcttgaccagaattgatagttgcttggaggaaggagcagaggagtttctgttgaaacctgtcaagttgtcagatgtaaaacgcgtaacagatttcatcatgcgaggtgaagggatgaaaggagtaaaaagatctaaaaaaagaagccgatcagatgattgcattccatctctatcaactgcattctcatcagtttctcatccatgtgatctatcatcacctccatcaccatgtgtatcgcaatcgaagaaatctagattgagcatatagattgagcagcaatgtttatgtctccatttttgcctaaccattgttcatattcaaaagcctctgatgtaatttgcgtttttacactaaacattgctgacaacgactactagaattaggaatgaggaagaggatgacagagtcattttgttctttagttcggtcgcttacatatttttttgctgattttgctgctgtacagagaaagttcattaaattaatgaaaccctctattttgaggggtcttcaaatttttgtttcttctgtctctttatatttcactaacaacattctggaatatgttcaaattttggaccctttacttagcctatgtttggatgggaggttgaataaagaaggtagaacctgaagttgatttttaagtg

SEQ ID NO: 28818 - DNA, 2773 bp, Glycine max
  Clone ID: TF_GmC3451_1
attttacggctgcgagaagacgacagaagggggccacgtcatgacgagagtagcgatgatctagtgaggagattttggtgggaagatattttcgacgattttcgcggttgtgggcgaaagctggctgccagcgatagtgaatcagaatcgtaagctcgacaaagaagcaagcaaggttattattctttgtggttgcggaacgaagcatgctgttgctgttcgagaatggatgagttgaacggcgccatgacgacggagaatagcaatgcggaggtggttcgatgggagaggtttctgccgcggatggtgctcagagtgctgcttgtagaagctgatcattccacgcgccaaatcatcgccgcgcttcttcgcaaatgcagttacacagttattgcggttccggatggattaaaggcatgggaaacgttgaagaagaaggcacctgagctagatctcatattaacagaagtggagctaccagcaatatctggatttgcacttctttctttgatcatggagcatgacatttgtaaaaacattccagtcataatgatgtcttctcatgattcggttagcatggcattgaaatgcatgttaaaaggggcagttgattttcttataaaacccattcggaagaatgagcttaggaacttgtggcaacatgtatggagaaggcacgctattagcactcctactcaaaatacaatcttttcaccgaaaaaacttaaaactgcctcagaagacaattctgcaagcaataaatctagtggttctgtggcttcctcaaagaaaaacaacgaatgcagcgagagattaagtgaggctcaaagcacttgtacatcaccaattttcgaagctgagagtacatacgtggaaaatatgcaggatgtgccccagtatgtacattgccaagttatgcaaactcttgtgcagagcacttgtacatcccctatttttgaagccaagagtacatatgtggaaaatatgcaggatgtgcccccgctgaaaagttctaaactgaacaaaattgatatggtgaagcatgaaaagtttgcccaatttgaaagggaatcagctgagcataatgatgaaacagaagataaatcagttacaattgtatcagatgctgcaaggtgcgacaaaacttctgaattaacagagttaaggccagaacaagactgtggtgttgctgaacctgaaactgaaaacgaggatgaaatcttaaaatctgagttagacggagacaattctcatgttagtatgatgcaaggatgcagtgctgagcgggtgaaaccttctaaaggagctattgacttgattgccacagttggaaatcttccaaagcaccttgatgaaaactgtagtctcaatggtggtaatacaaccaagtttgattgtgaaacgcaattggaactttccttaagaagtgattttcctggcagctcaggtaatcaagcaagtgaagcaactgaggaatctcaaagattgaaccattcaaatacttctgccttttcttggtatagtaatagtaaattgttgcagcctcatttttcaacaccatcgattacatttcctgaagtaaacaacctcagttgggattctcatgaatcccataaattatctggaattacttctggaaattgtcagtatggtggctcaaatcagaacctggagaatatgatcggtacagtcatttgtcagtatggacaagttacaccaaaattatcaaacagtcaatgtggactcttacctgtttctggggttatctccaaccttaagtctgagggacatggtaatgttttcacttctttgttctatgcacaatctggtattcaccctatgtcgagtccaaaacctgtctgccagaatgagagttctccctttcccacaagtacctccacccagtcctatcctgaaagccacaactcagatcaactacatgactgctccaatgatgctacttgtcttaatcaaaatgtaaaggataatactgattcagatcacgcaaggcatgattctcctgttgctgatcagagtgctggtaatagtttatgccatgatgctgcaaatcatgtcaatagtagtgcatatggaagcatggacagtggaaatgatggaaatgctacttcagctatagtatccaagaacgccccagatggtttcagtgatagtggttgtcataattatgatggatttagagtgacagatcctcatcgctccagtcaaagagaagcagtgctagtgaagtttcgactgaagcggaaagagagatgcttcgagaaaaaggttcgatatcaaagccggaaaagactggcagagcagcggcctcgggtgaaggggcagtttgtacgtcaacatgatcatcctgtcgctgaggctggtggtgattcatgaactttgttctttttaggtttcgtgtagtattaaattacagctgactgtaacactgattgtgtcaacaaggattagctgtagggtggtgtctgtgtatgtgttgttggaatctgtttatccattaggcaaaagaagagtaggccagtagggagatttatatttggactgccacttacaaatttaggattgcaattatttagtgggtttggtttggattttacctgtgtatatgttttcttggttgaatactaatatgggtctgtaaaaaatcccctctagaacctctggttttgcaattgagtgatctttctttgcattcgacagaaaagaaaaaaaaaaaaaaagtaaaaaaaagaaaggattcgatatgacagtttcg

SEQ ID NO: 28819 - DNA, 1572 bp, Glycine max
  Clone ID: TF_GmC6773_1
tcacaatttcccaaacaagtcctccctcaacaaaacatagccaaaatccttaaccgaagttaagaaggtttctgtcataaattctttgacgttctgtttcggtgacaatcatgtgtaaagagttctaataagtgaacaaaacttgccattctcccaaaaattatatgcatttgtattgacatattaagcgcttttggtgatataaaactattggtaattcatcaaattttattaaaacatgacatcatcttctccacctagcaataatgtgtgcttctatttggtaatgagcgcttcttctatgcatgtttcttaacagctcattcctactaattcggctggagtggaggtggcataatcgcttgtcatggatttgcaaagatctctcagatttggatcctccgaatctatcgcctttattattttctttaaccctttacttttcatctcaccatttattatttattacgcgtccttccttctctctccctttcccatctaaataaaacccaccattttccacttccatctacttgtgttctgttgtgtactttctattctcataagataactaactcactttgtgtgatagagttctcattctcatggctattaccggcgatattttccggcagagcataacggaaatgcttgcggagtccccttccggtgcgccagaacttcacgttctcgccgtcgatgacagcctcgttgatcgcaaggtgatcgaacggttgctgaagatttcttcctgcaaagtgacggttgtggagagtggaacgcgcgctcttcagtatcttgggttggagggagagaacggttctcttgggtttgatagtgttaaggttaatctcataatgacggattattccatgccggggatgacaggatatgaattactcaagaaaatcaaggagtcttctgtgtttagagagattccggtggtgatcatgtcatcggagaatgttttgacccgaattgataggtgcctggaggaaggagcagaggattttctgttgaagccagtcaaattgtctgatgtaagacgcttaaaagatttcatcatgaaagggaaagtgaaggaaggggaaaatatctaacaaaagaatgaggtcaattgattgcagtccacctctaactgcaacatgctcaccagtgtctcttccatgcgatcctccatcatcatcctcatcatcattactctcaccattatcctcaaagaaggctagattgtgatcagagattgagtagtagtagtgtgctatgtctccaattttgcctacactagtgttcaaatcaaagcatgtagtgtattttgcatttgtttaccaatctctataccttaggaacgagaaagctaatgtcagagtcactaattttttggcctcttgtttgtctactgatcttgcttatgtacagaggaaatttatcaaaatttataaaatagggcgttattttgaccaaaaaaaaaataaatataaaaaatattttgcggccgctctataggatccaagcttacttacgcttgcattctacttcataactcttctatagttgcacctaaattcaatt

SEQ ID NO: 28820 - DNA, 319 bp, Glycine max
  Clone ID: TF_GmC3283_34
gtcaagctatgatttcttttatgtttatataataatatgcggtaaacttctatacatttctagttgcctgagccaaccctttgttagtttgatgggccttatgagagagaagtcaagatgttcttttagtgagtgaaagaatggtggacaccatcattttgaagtcaattggctttgttaagtaagcatccatgcccacctccaggcatttggcttcatcacatgacattgcatgtgctgtaagagcaacaatgggaatgtgcctgcttgttcccacttctgatttcctgattgcttttgttgcctccggacgcgtggg

SEQ ID NO: 28821 - DNA, 367 bp, Glycine max
  Clone ID: TF_LIB3242-550-P1-J1-E10
gtgaataatggagtggaagccgttcgtgcagtgcagcgccatacttatgatgtcattttgatggatgtttacatgccagttatgaatggtcttcaaacaacaaaactgattcggtcttatgaggaaacaggcaattgggaagctgcaagagaagctggaattgaacaatgttcaccagcttcaaatgaatgttctgtaccacttaaaaaccggatccacatcattgcgatgacagcaaacacaatgtcagagagtgctgacgaatgttatgcaaatggtatggactcatttgtgtcaaaacctgtgacattccaaaaactgaaagattgtctagaacagtacctgaggtgaggtgaatcaatccatg

SEQ ID NO: 28822 - DNA, 2622 bp, Glycine max
  Clone ID: TF_GmC597_2
ttaataatagaacacaagtagttaattcaataacaacgttttcaaaaattcacttctccttcaacgaggaaagcagcgtttcctgtttttgagttgtcgcattttgtgacggcttaaaggcatgggagacattgaagaacaaaccatctgacatagatctcatattaacagaagtggatttgccatcaatatctggattctcacttcttactttaatcatggagcatgacatttgcaaaaacattcccgtcataatgatgtcttctcatgattccgttagcatggtactcaaatgcatgttaaaaggtgcagctgattttcttataaaacctgttcgcaggaatgagctaagaaacttgtggcagcatgtatggagaaggcacgccataagcaggcctcctcaaaattttacactaccagagattgaaattggttttgctgcagaaaaccatgctgcaagcaatgactctagtggttctgtggcttctacagcaaaaaatggtgaatgcagcgagaaaacaagtgaggctcaagatatatcgcagctgaagaggtcttcaaatttgagcaatattgacacggtgaagcatgaaaattctaccaaatgtgaaagggaatcagataagcataatgatgaagctggagagaaatcactgtttgtatcagaagattcaaggtgcaacaaaacttttaaaccaacaggtttaaggctaggtcaaggctatgaatgctgtgaaacgagaaatcaagatgtagttctaaaaatagagttgatcaaatccaatcctgaaattaatacagatattcatggatgcagtgatgaactggtagatccttatactggggccattgacttgattgctacattcaagaatcttccaaagagcactgatgaaaaatgtagtttcagtagtggtaacactgccaagtttgattttgatacacaattggaactttctttaagaagaagagattttcctggaagctcatgtaaagctgcatctgaggaaaggcaattattgaaccattcaaatgcttctgccttttctaggtatagtagtagtaagttgttgcagcccctttttccaacaccatcaactatctctgctaaattaacaaattccagtctgagttctcatgaatcccataaattctcagaaaatgcatctacttctcatcaatatggtggaaaaaatcaaaatcaggagaaaattatcactccagtcattggtcagtctggacaagttgatccaaaattaccaaacagtcaacttggatattttcctgctacaggggttacttctgatcacaagtctacaggaaatggaaatgtcttcccttctatgctttatgcagaatcaggtgtccatcccatatggactccaaaatcagtgtgccagaaagaaagttctccatttcccacaatcacttcatcccagtccaatcctcaaagtcacaactcagaatgtcatctctggtcggaagattcaacccatgcttctgataaaaatttaaatgatcaaattaatttggattgtgagacacatgactctcctgatgctagtcagagtgctggtactagttttttccacgacacagcaaatcataatagtagcggtgtatacagaagcatgggctgcagaagtgatggaaatgctacttcagctaaggtagccaaggagagccatggaagttttattgatagtggtcactgcagttatgatggattcatagggacagattctcatcgcacaagccaccgagaagcagctctgacaaagtttcgactgaagcggaaagacagatgctatgagaaaaaggtgcgatatcaaagccggaagagattggcagagcagcgcccccgggtgaaagggcagtttgttcgccaagtacaagatgatcatccagtagcagatgtgggtggtggttcctgaaattgttttgtttcaagttaccttcatcattgaattacagtctgacttccaaatctgatttgcctttctcgacaaggattaactgtagggtctagtttgtctggtgaaattatgtttcctcttagcgttgttagtattttcttctggcttgttatattggctgtttcttagaatgtaggattgtaagtattttgtaggtttgttttgaagttttgattttacctcgtgtatatgctttcttgattgaatactaatatagggctactatcgttatataggcagtatgcttgtgtcttgaaagattgaatttttatttttttttatctcggcaagcatctctggtttgcaagcaaaactgatttgcctctcttgccaaggattacctggaggatatagtttgtctggccaaattatgtttaataaaggcattgttagcattttcatgtggtttgtacaccgcgctgtctcttagaatgtaggattgtatttgtcactaggattgatttgaagttttggttcaacccagagaatttgttttcttgataaaatactaatatgggggtaatcgccgcatagacagtatgggtatgtcttccaagcttcaaaaaccatttatataaaaaaaaaaaaatcacaacaagcaaaaaaaaaaaaaaagggcgacggccggccaccggctagtagctcg

SEQ ID NO: 28823 - DNA, 481 bp, Glycine max
  Clone ID: TF_GmC353_2
cccacgcgtccgcccacgcgtccgcaagcagtcaaaatgagtatgtacatataaaatttgattttcagattactgagagttctcagtcagacaaagcaatttcaacaatacattatagtagtaggaggcagtactacaacaatgaacctaaggagggcctgagcttcagcatgtgcaaaaagttggtacagatgatgcaaggtaatatatggatatcaccgaactcccttggtttggtgcaaggcatgacacttcttctcaagtttcagataggaccatcacttggaaaatccatatttgcacctaaagattattcaagctcacagttcagaggccttaaggttttgttagccgaggatgatggtgtaaacaggaccgtgaccaagaagctacttgagaagcttggttgtcaagtaattgctgtttcatcggggtttgagtgcctgagtgctataagtgggggctggaactcattcagaat

SEQ ID NO: 28824 - DNA, 552 bp, Glycine max
  Clone ID: TF_GmC62872_1
gggcttaccgttcgtccggctgatgatgatgatgtaaacaggactgtgaccaagaagctgcttgagaaactggggtgtcaagtaactgctgtttcatcaggattcgaatgtcttggtgctataagtggctctggtaactcattcaaaattattctgttggatcttcacatgcctgaaatggatggttttgaagttgcaagaaggattcggaaattccaaagccataattggcccttgatcatagcttttactgcaagtgcagaagaacacatcaaggagagatgtctacaggtgggaatgaatggattgattcgaaaacctatcctccttcgtgagatagcagatgaacttggaacagtcttgcaacgtgcaggtgaaaaattgtgacaacaattttaaatatctcaaattttttaggttcctcaaaattcattactttgacattttgaaagagaacctgaaattgataacaaactaaatatactagatactaggtacattttgctaaccatttttctgtatgatctttttaccgtacaatgaattatggat

SEQ ID NO: 28825 - DNA, 446 bp, Glycine max
  Clone ID: TF_6667475
gccaccaagggctcattttcaccaatggcgcgcaagccgtcgaggtgtttacccgcgagcgcccgcaattggtgttgatggacgcccttatgccggtgatggacggttttgaagcggcgcggcggatcaaacagttggcgggtgaggcgctggtgccgatcatcttcctcacctcgctgcgcgaaagcgaagccctggcccaatgcctggatgccggtggcgatgatttcctgcccaaaccctacaacccgctgatcctggccgccaagatcaatgccatggaccgtctgcggcgcctgcaggccacggtgctgcgccagcgcgaccagatcgcccggcaccacgattacctgttgcatgagcaacgcgcggccaaggcggtgttcgacaaggtagcgcattcgggttgcatcaatgccgcgccgaacattcgttacctgcaatcg

SEQ ID NO: 28826 - DNA, 2129 bp, Glycine max
  Clone ID: TF_GmC11138_2
cccgcgtccggaaaaaaattgttttcggcggagtaacaaaagaaaagaaaagaaaaacggattaggagaggaaaaaaaaaaaaaagcttgtgcgagagaaatgttagaaccttgtttctgatttttttttcctcttcgattttgatttttttttctgttgtagtttttgttgttgttgctctctctattttcgaaacgagattggagctctgactttgtggtttttgaattttattttttggattggtttttccaaattgctgcatcgagcttgcaaatggaggtttggttcctgtcagtgaagctctgaagtgcatctggtgttatataaggtggataaaaattactgaaaaaagaaagaaagacaaagaagatgatattttcaattatagtttcggagtttgtgttttatcttgccttatgatataagcctctaactgttcgaatttctgaggtctgatgatatcgtccggtaaagtaatcttgtgaagagtttctcatgtatgcatgtctaatcagatttcgtccgcagtttctgtaaggatggaacaggttgtcgttccatttctttaaatttgctatgaaatttttgtttttgagattttcatttctgtcggggggctggagtttggagtgtggttgatataggctggtccgatgaacaataatgttgggaaagggaaaaaaggtttggcagaacaaaatcatatgttttttaacaaaaagagtctcaataatggagtagttaatggaggggtaggctctggatcatcaactgaagatgacacaagatttaataaggtggttgaagatggaaacaatggattgaggggtctgattcaaatccatgggagcttgcagatttcacaacaaccacctcaagagccagccgtatgctgggagagatttctcccattaagatcgataaaagttttgctggtggaagatgatgattcgacacgccatgttgtgcgtgctctgttacagaattgtagttacaaagtcactgccgtttccaatggccttcaagcgtggaaagtcctggaagatccagaaaatggcattgatcttgtcctaacagaggtagctatgcctattttgtctggaataggtcttttgtgcaagatcatgagccacaaaactctgaagaatattcctgtgattatgatgtcatctcatgattctatgggtatagtctttaagtgtttgtcaaaaggtgcagttgattttttagtgaaacctattcggaggaatgaacttaaaaacctctggcagcacgtttggagaagatgccacagttctagtggtagtgggagtgaaagtgcgaccctcaccagaaaatttgcaaagtcaagaagtaatgatgcatatgaaaacaatagtgacagcagtgatgagaatgactatggaagcagaggcttgagcattcgtgatggaagtgacaatggaagtggcactcagagttcatggactaaatgtctagctcaagttggcagtcctcatccagtttcacctcataaacagttggttgatgcccctgatagcacatgtgcccaagtgatgcaaacaaagactgaaaaagttagtagtagatgggtgcatgcgacggaaaaagagtgccatgaacttattgatcttgatgatgttgcaagggttaaggacttggctatgggaatatctttgaatatgcaactagagcatccactcgaggaactgtctagcaatccaattgtgggtaaaggggcaaataagatgtctgatgtagatgatatgcagatcattaagagaaagagcaatgtctgtgaaaaaggacaattggaatacaatggtgataaaaccgggacacaggaaaatcaggctatgaatgttattgatgttactgatagcaacagtccacaggctgaaagcagagacttgaacactccaaatgggtttctggtttttcacaatcaaaagcaaactgttgccccaaagagcatccatcccttgaactaactctgaaaaggctgggagaagtaggagatggctaaaaatgtcactggtgaaaaatgcaatgtcttgagacatttaaatcagtcagcattctcaaaatataatactgtttctgcttaaccagctcaaactggaaa

SEQ ID NO: 28827 - DNA, 871 bp, Glycine max
  Clone ID: TF_GmC167244_1
tacggagaagacgacagaaggggacccacgttaaggaatcctcttttcttttcctctttctttctttctcgtaatctttcatttttttccctcttcccttttttcgatggacacggacagcttcgtttccttcgatcatgtttcgccggaggattcccacgaggttcatgtcttggccgttgatgacagcctcgtcgatcgaaaggtcattgaacgcttgcttaaaatctcagcttgtaaagttactgctgtggatagtggaatcagagcactgcagtttctggggctggacgagcagagaaggacctctgaatctgatgggtttgtcccggatttgaaggtggatctaattatcactgactactgcatgcccgaaatgaccggttacgagttgctcaagaaaatcaaggaatcgaccatgttcagagaaattccagtagtgatcatgtcttccgaaaacattttgccgcgcatagacagatgtttggaagaaggtgcagaggatttcatagtaaagccagtgaaattatctgatgtaaaacggttaaagggttacatgacacccaaagaggttattaagatgagaagccaagaagacagaagaagtgatggctatgttaacggtggtgatggtgggggttgtggaagataaacaacaaaagaaagctggaagagcaagacacctctgacgtgtcattatcaccaccgtcaacttctaccctttcatcatcaccgtccgtttcctcaccatcaccgtcatcttctcctacttcttcagccagcgtgcttgcctctccaatcagacagcttaaatgaccagcaccgattgactctctggtatgtcatccacagcagcaatttctctttttgc

SEQ ID NO: 28828 - DNA, 870 bp, Glycine max
  Clone ID: TF_GmC31263_1
atcatttccattatttatatgctatattatctgcagccaaatataaattccattacccttttctcagtttcttcccctgaactccataaataactcactcttgtattatttttatgtttttcacttccatgatgccagtttcaaccatgtgaagttgttgtgtgtgtgctgtgtttgttgttgtgtactgttttggatcttcagaaccaaccatgaatctcagccacggcaagggatccacttcgagttctcctctgaaagccggagacaccgtctccgaccagttcccggcgggtctccgggtactggttgtggatgatgaccccacttgccttatgatccttgagaggatgctgcgtgcttgtctctatgaagtgacgaaatgcaagcgagcggaggttgcattgtcgcttctgagagagaacaaaaatgggtttgatatcgttttaagtgatgtgcatatgccagatatggatggatttaagcttttggagcatattgggttggagatggaccttccagttattatgatgtcagctgatgatggaaaacaagttgtgatgaaaggggtgacacatggtgcctgtgattacctgattaaacctgttcggattgaggctttgaagaatatatggcagcatgtggttcggatgagaaagaatggtttgagagatgtggagcaatctggtagcatggaagaaggagatcggcctccaaagggatcagatgacggaaattactcgtcttcggtgaatgaagcccaaagctcaaagaagaggagggatgaggaccaggaaggagatgagaaggatgattactccacgttgaaaaagcccgagttgttggtctgttggcttattaacagttatg

SEQ ID NO: 28829 - DNA, 384 bp, Glycine max
  Clone ID: TF_LIB3242-023-Q1-N1-C10
aattcggctcgaggttagttttgttttgttacccttcctctccagccttttcttgagtttgtctctctctctcctttttaattttaaataatttgttgtctgttgcgtgaaagaggccctgaaaacaagatttctgtagtcaagtttggagctttttgctctgtgattggtgtgttctccaaacaatgcataattcttcatctgggtacttggttctggtttaatatgggggtggaagaccgttttccggtgggtatgcgtgtacttgccgttgacgacgacgaaacgtgcctctcagtgttggagaacctgcttcgcaaatgccagtataatgttactacaactaatcaggcaattaaggcgctagacatgttgaggaaaaac

SEQ ID NO: 28830 - DNA, 1376 bp, Glycine max
  Clone ID: TF_GmC142127_1
gcaataactgacatgaagaaacataatttggaagatctgccttccaattttagagggcttaaagccatagtggttgatggaaaacctgttagagcagcagtgactagataccatctgaagagactagggatacaagctaaagttgcaaatagcatcaataaggctgtttctttatgtgggaaaaatggttctttggcctcggggtatacaggctaagattgcaaatagcttcagaaagattcatgggtttgtggagaggaagagatcttcaatctctggcaactggactggaaacaaaatgggcatatgtttaagatacctcaaatgatccttcttgcgactattcaatgtgtggcaactggactggaaacagaatcggcatatatttaagatacctcagatcatacttcttgcgaccaacatcggtaatgatgaatttgataaagctaaagctgcaggtttcaacgatactgtgatcatgaaggccctgagagctagtgtggtggctgcttgtcttcgccttcttcggggaacggggatcttggggcttcacggcaatgtcgtgaacccgagggtcgccgcaggtgcattaagaaattttggcgctgatgtgacgtgtgcagaaagtggcaatgctgctctcgagatgctgcagttgcctcacaattttgatgcttgcttcatggatattcaaatgccagaaatggacgggtttcaagcaactcagcgaattcggatgatggagacaaaggcaaatgagcagcagatgaatggtgaaggaaatgggtggaaagacaagtaccatatacctatattggccatgacagctgatgtaattcacgccacatatgatgagtgcgtgaaatatgggatggatggatacgtctcaaagccttttgaggaagaaaatctgtatcaagcagttgcaaagtttttcaaccccaagcctaccacagacaacagcctaatagaaaatggcagaacttgaaaagcaacttaatgtttaatgaaagacacttactttcactactggcattttttcgtagtttgctggtaatttgaatgtgctttaatcagttggtttttgaagatatctgaggatatgcatacaccaggcatatgcagtgatcatttctaaccaccagctgaacatgatttcaatctgagtaaatgtatacccctaccctcaacttgtgtacagattctccccccgggatgaggaaaatcatgtaaattcaaaaaatttttttttcctttcttttgcatctcccgatacttccctatgattagggtttcaccaatattattttttttttctctgtaatattttggtctaatagaattttggtagtccccatattcagagggaagttcgg

SEQ ID NO: 28831 - DNA, 4063 bp, Glycine max
  Clone ID: TF_GmC4331_1
ataaaatatttttattttttttttttttttttatttcccccattggcttgggggaatttaaaagtggatttataacttcaaagcttctaattatcacaaggggggagccaataatttttcactcttctcacattaatagatttcatgaatcttctctgaaaatttgaatacacggattagttacttagttgtacttcaaacctttatatcaccaaaatggaataatttttttttttttatttgagtcaaaggaaatccagaattggaaatataaaaatcggccaaaaaatggtggatcactcacactacagtataatgtatcagttacatgtttgcaagccgaattccagcactgttaagaacaaaaggaagcaagcttgctgtgatacatcgaatcaccatctttattgtgagtcatatacaaagattgatgatgggtacttgcttccttcctcccctttgatgccaagaagctaattttcttcctttcacctgaatcaagcccttgtgatacatgcatcaatacacataaaaatgtaacgcgcctaggctagattactataagttgtattattacatacacaaggatgagactccagaacctgtattataatacaccctaatcttctaatcagcctcaatcatttcggctgactttacaaggaagaagaattaatgggttttggtacccttaacaaccaattacaactcaattgcaaccaatcaaacttggctcctatgtacactccctgccacaaaaacaatgttttaaaacaggaacccttcacacacagcagaaaagacaacaaaataggtcaaaaaggtagaatgaaccatttctgaacttctacaatattatccccctttgttccattttcttttatctttcagatgagatagatagcattcttctgtctctagtgaacaaccaccaagctttgaggtggttaaatactaaaacatgcactggctgttaaatagggaacttactctcaggagacttcggaacctatttgcccacttcggagtgtcctggattacggacagctacgcttccattatcaaatattctggtttaactcggcaccgtattttcttttcaagatgactggaaaaaccgtgagacttctctatacagctgttcagcttcaaatggttttgaaacatatccatccatgccacaccttaggcattcctcgtgtgtagcctgtatcacatctgcggtcatggctaaaatgggtacatgccagtttgtaatattctcaaagtcatccatagatacttctctgttcacactatcttccatctccctaattcgctttgtagcttcaaatccatccatttctggcatttgaatatccatgaaacaggcatcaaactgatggggtggcttcaaggaagagatggcatcttttccactgctaacacaaaccacatctgctccatactttttcaatgcaccagctgctactgcacggttcacaccattgtcgtctacaattagaattttcctgccacgaagaagatggcgaagagacaaactttggagctctctatgaggagctcccttgttttggacacccatggctcgttgtagtgaggcagcaagcatacttgctctcagaggtttggtgatcacagtaggattatgaacacccaagtttacgctagctttaaaagaactactagaattaacaagaatgaacagctttggaggaaccccatgatcaattctcctcgtgttattgacaaagtgagatgacaagcctaaatctctatcccaaacctcctgctcaatcaggaccatattaacaactacattcccattgcttatggttgacaaaccttgttttaaatctgaaaccatttcaacatgaatgccaagccgttggatgtgatatccagacacttctgctctaacagatcttgggtcaataattaatgcagtcatcccctcaaattctgaagatgcagactgaggttggttgttgatttgctgaattttacactcacttgaactacggtgtccattggtgaatacagcagtaaaagtgaatgtggacccaatcttgggtatgctcacaaatccaatttccccattcatgaggccaaccaaacatttgctaatgcttaggccaatgcctgttcctccatgctttcgggagatggatgaacctacctgcatgaatggggtgaagatgagtggctgagattcaagaggaataccttcacctgtatcttcaacagatacaatcaaattgacaagatcattggagggggatgagaaggaaccaagaggtccctcttgactgaaagccttgaatccttcccagctccggcgactatcagcaacgggcgaaccactcaaggtattttctgagttggattctttgtcaacctctattgaacggacaacctcctcaacaagatggattgtgacaaaaatatgtcctttgtccgtgaacttaattgagttacccatgagattggtaattatttgtcgaaatcttcctggatcacctataagtaattcaggaacatgatctgacacataaactgccaactctactctttttccttgagacttctcagaaaatagagacaatacatcatccaaaattgcccgtatgtcgaagagcacagcctcaagctctagcttaccaaactcaatcttagcctgatccaaaacctcatttataagtgacaccagagcttttccactttcctgtgctgtcctgacatattcctgttgggttacatctagatctgtgtccataagcatatgcaacatccccaaaacaccattcattggtgttctgatctcatgggaaacagtagcaagaaactgggattttgcaacatcagccgccccagctcgttttttaagttccatcatctcacggtaatcatcttctactttggcaattcgattcacagtggcatggaaaatatatccaacaaggagtgcaataacaaggataccaatagaagtagttattgccacccatggccatggtggcttctgcttgaacctgcagtgcatctcatgcttcctaaaagggtctccaaagttaagagtgctgacgtgatagaaaaaatcccctgattcatttgagccatacatggcaattggatgagtacgatttgtagtatcatatacatgaacaattacagtttgcttgctagcaagttgctgaagtaatttctccactaatgactcaacatcaaagactcccccaagatacccgtcagttgcttgaatcctttcatttggggttgtatttgatgggagatctctcttgtaaacagcaaaggtcaggataacccctagtcgatttgttttgagcagcctaaagggcgcagttaaaacccctttgcctgattctcttgcacgcagcacattttcacggtcttcctttccagaaagcacattaacagaaatcacgtgtgcaattgtatcctgtgcaaagatgacaggagcatattcttcctgaacaggggatggctccagtgcctctggggcataatcgtccttatgaaccgggttctgctctagagtatccatcctcttgatagtccaaccttgctgcttttcaaattgttccctttcagaatggagcacccttacagcatacgcaacaccacttgtaagaggtctctcaaaagctgttctttctgtgtactttgcaaaagttttctgatcgatggctgaggggctcttagcatggtggaaagtggagattagaatggacatggcttggatatggttcatactgacattaaactgatcctgcagcatcctagccctttcatcacacatgcttgcaagagtttctttcctcttctcagtaccttgcgagctcatgtagcagaagatccgcaaagatactatgaaccaacccactacccatgtcagcaaaagcttcctccacaacgctctcttaactttcttggagccaatatactggtagtactgttggtggattttgcaaccctgccctgagatcttctcccaccattttttgtgccacatcttgctaccaccaccacctccaccacccat

SEQ ID NO: 28832 - DNA, 1034 bp, Glycine max
  Clone ID: TF_GmC413_3
caagatctctctgatttggatcctccgaatctcccctcttttcattttcacattcttcttattatttattcacccttttccccttccttcaccattcattttcttttataataccattcttttttctctttatctctttcatcaatacttcatcgttttcgttaagggatggcttctgccggcgatgttttcaggcagggtttgccggaagtttgtgctgccgggaagttacacgtgcttgctgttgatgacagccacgtggaccgcaaggtcattgaacggttgctcaaaatctcgtcttgcaaagtgacggtggtggagagtggaagcagggctctgcagtatctggggttggatggagaaaaaagttccattggtcttgatagtgtgaaggttaatttgataatgacggattattccatgcccgggatgacaggatatgaattgctcaagaagataaaggagtcatctgtttttagagaggttccagtggtggttatgtcgtctgagaatatcttgaccagaattgatagttgcttggaggaaggagcagaggagtttctgttgaaacctgtcaagttgtcagatgtaaaacgcgtaacagatttcataatgagaggtgaagggatgaaaggagtaaaaatatctaaaaaaagaagccgatcagatgattgcattccatctctatcaactgcattctcatcagtttctcatccctgtgatatatcatcacctccatcgccatgtgtattgcaaccgaagaaatctagattgagcatatagattgagcagtgatgtatgtctcctccatttttgccaaaccattgttcatattcaaaagcctcagatgtaatttgcgtttttacactaaacattgctgacaacgagtactaggattaggaatgaggaagaggatgacagaatcattttgttctttagttcggtggcttacatattttttttgttcattctgatgctgtacagagaaagttcattaaattaatgaaaccctctattttgaggggtcttacctc

SEQ ID NO: 28833 - DNA, 859 bp, Glycine max
  Clone ID: TF_GmC478_1
ctcgagccgcgagagctaagtaatgttgaaagtgatggcggtgtaactgacctaagttttggatagatcagccgcgagatgatcgagctgcagggcggcgaaatcggcgtcagatctcgacctggaaaaggcgctacattcgccttctacatcgccgctcgcactgcagatgcgccgccgccgtccgtgcaacaaagtctctcttctccggcgctaatgtcgggaagacgaccgtcggagaataccagagccagatattccatcctggtggtggaagacaacctggtcaaccagaagatcttgagaatgcagctccaaaagctcggccacgaggtgcacgtcgtctcccacggccgcgaagccctggatttcctggaaactacttcctgctgggaaggcggtactgccagtcacacgcacgtttcgattatactcatggacattgagatgcccgtaatgaacgggctggaatgcacgaggagaatccgagaagctgagagcgaaggccgcgttaagcggcatttacctattatcgcggtgtctgcgaatgcccgtgagggccaggtgcgttatgcgatggagtgcggagtggacgacgcgattagcaagcctttccgcgtggctgatctgatgccgattatcgagcgattggctttggtttagaaatgatgaaaagcgatattccggacggcgaaagcgatgcgcccttgcagtcaacgcgtgcgtacgattgtgcgcagctgcgcacaatcttgtatacaaaacaacgcgtcggtatgcattgggaggaaatacatttgctggtggtagaccatcaggcacagacatagatcacgaatccatatacgacttttgagag

SEQ ID NO: 28834 - DNA, 1799 bp, Glycine max
  Clone ID: TF_GmC353_1
cccacgcgtccgctcacgctccgagtagtggtggctctgtggagttgggtgctgtggcggctattcgcatgccgttacttcatgtgtcaaatttcaaaggagggacgccggagttggttgagacgtgttatgctatacttgttttggttctgccaagttcaagcactagggtttggacctaccatgagatggagatagttgaagtggttgctgatcaggtggctgttgccctgtctcatgcatctgttcttgaagagtctcagctgatgagacagaagctggaagagcggaaccgagcactgcaacaggctaaaaagaatgcaatgatggccagccaggcacggaagtcgtttcagaaggtgatgagccatggaatgcggaggcctatgcattctgttctggggatgctgtcattatttcaagaagatattgtgtgaactgggcagaggataagaggcgatacaatgttgaaagttgtaaatgagctctcgatttttattgatgatgtaatggaaatgtcataaaatgaaaagggaggcttccggttagagatgaagccttaccttctgcattcaaaggtgaaggaagctgcttccattgccaagtgcttgtgtgtttatgaaggctttggttttgaaattgatgtccagaagtctttgcctgaaacagttatgggtgatgaggcaaggacttttcaagtaattttacacatgattggctatttattgaacatgaatgacaaagggactctcaattttcgagtttttcttgaaagcgatggtggagacagggatgataaaaatattggaatatggaggtcaagcagtcaaaatgagtatgtacatataaaatttgattttcagattactgagagttctcagtcagacaaagcaatttcaacaatacattatagtagtaggaggcagtactacaacaatgaacctaaggagggcctgagcttcagcatgtgcaaaaagttggtacagatgatgcaaggtaatatatggatatcaccgaactcccttggtttggtgcaaggcatgacacttcttctcaagtttcagataggaccatcacttggaaaatccatatttgcacctaaagattattcaagctcacagttcagaggccttaaggttttgttagccgaggatgatggtgtaaacaggaccgtgaccaagaagctacttgagaagcttggttgtcaagtaattgctgtttcatcggggtttgagtgcctgagtgctataagtggtgctggtaactcattcagaattatcctgttggatcttcacatgcccgaaatggaaggctttgaagtggcaaagagaatccggaagttccacagccgtagttggcccttgattatagctcttatagcaagtgcggaagaacatgtgagggagaaatgcctacttgctggaatgaatggattgatccaaaaacctatcgtacttcatcagatagcaaatgaacttagaacagtcctacaaagagcaggtgaaaaactgtgagaacagttttaaaagcatgcttcggtttaagaaaatatgatttcattagtaattacaaaaaggtcatgttattttagttctgtttcctattttcaagcattgcgggctatgcttttattattttgtgaacaaattcttgaaaataagaaacaaaataaaataatgtgtcttttataattactaatgaaagagtgactcaattttctgaagttgctcaaaacggcattgtgaacttgggggatttctaacaatatcaaataataaaaaaagtagccttttgtcccc

SEQ ID NO: 28835 - DNA, 951 bp, Glycine max
  Clone ID: TF_GmC413_4
atctctctctctcttcattcttgaggtcttctttcattttataccattcttcttatttctttttaccaatcactacttattcaatccaaggatggcttccgccggcgatcttttcaggcatggtttgccggaagttggtggtgccgggaagttacacgtgcttgctgttgatgacagccacgtggaccgcaaggtgatcgagcggttgctcaaaatctcgtcttgcaaagtgacggtggtggaaagtggtagcagggctctacagtatctggggttggatggagaaaaaagttccattggttttgatagtgtggatgttaatttgataatgacggattattccatgccggggatgacaggatacgaattgctcaaaaagattaaggagtcatctgtttttagagaggttccagtggtggttatgtcgtctgagaatatcttgaccagaattgatagttgcttggaggaaggagcagaggagtttctgttgaaacctgtcaagttgtcagatgtaaaacgcgtaacagatttcatcatgcgaggtgaagggatgaaaggagtaaaaagatctaaaaaaagaagccgatcagatgattgcattccatctctatcaactgcatttgcatcagtttctcatccatgtgatctatcatcacctccatcaccatgtgtatcgcaatcgaagaaatctagattgagcatatagattgagcagcaatgtttatgtctccatttttgcctaaccattgttcatattcaaaagcctctgatgtaatttgcgtttttacactaaacattgctgacaacgactactagaattaggaatgaggaagaggatgacagagtcattttgttctttagttcggtcgcttacatatttttttgctgattttgctgctgtacagagaaagttcattaaattaatgaaaccctctattttgaggggtcttc

SEQ ID NO: 28836 - DNA, 2233 bp, Glycine max
  unsure (1)..(2233): unsure at all n locations
  Clone ID: TF_GmC191_1
tcgcccacgcgtccgtacggctgcgagaagacgacagaaggggaccctcaacaacctaaaaaatattcactaagatttatttcccttattttattcatttattctttgttcctagtctttatcttataatttctcattgcttgcccggtaattcaagatcaacttggaaaatttgcaagatttgggatgaaatctggtcggatcttgctttgtgggatggggattttggtgggtcttatttcaatacaaagctcttcctctctcaatcccatctccctctcttcttcttcttcttcttcttcataacacaaacacaaaacataaacctttcttccaaccaacccttttttccaattctttgtttcttcaaaaatcttcaatccaatttttcaccttttcacaaatggggatggctgcagtggagtcacagtttcatgtcttggctgttgatgacagaattatagataggatactcattgagaggctccgcacaacctttttctattaagttactacatttgattttgttcactactttttagttcttctctggatgccatagaatgatgagatcaatctcatgtataccatctgttctgtcccaacaaccataacgcctcaggaggtggaggttaattttgttataacagattactctatgcctggcatgacaggctatgacttgcttatgaaaatcaaggaatcttcatctttgagaaacataccagtggtgattatgtcatctgaaaatgtgccttcaaggattaacagatgtttggaggaaggagccgaagaatttttcttgaagcctgtgaggttgtcagatttgaacaagcttaaaccccacatgaagaaaaccaagttcaaagatcaaaagcaagaaacagtagaaaggtttgaagactcagaagttcaacagcaacagtcacaacaacaaatcatcatccaaaatgagcatcaccaagcaccaaaattacaagttcttcagccagagtcagaatcagagtcacatccacaaccaactattgaacaacagcaacaaattctacaacaagccaacaacaataacaagaggaagaccatggaacagggcctttcacctgagactgacagaacaagaccaagatacagtggcatagccactgtggtatgatcataaaaatcattggcaaaaattttcttgaatttcaaaaaatgtaattctcatataactttttttttctttcttttaaaaacaaattaactcaagtgttggttaatataggctctataggagtgtaatagagttgtttcctgtacacattttcctggaaatatttccttccaattttgcttccccccaatataatgaaaaggaaaaaaaatataggaattgagtggaacagggcctttcacctgagactgacagaacaagaccaagatacagtggcatagccactgtggtatgatcataaatcattggcaaataattttcttgaatttcaaaaatgtaattctcataacttctttcttcttcttttaaaaaaaattaacttaagtgttggttaatataggctctataggagtgtagtagagttgtttcctgtacacattttcctggaaatatttccttccaattttgcttccccccaatataaatgaaaaagaaaaaagaaatattgaattgaaaagaaattatcagatgataaataaatcaaaagcaagaaacagtagaaaggtttgaagactcagaagttcaacagcaacagtcacaacaacaaatcatcatccaaaatgagcatcaccaagcaccaaaattacaagttcttcagccagagtcagaatcagagtcacatccacaaccaactattgaacaacagcaacaaattctacaacaagccaacaacaataacaagaggaagaccatggaacagggcctttcacctgagactgacagaacaagaccaagatacagtggcatagccactgtggtatgatcataaaaatcattggcaaaaattttcttgaatttcaaaaaatgtaattctcatataactttttttttctttcttttaaaaacaaattaactcaagtgttggttaatataggctctataggagtgtaatagagttgtttcctgtacacattttcctggaaatatttccttccaattttgctaccacccaatataatgaaaaggaaaaaaaatattgaattgagtaagaaattactccnnnnaaaaaaannnnnnnna

SEQ ID NO: 28837 - DNA, 938 bp, Glycine max
  Clone ID: TF_2407791
ggtggggttgggaagacaacgttgctcatcttccggaatcgcattggcggtaatgccaaagataggtttgcgatattccatcttgcgcgaacgctcagtcagttcataaccatcaaccacgggcatatttacaatcaagtcaatacgatgtcgaactccatcaggtctgcgcggtccagcgcttcgcgcccgttgccggcaaactcgacttcgcaacccagatgcgacagttgctctttccaaatcatgcggttaatggggtttgtcttccaaccgtcagtatgcgtagcttccataggcgcagcctgcggctccacttccgtggtttctatgacatcgtgcaggcgctggcacgcgatcgattgctttttgcgatcgcccgccaccgctgtagatatgtacccaactgcgattaattcttcggatcatcatccaacgaagatccgggcagctttggctacgatgcgtggccggctccatgcaatcccggccctgtttcctggatggacgccgaaatatccaaccaggatggctttaccgtcgtccctgatgcaccgccttgttcatatccttattgggagcgcctcccccacgctgcccaaccaaccacataatttttggcaaaaaaaattgccggaaaacccgaattgcacttataactttaacttcctcaaaaaaccggcacatcttggcgaaaactgccctctttttgaatcggtaaccaacaaggtcaaaaaaaaaaaaaaactggcccaccccgggctgaatggtcccatccttaagtgccacccaggattggggcaaagcgccagcaaatcgataagcccaggcctgtgccatttttcagcaaggcatcctgctcgacctgatagaacggttcaaatatatgcaccagtcttctgaggctatgccacgcccgttgtcttcccaaccccacc

SEQ ID NO: 28838 - DNA, 1831 bp, Glycine max
  Clone ID: TF_GmC57050_1
tgcatgcttttgtgtggatatgagtctagttgacctcatgggaggagaaattggatttgtaagtgagcctggaattggaagcactttttcctttaccggaaccttcagaaaaggagaaagcacgtctctggatgcaatgcagcagaataatcattttggttcagagttccaaggattgagaacattagtggtagatagcagaaaaatccgagctgaggtcacaagatatcatctgcagagattgggaatgtccgtggatgtaacttacagtctgaattctgcatgctcttgtttatctaatgtgtgtaacaagagtatgtcgacccaattggccatgattcttatagacaaggatgcttgggataaagaatgtcatatcttatacacaatcaagaaacgtagacagaatggcatcaaaggggatccaatgaatttaccaaagatttttctcctggccacccaccttagctccaatgaacaggatgggctcaagtcagttggtataatagatgatatactgatgaagcctctttggcttagttctttgattcagtgctacagagtatcccttggcactgaaaacaagcgagtaaatagggaaaaagtatccaaacttgggaatttattaattgacaaacaaattttggtggttgatgataatgcagtgaacagaagagttgcgcaccgggttctacagaaatatggggctaaagtgactgctgtggagagtggcagggctgctctaaagatgcttgagctgccgcataattttgatgcttgtttcatggatctccaaatgccagagatggatcgttttgaagcgacgaggaaaatccgttgtctggagagtgaggtaatggagaaaattgcatgtgggcaagcatctgcagagatgtttggtaacatctcttattggcacattccgatactagcaatgacagcagattcaactcagtcttccaatgaagagtgcataaagtgtggaatgaatgactatgtgtcaaagccgtttgaagaagagcagctctacatggcaatggcacgtttcttcaagtcagattcatagtgtggaagtttgaaatctttgattattagtgcagacaccctgctcacaagtgtggactgaccggccgcgtggggtgtagtatgatatcaattatcatcgaatgccatttgttggttttccattaaaagagctagcggatggattaattttggctaaattatttccagatattgtaatggttggacatgccccagctgatgtgttcctaattgagactgcttgccagcatcaaagctatcaattcagcatcatggatctcacctatggtcttgtttagtgatagtaagtaccatgtttacatcccaggattttcatattattttttttgttctaggccagagaccatgagtgtcttccaacccattgagtcaaagactaatcccgctcacgatacatgactgtcgctgacttatgggaattttgcatacggatattgattttgagttcaagatattatcacttattgcaggacaggaggaggtcaacagaaggcataattttatttttgtgtacataacccgtttttgttcctgcttcccgtcgcttattattttttgtaaatatttatatttggagctagtaggataagagaaaaatgttatagtgtcgacatcattatttcatattttgggggccaagatggaaaggaatgacagatctttgaaccctcataattttgtaagtagcatgtaaagcaaaattattacatgataccagtagaatgacatcaaaaaaaaaaatattttgtgaaaaaaaaataaaaac

SEQ ID NO: 28839 - DNA, 675 bp, Glycine max
  unsure (1)..(675): unsure at all n locations
  Clone ID: TF_GmC663_2
ggctcgagaaaaaaaaggaaaagaaaagaaaaaaaacctgaatcctcttggactctctcagctctcagatctgagttccagaaattaaggattccctttactttcccttctcctcatggatctttttctttcaattttagataaataaatcacaaaaaaaaatcaggcatccttttttcctatttttttttgccgttgaaaaaaatggaaaaggtggctccgcctccgattctgatgcaccggaagcgcgatctatcgtacgacatcgtttcggcgggtccgaacgagagctggaggtgggagtgggacagcgtgcgtttcgcaggaaaaccaccgccgccgccaccactgtccccaaacaacgacgtcgttttcgaggcggaaagtgtcgttcctcctctacagttaaagctcggaggaacaacaagagtgaataacaataacatcaatatcaacgttagcaacaagagagttaggtcggggtcccccggaacggcgtcgtatccgatgtgccaggtggacaactgcagggaggatctgtcgaaggcgaaggactatcaccggaggccaaggtgtgcgaggctcatagcanagcctcgaaagcgcttctcgcgaatcaaatgcaaagattctgcagcagtgtagtaggtttcacccgctctcgagttcgatgag

SEQ ID NO: 28840 - DNA, 340 bp, Glycine max
  Clone ID: TF_LIB3093-052-Q1-K1-H5
actcggtccttaattcccgtgtctggtccactccttacaatccactcgtttctgcaatgctgatcttagcaaatctaatgattatcacatactgcataaagttggtgatattcactccaagggcattatttctcttgtcttaaattcaattcttacattctttcaacaatttaatatgtttcacctactttaatatttttattatatatatattatcttttatattcttttttcaatttatattttatttttatttatttctatattattaatctttttcttatttattttttatttattatttatcatacttttatcttttttttttctatttattttt

SEQ ID NO: 28841 - DNA, 385 bp, Glycine max
  unsure (1)..(385): unsure at all n locations
  Clone ID: TF_14126564
cactagagctgctaaatgacaagtcacacatcaagaaattaccaatatcaaaaattgcagttggacaataaaatagaagttttaaaagttgaactttgaatgataactgtcttatctaatgccaatgaagactatcagaatgcatttttcataccttgatatgactgaagaatcttgtgttgtttaccagtcatgtaatcaaattggggtttccttcggcgttcattgtgtcctgctagacgcctgcgacaactgcgcttaccatcatcgaactcgacaagcaaatggaacctaatttaataacaaaacaaatggtgtaattcaatacataagtaataatcaggttcactntgcnnaananaaaannnnannnaaaaaaaaaaaa

SEQ ID NO: 28842 - DNA, 763 bp, Glycine max
  unsure (1)..(763): unsure at all n locations
  Clone ID: TF_LIB4391-031-Q1-K1-E6
tcgacccggcgtccgngagcttaagggtatcaccgccgacacagggtttgcttgcgctgcgctaatgccgccaccgttatgctcaacggcgaggccaagagatactgccaacagtgtggaaagtgcgatttttttgtttaagtctcttctctcttttccatcaattgattgattcaattaccacttcgctgcttagttagttctgttgttcgatatgttcttcaattatgcgactccgtttaactctattccgtcacttgattctattacttctctgcttagttagttctattgtttgagatgtgcttcaattgaatgttattatgtgattgtgttgttgaattgacggttaactctgcgaatttcttcgcaggtttcacgttttgtcggatttcgacgagggtaaacggagctgtagaaggaagttagagcggcataacaccagaaggagaagaaagcctacggcggattctggaggggctactcatagtgaactacttcaacctgttgccgaaaacgaggaaaacaattatgatgtggaagctggaaaagaatgctcactggctgagtatgaatcgtacagattgttcgaatttgagtaccgatatcaacgacgttggagtgtctctggatcttgaagatgaaccggctcccattccgagctcggctcctgaagcccagaatattaatagtgatagtgttgtgtctttggctgtttctggtgaaacgcgagtgaatagtgggaacacttccaattcgcctt

SEQ ID NO: 28843 - DNA, 383 bp, Glycine max
  Clone ID: TF_GmC138175_1
accagagatcatcaatctctctttcagttttccttgaacctatggacggaagttggagtgagggaaaaaggagcatgagttacaaggaggaggatgagtacgaagaagaggaagaggaggaggtgagtgagtatggagatgatggtaagaaaaagagggtggtgagtaataagagagggtccaaagctggaggctcagtgccaccttcatgtcaagttgatggttgcaacgctgatctaagtgaagctaagccctaccataggcgtcacaaggtttgtgagtaccatgccaaggctcctgctgtagtcattggagatcagcaccaacggttttgccaacaatgtagtaaggttcatgagctatcagaatacgatgactcaaga

SEQ ID NO: 28844 - DNA, 2822 bp, Glycine max
  Clone ID: TF_GmC4383_1
ttgcagaagagatctaaacaacgccgtttcttccattctccgccaaacatccaacaacccctaacaaacgataccaccaaccactacacaattccaattcaattagcccacgcgtccgccaattttcatggaacccctgtctctccctcctctcccagtcatggacgacgccgaagacccttcctccatttgggacttctcttacctcctcgacttcgacctcgacgaccaagatattattattaataacaacaactctctccctcttcccttcaacgaccaccccgctccaaacgagatccctcaaaacgacagggtccgaaagcgcgacccgaggctcacatgctccaacttcctcgctggtcgggtcccctgcgcctgccccgaactcgacgcgatactcgaggacgagggtttgcctggcaagaaacgcgcccgcaccgcgcgtgcatctgcatccgctcgctgccaggtccctgcctgcgaggtcgatatctcagagctgaaagggtatcaccgccgacacagggtttgcttgcgctgcgctaatgccgccaccgttatgctcaacggcgaggccaagagatactgccaacagtgtggaaagtttcacgttttgtcggatttcgacgagggtaaacggagctgtagaatgaagttagagcggcataacacgaggggaggacgaaagcctacgacttattctggaggggcgactcatagacaactactgaagagggatatcataaacagcgaggaagagttgcctgaaagatatgggcgtcgatgtttgggcaggggattcttgacctctcgaccagctatttttgtgattgtttctgatgctgtttgtcttggggtatgtgttgccgaccttcatcctggtagggttagtgagttagcagtatcggttagaaggtgcttgtttaactattagtattttttgcatttgtcttctagttggtacatatttgatgtaacactaaataaatcgtattgtgaggatataatacggctgcgagaagacgacagaaggggtcggatttcttttaagctttatgattggaatcctgcggaatttcctagaaggctacgacatcaaatattccaatggttggcaagtatgcctgtggagttggagggatatatccgccctgggtgtacgatcctgacaatttttattgcaatgcctaacatcatgtggataaatttactgaaagaccctttggagtatgtgcatgatattgttgctcctggaaagatgctatctggaagaggcactgcactagttcatctgaatgacatgatcttccgtgttatgaaagatggaacttctgtgacgaatgtcaaggtaaacatgcatgcaccgaagcttcactatgttcatcccacatactttgaggctggcaaacctatggagtttgttgcttgtggaagtaacttactgcagcctaagtttcggcttcttgtatcgttttctggaaagtatctgaaatgtgagtattgtgtgccttctccacatagctggactgaagacaacatttcttgtgcttttgacaatcagttatacaagatatatgttcctcatacagaggaaagtctctttgggcctgcatttattgaggtggagaatgaatctggtttatcaaactttattcctgtactcattggggataaaaaaatttgtactgaaatgaagacactgcaacaaaaattagatgtatctctcctttctaaacaatttcggtctgcatctggtggttctatctgtagctcatgcgaaacttttgcacttagtcacacatcatcatcagacttacttgtagatatagcatggttgcttaaggacaccacttcagaaaattttgacagagtgatgacagcttcacaaattcaaagatattgccatttgttggactttctgatatgcaatgattcaacaatcattttgggaaaaatattaccaaatttgataatcttgacagaaagcatgaaatccaatgttgtaattaataggacaagtgatgttgacataatgcaactcctgaatcacatacataatgctagaaatgccgtatatcagaaacatccgaaaagtgaaagtataattgtgcactctgaaatgaaaggctttatacttgctcagggctgctcccaagataacaagctatcagttgcaattaacagccagggtatccagtcgagagcagatgagaagtggggagtactgaaagtgaaaagtccaacttctaatgagaaaatggaaagaataccacttttgaagagggatattataatgagtatggaagagttgcctgaaagatacgggcgtcgatgtttgggcaggggattcttgacctttcggccagctatttttgtgttggtttcggttgctgtatgtcttggggtatgtgttgccgtccttcatcctggtagggttagtgagttagcagtatccgttagaaggtgtttgtttaactattagtatttttttgtacttgtcttcgagttggtacatatttgttgtaacactaaataaactggtgttattgggatgattaggtagtttattacattggaaagcttaatccaaggttgctaatttgtgcattaccaattttatcggatgtccagagggacttgcagttgcaggtgctgtgactgcaacgagtctgatcattaatagttaaaatttgtaattcctgttaccattattacaattgggtgtttatgccagagttctctctagaaacgtgtaattcttgttatcattatattataatcctgactagacttcatttttttttgtggctcactctccg

SEQ ID NO: 28845 - DNA, 1195 bp, Glycine max
  Clone ID: TF_GmC261392_1
ccacgcgtccgcttgtaaaagtcaagatagataatcactcagctttatcatgacatcaatccaaatagttatggctatcacttagcttagaattcaatttactataaaaaattgaaataaacttagcaaagttctaattctaattcacacagcttcatatcactaacaagcttaaaactaaagggggtattgtttggtgacagggtttacttgtttctttccaactgggggctatcctcccatactaattcaatcacacaattgagatccagtttaacaataatagacaaaaaaaaaaccagcttgacgcaaacctacctttgtaattgtacatgaacttctcagcagccatgaaaagagacggtggctgaggtttcctccggcgcctgttatgcccgtcaagccgtttcctacaactcctcttaacctcatcaaactccccaagtgaatgaaacctacacaacaacaacaattggcaccaccccatgtcacaaaacacatctaactagcgaaacaactgactgtcacaaagtctcatacaaaaacttttaacacccacatactccccaagcgaaccatacctgctgcattgctggcagaacctctgttgtttcccccccaccatcacaaccggggttttggagtgcttttcgcagaccctatggcgcctatgatactctctgcaatcactgagatcagaattgcatccatcaacagaacaacacatgttctgtaatccattctgaaggcgggatcttttcgacgacccggatggcgatgacacggtttttgagtcttttgtgtccttagcaacaacatctggggctgttttttcctcaccaagcctcaaatccactgaagctgcttcactcttctggccttcaccattagccagctccaacccacgtggatcccaagcaaactctttcccatcccaatccataaccaaccaacaaaactatggtttgctttatgtcccttttaagatgccaaagccaaacctaaacctaacacacatagttatgtactaatcttgaatctcttaaattctgatagctgcggataaagcctccaagaaaatgggcatagaaggtgcaagccccattttgatgtttctctctgagaggagaaagaacttgttcgagtaaaaaagtaggtcaccaactaaaattcacggacgcgtgggtcgaccggg

SEQ ID NO: 28846 - DNA, 666 bp, Glycine max
  Clone ID: TF_GmC860438_1
caaagatggtggtgaggagtgacaggttgaagagggatgtggcagattgtggtgacaacaaccaaaacgggtacgtggagcaagagaagaagataaaaggggtggtgagttgtgctgggaagaaaggtggtggtggcaataataatagcatatatgcggtgttgtcaacgccgatcttcatgaggccaagcagtaccacaggaggcacagggtgtgtgagtatcatgtaaaggctcaggttgtgcttgttgatgaggttagacaacggttctgtcagcaatgtagcagattccacgaattagctgaatttgatgacacaaaaagaagttgccgcagcagtttggccggacacaatgaacggaggagaaagaactcagatcagtctcaagcagaagggtcaagccgcaacaaagggacagggcaccctcaattgaaggacattacttgtggtcaggctgatgagagggggagaattcagataacaatccacgaaaatgctgcttacaaacatttccagataagatgagatatgctttgatctgaagtttgctctctctcttctgtcatccaggggatgtatttgtatttgtcaaactattcctgtgtcacactcatgctgaagattgcatttagataaataacttacaaaaaataaaactaacataa

SEQ ID NO: 28847 - DNA, 633 bp, Glycine max
  unsure (1)..(633): unsure at all n locations
  Clone ID: TF_GmC735929_1
ggtagaggggtgccacgtggcgcttgtgaacgcgaaggagtaccacaggaggcacagagtttgcgataagcattccaaggcacccaaagctgtggtcttagggttggagcagagattctgtcagcagtgtagcaggtttcatgtggtgtcagagtttgatgactcaaagaggagttgtaggaggagattggcaggtcataacgagcgaagaagaaagagctctcacctttctgttactaggaattctagacaagggtgtgctctctctcttctgtcatctgggagtagtagtgaaaattggctatctcatcatgcggatttctccacaagatgcagtgcagcattgcgtgaattgatagcagaaaaccgtgctgccctaatcactagacaacaacaacttgtttatgatagagactggcctcatgttgtgccccaccatgatgctgcagtggaagaagaagaagaagactttgaagacttacaacaacaacaacaaccacctgagcccaattattttccacaacaacatatgtttccacagacataataataataatagttcctgaacttggttggaggtgaccccaaatatatctaatgcactttacacagagtgtntgtatgttgtgtagc

SEQ ID NO: 28848 - DNA, 3856 bp, Glycine max
  Clone ID: TF_GmC7371_1
catgcatctagaggtatatgaataagtctcactgtctttcttggtctgctgtcggtgtttgtgacatcgaaatttcgttcaccagtttttgggttgaattttgcatacccctcgagtatttttcagtttcccagaaaaaatattggtgtggctagtcaaactagagacttggacaattttggttgctattgtgtgcatcttggtatttcttctgaaggagtttgttatgggagggaagagctcaaaagggagtggtaggaggtatgattttggtgcttcttcatcttcaagggataatagctatggtggataccctccgcaatcaccatacacttcttatcaaacacctcagcacccttgtgcatcagcatcagcatcagctccattttatgactatgcacagccaaaaaggaagttggataagaagtattccaggatagctgataattaccgttctttggatgaggttacagctgcacttgcaaatgctgggctggaatcttctaatctcattgttggcattgatttcaccaagagcaatgagtggacagggaagaggtcattcaatcgaaaaagtttacatgacattagaagtggtcaaaacccttatgaacaagcaatttctattatcgggaaaactttatctgctttcgatgaagataacttgattccttgttttggatttggagatgcatctacacacgatcaagatgtatttagtttctattcagaagagaggttctgcaatgggtttgaggaagttctgacacgatacagacaaattattccttccctaaaactcgcaggacccacttcgtttgcccctattattgaaatggctatgactattgttgagcaaagtggtggccaatatcatgtcttgctaataattgcagatggacaggtgactagaagcgttgatacacaaaatggcaacttaagtccgtatcagatggatatcaggagcagaacacaaaagacaattcactagatgcaatcagtgcactgtcaaagcatagttttggtgggagttggagcaatgggaaatgatgagggaatttgatgataacatcccttctcgggcatttgacaattttcagtttgtgaattttactgaaataatgacaaggaatgtagattcaaccagaaaagagacagattttgccctttcagctttgatggagataccttctcaatacaaggcaaccctagagcttggcatattgggttcacggagggggcattcaccagatagggttgctctacccccacctctttatagtagaacctcttccagcatcagcacaaaatctacaaggtctaacagttttcagcagaggacacctacacatactagctatgatagcagtgttcacacagagacatcatcaagttctttatatgataataaggtttgccccatttgtcttaccaatgcaaaggatatggcctttggttgtgggcatcagacttgttgcgagtgtggagaggacctccaattctgtcccatttgccggagcacaatccatactagaataaggctttactagttagctttgatgcagaagtcctgtcaatgaaaatttcgtcatttccagaataaggggctgcaaaaggatgtgcagagttggtctggctcttttcacagatggtttcttgtccataaaaactgcatttgcaatttccaggcgaaacttgtattcccagttacacttaggaagagctctttacagaaagaattggccttccccgttgtatatatgtagttcatgtgtctcggaaggcgtcatgtttttaaatgaactgcttgcattaaaattatttgtattgttctaaagagcatttatcattttgatcgaatctagattgtctttctactaaacatgggccgtatgtagctctccattatcagtaggactgtgagataaccagtcaagaatctgtgctctaagtacaagagcaaaatcatttggctctttaccgaagagcttaaaaacaattcgatctgtgcgactctgagcttctccactgaaactagaaggagactgggcagatgcagaatcagaatttccacttgtttgaggtggacttgactgatgggaatcttgttgtgcccatggtaatcaagagagctagtcacaagatttgtagagacgggcaatctttctaaatcttccataccatcatctgagtcaatatatatgtcattcaaatcaaaattattcatcttgatctgtccagcggtactgtctctggcttctgagtaggccggaggactgtttgacatgctgggctttatagaagatgtgatttgctgatcagaagccccagcatcatgtgcatgcatcacttgttgctgcattttagccatagatacagtttcatgttgtcttgtatcagttggagagccttgagaaccattggagaataaagtagacatcatttctgacttccttgatgaaccatcttctctcaacaaattctctggttctcgcaaaaggttagctatgttcttgctcccttgctcaccattctgactagcaagactcctcagaatatgagttagtagatcctgatctgtagtctgatctgacctgtcagaatgcatatttgaaagtatcttcaataaacttatcaacagatagctacttgtctgatcatcatttaatgaacttccattaggaacagcttcatgatttgttttccttcttcgtttattatgccctgccaaacgtcttcggcagcttctctttccttcatcaaactcttgaagcaggtgaaacctactgcattgttgacagaatctctgcattgcatttcccacaagcgccctactggccttggagtgcatctcacaaactttatgtcgcctgtgataatccttagctttgctcagatcagcactgcagtcctccacctgacaaacagctcgatttgaagtacttcccgacactctacttttcttcccattcgtaccgtcccagcttgcaacttccctatccaccactgcagaagcatggccaccaagctttaaactaagagtacccccttcctcattcaacccatcatcctccagcacaataaattgattttttttacttttttaaggttttgttaaaaaaataggtttttttttccttttcttgtccccttcttagttccccttgggatcccttggatctacttcctcagaggtggaagaactgttggatggacctccggccaccgggatcccagccggacccaatagggaaaaattgctgtcccactccaacaccatccgccggcaccaccggattcagccggctagcgatgaacagatcaccatcccatctccaatcattcaaatcccactctgaggacctcttccccacacccctcaaatccgaggaagcacccacaccgtaaaaatgataagcctcagctccaaatttagcttccatggtcaaaaacacaaactacacaactaaattcagttacagtacgaaatcaacaacacggaatcacaatcaattaaccttacttcacccccaacagtcccaaaaatagcaaacccacgcaaccatgattccaattcagtcgaatccgcatggccaccaccaacacttccaatttcccaagtcaactagagtaacacaaaacctagctcagctcaagtaccgcgacagacacaacaaccttcttcaactaaaaattatctaaagaaacgccaggaagaaaaaattaaaataataaaaaaggttagaaagtaaaattcaagaagaaattgatgacgaagcgaagacaacggtcgtaccggtacgtgagaggtttggcgtgagaagcatagcagatcgacggcgagtggatgtcggta

SEQ ID NO: 28849 - DNA, 704 bp, Glycine max
  Clone ID: TF_GmC263455_1
ccgggttaacggcggtgacggtgccgaggtgtcaggtagaggggtgccacttggcgctgctaaacgcgaaggattaccaccggaggcacaaggtgtgtgagatgcactcaaaggctcccaaagttgtggtcttaggcatggaacagaggttctgccagcagtgtagcaggtttcacgtggtgtcagagtttgataattcaaagaggagttgtaggaggagactagctggtcacaacgagagaagaagaaagagctcccatgattctgttgcaaggaattcttcaaaaggagggtgtgctctctctcttctgtcatcaagaagtgattcttggctttctccttctgatctctccataagatgcagtgccgcattgcgtgaattgatagccgaaaaccgggcagccatcatggccagacaatttgtttcagatagagattggcataatcatcaccatgcagtggaagacttcaaggagatccaacctgagtccaattacttcccacaacaaatgtttccccagacacaatgaaggatccatgtgtaaaagagcttgagatcttaatgctggttacttgacccaaaggtttagggaaacaagatttcaaagagagtagacatttatggggaatgcctaaagaaaggactttgtgtctgaagttttcaattctttaatttgctaaaaataaaagtttggacttcttta

SEQ ID NO: 28850 - DNA, 3300 bp, Glycine max
  Clone ID: TF_GmC365_1
cccacgcgtctgcccactcgtccggggaggagaaaagtggaaagaagacaaagatgaccgcgagtacttcgagccgggctgtttgtcaagtggaagattgtagggctgatcttagtaatgcgaaggattaccatcgccgccacaaagtttgtgatatgcattctaaggctacccaggaactagttggaaatgttatgcagagattctgtcaacagtgtagcaggtttcatgttcttcaagaatttgatgaagggaagagaagctgtcgtaggcgtctggcaggccacaataaaaggaggaggaaaacacttcctgatgcaactgtagttaatggaggctctctgaatgaagaaaagggcagtagctatttgttaatgagtttgctaaggatactgtccaatatgcattcaaatggctcggataatatgaggaaccaggatgttctatcacatcttctgaggaacctggcaagtctgactggtacaattaatggaagaaatatagtgtctttattagagggatctcaagatttggtaaaagctgggacatctggagctgcacagaatgttcctaacacaaattctgatggccctgaaccatccagacctttagattcttctatcaaaatggatgatggtctaatccatcgggaccctccagagtctatggtacaacgtgagacgactcctgctaatgatatggctaaaaaatgtatagcttcaggcagtgatggagtaggaagtttaaaatctccttcagtaccgcagtcctcaaatgtacttctgtcaagggatggccttccaccccaatcagttgcagcacagactacagttggaagaattgggttaagtaatattgacctgaataatgtatatgatgatgtacaggattatgttgagaacacgaggaattcttgtcctcctctgccttcagggaatgggtctcttgatcatccttaactggttatcccacagtcccacagagatagagagctatataaggccaggctgtatcatattaactatatatctccgtctagaaaattccgcttgggaagagctatgctacaatctagaatccagcttgagaaagcttgctgcgccaaatgattctttctggagaacaggatggatatatacaagagtgcagcactctgtagcttttctgtataatggtcaggtggtcttagatgcaccattgcgcctcaaaagtccgcaaagttgtcaaattttatgcgttaaaccacttgctgtttctgctagttcttgtgctcaatttgttttgaaaggattcaattttttgctgtctaactcgaggttgctctgtgcacttgaagggaagtatctggtacaagatagttgttatgatttgattgacagtgctgatgcagtcaatggacatcaagagcttcagcatctcagtttctcttgtcatgtaccgaatgtgactggaagagggtttatcgaggtggaagacaatggtcttagcagctgttcctttccattcatagttgcagagcaagaaatttgcttagagatctgtaagctggagaatgtcattgaggcagcagagactgctgatgacaaccagataaaaactaacctaatggaagaaaagactcaagcattgtatttcatacaagaaatgggttggctccttcatagaagtcgtgtgaaagttaggctaggtcccatggcacctgtccaagatcgcttccattttaatcggttcatatggcttgttggcttctctatggaccatgactggtgtgctgtgatgaaaaagctcttgaacattatctttgagggcactgttgatactggagatcatgcctctgttgagttagctttgttagagatgggtcttctacacaaagctgtaaaaagaaattgtcggcctatggtggaaatactattaaaatttgtgccagttaaagcttcagatggtggagacagtaatgagaagcaagtcaacaagtcccctgacagattcatattcagacctgatactgttgggcctgttgggttgactccccttcatgttgcagcaagtatgcatggttcggagaatgtattggatgcattaactgatgatccaggaatggtgggaactgaggcatggaaaagtgctcaggatgctacaggtttgaccccctatgactatgcatccatgcggggctactactcttacattcaacttgtccagagtaaaacaagcaacacatgcaaaagccaacacgtgcttgatatcccaggcacccttgtagatagtaacacaaagcagaagcaatcagataggcacagatcatcaaaagtttcaagtttgcagactgagaagattgaaacaacagcaatgccacgtcgttgtgggctatgccagcaaaagctggcgtacggtggcatgagaagggcactggtttataggccagcaatgctgtcaatggtggccattgcagccgtgtgtgtctgtgtggctttgctcttcaaaagttcacccaaagtttactatgtattccagccattcagctgggaatcattggagtatgggtcaatctaatgttgtatatcaggtattctttgcagtaggcatgcacttttgttttttggagtgtgaaagtcttagttctgagtatatacatctgtgatagtagctgtcatcaaaatatgtagggaaggtttgtttaccttcacttcagatgttcagcataaaatgctcactgtgctatctatcaaatattaggtagatggtgctattagttcacgtatatgcaaagataataggagcttgccggtatttagaagggtactttgtatcaatcaataattatataagatttactacaggtgagtatgctttgatgttatcttatttattgatgttattatgaaaattatataagcaactaaatgtagttgactagtaacaagagaattatgtaacttgcaggggacttcatattgaatttgggtttcattatgtacacctgttgttttcaaccattggtttatgtatgaagctttatgtaaaaaaaaaaaaaaaaaaaaaaaaaaaaaaaaaaaaaaaaaaaaaaaaaaaagaaaaaggaagaaaaaaaaaaaaaaaaaaggtttattccttttagggagggtaaattttagcttggcactggccgtcgttttacaacgtcgggactggaaaaaccctggcgttacccaacttaatcgccttgaagcacatccccttttcgccagctggggtaatagcaaaaaggcccgcaccgatcgcccttcccaacagttgcgcagcctgaatggcaaatgg

SEQ ID NO: 28851 - DNA, 643 bp, Glycine max
  Clone ID: TF_GmC368_1
cttctcataaccttcttctggagctctgtggaagttactatggacacaagcaggtctgagggaaaaagggtcatgaggtacaaagaagaagatgatgataatgatgatgaagaagaagaagaggtggtgagtgagatgggttttgaagaagatggaaggaggaataagagagtaataagagatctctatggaaagagagggtccaaaggtggaggctcaataacaccttcttgccaagtggacaattgtgatgctgatctgagtgaagctaagcagtaccacagaagacacaaggtttgtgagtaccatgccaaggctccttccgtacacatggcagggctgcaacaaaggttttgccaacaatgtagcagattccatgtgctatcagaatttgatgactcaaagaggagttgtagaacgcggttggctgggcataatgagaggcgtcgcaaatatgcagttgactagctaccatggacaatgatttcttctatgggatggacattaataatcattgaggcaagcatgtgattaatgaaattaaatttcccattcaaatcttcataaatcattgttgctggtctctaaggatgctctctatcttctgtcaagattttcatatgcaaagatttttctgttagtt

SEQ ID NO: 28852 - DNA, 1031 bp, Glycine max
  Clone ID: TF_GmC47481_1
ccacgcgtccgtacggctgcgagaagagacagaaggggctccaaacggtcctagctcaacaacaagcatatccttcatcattgtcaccacccctttgcacaatggagagggagagagcattgtttgagagggtgagaaagaatagcacagtggaagaggaagtggaaaatgaagtagaggaggaggatgaaagtggcgttagtattactgaagaagagaagaagaaaggggttggtagtagtggtgggagaagagggtcaagtggaggtagtggaggggtttctccaccttcatgtcaagcagagaggtgtggtgctgatttaactgatgcaaagaggtaccatcgccgccacaaggtgtgtgagtttcattcaaaggcacctgttgtggtggttgcagggctaaggcagaggttttgccagcaatgtagcaggttccatgacctggcagagtttgatgaatccaagagaagctgccgccgccggttggccggacacaacgagcggcgccggaaaagcaacccggaagcttccaatgagggcagcaccaaaggccatcaccctaaggaaacaacacactgcaggcttgcaaatgagagggagagaattcagatgaacctaccagggagttccggctacaagtctttcaacatcagatgaagccaaagtgttcacaaagctctctctcttctgtcaccctttggtttcttacaacccaaggtatataataaaaacccctttgtattgtatgttcacatgagcaagaatcaaaaatcccaaaaacttccaacagccaaagcctgatgtcttaatatgcaatgtaagctagctagtttcctgagctctgtttttcttatttggatagagtgccttttttttctgtttgccttatcaccattgttatcctatagaagcacccttcttgattggggtgtgctcttatcttccattgggttagaataaaaagatattgcttcttttgggtaaaaaaaaaaaaaaaaaaaaaaaaaaaaaagcggccgctttagagga

SEQ ID NO: 28853 - DNA, 551 bp, Glycine max
  Clone ID: TF_GmC39396_2
catgacttcaacttcaacaaccacctctttctctctcacttcttctcttgctcttatcaaaacaaaccactatgaataatactaacgataataatagttacaacaatacactctagcttctagcctgctacctttccttatcaccagcaccaatggcttcagacgccaaactctcctcttctgagtccctcaacggtttgaaattcggccaaaaaatctattttgaggatgttggtcttgctactccagccacctctcttacttcttcttcttcttcttcttctgctgctactgttacttcttcttcttcttcaaggaaaggaagaggtgggtctgttcaaccagctcaacctcccaggtgtcaagttgaagggtgcaaagtagatctgagtgatgcaaaagcttactattctagacacaaggtctgtggcatgcactctaaatccccttcagtcattgttgctggtcttcaacaaaggttttgtcaacagtgtagcaggtttcatcagcttcctgagtttgatcaaggaaaaagaagttgccgtaggcgg

SEQ ID NO: 28854 - DNA, 753 bp, Glycine max
  Clone ID: TF_GmC60889_1
tacggctcgagaagacgacagaagggataccattctttcccaaattatattcctaactgtttctccaggttacttttaatctgccttattggggaaaaaaaaaggttggtttaaccaattttctaatatttcaggttaatgatatttgggctcttggatatgcttcttgagctaaacagatcttttcctttttgggtcctacttctgactgtagtttttttgttccacaagtttttctgcttctgattttctaaaatagacaaccttgaaataagaggctgtatggttatggtatatagcgctgctgtaatgtttagcttactatccaggtttcatttgctggctgaatttgatgatggtaagcgtagctgtcgtaaacgccttgcaggccacaatgagcgtcgaagaaagccacaagtgggtattcactctggaaaagctgggaggttgcttcagccatatgctggtaattacttatttctgaaattgtgttatgataaagcttctctcttaagttccatccttcttggcagtacatgaagatgcatctatttctttccttgattacttttccatcatatttgctgaagttaaaaactgattatggaattgctataacttactaatccttcacaactcttgtttaactgcttgattatgaaagatacagaaattgaagcatagcaaaatatattggttcgctttcatagttcatttccacctttgcaaagagtttctctattatatatgccc

SEQ ID NO: 28855 - DNA, 1989 bp, Glycine max
  Clone ID: TF_GmC39396_1
ggacagatagtcaaaagataatatcaaataaaatggggcgggggtagcaaacatcaaagaggctgtcctcccaatcacaaataattccaaaggtgacggcaatggcaaaaaacaccatacctgtgcttaagacactactaacaaaacacactctcaggtgatattcattcggcgcctgaaagttccacaaatgaggcaaggctacccaccttgcttatcagtttgaacaaaacaaaacaacaagcaatagttatcatcaatctggtaagtaaccaagtaggcacaggtttctgctacattttattacaaagctgacaaaaaaaaaacaagtgcattaaagtgaccaatgagcagattcatatgccctggactgttctagatccatataatgcctcctgccctgttgggacaggtccagctcaccatgaagttggctattgagaggctgtgaaatctgaccgagacctagatcagggaccacctcgggcgaacagttaccagaatcaatgcccttgaaaaaccacgaggtatttggaagttgatggattgatgcaccatgagatgatgcagcaagttgtgtcaagggtgtcccgttgaaatttatcatgttactcaacccaagacttggtgctgtgtttctagaaccccatgtttgatttgacagaagagagagagcacagctcgtgtcggtgaccccaatgtaactttcccctggaggatgtcccgggctggcgaagcttgtcccacccaccgaaccttgcaagaaaaggtcagatgatgtctctgagttgccattccagctaagtgtggaggtttgatttccaggagctagctcagatgatctagctgggggttctggatccccctgtttgctttggctgtggagtcagtgccctccgcgaggtgctgccccccctctatcttcccccgcgggcgtggcccggcccgcggaacctgggcggaaccgccggctcgtgcggggcttgctccgacgttctctccggcctcccgggccccctcggcgtcgtcgtttccgttcctcattcccggtcggatggcgtccggttgagaagaaaaaagaaaaaaagaaaaaagagagggtacaatctgtctctcgtagctggcttggctccattattcttggtttttggacagacaagggtgtgtttggttctctgactacactcactcactccttctctcttctctctcagtgtacctgactctgccaccttccctacccttccaccccctcttttgtcttccactttactctcccattacaactcctttcatgaacttctatttccaacttcaaccacctctttctctctcacttaactttcccttatcaaaacaaaccacaatgaataataatactaacgataacaatacactctagacacctcaccttatcactccatcacctatggcttcagacgcaaaactctcatcttctgagtccctcaacggtttgaaattcggccaaaaaatctattttgaggatgtgggttttgctactcccgctacctctcttacttcttctgctactactgctaccactgttacttcttcttcttcttcctcttcaagaaaaggaagaggtggttctgttcaaccagctcaacctccaaggtgtcaagttgaagggtgcgaagtagatctgagtaatgcaaaaacttactattctagacacaaagtttgtggcatgcactctaaatcccctacagtcattgtaggctggtcttcaacaaaggttttgtcaacagtgtagcaggtttcatcagcttcctgagtttgatcaaggaaaaagaagttgccgcaggcgactagctggccataatgaacgtcggagaaagcccccacccagctccctcttgacctctcgctatgctagactttcttcatctgcttttgatcatagtggcagagggggcaactttctgatggaattggcttcatacccaaaacttagtctgagaaattcac

SEQ ID NO: 28856 - DNA, 931 bp, Glycine max
  Clone ID: TF_GmC38724_1
aatttcagaattaatgtatacacccactcactctagttagctagtactaaagggagcatcagcatcagcactcagtagccagcagcagcaatgggttctgcttcagtcaccaaagcaccaccctcttcctcctcatcacccaactcttcttctactgagtcccttgatggcttgaagtttggccagaaaatctactttgaggaagtgagtgttgctgcagcagcagcaacaacaactcaagggggcaacaaaacgagaggtggggtttctgcttcaaagaagggaaggggtggctcagtgcaagctcctaggtgtcaggttgcgggctgcaaagtagatctgagtggtgctaaggcttactattctaggcacaaagtttgtgccatgcactccaagtcccctactgtcactgttgctggtttggagcaaaggttttgccaacagtgtagcaggtttcatctgctttctgaatttgatcaaggaaaacgtagctgccgcaagcgacttgctggccataatgagcgccgacgaaagcccccaccaagctccatattaacctctcgctatggcagactctctgtgccctatttttgataacaatggtcgagacgatggctttctgatggaatttgcttcataccccaagcttactttgagaaatacattgccaactcaaagatcaactgagccggctccagggaaccatgctgcaacactcacctggcaaggaggttcagacactccctctgaatttttcctgcaaggatcagggagtagtggtggaacaagcttccttaattcaaaacatcccttagtggaaagttacactggagtcactgactcaaactgtgctctctctcttctgtcaagtcaaaccctgggtttcagaaacacagccccagcaacaaagtttgaactgaacaacaacttg

SEQ ID NO: 28857 - DNA, 711 bp, Glycine max
  unsure (1)..(711): unsure at all n locations
  Clone ID: TF_GmC261392_2
ccccccccaccaacacanccggggtttggagtgcttttcgcagaccctatggcgcctgtgataatctctgcaatcacttaggtcagaattgcatccatcaacagaacaacacatgttctgtgatccattctgaaggcgggatcttttcgacgaaccagatggcgatgacacggttttcgattcttttgtgtctttagcaacaatctggggctattttttccccaccaagcctcaaatccactgaagctgcttcactcttctggccttcaccattggccagcagctccaacccacgtggatcccaagcaaactctttcccatcccaatccataaccaacagttgctccccacaaaactattttttgctttatgtcccttttatgatgccaaaccaaacctaaacttgtgtaaggcactcacaaaggaatcagaacttgaatttgaatccccttggtgtttgttttcaccacaaagctgaagaagactttgacttgttgggaaccaaaaaacaggataaaggggagatcaatcaattcaacacacaagagggatattagaattgggttctgagaggaagccaaaataataaatgcatcaatttttaaagaagattgcatcaaaattgaaagaaaataaataaaaaagaaatggatattggaagatatcctgaaagattatagacatgaacgtcacctctcgagccacgcgtgg

SEQ ID NO: 28858 - DNA, 3780 bp, Glycine max
  Clone ID: TF_GmC564_1
tgttgcaggtggggttggaattggaattggttattggactttgttgcaacaagttagattttgattgatggaggctgagtttggagcgaagaatcagtacttgtatggacctgtggtgtcaggaatgaagaaagctgttgttgggaatgggaagaggagtttggaatgggatttgaatgattggagatgggatggtgatcttttcactgctcaaccactcaattcagtgccatctgattgtaggggtcgccagttttccccacctcatcctgaaattcctgcaaaaaatgctaatccatctaccaccaatttgtcttattctgttttcatctcaggtgaaggaaagagggaattggagaaaaggaggaggggtgttataggtgaaggtgaaggtgagggactgaattatgaggctggttctcttagtttgaaccttgcgggtcaaggttaccctctcatggtggaagaagaagaaaagagtggaaagaaaacaaaggtaattgggaccaatacaacaactactactactactacctctaaccgtgccgtttgtcaggtgcaagattgtagggctgatcttagtaatgccaaggattaccaccgtcggcataaggtttgtgatgttcattctaaggccactatggcactagtgggaaatgttatgcaacgtttctgtcaacagtgtagcaggtttcatgttcttcaagagtttgatgaagggaagagaagttgtcgaaggcgtttggcaggccacaataggaggaggagaaaaactcatcctgatgtctctgttgttaatgaaggctctctgaacgatcaaagggacagtaactatctgctgatgagtctgttacggatactgaccaatttgcattccaatggctcagatcatacaaggaaccaagatattctctctcatctgctgaagaacctggcaagtctggctggtccaaataatggtggaaggttagcacccttactggaggaatctaaaggcttggtaaatgctgggacgcatggagctgatcatgataaacccaaccttaactcaaatgctcctgaagcttccaggccttcttcttccatcaagacagacaatggcatcatcgctcaggaccctccaatgtcggtggtgcagtatgaaacacctgctaatggcatgacacaaaaatgtatagcttcaggtgatggagtaggaaatttaaaacctccttcaggaccactgctctcaaatgtatgtgaaccaagggacagcgttccatcccaattaactacagcagagactaaagtaggaaggggaaacttgaataacattgaccttaataatgtttacaatgatatacagaatactgttgagaatcataagaagccttatcctcctgtggcttcagggatggggtttattgaccatgcctcatggttgcaatgtgattctctcaaatcaagtcctccacagacaagtagaaactcagattcaacctctacccaatcaccatctagttccagtggagaagctcaggtatactcttgatgtaatttaaatccatttcctcttttctgaataatttaataattctgctatttactttgtatcaaaatatttagattacttaaatgattgtatagatatctttactgataaagatactattttgccaaggtcatcatttgaagtccccttttcaggttctttgccttttcattagtgtgtaggtctactttttgtggctgactcagaatgacatgttatttgtttactgtttacagagtcgcacagatcgaattgtttttaaactctttggcaaggatccatctgattttccccttcttctccgatcacagattctcaactggttatcccacagtcccacggagatagagagctatataaggccaggttgtataatattaacgatatacctccgtcttgaaaaatctgcatgggaggagctctactgtaatctaggatcaagcttgagaaagcttcttgctgcatcaaatgattcattttggagaacaggatgggtatatgcaagggtgcagcacgctgtagctttcctgtataacggtcaggtagtcttagatgtgcccttgcgtctcaaaagcccacaacattgtatgatttcatgcattaatccacttgctgttcctgcaagtgctagtgctcagtttattgtgaaaggtttcaacctttcccaatctagcacaaggttgcactgtgcacttgaagggaagtatctggtacatgctagttgtcatgatttgataggtggagctgatgcacccattcagcatctaagcttctcttgtcaaataccaagtgtaactgggagggggtatactacagatggggatcatggtcttagcagctgttcctttccatttatagttgcagagcaagaagtttgttcggagatctgcaagctggaaaatgtgattgaggaagctgaaaccactgatgatatccagataaaaaaccaacatatggaagaaaagactcaagctttggatttcttgcaagaaatgggttggcttcttcatagaagtcatgtgaaatttaagctaggttccatggctcctttccatgatctcttccaattcaatcggttcgcttggcttgttgacttctccatggaccatggttggtgtgctgtgatgaagaaactcttggacattatatttgagggtggtgttgatgcaggagagcatgcctccattgagcttgcattgttgaacatgggtcttctacacagagctgtaaagagaaactgtaggcctatggtagaactactgttaagatttgttccagttaaaacctcagatggtgcagacagtgaaatgaagcaagttgccgaagcccctgacagattcttatttagacctgatactgtcgggccagctgggttgactcctcttcatgttgcagcaagtatgagtggctcagagaatgtgttggatgcattaaccaatgatccacgaatggtgggaattgaagcatggaaaagtgcccgggacagtacaggtttgacccctaacgaccatgcttgccttaggggctattactcttacattcaactagtccagaacaagaccaacaaaaaaggtgaaagacaacatttggttgatatccctggaactgttgtagatagtaacacaacgcagaagcaatcagatggaaataggacatgtagagttccaagcttaaagactgagaagattgaaaccacagcaatgccccgtcaatgtagggcatgccagcagaaggtggcttatggtggcatgaaaacagcaatggtttataggccagtcatgctctccatggtgaccatagcagttgtgtgtgtctgtgtagctttgctcttcaaaagctcacctagagtttattatgtcttccagcccttcaactgggaatcattagagtatggggcaatgtaatgttgtatatcaggtgttttctgctgtaagcttccaccttttcttaatatattattttagaaactgggtaagtcttagattttgggtttagagtatagacatgttatacatccatagtaatagtagctgtcatcaatatatatggggaaaacccgaggttgacacttcacctgttcagaacagaatcttgattatgaaacctgtgaacctgttaaatatggggtcaatgctattaggccattatatatgtgataatagggataacgccataacagttttaagcaatttgaggaaattgccttgtattaattaatcaataaatacaagatatttacggttcagttt

SEQ ID NO: 28859 - DNA, 263 bp, Glycine max
  unsure (1)..(263): unsure at all n locations
  Clone ID: TF_700734849H1
agcacatccctacacagtggcatgccttgtggatgggtgcaattcagatcttagcaatngtagagattatccataggcgccataaggtgtgtgagctccattccangaccccagaggtcacaattggtggcttcaagcaaaggttctgccaacaatgtagcaggttccattcgctggagcaatttgatgaaagaaaaagaagctgcagaaaacgtttagatggacacaatagaaggagaaganagccccagccagaacctctc

SEQ ID NO: 28860 - DNA, 618 bp, Glycine max
  Clone ID: TF_LIB4390-055-R1-K2-H7
ctatcttctatttacgtactgctagtactatatcctgttttcatgttttttaagtagcagcattcaattggaacttcagtaaattacatcctcgattacaattatggcttatccttgttgtgtttaattagtataaaaggaacttgtgttactttattttttttcttccagattccaccttctttcagaatttgacaatgggaaacggagctgcaggaagagactggcagatcataatcgtcgcagaagaaaaactcagcagattgctcaagaaattcacaaatctcagcattctttggacaatgttgcaaggtccttacctgaatctggagctcaatcttcgtcgtcgtcggggaaggtggcagtacgtgtcaccccctgattatttccagcaacaaagaccaaaccaaaatagaggctcttcgtcatcaacaacatcgatatcagggtcattgtttttctcaggtggttagtgcatgtgggaccaatttgcatgcctaatagtaccccatgccattaattaatggaggagaataacaataatgtactgaatatctcttgtaacttccttctccatttaatttagaagctttaataatattcttgaatcactgattt

SEQ ID NO: 28861 - DNA, 1509 bp, Glycine max
  Clone ID: TF_GmC422_1
ccacgcgtccggtcttaaaggacgcgtggagcgatatagaaagtgagagagaaaaaaccacaacgtcataaaaaaaagacttaatgtgcacgccattgtggtgagatagaaagaaagatgcaaatggaattccaaggctaacaacacaacttcaacaaattagggctttattctttgcaatcatatcatatactcttcacttcactctcaaaactcccacagttgaagagacatgttggactatgaatgggggaacccgtccacgataatgctcaccggaaatgaagacagctccgccgcgggctccgaccaaacccaccgtcaaatcttcgaccactatgcgtcccacacactcatccccgaccacttcctacacgcgccaacgcactccaccgccaccaccgccgccgcaaccaccgtggatttcacccatccaccacttcaccccgcaaccccaccaccataaccacacatgaaccaccaccaccataccatgccttcttcgacccacgcgcttttcatggcgcgtcgaacacctcttaccccccacccccttccatgctctcccttgacccgctgcctcacgtcaacgctgttgggtctgggcctggacacgggcccgggccaggacccgggccaggcggacttctccttgtccccaagtctgaagaagtcggtcggcccatggactttgtcggctcacgaattggactcaatctcggaggacgaacttacttctcgtcctctgaggatgacttcgtgagccggctctaccgtcggtctaggcccgtggaaccgggttcgactatctcgtcgaactcgccgcgatgccaggccgagggttgcaatgctgatctgtcgcaagccaagcactatcaccgccgccacaaggtgtgcgagtttcactccaaagccgccaccgtcatcgccgccggcttgactcagcgattctgccagcaatgcagcaggttccatcttctttctgagtttgataacggaaaacgtagctgcaggaagagattggcagatcataatcgccgcagaagaaaaactcaacaaccaactcaagaaattcagaaatctcagccttctttggataatgttgcaagatctccaccggactccggagctcagtcttcatcgtcggtgacggtggcagtgtcgccaccggattatttccggcagaggccataccaaagcacaaacaacccttcatcgatttcaagctcactgtttttctcaagcgggtagagttcacgttggagaagtttaatttgcatggctaattaatatttgcaagaaattaacggaggagcgtcaacaataatatatagtgaactactacttccacttgtaactcccaatttaatttcaaactcttaatctcgcgttattaatttgtacgaattgtgatttaaagcatctatgttaatccctccccttaattttctataaaaatttaatagtatttgtttactgttgattattattggcccctttggggtgcta

SEQ ID NO: 28862 - DNA, 707 bp, Glycine max
  Clone ID: TF_GmC663_1
agatctcagctccagaaatcaaggattttctttgaatcatggattttagctaaataaatcataaatcttcataaatggatcaagttgctcctcctccgattctcatgcaccgcaagcgcgatctctcctacgccgtcgtttcgcctgctcccaacccgagctggagctgggactgggacagcgtgcgtttcgccggcaaaccaccgccaccactctcctccccaaacgacgacgtcgtttttgaggagagtgttgcgccgcctctgcagttaaacctcgggggaaggacgaacaacagcaacagcaacaagagagttaggtcagggtcccccggaacgtcgtcgtatccgatgtgccaggtggacaactgcagagaggatctgtcgaaggcgaaggactatcaccggagacacaaggtgtgtgaggctcatagcaaggcctccaaagcgcttctcgcgaatcaaatgcaaagattctgccagcagtgtagcaggtttcatcctctctcggagtttgatgaggggaagcggagctgccgccggagactcgccggacacaaccggcgccggcggaagacgcagcccgaggatgttacctcggcgactcccgcgccagccgccgccgcgaatttggaaatcttcgacttgttgactgccatagctggagcttcgcagggaaaatttgaggaaaaaaggtcacaagtaccg

SEQ ID NO: 28863 - DNA, 2557 bp, Glycine max
  Clone ID: TF_GmC95509_1
gataattcccccctaagacgacatcaggttgggaattcgcattttgtaaatgatatagtcaaaactaatttacacttaccacttgctatttgctaagtacatattttctttgcttgtttaagtttttggtctagcaggaaatacagctgacatggggatagaacaagtgatttaatgttgtctttgaaaaattaatcgatgttttcccttaagaattagcagttcattcatagattctgtaaaatttggggatgtttcttaaactctagcttcttaatgtgttttttaatcattggtctaccccatttatacagacgacagaagggggttgtgtgagtgcgagaaacacgaagagaggttcatgggtactagtacgaggagtacgttttcagggctcgaggataattcccctaggggcatctcagtttgcagatcacagtgaccatttgtatatgaatttctaaggtcttgtcatggagtgtaatgcaaaatctctcgggcaatgggactgggagcacttattcttcttcaatacaaaagcagctgaaaatccaaggttacaaccaactgattgtagcagtgaagcagatcgggaaatcaacgttggaatgttgtatccatcaggtggtagtgcttgttctggctctgaactaatacatgcttcttcatcaaggagctcaaaatcagcttccaacaattcatcatcaaatggggatagcagggaatctatattgactctggaaggttctcatgatgattccactgggaagaaagaattgtgcaatggagagccggttgaaacttctccagcagcagtgccctctcctgtctctggtgaaccattgctcactctaaagcttggtagacgattgtactttgaggatgtctgcaccgcaagtgattccaagaaaccatcttcctttgaggttcccattttatcagggaagaaatataaaacaagtagtcaggctgtacagcatccaagctgccaggtggaaggctgtggccttgacctctcatctgctaaagatcaccatcgcaaacaccgagtttgtgaagctcattccaaatcccctaaggtggttataactggtttggaacgccgattttgccagcaatgtagcaggttccattgctctgtcagagtttgatgacaaaaaaagaagctgtaggcaacatcattttgccacaaattctagtcgcagcaaatctcagcctgattcaatcctattaaatccatcagctttgtctacatcaccctatgatgggaggcaaatagtgaatacatttgcattttcacggactcccattgatttagcttggcaagatatgaacccccagacataagaatatttcccgaagcgtgtaaatcccagtctgtcggtaccgagtatctttgcaacactttttcatcattccaatggccatctaccatcaagagccatggtaccgacgagtactgttcaagatgttacgcgtcatcaagatactattcgtttggctgatccaaacgatacaaaggatgttaaccgttctctctctcttctgtcatcgaatatcttcatcttcatggggtgcatatgagactaagtccctttctttggaacactccactcgggcaacacactcaatcactcagcatcacttaccacttccttcctcggcagagtattggcacactgatcatcaacaacattcaagcatgtgtatctcattcacggattgcgatagcagcaatcgctttcaagactttcagctgttgagctcaccctatgaatcaccttttccttgcaaccaactggattaacaacactatgcttctacttcaacaaaatttctagggtgctgtctttcatttgcttgctttttcaaatggagattaattaaaactgcatgttgattgcagttcgaatggtgtaagacctgttctcttgaaaactcccaagacattttcattttgtaccagactgcgctcatttcaattttaactttaatttctacttaaaaaaccatgtctccaccagcaacagttttttataccttagcttcttacctatgttacgcacatctccctacttcataatactatttactcacatcccaaaacaaataaaaaatttgattttttaatataaattcattattctatttcaggcgccgcaaaactcagcctgactcaatccaattaaatccatcagctttgtcttcatctccctatggtaaaacaggatcattcccctcccttggaaaatctattgcctgtcttgctcactggttaagtttcgcagtttattattttgggaggcatattatacaaatcataatatttcccccccaattttgaatgatcaaaactggttccagcaagtgactttgttttcctttagttttgctgtcgaactgtgcttagtatttgcagcttatttcaacttatgcttggaaacgtgtaacctgtgaataaaaagaattctagtgcactaaaaaaaaaaaaaaaaaaaaaaaaatcattttatttaatgaaaagcttggtcgattttttttatttttatcggtaaat

SEQ ID NO: 28864 - DNA, 895 bp, Glycine max
  Clone ID: TF_GmC325872_1
agtcaaagaagcaatagattttattctaatcaagggggcataggggtacaccattttaagggggggcacaatagaatacatatattccaaggcacacagatacagaagaaactggctaagtacatataatatagagcttaagggaaatgaactagtattatacatacgacaccacctttagatgttgggagttcttcattctggtttagatgcttattctcgtaacataaagaaaggggcctttattatatgccttggcatgtaaactgtgaagatccattgacagaagagagggagcatgccggtgaacacattggattcatctaatatggaaggagttgtagccagaattctttgcaatgttcatctgaattcttccccagacatcagcatttctgcagtggctttctgtagggtgctgccctttgcttccactgcatccttcattgcaagtttcagcattgcttttccggcgccgctcgttatgtctggccaagcgtctccggcagcttcttttagcttcatcaaactctgccagctcttggaacctgctacattgctggcaaaacctctgcctcagtcctgcaaccatcacagaaggagccttggaatgaagctcacacaccttatggcggcgatggtacctctttgcaacagtcaaatcagcaccacacatctctgcctgacaagaaggtggaaaaaatccacttgaccctcttctcccactccctccaccacctttcttcttctcatcttctgcaagaccaccctcaccaccaaccacactttcatcctcctcttcttcatcttcaacttcaactgtgctgtctctcctcaccttttcaattgacacttgtatcctctctctactcttgatctccattgtgagtggtgg

SEQ ID NO: 28865 - DNA, 1706 bp, Glycine max
  Clone ID: TF_GmC53350_1
tttcggttctatattaatcgctttaatgtgtttttacttccataaagaatggttcaccttcttttttttctgagtgtgtagtccaatgtttctccccacttaaattttctcttttcaatcgtattgcaattgatctcagggccatcgaaaggtggtcaaagaaagactaagaaaacaaagactgatataagtgttttgtttatggactggaatttgcgctgcgagaagacgacagaaggggaagtggatcaggcaaacttacccaacatggaaacaatggaaggctcaagcagatatggaatgtatagaactaagggggaattttctgttgacttgaagcttggccaagtgggaaattctggcagggaatcatcagtgttgactaagtccaaagatggtggtgctgttggagtctccaaaatgatatcctcatcttcttcagggtcagctaagagagctcgttcccttagcaacgggacacaaacagtgtcatgccttgtggacgggtgccactctgatctcagtaactgcagagactatcataggcgccataaggtctgtgaagtccattccaagactgcacaggtcacaattggaggccagaaacaaaggttctgccagcagtgtagcaggttccattcactggaggaatttgatgaggggaaaaggagaaactctaaaaaaattataatattttccttccatgacttgcaatataccaacacactagaaagtcaatgactaaatttagtagtaattttatcaggcacacagttgctacctttctcaagttcacatgagtacccatccacaactgtggtgaatcctacttggggtggagttcttacaacttctggtgatgttaggcttcatgggcacaaccaacaccaccaccaggtgcatttggctgataaacaggacctttttcttggatcttctccagccggttacaaagaagggaagcaattggcattcatgcaaggtgaccacaccctcaacaaccggagcccacatcttccaggtgcttccgtgggccaggcccagatgtttcttaggaccagcctgtattcagaaagcgatgggctgagatgcaaaatgttctgtgatagcctaacaagttcgatccaagacaacaacacctctcgtgctctctctcttctgtcatcaccaccacaaccgctcagtcctggaaatggattaaacctgatggtgaactctcactcgccccttatgcaacccttgggcctgagcctgcatgataacagcctgggctccgtggaccctgttttgggccccaatgattcttcatcaatgtataacataggttctaatggatctcaggggaatgaggcccctccactatttccctttcaatgggaatagactttataaggggactcgtcctttggatgttgattctttccctcgtactatttcaatgttcaatttatcttttaatgaaggcaatgaaccattatctatcacgtttaacaaaatggtgtggaaattttcatgtctttaaaagtgttgctgtgtactatcaaaaactatattcccgtcacctttttgtctttttttattctttgaagcagcaccacatttcaatgagaaactctacttgctcatacaatgacatgtgccagtgcgtaacttacaaaacgcacaaaaaaaattattgaagtaatggtcctgatcggacgcgtggg

SEQ ID NO: 28866 - DNA, 1247 bp, Glycine max
  Clone ID: TF_GmC7371_4
gcaaacaagatatcctgttgattgagtaagagagggttattaaatagaatgatttaaacattaaatgtttgcatgaaaataaataacaaatgatattctgctttgttcagatataatttacaattttcagtgatttgccacatcttgatatcataattaataccatttattccctttatacacattgtatatatatgaacccggtaaataaagaaggttaaattacctactacattgttgacagaatctctgcattgcatttcccacaagcgccctactggccttggagtgcatctcacaaactttatgccgtctgtgataatccttagctttgctcagatcagcactgcagtcctccacctgacaaacagctcgatttgaagtacttcccgacactctacttttcttcccattcgtaccgtcccagctcccaacttccctatccaccactgcagaagcatggccaccaagctttaaactaagagtacccccttcctcattcaacccatcatcctccagcacaataactctccttttcttgtccccttccttgttccccttgggatccctaggatctacttcctcagaggtggaagaactgttggaggggcctccggccaccgggatcccagcggacccaatagggaaaaattgctgtcccactccaacaccgtccgccggcaccggattcagccggctagcgatgaacagatcaccatcccatctccaatcattcaaatcccactctgaggacctctttccccacacccctcaaatccgaggaagcacccacaccgcaaaaatgataagcctcagctccaaatctagcttccatggtcacaaacacaaactacacagctaaaattccagttaccagtacgaaatcaacaaaacggaatcactcacaatcatttaaccttacttcaccccccaacagccccaaaaatagcaaacccacgcaaccatgattccaattcagtccaatcagcatagccgccaccaacacttacaatctcccaagtcaaccacagtaacacaaaaaacctacctcagctcaagtaccacgacagacacaacaacctcttccttctttccttgttcaacataaattatcggcacgtgagtggtttggagtgagaagcaaagaagatcggcggcgagtggatgtcggtaagtgcgccacgcaaaatggcgaacatgttctgtggacggaaaccggacgcgtgggtcgagccggtgaattccgg

SEQ ID NO: 28867 - DNA, 348 bp, Glycine max
  Clone ID: TF_jC-gmXLIB3564P117ae07a1
ccggaactcccacaaaaaatattaattggatgatcacatcacacatatgaagatgtataatataacccccgagaaattatcagttggcaacctaacttacctgctacactgctgacagaaacgttgcataacatttcccactagtgccataggggccttagaatgaatatcacaaaccttatgccgacgggggtaatccttggcattactaagatcagccctacaatcttgcacctgacaaacagcacgattagaggcaggggtagtactagctgtaggggccccaattacctttgttttctttccactcttttcttcttcttccaccatgagagggtaaccttgacc

SEQ ID NO: 28868 - DNA, 440 bp, Glycine max
  Clone ID: TF_GmC130710_1
gctttggttataaactgtcacatgatgcttcattacatccccgatgaaaccctatctgatacaacaggcttgacctcttttctctacgattcttcttctcttgctgcttcttctgctgttagcgttactcccacttcctcactgcgatcattgttccttaagtccctgcgaggtttagacccaacggtcgtaatcttggtcgacgaagatgcggatttgacttcgaacaacttggtatgcagactaagatccgcgtttaactacctatggatcccttacgacacagtggacacgttcttgccgcgagggagcaagcagaggcagtggtacgaggcagacatatgctggaagattgagaatgtgattgcacacgaaggggttcagagagttgagcgggttgagcctaagaacaggtgggagcagcgaatgaagaatgcgag

SEQ ID NO: 28869 - DNA, 480 bp, Glycine max
  Clone ID: TF_uC-gmrominsoy069c09b1
ctgactctatgttgcagtttaaaagagggttggaggaggctagtaagtttcttcctcggaggcctcagcttttcactgggttggagagcaccgcagtgtctgcagagccaaagggaaaaggtgtagctctgaagatggagaattcaattggggtgaggagtagaaagaatcatgcgcgccaagatgaagaagaagaagaagaaagaagcaacaagcagtctgctgtgtctgcggtttgtgttgaggaggagagtgaaatatctgaaatatttgacagggtgttgcttagtgttgaaaatgtgccactgtgtgctgaaaagaatggatcagtggcacaagctgagaaatcgaatttgtctgatggagggaaggttcgatccaagaggcaagggaggaagaaggagacggtggatttgaggacccttttgattatgtgtgcacaagctgtgtctttcagtgacaacaggactgctaatgaac

SEQ ID NO: 28870 - DNA, 554 bp, Glycine max
  Clone ID: TF_15203660
ctgcagccgagagggtaggctgccaacaattcgaacgtgcaaatgggttacttctccattgtgaatggagttcaaatgccagtgcaaaccctgttcaaagagttatctttcatttcgctcgagcacttcgagagagaatatacaaagaaacaggaaggatgacagttaagggatcagggaaaaatgaagaaagggagttacttcagaagatggacaccaacattgcccttaaatgccatctaaaagttcctttcaatcaagtaatgcaattcactgggatacaagctatagtggagcatgttgcatgtgagaccaaaatccatcttatagatcttgaaataagaagtggtgtacaatacacagctttgatgcaagcactggcagagcgccgggatcgcatagtgcaacttttgaagataactgccattggacttagttcattgaaaaccatgatagaagagactggcaaaaggttagctagttttgctgaatccttgaacttacccttttcatataagacagtttttgtgaccgacattgcggaaataagggaa

SEQ ID NO: 28871 - DNA, 435 bp, Glycine max
  Clone ID: TF_LIB3092-002-Q1-K1-C1
cccacgcgtccggaaaagaaggttcacataatagactttgacatcagccaaggaactcaatacataactctaatacaaacacttgcttcaatgccaggtaggccacctcgtgtgagattaactgtggtggacgatcctgagtctgtgcagcgttccatcggtggcataaacatcataggacaaagacttgaaaagctggcagaggaactcagattgccatttgagtttcgagctgtggcgtcaaggacgtcaattgtctcaccatcaatgctcaactgtcgtccaggggaagcacttgtggtgaactttgcattccagcttcaccacatgcgcgatgaaactgtatcgaccgtgaacgagagagaccaacttcttcgcaatgttaagagcttgaatcaaaattgggacagttgtggagcaggacatgaacacaac

SEQ ID NO: 28872 - DNA, 360 bp, Glycine max
  Clone ID: TF_LIB3242-464-P1-K1-D8
aacataaatcaagtgagtttttttaacaaattatagagtaacttgactatgagttccgcgaaagaagattaggatgatacataaactaactaaaagtctgaaataacaaaaatgaaccagttgtcattgaatcatcacctccaagcacaagaggtaataagaacttgattcatccaaccaagacatagagccccatctctctcttctagagtgtaatgtccttggtagctttgctgaagattttttattgaacaagtaacaaaggagttcaatggatatggtgtgaatccggccatagtgaaacgtgatctccacttcttcagaagctcatggcgttccactctttttgccccttcacat

SEQ ID NO: 28873 - DNA, 404 bp, Glycine max
  Clone ID: TF_jC-gmst02400046a06a1
ggctcgagatttgggggcgagtgttgtgcgaagtgagggagatgcagtagaatagtaatagtggtaacaaaaggcaacagagaacaacaacctcgccgtggcggaggcgctggtgaaacagatcggcttcctcgccttgtcacaggtcggagctatgaggaaagtcgcaacctacttcgccgaagcgctcgcgaggcgaatctacagagtcttccctcagcagcactccctctcggattctctacagattcacttctacgaaacttgtgcttaccttaagttcgcgcacttcaccgcaaaccaggcgattctcgaagcgtttcaagggaaaaatcgcgttcacgtgattgatttcggaatcaaccaggggatgcagtggccggcactgatgcaagcccttgcgc

SEQ ID NO: 28874 - DNA, 773 bp, Glycine max
  Clone ID: TF_LIB5118-051-A1-PF1-F2
tttctagtactgaagtttaccccattgcttcaaagtttaggggaagtaattgatgtgtccatgcttcatgtgaagcctggtgaggcagtggcagtgcactggctgcagcattcactgtatgatgcaactggaccagattggaaaacactgaaactccttgaggagttggagccaagaatcatcaccttggtggagcaagatgtaaaccatggagggtctttcttggaccgttttgttgcctccttgcactactactccaccctctttgattcccttggagcatacttacacaatgatgattcaaaccggcaccgtgtggagcatggccttctctccagggagatcaacaatgtgttggccataggaggacctaagaggagtggtgaagacaattttaggcagtggagaagtgagcttgctaggcactgttttgtgaagcaggttccattgagtgacaattcaatggctcaagcacaattgatattgaacatgttttcacctgcttatgggtatagccttgcgcaagttgagggaactttaaggcttggatggaaggatacaagcttgtacacagcttctgcatggacctgctgtaattctagctagatatatatcttaataaaggttcatagcttttccaattgggtcttaaaagtgttcaaacttcaaagtagtagctggagatcaattgagctgtatattgagaagatagattgcaactttttaggggattaataaataattctgtagccattttcatatgttcacccacc

SEQ ID NO: 28875 - DNA, 866 bp, Glycine max
  Clone ID: TF_GmC121075_1
actcgcgtccgggcgcggccatcccatgcgagtcaaaggttaataaacctaaatggataccacgttgtttagggtagtgagtagtttccaacaccaacaccaacccgatcacgatcaatccctcaacaactccaccacaagcagcagctctcgatcctccagacaacaacaaaactatccctacccacaagaagacgaagaatgcttcaactttttcatggatgaagaagacctatcctcgtcttcttccaagcactattgtccctatcaaccccaccctccctccactaccaccatccaccactccttctcccccactccctgcgactttgaattctccggcaagtgggcccaggacatcctcctcgaaaccgcacgggccgtggccgacaagaacaccacgcgcctccaacaactcatgtggatgctaaacgagctaagctccccctacggcgacaccgaccagaaactggcctcgtacttcctccaagccttcttcagccgcatctcccaagccggggaccgaacctaccgaaccttagcttcggcctcggagaaaacatgctccttcgaatcgacccgcaagacggtgctcaagttccaggaggtgagtccctggacaaccttcggccacgtggcgtccaatggcgccatcttggaagccttggaaggcgagcccaaactacacataattgacatcagcaacacctattgcacccaatggccaaccctcttcgaagccttggccactcgaaatgacgacactccgcacctccgtttaacctccgtcgtcaccgctgacgccaccgcgcagaaactcatgaaggaaatcggcgccagaatggagaaattcgccagactcatgg

SEQ ID NO: 28876 - DNA, 530 bp, Glycine max
  Clone ID: TF_LIB5068-031-A1-XP1-G9
ttccggatatatctcttaacattgttatcatgcattaagagagcatgcatacatgccactcccatatcatagcctccctcacctattttctttgttctaacgcttttgatatctttctctactcaaaacgcatctgcattgatcttatatgccttcccatgtttgttcccaaaactgaattcgaacaccttagaaaaacccaagctttaagaagtttcagttatgcatccttgatgttcagaaaaaccggcccattgtggttcacttcttgctccacgatagtcacacccttgggcttcaatttcttgaccgtgtccacggatcagttcattaattaatgggatttttttaatctttttttgtgtttttgttgttaatttttagtgtgcgtgtctgatcgccattgtcgatatattgtacactgttgtaacactctgtttagcatgcattttgtatgttttgtaagtgttgctagacatttttaatgaatgatcgttgacaaaagaaaaagggtttggctgaagcaccac

SEQ ID NO: 28877 - DNA, 611 bp, Glycine max
  unsure (1)..(611): unsure at all n locations
  Clone ID: TF_LIB4281-013-R1-K1-H3
ccacgcgtccggtccatacttcaagtttgggtacatgtcggcaaatggagcaattgctgaagctctgaaggaggaaattgaagtcacatagttgactttcagattggccagggaacccagtgggtgagcttgattcaggctctagctcaccgccctggagggcccccgaagatccgaatatccggtgttgatgactcctattcggcttatgccaggggaggagggcttgatattgttgggaaaaggttatctgcacatgcacagtcatgtcatgtgcctctttgagttcaatgctgtaagagtacctgcttctcaggtgcaacttgaagaccttgaacttctcccttatgaaagctgngggcagtgaacttcgccataagtctgcaccatgtgccagatgataagtgtgaacagtcacaatcatcgtgaccgattgttgagattggcaaagcgattatctcctaaagtggtgactctggctgagcaggaatttaacaccaacaatgcgccattcttgcagcgctttgatgagacaatgaagtactacttggctggttttgaatcgattgatactgttcttccaggggacncanaganaagattaatgtgga

SEQ ID NO: 28878 - DNA, 1366 bp, Glycine max
  Clone ID: TF_GmC30861_1
cccgtcccgacccacgcgtccgcccacgcgtccgtacagctgctagatttttctccaagggggcagtttctataataatggaagggcaatttctccttcattaatttatatgcctatgcctaagttttttcacaattggaatagccttgtcttctacactcccccaagctcttagattctaatccactgtggttttccaacctcagaatttcctcaaaacttggtgatgctggctagaacatctgtaacttcatcaaacaaaggaaaaagaagaagaaagaaagtacttctccaattgctattactgcttttctgacagcagattatgtgaaaccagaagagagaaccttgagaagtcaggactatatctgtttccttggcatcagtatcaattaacagctttctctaggctactattgtccattgttgtgcttctacatataatctgttggaagagatcagttgaagtactacaacacagttgagtcccggcaattctataatgcaggcatcagagcaacatagaaattcaagtatgtactatcaaccattacaacaaattgaagcgtactgcttgccgcagtatcggacactaaatccgcagctatactaccatgatggaggccatggaactcagttttcaactccaagttcttcagaactttactgcactttggagtcatcttctgtagctctttacaactccccttcaactgttagtttctcacccaatggtagccccatatcgcagcaagactctcagtcatatccacctgaccagtatcattcccctgagaatacctatggctctcctatgagtggctcctgcataactgatgatttaagcagcttcaacttgaagcacaagctgagagagttggaaagtgtaatgcttggccctgactctgataatcttgatagttatgacagtgccatcagcaatggaaacaactttgttccactagagatggacggttggaaacaaacaatggtggcaatttctagcaaaaacctaaagcatatccttattgcatgtgccaaagccatttcagacaatgatttgctaatggcacagtggctgatggatgaattaaggcagatggtgtcagtttctggcgatccgtttcaacggttgggagcatacatgttggaaggacttgttgcgcgattggctgcctctgggagttcaatatacaaatctttaagatgcaaagaaccagaaagtgctgagcttctctcctacatgcacatattgtatgaggtttgcccctacttcaagtttgggtacatgtctgcaaatggagccattgcagatgccatgaaagatgaagacagagttcacataattgatttccaaattggtcaa

SEQ ID NO: 28879 - DNA, 491 bp, Glycine max
  Clone ID: TF_jC-gmfl02220090c02d1
ggctcgaggaggcgaagaagatgggtgtgcagatggagtgaggcttgttcagcttctaatagcatgtgcggaagcggtggcttgtcgtgacaaatcacacgcttccatattactatccgaacttaaagcgaatgctttagtgttcggatcctcattccaaagagttgcttcctgtttcgtccaaggcctgatcgagaggctcaatctgattcagcccatcgggcctgctggccccatgatgccctccatgatgaacatcatggacgtggcctcagacgaaatggaggaagcattcaggttggtttatgaactgtgtccgcacatccagttcggacactatttggctaattccacaatattggaagcctttgagggtgagagttttgtccatgtcgtggacctaggcatgagcctgggtctacgacacggacaccaatggagaggtctgatccagaatcttgccggtcgtgtaagcggcgaacgtgttcgtc

SEQ ID NO: 28880 - DNA, 990 bp, Glycine max
  Clone ID: TF_GmC890_1
cgtgaaggagcacgaaacggtggctgtgaactgcgttttgcagcttcacaagacactctacgacggaagcggaggagccttgagggacttcttgggtctaatccgcagcacaaatcccagcgttgtcgtggtggcagagcaagaagcagaacataacgaaaacaggttggagggaagggtgtgtaactcgttgaaatactactcggcattgtttgattccattgacgagagtgggcttccgcaagagagtgcggtgagggtgaaaatagaagagatgtatgctaaggagataaggaacattgttgcttgcgaaggaagggagagggtggagaggcacgagagtttcgggaactggaggaggatgatggtggagcaaggagggttcagatgcatgggtgttactgaaagagaattgagccagagccagatgctgttgaagatgtattcttgcgagagttacagtgtgaagaaacaagagaaggaaggagcaacaggagttacacttagttggttagagcaacctttgtacactgtctctgcttgggggcctgttgatgctgctgcgggtacctcgtcctcgttttctcagccaagttgattttgattggtgattggtgattctttcttcataattcattccttcagagtatgaaatacagacacaagaaaggtaaggggtcaggggagagtcgagagtacaagagtattattctttgtaggtagggaaaattgtcattattattattctttcattctttgttgcagataagaatttgcctagcccaaagattagttggtgcaatttgtatcaatacagtaattgccttctgttctttatttttattattatttatagtcctgatgatgtctagatgataatatttcatacatttgaggtcaatttctgatcattgttttattcttttgtttatgtaagctgaaattctttcccaagtccttgtgattgaaatgaaatgaatgaattcagtg

SEQ ID NO: 28881 - DNA, 353 bp, Glycine max
  Clone ID: TF_LIB3139-046-P1-N1-E1
tccaccctaagtaaagtaacatggcttcaccaaggtgtccacccagagaaaatactaagccacaagaatttaaactccacacccaagaaagagctgtcaagcgtgcaatgtgtggaagtgaggttgaactagaaaaccttgtaattcaaccaggggaagcactagttgtgaacttcccttttgttttgcaccacatgccagatgagagtgtgagcacagagaaccacagagacaggctattgagattggtcaaaagcttgtcacccaaggttgtgacacttgttgagcaagaatccaacaccaacacttctccctttttccaaaggtttgctgagaccttgagttactacact

SEQ ID NO: 28882 - DNA, 990 bp, Glycine max
  Clone ID: TF_GmC151_1
tcggccatagcatcgcgaaactgggaaaccattcaaattgaagacctcaaaattgagcgcaatgagctgcttgctgtgaactgtctggtaaggtttaagaatttgcttgacgagtcaattgaagtgaacagtcccagaaatgctgttctgaatttaatcaggaagatgaaaccagatatttttgttcacagcgtagtaaatggatcttataatgctcctttctttctcacacgcttcagggaggcactgttccattattcttcaatttacgatatgtttgatactctcatatcccgtgaaaatgaatggaggttgatgcttgagagagaatttttgggccgggagataatgaatgtggtagcatgtgaagctcttgagagggttgagaggcctgagacatacaaacaatggcaggctaggaatactagagctggttttaagcagctcccactggataaggagataatgaccaaatttaggggcaaattaagggaatggtaccacagggattttgtctttgatgaagatggaaactggatgcttcaaggttggaagggtcgcatcattttgtatgcttcaacttgttgggtgccataatgatgtgtgtgactcaactcttggtttctgaattcatactggattgaaggtcaccttcagctgttgtgaactgtgatgaatattcttcccaggtttgcaccaagtgaccctgtataatagtggtagaatttccacccagattagcatcaaatcctacaatgacaaggacgcgaacattagtagtcagatacaatgacaaggacgcgaacattagtagtcagattgttatttacgatgtttttccttccctttcctttttctgaccgacatgtattataggcacttcagatcttaaaaagtagcaaattggttaaaaaggtttttgcagagtagtatcttgtatcgttagccactgatttgattgatttgaaatggatgactatttcatttagt

SEQ ID NO: 28883 - DNA, 2298 bp, Glycine max
  Clone ID: TF_GmC374_1
tcgcccacgcgtccgaaacaaccccttcttcacgttacctacgttttcattcaaaaccacagtacgacatcgaaaaaaacaaaaaagtcataatatatatcaacaaaagggaacgatattttcagcaaagttttgctctccacgtttattgaatcaaggtcttttctaatgctaggtgttgaatttggttaaccagtcttggaggtttatctgctattattaaaagtgttgggatacaagtaccaagcagaagtttgccaaggcagctgcttttagctgatgccatcatcatagtatggacttgaatcaatttttaaattttaacgttattagttcggaaggattcccttgcacatcgtcttgtactcctatttcaccaatatccaaccagttgcttggatccttgaaacttgacataggaaactcacctaactcggccctttctagtcattttgattctgatactctttcttctgcattaagtgacagtcaggaattgcacacctctggggaaattcactctggtgtcaactcttgcaagtctttgcaggaaagcaatcattatttgcacaggccagtctcatttgtagaccatctccaagacggtttacatctatctactaggagctttcttccacaggatgcaagttatgaccatgaaactagacatgcattgctggaattagaaacagctttgatggcacctgatggtgaagatcaaatcaccacatcaagcacttctttgggtgttggcagtagaccaacaacatcttgccaaagaaataggtcctggagctctgagggccagtcaagtgatgttgcacatgtagagaagcaccacaaatcagtggaggaagaatcgctgcaaggatttccatcatgcaatttgaaacaattgctgattgtatgtgccaaagccttgtctgaaaacaacatgcaacattttgatcaattgatagaaaaagctagaagtgctgtgtctataactggggagccaatccagcgccttggtgcttatttggtagaagggcttgttgcaaggaaggaggcatcaggaaataacatctaccatgccctaagatgcagagagcctgagggaaaagatttactctcttacatgcagctactgtatgaaatctgtccctacttaaaatttggttacatggctgccaatggcgctattgctgaagcatgtaggaatgaggaccaaattcatatcatagactttcagattggtcagggaactcaatgggtgacacttcttcaagctcttgcagcaagacctggtggagctccccatgtgcggatcacagggattgacgatcccctttctaaatatgttcgtggtgatggactggaagctgttgggaaaaggttggctgcgatatctcagacatttaacatccgagttgagttccacggcgtgcctgttttagctccagatgtgacaaaagacgtgcttgatgttaggcctggtgaggctttggctgtgaacttccctttgcaactccatcatacagctgatgaaagtgttgatatgagtaatccaagggatggacttttgagattggtgaaatcactttctcccaaggtaactacattggttgagcaagagtcaaacacaaataccactcctttcttcaacaggtttatagaaaccttggattactacttggcaatgtttgagtccattgatgtgtctcttccgagaaagagcaaggtgcagattaatatggagcaacattgtttggctcgggatattgtcaacattattgcttgtgaagggaaggaaagggtagagagacatgagctgttaggcaagtggaagtctaggttaacaatggctggctttcgtcaatatcctttgagttcttatatgaattctgtcataagaagcctgctgaggtgctattcaaaacattataatcttgtggagaaggatggggccatgctactgggatggaaggacagaaatttgatttcaacttcagcttggtattgattacatgcagataggaaataatgcagtggtagaaatatgttgccgactgaggtttatgttgatttctagggccttgtgttccttaccattgttctaaaggtcattatttgataaattagtctattgagtttcatgtcatagtgatgcagataactgcataccaattcttttataaactatttaggtatgtacagtgttttgatctacaaatattgtacttgtacctgaaacttatccttggtatccaatataaattaaatgaattcacagtaaggttattgacaaaaaacaacaag

SEQ ID NO: 28884 - DNA, 685 bp, Glycine max
  Clone ID: TF_GmC359_4
gatggttgagagagagctttatggcagggagattatgaatgttatagcatgtgaaggttctgacaggattgagaggcctgagacctacaaacggtggcaggttaggaatatgaaggctggtttcaagcagctaccactgaatgaggaattaatggccaaatttaggagtaagttaaaggaataccacagagattttgtcttagatgaaaataacaactggatgcttcaaggttggaagggccgcattttgtttgcttcctcttgttgggtgccggcataatgagatgctactgtgactcggttcagaattcatactatactaaaggttctgatattcttggtctggctacctacttactctaccttcagcttttgtgatgaagattgtaccaagctttgcaccaagttccttggtaaaattatagcatcacttttctggtagattaagacttgtgaaggtaatacaatttcgttagtgatattgataagaagggcatattagtcatcagagtaggagggccattatagcatgtttgcccaagtacataaaatcctattattgagttattttctctttaaccaacatgtatcaggcatttcacgtccttctatttaagtttgttaatttcttttacaggatacttgtcttttgagacaaattagttgagaagatgtgattaatttg

SEQ ID NO: 28885 - DNA, 614 bp, Glycine max
  Clone ID: TF_GmC359_5
acgagggttgatgcttgagagagagcttttgggcagagagattatgaatgttatagcatgtgaaggttctgagaggattgagaggcctgagacatacaaacagtggtatgttaggaatacgagggctggtttcaagcagctcccgctaaatgaggaattaatggccaaattcaggactaagttaaaggaatggtaccacagagattttgtcttcgatgaagataacaagtggatgcttcaaggttggaagggccgcattttgtatgcttccacttgttgggtgccagcataatgagatgctactggacttggcttataactaatattagactaaaggttctggtatcctgtgtttggctacctacttgcttaactttcgggctgtgataaaagattgtaccaagttttgcacgaagtcacttgcaacttctgtgaaactcatgatttcccctcagcatctctagaattttctggtagctaagatgctttcttattttaagtaccattaccaagttgatatggcctattcacataacctgataatgtgttggtcctgaaagcttttccccgtgattgtttgcatgcttgctgagtaatctgttggatgtggctcg

SEQ ID NO: 28886 - DNA, 540 bp, Glycine max
  unsure (1)..(540): unsure at all n locations
  Clone ID: TF_LIB3138-095-Q1-N1-E2-F2B
aaaatgaaagcagtattcacattattgactttgggattagctatggtttccagtggccttgcctcatccaacggctttcagagaggccgggcgggcctccaaagcttcgtatgatgggaattgatcttccccagccgggatttaggccggcggaaagggttgaggagacagggcggtggctggagaagtactgcaagaggtttggagtcccatttgagtacaattgccttgcacaaaaatgggaaactataagacttgaagacctcaaaattgataggagtgaagtaactgtggttaactgtttgtacagattgaagaacctatccgatgaaaccgtgactgccaactgtccaagagatgctttgctgaggttgatcaggaggatcaatccaaacatcttcatgcacgggatcgtcaacggcacttacaatgcaccgtttttcgtgacaaggttcagggaagcactcttccacttctcatcattgnttgacatgtttgaagccaatgtgcctcgtgaagatccatctangcttatgattg

SEQ ID NO: 28887 - DNA, 2139 bp, Glycine max
  Clone ID: TF_GmC640_28
ccggtccggaattcccggggcgaccacgcgtccgatcccctcatggtgtcaacatctgtgtgccctggtgtgttcacttctcagcagcagcaggagtttggagtgggggatgagaagcctcaggttattaatccacagtttatgttgaaccagaaccaagttcagttctcagagaatccttctttctttgtgccattgatgtacccccaggtgcaggtgcaggagcaacaggttttctctcctccgcatcaatcgaaacgccctctctttgacacgattggtcacaattttcaggctccaaggttgccccttttggattcagggcaagaggtgtttggtaggaggcagcaaacacagctgccattgtttcctcaccatatgcaacaacaacaacaacaacaacaatcaatgggtttgccatctgctaaacagcagaaggtgagttccaccggagacgatgcaagccaccagtttcaacaggctatatttgatcagttgtacaaaactgctgagctcatagaagctggtaatccggttcatgcgcaagggatattggcgcggctcaatcaccagctctcccctataggtaagccttttcagagggctgctttctacatgaaggaggctttgatgtcactgcttcattcaaatgctcacagtttcatggctttttcgccaattagtttcatactcaaaatcggagcttataagtccttttctgagatatcacctgtacttcagtttgccaattttacttgcaaccaagccctcattgaagctgtggaaaggtttgaccgaattcatgttattgattttgatattgggtttggagtacagtggtcatcttttatgcaagagcttgccttgaggagtagtggggcaccttcactcaaggtcactgccattgtgtcaccctccacttgtgatgaggttgagctcaatttcactagagagaatttgatccaatacgccaaggacatcaacgtgtcattcgagttaaatgtttttagtattgaatcattgaactctgcttcatgtccactgcttggtcaattctttgataacgaggcaattgctgtgaatatgccggtttcaagcttcacaaactatccatcgttgttcccttctgttcttcattttgtgaagcagctcaggccaaaggtcgtggtcactttggacagaatttgtgatcgaattgatgtaccacttcccaccaatgtagttcatgttctccaatgttattcggccttgctcgaatctctggatgcggtgaatgtgaatcttgatgccctccaaaagattgagaggcatttcatccaaccagccatcaagaaaattatacttggccaccaccattctcaagaaaaattacccccatggaggaacctcttcatacaatctggattctctccattcacatttagcaacttcacagaagctcaagctgagtgtctagttcagagggcacctgtgaggggatttcatgtggagagaaagccttcatcacttgttctatgctggcaaaggaaagaactcatctcagtttctacttggagatgctgaggagcagcagcagaagctaattaccttatatttttaaaggtgcatggtaacttacattgcagtttatgtaattgtttgtgtaatttttaggcttattgatgagatccacacccaaatgttttcttaactacatgggttggaatctatcattctatagttctattactagtacgtcactttgaacatgggtagtaattatgcctttccccattcccatcatctaagatgagtaactgtttctttgttatcttctagacaaagcaaactgcttagtaagaaaggaacaatttagccaagaatgcagcctctattttcttcttcttggtttattatattctttcttaattaatgtatgatgacctgaatttgggatacgtgattttaatatgcagcatgaaaatcttgtgccaattcaattatccaaatattagtttttgcgtggtttgagtgaaaagctggaaagattataattggttcatttgtagtctttaaggaaagacacccaaaacaaactcatgtatagtacttttgtttgtaatttaagaatataattcgttgtttgagtgttgatttata

SEQ ID NO: 28888 - DNA, 2257 bp, Glycine max
  Clone ID: TF_GmC978_1
ggaggtgtgaaggacaacgtaacaataaagacaaaagggacccttcacgcattgtcgacaacgtagtcatgaacaagtcgctgaaaccagaagaacaagggtccaaacattgaaactcattcccattgaagctgaacaaccaaccccattttggttctgattttttcagtgctccaagtggcaagttttggaattttctgggggcttcgtctggattattcttcaatttgaaaacccaccaagggatgagcgtttcctcgttgcaatgactacttctggtgctgacctggttttgaagggtcgacttctgtaaattcttcacccctgcagttcttctccatgatgtcactttcacctagcttaggttctcccaacaatctcttgttggcaagttttggaattttctgggggcttcgtctggattattcttcaatttgaaaacccaccaagggataagcaagcgtttcctcgttgcaacttgcaacttgcaatgcctacttctgttgctgacctggttttgaaggatcgtcttctgtaaattcttcacccctgcagttcttctccatgatgtcactttcacctagcttaggttctcccaacaatctcttgtttagggaaatgaaatccgaggaaaggggtttgtacttgatccatttgttgctcacttgtgcaaaccatgttgccgcgggggtccctgaaaatgcaaacaccacacttgagcaaatttccatgcttgcttcccctgatggggacactatgcagcgaatcgcaacatattttatggagtcgcttgctgatcggattcttaaaacatggcctgggatccacagagccctcaactcaaccagaatgactttgatatccgacgaaattctggttcagaagcttttctttgagcttttccctttcttgaaggtagcatttgttctcacaaatcaggccatcattgaagcaatggaaggggagaaagtgattcacataattgatctcaatgctgctgaagctgctcagtggattgctctccttcgagtattaagtgcgcatcccgaaggccctcctcatttgagaatcaccggggttcatcagaaaaaggagattctggatgaggtggctcatagactaactgaagaagcagaaaagttggatataccgttccaattcaaccctgtggcaagcaaattagaaaatcttgattttgacaaacttcgggtgaaaactggggaggcactagcaataagttccattctccaattgcatacccttttggcctgggatgatgaagccatgcagagaaagtctcctcttctgttaaaaagctcaaatggaattcacctgcaaagagttctgccaatgggccaaagcacattgggtgatttgcttgagaaagatatggttaatgggtacactccaagtcctgactcaacctcatcatctccatcatctttaactacttccaattcaatgaaaagggagcgctttcttaatgccttgtggggattatcaccaaaggtcatggttgtgacagaacaagactgtaatcacaatggtccaactctgatggataggcttcttgaagctctatactcttatgcagcattgtttgattgtttggaatccactgtctcaagaacatcattggagagattaagggtggagaagatgctttttggggaggaaataaagaacatcattgcatgtgagggatctgaacgaaaggaaagacatgaaaagctggaaaagtggttccagagatttgatctagctgggtttggcaacgtgcctttgagctactttggtatggtgcaagcaaggaggttcctgcagagctatggttgtgaaggatacagaatgagggatgaaaatggttgtgtgttaatttgctgggaggatcggccaatgtattcaatatcagcttggagatctaggaagtaagagaattagagggatatattgatgttttttcttttcttttctttctttctttttatttgtatgagtgttttattcttatggtaatgactgttcttcaagatagttttttagagatactctttattcattgcctggtaaaactccatcaagtaagaaatttgggaagacaaaaaaagggtagaaggacggaagaagtagaagtcttaatcggggttctgtttatggtttcattttttgcagctgatcattttattttttatgaattatgagctcctgtaccctaacttgtacctagtatattacataatataatgtgtttttgttt

SEQ ID NO: 28889 - DNA, 459 bp, Glycine max
  Clone ID: TF_LIB3242-303-Q1-J1-D1
ctctactgctgatgacagctactaattgaagaacaagcttagagaactcgagatttcgttgttggggcctgattcagacattgttgacagttgcggctgctcctacaagggtggttgccacggagcatctccaatggctaaatacaattgggatcagattgtggaaatgattccaaaattaaacttgaaagaagtcctcattcggtgtgcacaagccgtggctgatgatgatattgaaacagcagtgggatttatgaacaatgtattggcaaagatggtatcagttgggggtgatccaattcagaggttaggtgcttacatgttggagggtctaagagcaaggttggagtcttcagggagcataatctacaaagccttgaaatgtgaacaaccaacaagcaatgatctcatgacttacatgcacatcctgtaccagatttgcccatattggaagtttgc

SEQ ID NO: 28890 - DNA, 2146 bp, Glycine max
  Clone ID: TF_GmC1018_5
aagctgcacaaattaatatccaacactctcaagctttccactttcaaactctgcccgctcaatttgctttatctttccgagatttatatacacttttattgaaactgttgggattcaagtctgaaacaaaatcttaagaagtttgcggcagctgatgccatcatcttttagtatggattcgcaacagctcttcagtttcgaattaccttacatgtcatctttacccaccgttccatcgcttcttggatccttgaaatatgacacaggaaactcacctaattcacccttctccacttattttgattctgacactctttcggcattgagtgacggccaggagcaatacagccctggagaaatcctctctggtgtcagcccctcttgtaactcttctctggaaaccaaccattatatgtatagatcagtctccactttggacagtttcccattatattctgataggaactctcttctacagactatgagttctaatcagaaaatccaacatgctttgctggagctagaaactgctctgatggcacctgatgacgatcaagttaacacaccgaatacattggccgagagcagcaggccaatggcatcaggccagagatccaggtcctggagcaatgagaaccatgtgtcacaatatactcaaactcagccatcatatgcaactgccaatatgcagtcaagtgaagttgtgcacgtagagaaacggcaaaagttgatggaagaagcaacgctacaagatttcccaccaaacaatttgaagcagttgctgattgcatgtgccaaagccctgtctgaaaacaacacgaaagattttgatcaattggtaggaaaggctaaagatgctgtgtccatcaatggggagccaatccagcggcttggtgcttacatggtagaagggcttgttgcaaggatgcaagcatcggggaatagcatctatcatgcccttaggtgcaaagagcctgaaggtgaagagttgctcacttacatgcaactgctgttcgaaatctgcccctacttaaaatttggttacatggctgccaatggagccattgcgcaagcatgcagaaacgaggatcacatacacatcatagacttccaaattgctcagggaactcaatggatgactcttcttcaagcccttgctgcaagacctggcggtgctccccatgttcggatcacagggattgatgatcctgtttccaaatatgcccgtggcgacggaccagaagttgttgggaaaaggttggccttgatgtctgagaaatttggcatcccagttgagtttcatggagttcctgtttttgcttcagatgtgacaagggaaatgcttgatatcaggccaggagaggccttggctgtgaacttccccttgcaactccatcacacagctgatgagagtgttcatgtgagcaacccaagggatggacttttgagattggtaaggtcactttctcccaaggtgaccacattggtggagcaggaatcaaacacaaacacaacccctttcttcaacaggttcattgaaaccttggattactacttggcaatctttgagtccattgatgtcaccctcccaagagacagcaaggagaggattaatgtggagcaacattgtctggccagggatattgtcaatatcattgcttgtgaaggcaaggaaagggttgagagacatgaactgttcggcaagtggaagtcaaggttaaagatggccggcttccagcaatgtcctttgagttcttatgtgaattctgtgataagaagccttctgaggtgctattcagaacactatacactggtggagaaggatggagccatgttgttagggtggaaggacagaaatttgatatcagcttcagcctggcattgctaaaacatagactgtgtagtagtagaaatattatgatgatgggggaagctgaccacggtttatgtttcattgccagtgctatctcatctcatgtactagtgtagtagtacattgattcttttataaaatgtcacgtatgttaactgttcttgttctataaatatttcgatcttgtgcctgatccctatgaactatgggaatcacaaaattttgaactgactgtctcaataaaaacattctttagggggtagacttcggtgc

SEQ ID NO: 28891 - DNA, 2601 bp, Glycine max
  Clone ID: TF_GmC589_1
cgttccagattctcagattgtcttcatgattgcaattttataataagataaaataaataaataaacatattggcctctttagactataacaccatatgttcataaattcatattatctttttatttgggtttctcaattgctcctaacttacctccaatcttaattctttggaagcttcaaacttaaaagtcttgtttgttatctttttcttcccttgtctacatctatatttattagaatttattggttgtgcatatcaattccaaagtaccctattgttcattttttttttttctgatttattgctattccaccaatctgaccttcctaaggaaaccaattttttaatatattaaggagacatcaagagattgtcttgccctttggtttgctttaatcaaacgctcaaccacttggtcaaaagccttatctgagtttccttctgtgtctctaggagcatcaaccttatctgtctcaagttgcatcagcaaagtcatcttagaaggttcaacaagattttatcagtgagcacttgttttactatttctcaagactgaaattttgtatgagctgagtgaataaaaggagaactatgtcattggttatatctacagagttggctgatacatcatatgggaatgccaagctctacacactaaagggaactgatgttacaccagatttgtcctcccacaattttgcaccagataagcacagaaacatgtacatgacaaagtcatactcctgtgagagttatgaaaagtacttccacgattcaccaacagaagagctgatagaaccatcaagttccagcatatcaggaaactcagttcaccctgatggtgcttcttcttacctgctcagagctagttcaggagcttctgtgattgttaataacccatttgacacttctatctggtctacaaggcatcgcgatgcctatcagtccaattctgtatcagatttcgtggaaaatgggagcccggatggccttgacttcgatggtgaaatgagactaaaacttcaagaattggagagggctttgctttctgatgaagaagaggaggagcaaggcatatttgagactgttcaaagcatggagattgatcctgacatggtcgagtgggccaatccgcttcaagatatgctgctccatgactcaccaaaggagtcctcatcctcagattcttccaatcttagcagcatcagtagcaccaccaaagacacatcacaaaactcaccccaaacccctaagcaactgctttatgattgtgctaggatactttcagaaggaaatgaacaggaagccacatctatgataaacaagctccggcaaatggtctcaattcagggtgatccttctcagagaattgcagcttacatggtggaaggacttgcagctcgtgtcgctacatccggaaaatgcatctatcaagcattgagatgcaaggaacctccttctaacgatcgcttagcagcaatgcaaatactatttgaggtctgcccgtgttttaaatttggatacatcgcggcaaatggtgcaatagctgaggctgttagagatgaaaagaaggttcacataatagactttgacatcagccaaggaactcaatacataactctaatacaaacacttgcttcaatgccaggtaggccacctcatgtgagattaaccggggtggatgatcctgagtctgtgcagcgttccattggtggcataaacatcataggacaaagacttgactcgagccgctcgagccgattcggctcgagtgagtttcgagcagtggcgtcagggacctcaaatgtcacacaatcaatgcttgactgtcgtccgggggaagcacttgtggtgaactttgcattccagcttcaccacatgcgcgatgaaactgtatcgacagtgaacgagcgagaccaacttcttcgcatggttaagagcttgaatccaaaacttgtgacagttgtggagcaggacatgaacaccaacacctccccttttctcccaagatttgttgaagcctacaattactactctgctgtgtttaacacacttgatgcaactctccctagggagagccaggacaggatgaatgtcgaaaggcaatgcctggcaaaggacatagtcaacattgttgcttgcgagggtgaggaaagaatagaacggtatgaagtcgccggaaaatggagggcaaggttgtcaatggctggcttcactccatccccaatgagcacaaatgtgagagaagcaattaggaaactcattattaagcaatactgtgacaaattcaagataaaggaggaaatggggggtcttcattttgggtgggaagacaaaaacttaattgttgcttcagcatggaagtgaccaatacaaattcttttgttgcatgagactcattgtagtgttgatgtagtatttgtttgcttgtttagtttgtatctgttatgtttatgcttggttcagactcagatgtatactaacgtgcaacttatgctaatacatactttcatgtgtatggcaacacaaaacagctatcaatgcttaggcttgtaatgacatcattttcttgttagttagcatataattttgcgtttcc

SEQ ID NO: 28892 - DNA, 1900 bp, Glycine max
  Clone ID: TF_GmC6703_1
ctcacacactcacattgtttatttgatgtgggttaaatggataccttgtttagactagtaagttttcatcaacagcaacaaccacaacaacaacctgatccatccctcaactccaccaccagcagaacctccagcagctccagatcctccagacaaaactactacccttattcccatcaagaagaagaagaatgcttcaacttttacatggatgaagaagacttatcctcgtcttcttccaaacactactaccacccttatcaaccccatcatcatcaacaacacaacgtatccaacatttctacaaacaccttcagcaccacccctaacactgattactcctactcctactccttctctcccacgcaacctgttcaagacttcaacttcgaattctcctcccccaactggtcccacaacctcctcctcgaatccgcacgcgccgtcgccgacaacaactccacgcgcctccaccacctcctctggatgctcaacgagctcagctccccctacggcgacaccgaacaaaaacttgctgcgtatttcctccgagccttgttcagccgcgtcaccgaagctggcgaccgaacctaccgaagcttagcttcggcgtctgagaaaacatgctcatttgaatccacaagaaaaacggtcctgaaattccaagaagttagcccttggactaccttcggacacgtggcatccaatggcgccatcttggaagccttggagggaaactccaaattgcatatacttgacatcagcaacacttattgcacccagtggccaatgcttctggaagcattggccactcggagcgaagaaactccacacctatgtttaacaacaattgttactggttctagaatcggtaacaacgtccagcgcgtgatgaaggaaatcggaacgcgaatggagaaattcgccagactcatgggcgttccttttaagttcaacgtcgttcatcactacggcgatctatccgagttcaatttctcagagcttgatatcaaagacgatgaggctttggctgtgaattgtgtgaactcgctgcattcggtttccgcgctaggaaacaaccgcgacgcgttgatatcggcgttgcaagcgttgcagccgcggattgtgacggtggtggaggaggaggctgatttggacgttggaatcgacggttacgagttcgtaaaaggctttgaagaaagtttgaggtggtttagggtttactttgaggctttggatgagagttttgtgaagacgagcaacgagaggctgatgctggagcgcgcggcggggagggcggtggtggacctggtggcgtgctcgccggcggattccgtggagcgccgcgagacggcggcgcggtgggcggcgaggcttcacaacggagggctaaacgcggcgccgtttagcgacgaagtttgcgacgacgtgagggcgctgttgaggaggtacaaggaagggtggtcgatggcggcgtgctccgacgccggaatattcctctcgtggaaggacacgccggtggtgtgggccagtgcatggaggccataacgtaaagatcgtatcataatagtatcatttggctttgacatgggtgaatccctcgcacgtgttctcggtttttttggcacgtgcggaaggatatatattgatggagttttttttcttcttttcagtattattaattattattattattgggctttatttcctatttttgttcttttggttaaatatatataagtttggtaagacaccgggattcatgggcgtttgcttgtgttgaaaaaggaactaagtaaattattattttcttaactttttatgattgatttttttgtttaccaaagaatagcttgtgtctttggatcgatatttgtatgacatgtttttcaatcgcttc

SEQ ID NO: 28893 - DNA, 2219 bp, Glycine max
  unsure (1)..(2219): unsure at all n locations
  Clone ID: TF_GmC1116_1
ctctactcctcgcttcaacggttcaatcaatcaactctccttccttcccttatacccccccttctgtgtgttatccctcgcgtccactcaatgaaatgctgtgacgtgatttgcagaggagaagagggaatggcggcttacatgtgtgcagacagtggcaacctcatggcgattgcgcagcaagtcattaagcagaagcagcagcaagagcagcagcagcagcagcagcagcagcaacagcagcagcaacacttgctacaccaccaacagaaccctctctcccttcacactccaattccatggaacaacactcctcctctcggctaccctctacctcccaccaccgatttcccccccgaccccttccaacccgatccccctttccacttccaacccgacccccactccttccgcttctccgacttcgactccgacgactggatggactccctcatcgccgccgccgacaccactgatttcccncttccccccctccgatctcaacccgctccctctccaacccactccccccttcccctccccctccaccggcccagtcccccgtggactccgactccgactcctccgtacatcccctcctcanagccctggccgagtgcgcctccctggccgaaacggagccggatcaggccgcggaatccctaagccgtttgcgaaaatccgtttcccagcacggaaaccccactcagcgagtgggcttttacttctggcaggccctctcccgcagagaagaaaagggccataatagcacttgggatgaggagttaacactctcttacaaagccctgaacgacgcctgcccttactccaagttcgctcacttaaccgccaaccaagccatccttgaagccacccaaaccgcctccaacatccacatcgtcgacttcggtatcgtccaagggattcaatgggccgcactcttgcaagctttcgccactcgtccttctggaaagcccaataagatcagaatctccggaatccccgccgtctcccttggtccctctcccggcccttctctctccgccaccggcaaccgcctctctgacttcgccaggctcctcgacttgaacttcgtgttcacgcccattctcactcccattcaccagctcgaccacaacagcttctgcattgacccaaacgaggtcttggccgttaacttcatgcttcagttgtataacctcttggacgagcctccctccgcggttgacactgcgctcaggttggccaagtctctcaaccctagaattgtcacccttggcgagtatgaagcaagtgtcacacgtgtcgggtttgtcaaccggttcaggactgcgttcaagtacttctctgctgtgtttgagtctctggagcctaatttggccgcggactcgccggagaggtttcaggtggagagtcttcttctcgggcggcgaatcgcggcggtcattggggggcccgggtcggtgaggagggagagtatggaggacaaagagcagtggagggttctgatggagcgtgctggttttgaatcagtgagtctaagccattatgcaattagtcaagctaagatacttctctggaattacagttacagttctctgttttcgctggtggaatctacaccaccggggtttttgtctctggcttggaaggatgttcctctcttgaccgtctcctcttggcgttagttaatgggttcgacttggttgattgttattggaaagggtttccacctggtccttttttccctggtgtggaacaactaattattattattattattattatttgtcgatatgccatggatgatcgatcatgttgtgctatgctagcctcttcaattactgaagttatgcagaagatttgatatgtgaattggctggcactacaagaaattgaggtttttgggagaattgccacctttagcagcagtttggtcctctactagttccacacctccttacttttgtttttttagttgatttttctatttcttatcagcgttttttttttcttctagtggcaatgatgttattattagcttcaagaattggctaggcaaactgtgacaatgaaaatagggagaaatgggatggagaaaagctttctttctcattgcttctagtcattgtgatttgtgactctgtaaattggattttgttgtatggatttaaattggtctgaatgaatgaaatgaatatcaaaggatttttatcttt

SEQ ID NO: 28894 - DNA, 521 bp, Glycine max
  Clone ID: TF_GmC154430_1
aagagggcaaagatggagcagttttactttgccgaggaaataaagaacattgtgagctgtgaggggccgttgagaatggagaggcacgagagggtggaccagtggagaaggagaatgagcagagctgggtttcaagctgcacctataaagatggtggctcagtctaagcagtggcttctcaagaacaaggtttgtgagggttatactgttgtggaagagaaggggtgtttggtttttggatggaagtcgaggcctattgttgcagtttcttgctggaaatgctgagctgaatcatcatcaatctccactgtcccagcagtttaaaagttggtgtctgggatcaatgtcaataaataacagtttcatgcgagctgttgtgtgctagaataattggttaggacccaaattgtgttgttcaacacgctaaaactttgggtgagaataatgtcttttatcagtaagtgttgtggctgctcgggatcgaatagatgaaataaagtgataacttgtttggtgtgcat

SEQ ID NO: 28895 - DNA, 2388 bp, Glycine max
  Clone ID: TF_GmC510_1
aaacactctctctctctctctctctctctcgctctgtttcgagctttctttctttcttttttttctctgatgcgtttctacaataacacaacctcttaaccgttttatcttcttctttgcttgctccttttgccttccttcgtcgtcgccgagtccgaccatctccgggccgcgctgccctggcggcgttcgtgcgtctgtttcgcccgcttgagcgggtgcggccgccggccgatcccggccgggagcaaccacgaccaccccccaggcggctcccgccgcgactagtgacggctgtggcgctggcgatcaacggcaacacggcgccgtttttggcgcgcgtggcggaaacgctgtcgtattacggcgcgttgttggagtccattgaggccaccacggtggggaaagataacagcttcaacaactcagaccgagtcacactcgccgaagcaacgactcgacaaatcccgtactcggtaacgtgcctgcttcgaaccgttaaggccccgaaccactttctcccataaccatatggactttaccgttattgcagtggcaaagccaaaacctttatgccaaccaaccgcagcgttttcatgttccgctacatccccatctccgccctcaccacattactcgccccaacaacgggcccgtgcccatggacaggcccaaattttggttaccggaactcgaatttgggttttcctccaatccagaaccgggttcgtctttctcctcctgtttctgttccggttcaggttcagtcatctgaaccggaaaagaagatcatggaccacaggcttcttgaattggagaagcagcttctggaagataacgacgaaggaaggtgaagcagatgctgcgtctgggataaccacgagcgagtggtccgagtctgtcccagtccggttcagtaaccggttttgacgccgacgtcgccgacttcttccacgacgtcgtccacgtcatcttcttcctccgtggcttcgcctgcttccggatgctccaagcaaacgctcatggaagccgcatctgcaattgttgaaggtaaacacgatgttgcggcggagatcctgaaccggttgaacggtgtgaaccggagtgataggttgacggattgcatggtttcggcgttgaaatcgaggatgaatccggtggagtatcctccgccggtggcggagcttttcaggaaggagcacgccgattcgactcagatgctcttggagaactcggtgctgcttttggataactcagtgtgcttcaaggtagggttcatggcggcgaattacgcgattctggaagccgcatttgaggagaaaacggagaataacaggttctgcgtggtggattttgagattggaaagggaaagcagtatttgcacctcctcaacgcgctctcggcgcgtgaccagaacgcggtggtgaagatcgcagccgtagcagaaaaaggaggtgaggagagagtgcgggctgtgggagacatgctgagattactcgcggagaggctgaggatccggttcgagttcaaaatcgtcgcgactcagaaaatcgccgagttgactcgtgagtcgctgggatgcgatgcggacgatgttctcatggtgaacttcgcgttcaagctgaacaagattccggacgagagcgtctccccggaaaaccctcgggacgagcttcttcggcgcgtgaagagactcgcgccgcgcgtggtgacggttgtggagcaggagataaacgggaacacggcgccgtttttggcgcgcgtggcggaaacgctgtcgtattacggcgcgttgttggagtccattgaggccaccacggtggggaaagataacagcattaacaactcagaccgagtcagactcgaggagggactgagtcgaaaattgcataactcggtggcgtgcgaaggaagagatcgcgtggaacggtgcgaagtgtttggaaaatggcgcgcgcgtatgagcatggcggggtttgagttaaaaccactgagtcaaagcatggtcgagtcaattaaagcgcgactcatctctgccaacaaccgagtcaactcgggactcaccgtaaaagaagagaacggagggatttgctttggttggatgggaagaacactcacagtcgcatctgcttggcgttaacttggctcatttatttttctttcttttttctttttattttggttcggaatattattatatataatatcacattgttactatattttaacgtcatctagagataatggaaaggcaaagagaatagatttggtaaattattattattataaatatagtatgataaaagggtgaaaaaaaaaaaaaaagaaaagcccctcctcttggttctaccgaactaaaactaataaagaagtgtttggattccgag

SEQ ID NO: 28896 - DNA, 1187 bp, Glycine max
  Clone ID: TF_GmC977_1
gattttggcatccgttatggcttccagtggccagctcttatttatcgtctatcaaaacaacccggtgggcctcccaagctgcgcattacagggatagagctcccacaacctggtttcaggccagcagagagagtccaggagacggggcttcgacttacaaggtattgtgatcgctttaatgttccatttgagttcaatgccattgcacagaaatgggaaactatcaaaattgaggacttgaagataaaggaaaatgaacttcttgttgcgaatgctatgtttcgatttcaaaatctacttgatgagacagttgtggtgaatagtccccgggatgctgttttaaagttaataaggaaggcaaatcctgctatctttttacatgctaatgtcaatgggagctataatgctccattctttgtgacacggttccgggaggcccttttccattattctactttgtttgatgtgcttgataccaatgttgcttgtgaagatccaatgaggttgatgtttgagagagagttctttgggcggcaggtaatgaatattgtagcttgtgagggttgtgagagggttgagaggcctgagacatacaagcaatggcaggttaggaacatgagagctggatttaaacaattgcccttggataaacatctcattaacaaattaagatgcaagttgaaagatgcgtaccacagtgatttcatgcttcttgaagatgacaactacatgctgcaaggttggaagggccgagtagtttatgcttcctcctgttgggtgcctgcataggccttgacaatgttcttcccaaggtagttaattaggagaagcgtttcatgagttgtaggggagacatggacttccaaaattcttgtggttgacatattctagaagctgatccctgctaatgtaatgacatagcatagttcaatttcagttctcagaatatttttaaattggtcaagtcataagtgtgtgtataatataactgataactggtgctgtgtggatgacatatttcaatgttgaacaattccttcttgagttcttctgataggcactcatgagcagcagaatcctgagattgtgagattttaggtctaaaatttgaactggtttctaagtttgtatattaagttaatattttattctgttcaattaattatttagttaaagggaaaattact

SEQ ID NO: 28897 - DNA, 798 bp, Glycine max
  unsure (1)..(798): unsure at all n locations
  Clone ID: TF_GmC194417_1
ctggcgtccggaagcagtctgcttctttcccctaagaggcacccgcttgagagccctgatgggaattcttctaattccactactgattctgccaattctcatgatttgaagccttcttcacccaatacacctgcttctgatgctttgcattcctcttcccacgcgccctctttggttgttcctccccatgctttgactaaaattaatgatggaaccgtggatttggattcttctgtaaccaagctcttggctgaaaatattttcagtgatgcagactctatgttgcagtttaaaagagggttggaggaggctagtaagtttcttcctcaggggcctcagcttttcactgggttggagagccccacggtgtcttcagagccaaagggaagaggtgtagctctgaagatggagaattcatttggggtgaagaatagaaagaatcatgcccgccaagatgatgaagaagaaagaagcaacaagcagtctgccgtgtctgcggtttgtgttgaggaggagagtgaaatatctgaaatatttgacagggtgttgcttagtgttgaaaatgtgccactgtgtgctgaaaataatggatctgtggcagtgggagatagtaacacaaagctaattgagaaatcgagtttgtctgatggggggaagggttcgatccaagaggcaagggagaaagaggaaacggtggatttgaggacccttttggttttgtgtgcgcaagctgtgtctttcagtgacaacaggactgcntatgaactgttgaagcagattagcagcattcttctgctt

SEQ ID NO: 28898 - DNA, 400 bp, Glycine max
  Clone ID: TF_GmC104019_2
gaaacacagaaaatggacaattagattggatttaatgttgagacctttgtcattaacttgtacatagtaatggaacagaaaaagaagagggatgttatgccttattgcagaactttcatttccaagcgcaagaagcaaccaaatctctattcatccaacccagataaagagctccatctctctcttgaagtctatatctatcactgtagttctcgagcaacttcttgatggtaccattcaccaatgaacttaaagggtaaggagtgaaaccggccattgcaaatcttgacctccacttgccgagcacctcatgtcgttccaccctctcgaccccttcacaagctatgatgttaaccaagtctcttgccaaacaatgttgctcaacattgcggacgcgtgg

SEQ ID NO: 28899 - DNA, 2771 bp, Glycine max
  Clone ID: TF_GmC1018_1
aacataaatgacattttataaaagaatcaatatactaccagtacatgagatgagagcaatggcaatgaacataaaccttaatcagctacatgttaaaccctcccaaataccatttggcttcccatcatcatggtatttctattaccactacacagtatttcctacacgcgtttttgatgtgctattcagaacactatacactggtggagaaggatggagccatgttgttggggtggaaggacagaaatttgatatcagcttcagcatggcattgctaaaaacatagatagtaggaaatactgtgtttcaagtggtaatagaaataccatgatgatgggaagccaaatggtatttgggagggtttaacatgtagctgattaaggtttatgttcattgcacgcgtccgaaaccccaaaaacactctgacacaacaaacacaaacacaatcgtcaattaaaacaacaacaatatcgaagctgcacaaattaatatccaacactctcaagctttcgagtttcaaactctgggcgctgaatttggttcatttttctaagagttatatatacttttattgaaattgttgcggttcaagtctgaactaaaacattaagtttgtgcttttctgatttgccagctgctttcaaattatcttaaatcacttgttcagatcagctgatcgccatcatcttaatatggcatattctacaacagctcttgctggtgttgattaccttacatgtcatgttatcctacggcttctatcgcttgaaatatcactggtaactcttgtggtgattgtcactgataatctatcagaggttattcgtgttccacagcctgtgccatggccagccaagttcaaatactcaccaacctttgtttattttgtagctgcattgttcgttactggcctctacagtatcattacaacacttgcatcattctttgccagtaacaagccagccctcaaaaccaagtttgctcctctactttatcttatgggatgcgctgatattgggaataatagcctcagcaacaggcacagctgggggtgtagcatatttgggtttgaagggaaaccggacacgtggtgggttggaataaaatttgccatgtttacgacaagttctgtaggcatgttggtgcctccatagcagtggctttgtttggaagcgttgtgacagtcttgctcatttggctttcagcttacagcattcatagccgagtccccaagtagatggaaggaacatggatcatgcattctgcatatttatgcatacatcttcatttattgtttataaagttagtgtgctcagtaattgttaagagtgtgtagatgacttaatgtgttgcttcagttgtgttgactgttttttgtaaatcagtgttttcccctccaaggacctaatttgtactattttacaagacatgtgcaaaattaattagagcctgaaggtgaattgcgagtcacttacatgcaactgctattacgaaatctgcccctacttaaaatttggttacatggctgccaatggagccattgcgcaagcatgcagaaacgaggatcacatacacatcatagacttccaaattgctcagggaactcaatggatgactcttcttcaagccctttccaaatatgcccgtggcgacggactagaagttgtgggaaacaggatcatcaatccctgtgatccgaacatggggattgatgatcctgtttccaaatatgcccgtggcgacggactagaagttgttgggaaaaggttggccttgatgtctgagaaatttggcatcccagttgagtttcatggagttcctgtttttgctccaaatgtgacaagggaaatgcttgatatcaggccaggagaggccttggctgtgaattttcccttgcaactccatcacacagctgatgagagtgttcatgtgagcaacccaagggatggacttctgagattggtaaggtcactttctcccaaggtgaccacactggtggagcaggaatcaaacacaaacacaacccctttcttcaacaggttcattgaaaccttggattactacttggcaatctttgagtccattgatgtcaccctcccaagagatagcaaggagaggattaatgtggagcaacattgtctggccagggatattgtgaatatcattgcttgtgaaggcaaggaaagggttgagagacatgaactgttcggcaagtggaagtcgaggttaacgatggccggcttccgtcagtgtcctttgagttcttatgtgaattctgtcataagaagccttttgatgtgctattcagaacactatacactggtggagaaggatggagccatgttgttggggtggaaggacagaaatttgatatcagcttcagcatggcattgctaaaaacatagatagtaggaaatactgtgtagtggtaatagaaataccatgatgatgggaagccaaatggtatttgggagggtttaacatgtagctgattaaggtttatgttcattgccattgctctcatctcatgtactggtagtatattgattcttttataaaatgtcatttatgttaaaagttcttgttctataaatatttcgatcttgtgcctgatccctatgaactatgggaatcacaaaattttgaactgactgtctcaataaaaacattctttagggggtaaaaaaaaaaaaaaaaaaaaaaaaaaagataaaaatgcttgcataagctggttaaggtgatttgtaattcgatatctaaaaaaagaatga

SEQ ID NO: 28900 - DNA, 1525 bp, Glycine max
  Clone ID: TF_GmC538_1
gtggaatttgagtacaatgctatagctaaaaaatgggaaacaattcaacttgaggaactcaagattgatagggacgagtacctcgttgttacctgtttttatcgtggtaaaaaatgtgctggatgaatctgtggttgtggacagtccaaggaataaattcctcagtttgataaggaagatcaacccgaatatattcattcatggcattactaacggggccttcaatgcgcctttttttgttactcgattcagggaggcactgtttcactactcttcactctttgacatgcttgaagccattgtttctcgcgaggaatgggagaggatgctcattgagaaagaaatatttggtagggaagcattgaatgtcatagcatgtgaaggctgtgagagagtagagaggccagagacatataggcagtggcaagcccgaattctaagggctggatttttgcaacaaccttttgagcgtgagatagtaaagagggcaatagagaaagtaacaactagctaccacaaggattttgtaattgatgaagatagccaatggttgttgcaaggttggaaggggcgaatcatttatgccctttcttgttggaaacctgcatgactaaccaagatggtacaagtgcatctcactcgggctttgtgaattagtttgacttctgaggagctcagggttcgagatcaaaaataaggattcaagctgtgagttcagttgaggaaaacatggctacttaatagcctggtatgaaagtagataatctatgttattatcctatagatcatttataaagtctgttgtgtgatagctaacttgagggctgtcaaatgaacatgatccaatctaatgttgcagatgaatttagcatgtaataagatcaaacctttattgctgttactcattttgagctttcaacttcaatgcttctgatagtttacttaactgaaggtaatagcttgtgtatttcatcttttttgtatttcatcctaacaattaatggaagatttactttggagaaatacttgttgcacagcagatggcatgttactattctagctgtaccaaaagcaaaaagtttgactaggtccacgtagcttagatgctgcaattggttcaagtgtggaagtgatgtacaaacagcagatctcttcacatttgcttttgaagacttgttttcaacatttgacccataatgggtggtgggggcctcttgttgatacagattttccttgttgaataatgtatgattgtaatctgacttgccatatggtgtgcatttactacatatttggacctataaccaaatctatagttggtcacaccattcatcatttgactttccctttggtggacagctgatgaaagttgttctttggaacagtggtggcacgatgacttgaacatgcccctaggaagctattggaaatcttcaccactagctcattgcttgtaacttgtagctattgaaagtggatcaaaagtaaattctattttatacattttgttctcacaatttgttgg

SEQ ID NO: 28901 - DNA, 2018 bp, Glycine max
  Clone ID: TF_GmC164_1
tgcatgatagctacttaacacaaactagcaagtagcatcaagcatcatggtcatacattatacaaggcaacttctccgttaatttcctcacacatccctttctccctctttctctttctctttctctttctctccttccttttcatcactcacttttcactcccaagtcccaaccacaacccctcctctcctctcctcgatcagtgccataaatcaattctttctttctatctatctctgtccacaattctctttatgtcaacaaacctaaaactaaaacctgcttgagagagtagggaattaattaattaattttctttcatttcatcttttaagttgatctgtgaaaatggcttcatcttcctccaacggcagttccagcggaagcaagagttgggacatcgacggcgacctcgccggtttcggctacaaagtccgttcatcggagctgcaacacgtggcagaaaacatggagcgtttagagaacgtgatggacattgtgaactcatcaaccaacaataacatatctcagctggcctccgatacagtcttctacaacccctccgacataggttcctgggtcgacacgcttctctccgagttcgaccaaacggcgtcgttgccctacgatttctcggattttctcgatctcgacacggatcagaatcaaaaccacaaaccaacgctggtaacaatggaagaagactcagggataagactcgtccacacgctgatgacctgtgcggattccgtgcaacgtggtgacctcgcattcgcgggctccctcatcgagaacatgcaggggctgttggctcacgtgaacaccaacatcggaatcggtaaagtcgctggatatttcatcgatgccttgcgccgtcgcatcttagggcaaggcgtgtttcaaacgttgtcgtcgtcctcgtatccgtacgaggacaacgtactctaccaccactactacgaggcctgcccttacttgaagttcgcgcacttcacggcgaatcaggctattttagaagctttcaacggtcatgattgtgtccacgtgattgacttcaatctcatgcaggggctccagtggcccgcgctgattcaggccctggcgcttcggcccggtgggcctccgctgttgaggctcacgggcattgggcctccctcgtctgacaaccgcgacacgctccgcgaaatcgggctcaggctcgctgagctggcgcggtcggttaatgttagatttgcatttcgtggcgtggcggcgtggcggctcgaagacgtgaagccgtggatgctgcaggtgaatccgaacgaagccgtggcggttaactccatcatgcagttgcatcggcttcttgcttcggactccgatccaataggttcgggcatcgaaaccgtgctgggttggatccgaagcttgaacccgaagattatttccgttgtagaacaggaagcgaaccacaaccaggaccggttcttggagcggttcacggaagcgttgcattactactcgaccgtttttgactcgctggaggcgtgtccggtcgaaccggacaaggcacttgcggagatgtacctgcaaagggagatatgcaacgtggtgagcagcgagggaccggcgcgagtcgagaggcacgagccgctggctaagtggagggagcggctcgagaaagccggcttcaagccgctgcatttggggtcaaacgcgtacaagcaagccagcatgttgctgactcttttctctgctgaagggtactccgtggaagagaatcaaggatgcttgactttggggtggcatagccgccctctcattgcggcttcggcttggcaagctgcgccgatgcaggacagggaaacgctgcgtttcgagcaatgagtttcaagaaacggaaaaattgtttaattatagtagtaactagtaaacaagagtgatgtataatgtaaatttttctctctctatcaaaaaaaaaaaaatttctctttctttttttttcttttctgtttttttttaaatggtcatttttgcg

SEQ ID NO: 28902 - DNA, 1800 bp, Glycine max
  Clone ID: TF_GmC359_8
ggaaattgtttgtaatgaacgctgtagttcacagagtgaaacagtgaaggctgtagagccaggtggagtgaagggtcttcctaataatcgagcgacttaccaggaaacagtagatttgaggaatcttctgatgatgtgttcacaatctgtgtatgccaatgacatcagggctgccaatgaattgctaaagcagattaggcaacactcttctcccattggggatgcatcacagaggttggctcattactttgccaatggcctcgaggcacgcttggttggggatggtacaagtacccaaggaatgtatacttttctgagctctaagaacaacactttttctgagttactcaaggcataccaggttttcagttcctccagccctttcaagaagtttgcatatttatttgaaaatacaatgattatgaaagcagctgcaagtgcagaaaccgtccatattattgattttggcatcctacacggtttccagtggccaatgctcattaggcttttgtcaaatagggagggtggacctcccaagcttaggatcacagggatagagtttccccaacctggctttcgtcccacagaaaaaattgaggaaacgggtcgccacctggctaactattgtaagcgttacaatgttccctttgagtataatgccatatcatcaaggaactgggaaaccattcagcttgaagccctcaaaattgcaagcaatgagctagttgctgtctactgtcaccagaggtttgagaatttactggatgagtgtactattgaagtgaacagtcctagaaatgcagtcctgcatttgatcaggaagataaatccggatatttttactcactccatcactaacggatcatataatgcccctttctttaccacgcggtttagggaggctctctttcattattctgccatttctgataagaatgacactgtcatatctcgtgaaaacgaaaggaggttgatggttgagagagagctctatggcagggagattatgaatgttatagcatgtgaaggttctgacaggattgagaggcctgagacctacaaacggtggcaggttaggaatatgaaggctggtttcaagcagctaccactgaatgaggaattaatggccaaatttaggagtaagttaaaggaataccacagagattttgtcttagatgaaaataacaactggatgcttcaaggttggaagggccgcattttgtttgcttcctcttgttgggtgccggcataatgagatgctactgtgactcggttcagaattcatactatactaaaggtatgattccaagaatcagtcattggctttaactctatccacttctttttttccctggttctgatattcttggtctggctacctacttactctaccttcagcttttgtgatgaagattgtaccaagctttgcaccaagttccttggtaaaattatagcatcacttttctggtagattaagacttgtgaaggtaatacaatttcgttagtgatattgataagaagggcatattagtcatcagagtaggagggccattatagcatgtttgcccaagtacttgcaatcctattattgagttattttctctttaaccaacatgtatcaggcatttcacgtccttctatttaagtttgttaatttcttttacaggatacttgtcttttgagacaaattagttgagaagatgtgattaatttgaaacagatgatgactatgttccgtttgttttttccggtgatattcttgcttgcagttttgtatttctatatatagcaacttatgtg

SEQ ID NO: 28903 - DNA, 1820 bp, Glycine max
  Clone ID: TF_GmC164_2
cacaaactagcaaagtagcaacacacatcatggccatacattatacaaggcaacttcttcgttaatttcctcacacatccctatctggctttctccctctcttactctctttctctttccatcactcacttttcattcccaaccccaacccctcctctcctcagtgccataaatcaattctttctatctatctctgtccacaattctctttaattaattttctttcatttcatttcatcatttaatttcatatgaaaatgatttcatctgcctccaacgaaaacaagacggtggtggacatggacgaccacctcgccggcctgggatacaaagtccgttcatcggagctgtgtcaagtggctgcaaacatggagcgtttagaaaacgtgatttcatccaccgacctatctcaactcgcatcagacacaaccctctacgatccttccaacatagggttaggttcgtgggtggacacgctcctctccgagttcgaccaaacggcgtcgttaccgttacaatacgatttcgccacggatccaaaccataacaagcaattagcgctggtcaccaccgtggaagaagactcggggataagactggttcacatgctgatgacgtgtgctgattccgtgcaacgtggtgacttctcattcgctggctccctcattgagaacatgcaggggttgttggcgcacgtgaacaccaactgcggcatcggaaaagtcgccggctacttcatcgacgccttgcgccgccgcatctcgaacacgcttccaacgtcatcatccacttacgagaacgacgttctctaccacaactactacgaagcgtgtccttacttgaagttcgcgcacttcaccgcgaaccaggcgatcttggaggccttcaacggccacgattgcgtccacgtcatcgacttcaacctcatgcaagggctccagtggccagcgctgatacaggcactggcgctccgtcccggcggaccgccgctgctgaggctcaccggtgtcgggcctccctcggcggaaaaccgcgacaatctccgcgagatcgggctgagactcgccgagctggcgcggtccgtgaacgtgcggttcgcgttccgcggcgtggcggcgtggaggctggaggacgtgaagccgtggatgttacaggtgagtctgaacgaggcggtggcggtgaactcgataatgcagctgcaccgggtcacggcggtggacgccgccgtggaagaagttctcagttggatccggagtctgaaccctaaaatagtgacggttgtggaacaagaagccaaccacaacggggaagggtttttggagcggttcacggaggctttgcattactattccaccgtcttcgactcgctcgacgcgtgcccggtcgaaccggacaaggctgctttggcggagatgtatttgcagagggagatatgcaacgtggtgtgctgtgagggaccggcgcggctcgagcgccacgagccgctcgctaagtggagggatcggctcgggaaagccggcttcagacccttgcatttgggtttcaacgcctacaagcaagccagcatgttgctcactctgttctcagccgagggtttctgcgtccaagagaatcaaggctctttgacactgggctggcatagccgccccttaatcgcagcttcggcttggcaagccgcgccgctgagagatgacgaaacgctgcgttttgggcattgaggaatggaacgcttcacttgtttttgtaagtacttgtagtacacgggaagagtggtgaatctataaaactataactgcttttaatgtggtcaattttggcgt

SEQ ID NO: 28904 - DNA, 2172 bp, Glycine max
  Clone ID: TF_GmC163_1
ggagatttctcagttgtcaacacccttcggcacttcagcacagcgtgtggcagcatatttctcagaagccatatcagcaaggttggtgagttcatgcttagggatatatgccactttgccacacactcaccaaagccacaaggtggcttcggcttttcaagtgttcaatggtattagtcctttcgtgaagttctcacacttcacagcaaaccaagctattcaagaagctttcgagagggaagagagggtgcacatcatagatcttgacataatgcaagggttgcagtggcctggtttgtttcacattctagcttcaagacctggtggagcaccttatgtgaggctcacagggcttggtacctccaggaaagcacctgaactggttcattcatggggaggtgagttggagccataaactactactcagcattagttgactctcttgggtcaagctatggggaggagagtgaggagagggcatgtggtggaacagcaactattgtctagggagattcgaaatgtgctagctgttggggggccatcaaggactggagacccaaagtttcagaactggagggaaaagcttcaacagtgtggttttagaggcatatctctagctggtaatgctgccacacaagctagtctactccttggtatgttcccatctgaggggtataccttggtggatctagagggagcggatatgagctgggtgggggttttttttagtacacggggaaatagttatagtactacttttcatgaaagaattccccaaaaaccttttttcacctttataggctcttgtacccactttatgtctgccttttttcttttctaaggaagattgggaacaatgattaagtcttgttttgaatcactctctgcacatatattaatggggagaaaccaaaaaaagaactgtagaatgtatatagtaaggattgaatgacatggtgatgggtctcgtgtatttatcattactaacattgtcacactaaataatttcaggagtttaattaaaggcatgctactgtaaaaccaatccaaaatcttctttgctatcacctgttaaagtgtttatttattatgaaagttaataaattttgtatcttgctaaccaaactcaatgcttttagcatactaattaagaaattaaaaaaatatttattataagatcacaggagaaaatagaaaaaattatggacaaatagatacttattaacatttgtcataaattcattttatacgaagaattatgattggataatagtataaatatgaaacttattgcatggacttgtgttatgcaggctggcacctaaagtggtgactgtggtggagcaggacctaagcaacactggttcattcttggggaggtttgtggaagccatacactactactcagcattatttgactctcttgggtcaagctatggggaggagagtgaggagaggcatgtggtggaacagcaactattgtctagggagattcgaaatgtgccagctgttggggggccatcaaggactggagagccaaagtttcataactggagggaaaagcttcaacagtgtgggtttagaggcatatctctagctggtaatgctgccacacaagctagtctactccttggtatgttcccatctgagggctataccttggtggaggacaatggcattcttaaacttggttggaaggacctttgcttgctcactgcttcagcttggagaccacccttccatagtgccattacccatcacaactaggcttttgtgttggcctttttcatcatcatcatcatctcattattctaatcatgtgtagcatccaccccctctttgttacttaatttagagagagattgttaaggtgatcccatagcacgtgatttttcttgcctaatgtgtaccccttcagcagtaacatattaaaaaaaaagatatagttaaaaataggaaacagtgatatgaccaaatggttgaaggggtaccccactattgacataatgcaagaaagttctcttgctcggggagcacttgagagtttttctaatagtattttattaagagaacttataaggatgttacttttatattctgattttaatgaatacccttataaggatgttacttttatattctgattttaatgattacccttataaggatgtt

SEQ ID NO: 28905 - DNA, 1149 bp, Glycine max
  Clone ID: TF_700566412_FLI
agactattgaagcagaagcagcccacggcacagttacccgccattttagggttcatcagaagggaggcgaaaccagcacaaatagcatagcatccatctttgcctggacaagagggctagcccacagggcaaaactggatgacaatgctaaactcttggatttcactgaaaagctagaggcagcttgcattggagtagtagaggctgggaagatgaccaaggatttggcacttattcttcatgaattcctctgtgttcaaataatgctcccttctcgagccgaatcggctcgagcggctcgaggtgagcttgaactagaaaaccttgtaattcaacccggggaagctctagttgtgaacttcccttttgttttgcaccacatgccagatgagagtgtgagcacagagaaccatagggacaggctattgagactggtcaaaagcttgtcacccaaggttgtgacccttgttgagcaagaatccaacaccaacacttctccctttttccaaaggtttgttgagaccttgagttactacactgctatgtttgagtccatagatgtggccctccccagagatgataagcaaaggatcaatgcagaacaacactgcgtggctcgcgacatcgtcaacatggtagcttgtgagggggatgagaggctggaaaggcatgaactcttagggaagtggaggtcaagattttcaatggctggttttgcaccatgccctttgagttcctcagtcacagctgcagttaggaatatgttgaatgaattcaatgaaaattataggcttcaacatagagatggcgctctttatctaggatggaagagtagagctatgtgtacctcttctgcttggagatgttactgactcattgtcattgtcattggtatatgtatttttttttatccacaaatattatttgttagtaatatattagcttttattagcggggaatttgaacccatcacctctccccattcccatcattggtatatgcatattttcctccttgttaatttctttcctttttatgacattaagtcattatttagtggtatccgctgtttctcaataggattaattagagacttagctttcttccaacgtgtatcctttaccttttgtgggttcagcttagtctttt

SEQ ID NO: 28906 - DNA, 521 bp, Glycine max
  Clone ID: TF_GmC3121_16
gaaaatgtaaattatattaaatcgaaaatgatccaacaataaacaggacatatccgcagctagaaaaaaataaaagtctccttaatacaaaaaagcctaaatcaagatgctaaaacaaatacaccaagtacgtttgtctatatatacaagaagcatgtttactcccttaatcgtccgcggacgcgtgggccgctagagacctcagaatatatcctggtattgcagcctaccctcctcctcctccacaagacaacaacaacaacaacaacaacctcgacgaaatcgaaacagctaacaacatcaacaagcgtctcaagccatctccagttgaatcagcagactccgcgtctgagcccacgcgcaaatagctgctcgtggcttcgtaggaagccggcgtgcgtctggtccacactctcctggcgtgcgcggaggccgtccagcaggagaatctgaagctggccgacgcgctcgtcaagcacgtgggcatactcgcgggttctcaagccggcaccatgaggaag

SEQ ID NO: 28907 - DNA, 1647 bp, Glycine max
  Clone ID: TF_GmC359_9
atggaggtaagggtcgttcaaagaaacaagggatcaggaagaaggaaacggtggatttgaggaatcttctattgatgtgttcacaatctgtgtatgccaatgacaacaggactgccaatgaattgctaaaacagattaggcaacactcttctcccgttggggatgcatcacagaggttggctcattacttcaccaatggcctcgaagcacgcttggttggggatggcacaagtgcacaaggaatgtatacttttctgagctctaagaacatcactgttgctgagtttctcaaggcataccaggttttcacttcctccagccctttcaagaagtttatacatttctttgcaaataaaatgattatgaaagcagctgcaaaggcagaaaccgttcatattattgattttgggatcctatacggtttccagtggccaatactcattaagtttttctcaaatagggagggtggacctcccaagcttaggatcacagggatagagtttccccaacctggctttcgccccgcagaaagaattgaggaaacaggtcaccgtctggctaactattgtaagcgttacaatgttccctttgagtacaatgccatagcatcgaagaactgggaaaacattcaggttgaagccctcaaaattcagagcaacgagctagttgctgtcaattgtcacttgaggtttgagaatttactggatgagtctattgaagtgaacagtcctagaaatgcagtccttcatttgatcaggaaaataaatcaggatatttttactcagtccatcactaatggatcttataatgctcctttctttgccacgcggtttagggaggctctctttcattattctgctacttatgaattgattgacacagtcatacctcgtgaaaacgaatggaggttgatgatcgagagagagcttttgggccgggagattatgaatgttatagcatgtgaaggttctcagaggattgagaggcctgagacatacaaacagtggcaggttaggaatacgagggctggtttcaagaagctccctctgaatgaggaattaatggccaaattgaggactgcgttaaaggaatggtaccacagattttgtcttggatgaagataacaactggttgcttcaaggttggaagggccacattttgtatgcttccacttgttgggtgccagcataatgagatgctactggactgggttcagaactcatactatactgaaggttttggtatccttggtttggctacctctacttgcttaaccttcaggtgctgtgatgaagattgcaacaagctttgcacgaagttacttggtaaaactatggcacaagttttcgggtagaattgagacttgtgaatgtaatgcaatttctgtaatgatattgataagtagggcctattagagtaggaaggccattatagcatgtttgcccgagtaccagtatattgagttattttctctaaccaacatgtattaggcattttgttaggatggacccaaagaggtccaaaagaaggatgtttaagtggctcaaagattataaaagataatgttttttatttataaattatagttttttatttaatttatattaaaataacatgatgttgagacttggataattattatccatt

SEQ ID NO: 28908 - DNA, 1736 bp, Glycine max
  unsure (1)..(1736): unsure at all n locations
  Clone ID: TF_GmC112744_1
ctaaacatcatatttngaataaggtgacgtaaagtttttaattttatttctaaagattttaaggttaataataaatatttaatttttttatcaataatattaaaacccaatactcactaaacaaaaatacccttaaaatatttttttaatcgagtcaactaaaatataatatagatcctcaattatcaattatagtgcgatgcaatttaatatatatatttttagtagaaatagttatttagcagacgaaaaaaataaagatatgatgcaagtggaagaaaaataccaaaactaggctgcaagcaagtaataattatcaaataaatggtcatcgtcagattttggagtattataatacggggaagttgatcattgatcaatagtcgataaaacgagacatatatcattttcgggtgtcctactcgtaggacataggacaaaatttgatgagtaaattaaagggtttttggcacaaccaaagatgacgcaattaaaaaactaatcttccttaattaatccacagcccgagatgatgagtgtgattagcgagacaaattaataatgagaggctttggggatataaaaaccaaggttacgacgaaatatcgataacagaacggagcacccaaagaggataacataacacccaaactaacttttctgggctacaaagtcatcaccctttctgtctcctttcttttttttttttttttttttacctctcttaattttattttattttttttctctctctctctctccaaacactccttttctgacacaccgtctacctatctgcacaaactttccttgtctttccctctcagttttgtcacttttcccccaaaactttcctccaaagctttcgattctctctctcgacccgcaccgatcatgcttcaaagcttggtcccccgatcccctcgcacttcaaaccccaacgctatgaaaactaagcgcgccgttgacgccggaggcgattcccccgccgacgaaccttccttcaagcggaccaacttctccggcgagaaaactacggccgaagctgaggaggagcaagccttcgatcccgagcctcacggcggcgattccaccggtctcaaactcctcggtctgctcctccaatgcgcggagtgcgtcgccatggacaacctcgacttcgccaacgacctcctcccggagatcgcggaactctcttcgccgtacgggacctcgccggagcgcgtcggtgcgtacttcgcccaggcgctgcaggcgcgcgtggtgagctcctgcatcggctcctactctccgctgaccgcgaaatcggtaaccctaactcagtcgcagaaaatcttcaacgcgttccaatcctacaactcggtgtcgccactggtgaagttctcgcacttcaccgcgaaccaggcgatcttccaggccttagacggcgaggatcgagtccacatcatcgacctcgacatcatgcaaggcctccaatggccaggattgtttcacatcctcgcctctcgctccaaaaaaatccgctccgtgagaatcaccggattcggatcctcctcggagctcctcgactccaccggccggagactcgccgattttgcgagctcgctcggtcttcccttcgagttcttccccgtggaaggcaaaatcggaagcgtgacggaactgagtcaactcggcgttcgacctaacgaggcaatcgtggtgcactggatgcaccactgcttatacnacataac

SEQ ID NO: 28909 - DNA, 2028 bp, Glycine max
  Clone ID: TF_GmC509_1
ggctcgagaaaaggcccacaatcataacaaccaaaaagcccccttctccttccaacccctccattttcaacaacaattcctctaagcatcgttcagacaagggtacaccacaacagcttttgttagtcctcaccaagcgatgagagttcccgttccctcatccccacaggccaacccaaaacccaccaataacgttgtccgtaccattgcccttcccaacctcaacaatagcaccacgccccccacgggcctgtgctacgagcccacttctgtccttgacctgtgccggagcccgagcccgggcaccgaaaagcccaccaccgatcactccgttctcgtcaccaactcccaagactatctcgacctggaagaccatgcgttgcacaacttggactgggactccatcatgaaggacttgggcttacacgacgactccgccacccccgttttgaaaacttttctccaccccgacgacgacgacgacgacgacaacaacaacaacccatcatgcgacgacttcacactcttcgaccacgcgcttgaattcaccactctctccgacatctactccaaccaaaacttcgctttcgatttcaaccacttgcctcacgacttcaaccacctcaacggcttcgatttcatcgaagagctcatccgcgccgccgactgcttcgacaccaagcagttacacgtggcgcaactgatattggagcggctcaatcaacgactacgatcgcccgtcggaaaaccactccatcgcgcagcgttttacctcaaagaagctctccagagtcttctctccggttcgaaccggactccgaggatttcatccctggtggaaatcgtgcacagtatcagaaccttcaaggccttttcgggaatttcgccgatcccaatgttctcgatcttcaccaccaatcaaatagttctggatcacgcggcgagctccttcatgcacgtcatcgacttcgacatcggtcttgggatccaatacgcttccctaatgaaggagattgcggagaaggcggcggattcgccggtgctccgaatcaccgccgtcgttccggaagaatacgccgtcgagagcacgctcgtccgcgacaacctcgcgcagttcgccctagatctcaggatccgcgtgcaggtcgagttcgtgccgcttcgaaccttcgagaatctctccttcaaggccgtgaagttcgtcgacggggagaacaccgccgtgctcctgtcgccggcgatttttcgccacctcggcaacgccgccgcgttcctggcggacgtgcggaggatctcgccgagcgtggtggtttttgtggacggcgaggggtgtgcggagactgccacggcgtcggcggcgtcgttccggcgcggcgttgtgagcagtttggagtactactcgatgatgctggagtcgctggacgcgtcgacggtggtaggcggaggggagtgggtgaggagaatcgagatgatgcagctgcggccgaagattttggcggcggtggagagtgcgtggcggcgggttccgccgtggagggaggcgttttacggcgccggaatgaggccggtgcagttaagccagtttgcggattttcaagcagagtgcctgttagcgaagtctcaaatcagaggatttcacgtggcaaaacgccagaacgaactggtgcttttctggcatgatagggccattgttgccacgtcagcatggcgctgttagaacatggagtgttattattggcagaggggattatgtaataatgtagtaattataataaactgcaacgaaagtaaatttaggttccaatttcgaagtccactacactcgttcaaactattgctatgatggaaaaaatctaggtatctttggcaaaaggaaaaggtggggagggggtggtagataagataaacttgtatttttctgtaccattttgttgtccttctttgttggatggactctttgttatcctgatgaactttactactggttttctaatcaaagggtttggcagattttaaaaaaaagcatac

SEQ ID NO: 28910 - DNA, 1041 bp, Glycine max
  Clone ID: TF_GmC406_1
attcaatttgcaacctaagtgaggatgcaaaaacaattcacatcatagactttggcatccgctatggcttcaaatggcctgcacttatcagccgtctatcaagacgccctggtgggccacccaaacttcggatcacggggatagatgtgccacaacctggtttaagaccacaagagagggtgctcgaaacagggcgcagacttgcaaattattgcaagcgtttcaatcttccatttgagttccatgctattgcacagagatgggacaccatcagagttgaggacctcaagatagaaacagacgaatttgtggctgtgaactgcttgtttcagtttgagcatctacttgacgagaccgtggtgttgaataatcccagggatgctgttctgaggttgattaagaatgcaaatccagacatatttgtgcatggcattgtcaacggatcctatgatgtaccattctttgtgtcacggttccgggaggctctctttcattacactgcattgtttgacatgcttgacaccaacgttgctcgtcaagatcccatgaggttgatgtttgagaaggagttgtttggacgggagatagtgaacatcatagcttgcgaaggttttgagagggttgagagaccacaaacatacaagcaatggcagcttcggaacatgagaaatgggtttaggctgcttcctctggatcatcgaatcattggcaaattaaaggataggttgagagatgatgcgcacaacaataatttcttgcttgaggttgatggcgactgggtgctacaaggttggaagggtcgaattctatatgcttcctcttgttgggtacctgcatagcataggccttgaacattatttattccagattacaaaaatctagtcttacacacaactattagtacgtctccttcaatctccctagctcatttgttgttttttatgataaggaaaaaccaaagttatagttagtttctttcaatgtgtagtttgtttagtacttacatatctaacaaattcagcaaatacaattgagagccgc

SEQ ID NO: 28911 - DNA, 383 bp, Glycine max
  Clone ID: TF_jC-gmst024114c12a1
ggctcgagcttcgaccacgcgtataattcacctctctctccgacatctactccaaccaaaacctggccttcgatttcaaccacttgcctcacgacttcaaccaccacctcaatggcttcgatttcatcgaagagctcatccgcgccgccgactgcttcgacaccaaacagttacacgtggcgcaggtgatattggagcggctcaatcaaaggctacgatctcctgtgggaaaacccctccagcgcgcagtgttttacttcaaagaagctctccagagtcttctctccggttcgaaccggaccccgaggatttcgtccctggtggaaatcgtgcacagtatcagaaccttcaaggccttttcgggaatttcgccgatcccaatg

SEQ ID NO: 28912 - DNA, 1528 bp, Glycine max
  Clone ID: TF_GmC588_1
atgaggttatcttctgtaacttcttcacctcttcagttcttttccatgatgtctctttcagtttcacctagcttaggatctccctaccaaatgaaatgcgagcaaaggggtttggtattaatccatttgttgctcgctggtgctaattttgtagccaccggtgatttacaaaatgcaaacctcacacttgagcagatttcccagcatgcctctcttgatggggatactatgcagcgaattgcttcttatttttctgaagcactcgctgatcggatacttaaaacatggcctggcatccacagggccctcaattccagcagaataactatggtttctgatgaaattcttgttcaaaagctcttctttgagcttttacccttcctcaagttctcatatatcctcactaatcaggctattgttgaagccatggaaggggagaaaatggtgcatatagttgatctctatggggccggaccggcacagtggatttctctcctccaagttttgagtgcacgtcctgaaggtcctccccatttgagaatcaccggggtccatcacaagaaagaggttctggatcagatggctcataaactcactgaagaggcggaaaagttggatatcccattccaattcaaccctgtgctaagcaagttggaaaatcttgatttcaacaaacttcgcgttaaaactggggaggcactggcaataagttctattatgcagttgcactcccttttggccttggatgaagatgcctcgcggagaaaatcgcctcttttgtcaaaaaactcaaatgcaattcacctgcagaaaggcctcctcatgaaccataacacactgggagatttgcttgacggctatagcccgagtcctgattcggcctcatcctcaccagcagcgtcttcatctgctttgatgaattcggagagctttcttaatgccttgtgggggttatccccaaaagtcatggttgtaactgaacaagactttaaccacaactgtttgaccatgatggagagactggcagaagctctattttcttatgctgcatattttgattgcttggagtccacggtctcaagagcatccatggacagattaaaacttgagaagatgctttttggcgaggagataaagaacatcatagcttgtgaaggatgtgaaagaaaagaaaggcacgaaaagatggataggtggatccagagacttgacttatctggatttgcaaacgtgcctataagctattatgggatgctgcagggaaggaggttcttgcagacctatggttgtgaggggtacaagatgagggaggaatgtggtcgggtgatgatatgctggcaggagcgatccttgttttccataacagcttggagaccaaggaagtaagataaagaagaaaattagtcatgtagtaatggatagagtctctttttttaagtttttcttttcttttctttgtttctaattgtatgacagagttttaccaatgtggtaatgactagtaatgaagagatacttctatttcctt

SEQ ID NO: 28913 - DNA, 1731 bp, Glycine max
  Clone ID: TF_GmC7815_20
ccacgcgtccgtacaaatccatagttttttaggttagttgctggcattggcaagcaatctggtttctctctcctctctgcactgcaccccacaactcaaactgagcagtcacagacacaggtatgctctcgctggacacttcctagttttcaactacatgtgttcatgccttgtggggaatgcctctaattgctgtctcatctgttggatcattcagctcaaactcccacttctgtctcattttcaattttccggttttatcgacaatccccacatagaatacccgttggccaaccgacctccttaccattcaatttcgtcgggtttcagcaacgacttccactttttttattagttaagagaacccccccccaaaaaaatgaagaaaactactttcttttttacgtctaagtctctcttctgttactagtcagtcttgtggtgatctcaaagcctctaactttcctcagaggttgacgattttcggttttggcacccaaggggttgaatttcctggcatgttgtgtgtctttaaaacatctatgaactgttgttggcacttggcagataattattgcatctagcaacccataaagacggtgactatgagtaatctgcaaaattttaatgctatactctgtgtctctgaatgaccatcaagtgatccggtgcggttggaaagaaccttccgaattacaaagattgactacttgttattctcattggtggagttaatagttattttgtagatgcaaacgtctcagaaacacccaagttcagctggtgtccatttctatcaccagcctgtgcaaggcatttaccaaatgttgcaaagcaatctatgccatgatagcagcagccagggaacaagtgtttcttttgaaacctgcaaggagcaatactttactctagaatcatgcccagcacccactacttgtttcgtggattgtgatgattctccttcctatgccagtgtatcatctaaaaggactccattttctccacagggttctcagtcatgctattcagatcaccagcagtcctctgacaacacctacggttcgccaataagcggcttgtccagtgttgatgacgggcatgaactgaagcacaagcttagagaactggagatttcattgttggggcctgaacaatcagacagttgcggctgctgcgtcgtcaagggtggcctccagggatcatctcagttggctaaacataactgggatcagattgcagagaacgttgcacaatttgacttgaaaggagtcctcagggtatgtgcacaggctgtgtctgatgatgatgttccaacagcaagaggctggatggataatgtattggggaaaatggtatcagtctctggtgatccaatccagaggctgggtgcttacttattggaggggcttagagcaaggttggaatcatcagggaatctcatctacaaatccttgaattgtgaacaaccaacaagcaaagaactaatgagttacatgcacattttgtaccagatttgcccgtactggaagtttgcatacatatctgcaaatgctgtcattgaagaagcaatggcaaatgagtccaggattcacataattgatttccaaattgcgcagggcacgcagtggcatttacttatccaggctcttgcacataggcctgggggacccccctcccttcgtgtgacaggtgttgatgattcgcagtcgattcatgcacgtggtggaggac

SEQ ID NO: 28914 - DNA, 765 bp, Glycine max
  unsure (1)..(765): unsure at all n locations
  Clone ID: TF_GmC160039_1
acgagctcaggctcagtctccaacgcttcctcggagagccagagcctgaggctaaacgacaacgtttcagaacacgaagtgggaaacggttcagggaacccttactaccatcaccgcaaggtggaagcaggggaagaagacgaccatcacgggttcgagctcgtgagcttgctcaccggctgcgtcgacgcaattggatcgagaaacgtcactgcaatcaaccatttcatagcaaaattgggtgatcttgcttcccccaaaggaacaacctcgataagccgcatttgcgcttacttcacagaagcattagccatcagagtcacgaggctctggcctcacgtttttcacatcgccgccgccaccacttcacgcgacatggtggaggacgatgaatccgccacagcattaagacttctcaaccaagtaaccccaattccaaagttccttcatttcacatcaaacgagatgctgctgagggccgttgaaggcaaagacagggtccacataatagacttcgacagcacgcgaggccttcaatggcccagcttgttccaaagcctagcttcgaggtccaaccctccgatccacgtcaggatcacggggatcggagagtccaaacaggacctcaacgaaaccggagagagactcgccggttttgctgaggtcttaaacctccccttcgagttccaccctgtggtggacagactncgagacgtgaggctgtggatgcctcacgtgaaggagcacgaaacgggtgctgtgaac

SEQ ID NO: 28915 - DNA, 1490 bp, Glycine max
  Clone ID: TF_GmC1774_1
ctcactaccaaaaagtaatatcttctgaaaaggaaaggaagaagaaaactcccaagtatcattgtctgattgacaaattgtatctggaactgtttttatcaaacatttacatgctctgagtagaatgaacatcctatattttctcttttcacacctacggctctcatttatgctaatccagctattatggatggattaggttcgccatcccagtggctgagggagctgagatgggactcccagggcttaaatccaataagccttcttattgactgtgccaaatgtgttgcatctggaagcatcaagaatgcagatattggccttgagtacatatctcagatttcatctcctgatggtaatgcagtgcaaaggatggtcacttatttcagtgaagcacttggttacaggataataaaaaatttgcctggtgtatataagtctctcaatccatcaaaaacatcattatcttctgaagatatccttgttcagaaatacttctatgaactgtgtccatttttgaagttctcatacctgatcacaaaccatgccattgctgaggccatggagtgcgaaaaggtggttcacattattgatcttcactgttgtgagccaactcaatggatagatcttctactaactttcaaaaaccgtcagggaggtccaccccatctgaaaattacaggaattcacgagaagaaagaagtattagaccaaatgaactttcatttgacaactgaagctgggaaattggattttcctttgcagttctatccagttgttagcaaactggaagatgttgactttgagaagttgcctgtaaagataggagatgctcttgcaatcacttctgttcttcagctgcattctcttcttgccactgatgatgatatggcagggaggatctcaccggctgcggcagcatctatgaatgtgcagagagcactgcatatgggtcaaaggacttttgcagagtggcttgagagagatatgatcaatgcatataccttgagtcctgattctgctttgtcaccgctttccttgggtgcctcacctaagatggggatctttctcaatgctattagaaaacttcaaccaaaactagtagtgattactgaacaagaatcaaatctgaatggttccaatttgatggagagagttgatagagcattgtacttttacagtgcattgtttgactgcttggactctactgttatgaaaacatcagtagagaggcaaaaacttgagagcaagcttcttggagagcagataaagaacatcattgcttgtgagggtgttgatagaaaggagagacatgagaaactcgagaaatggattcgaagacttgaaatggctggttttgaaaaggtacctttgagctacaatgggaggttagaagcaaagaatctgttgcagagatatagtaataaatacaaatttcgagaagagaatgattgtttacttgtctgctggagtgacagaccattgtttta

SEQ ID NO: 28916 - DNA, 1418 bp, Glycine max
  unsure (1)..(1418): unsure at all n locations
  Clone ID: TF_GmC170_7
ggctcgtgtattatttagatatctaaataattattactatacaaaatcattttatcgaatcatattgtttttattatcattattgccgagatttgatccgttctcttgagatgaaatgactagggttatctggaagtcaatcaaggacaagctcattttgcccttcttggagttggacatcaagtattatgacttaggccttccttaccgtgatgagaccgatgataaagttacaatttgaagtgcagaagccactctcaaggtcattgtggcattcaaggggcaactattactccagatgaagctcgtgtgaaggagtttggcctgaagtcaatgtggaagagtccaaatgggactattaggaacattttgaatggaactgtcttcagagctcgagccggtggttgttgcttattcaggctcttgcatctcgtccaggtggaccacctttcgttcacgtaaccggtgttgatgattcccaatcatttcatgcaaggggtggaggacttcacattgtagggaaacgcctctcagattatgccaaatcttgtggagtgccatttgagttccacagtgctgcaatgtgtggaagtgaggttgaactagaaaaccttgtaattcaaccaggggaagcactagttgtgaacttcccttttgttttgcaccacatgccagatgagagtgtgagcacagagaaccacagagacaggctattgagattggtcaaaagcttgtcacccaaggttgtgacacttgttgagcaagaatccaacaccaacacttctccctttttccaaaggtttgctgagaccttgagttactacactgctatgtttgagtccatagatgtggccctccccagagatgataagcaaaggatcaatgcagaacaacactgcgtggctcgcgacattgttaacatggtagcttgtgagggggatgagagggtggaaaggcatgaactcttggggaagtggagggcaagattttcaatggctggttttgcaccatgccctttgagttccttagtcacggatgcagttagaaatatgttgaatgaattcaatgaaaattataggctcggatatagagatggtgctctctatctaggatggaagaatagagctatgtgtacctcttctgcttggagatgttactgactcattgtcatagcctcataggtatatgtatattttcctccttgttaatttcttcccttttttggacacttagtcattattcagtcgtatcttcagtttctcaatagaactagctagttagagacttagctttcttccaacgtgtatcctttaccttttgtgggttcagctgagtcttttaacatttttgtacatttcaatgctacatagaaggtaagagaaaacctcagttattgacanaaaaaannnnnnnnnnnn

SEQ ID NO: 28917 - DNA, 347 bp, Glycine max
  unsure (1)..(347): unsure at all n locations
  Clone ID: TF_LIB3242-531-P1-J1-H3
nnnnncacttcgagatcttgatataatgcaagggttgcagtggcctggtttgtttcacattctagcttcaagacctggtggagcaccttatgtgaggctcacggggcttggtacctctatggaagcacttgaagccacgggaaaacgtttgtctgattttgcaaacaaactttgccttccctttgagttcttccctgttgctgagaaagttgggaaccttgaccctgagaggctcaatggtagcaaaacagaagctggtgctgttcactgttgcaacattccctttatgatgtcactggctcagacaccaacaccttgtggctttttgcaaagactggcacctaaag

SEQ ID NO: 28918 - DNA, 3720 bp, Glycine max
  Clone ID: TF_GmC3864_1
ccgggctcgatcttcgacccacgcgtccgatcatacacacttttttaccttttgaaggcaaccaagtttgtcaattagaaaatagtgaattatcatctctatggtttatgataattagacaatgtttatctgttaactcagaccacatatctattcatcggtacacttcttctctgtggtgatttaactttagttactgtctgaatgttccagatgatatgttataaatagttgactttggtttattctttttagtctatggacacagtcatcctagaagattcaacaagattacatcactgagagactctgcctggtttactatttcttaagccaaaaattcacgtgaagcaaataacaggcgaatcatgtcattagttaggtctgctgatctagctcctacatcatatgaaaatgctaagctcttctcactgaagggaactgatgttagaccaggcctgtcctcccaaatttttggtcctgataagcataggagcatgtacatgaccgatgcttactccggcgagtgttatgagaagtacttccatgactcacaaacagaagaattgatagaaccatctagttccagcatctctggaagttcaattcaccctgatgtagcctcttcttaccagctcagagccagttcaggagcttctatggttgccaataacccatctgattcttctttcatgtctacaaggcatcatgatgcttaccagtcaaactctggatcagatttgatggagaacggaagcctggattcacgcgacgatgaaggtctaatgagattaagactaaaagcactggaaagggcattgcttgatgatagtgatgctggggaggatgaagaggaggaggaggaggaagaggaagacatatttgaggctgcacaaagcatggaaattgatcctgacattgctgagtgggctgattcaattcataatatgctgctccatggttcaccaaaggagtcctcttcttcagattccaataccagcagcatcagcagcaccaaagaaatatcacaaacttctcagacccccaagaagttgctttatgaatgtgctattgcactttctgaaggaaatgaagtggaaggatcatctatgataaacaatctccggcagatggtctcaattcagggagagccttctcaaagaattgcagcctatatggttgagggacttgcagctcgcctggccgaatccggaaaaagtatttacaaagctctgagatgcaaggagcctccaacttcagatcgtctagcagctatgcagatactgtttgaggtttgcccatgtttcaaatttggattcattgctgctaacaatgcaattacagaagcagtgaaagatgacatgaagattcatataatagattttgacatcaatcaaggaagtcagtacataaatctaatccaaacacttgcttcaaggtcaagcaagccaccacatgttaggttgactggagttgatgatccagaatctgtgcagcgatctgttggaggcctacggaacataggacaaagactagaaaaactggcagaggcacttggtttgccatttgagtttcgagcagtggcatcaaggacttccattgtcaccccatcaatgctcaactgcagtcctgatgaagcactagtggtaaactttgcattccagcttcatcacatgcccgatgagagtgtttcgacagtaaacgaacgggaccaacttcttcgcttggtgaagagcctgaatccaaagcttgtgacagttgtggagcaagatgtgaacacaaacaccacccccttcttacctagatttgttgaggcctacaattactactctgctgtgtttgagtcacttgatgctactcttcctagagaaagccaggacaggatgaatgttgaaaggcaatgcttagcaagggacattgtcaatgttgttgcgtgtgagggcgaggataggatagagcggtatgaagttgctggaaaatggagagcaaggatgacaatggctggcttcacttcatccccaatgagcacaaatgtcaccgatgaaatccgaaaactcattaagacggtgtattgcgacaggtacaagattaaggaggaaatgggagcgcttcactttggttgggaagacaaaaacttgattgttgcttcagcatggaagttaccaagataatcaattgtgttaggcgatagactcattctagtatcagtaatctagtgtttgcttgcatgcttgtttagtctgtagattacttctgatattcctattgtggtgttttcttgcttttccacatgtatactaacgtacaatcttaagctaataacgaactttgattttatgtaagtgcttttcttaacgtggctggaggacaagggagcaagaagcaatgaagcttatgcttaagctaatgactattttctagtttgataatttgttaaaataaaagagttgattaaggcgaagggtgtgatgagattagttttgagaagaaaccagcaatcggcgattaggagtgagagagatatggagggaattgaaggaaatagcagcagatacagtctgaaaccctcgcgaatttgcaacgaagatgttctgatctgcgtcgacgtcgatcctcagtgcctcgtcgaaatgaaaggtgccaccggtcccaatggcagacccctcacccgtttggactccatcaaacaagccatcgttctcttcgtcaatgccaaactcaccatcaaccccgaacaccgttttgccttcgccactctctccaacaccctcgtctcttgggtcaggaaagagtttagcagtgaaattgagtcaacacttgcagcaatgcgtgttctttcagcttcttcttcttcttccaccaccgccggccaacccgatctcactcatttgttccgtcttgccgctcatgaagccaagaaatcccgtcttcagggtcgcatcctaagagtcattttgttctactgtagatcatcagagcgaccaaagcatcagtggcctgtgaaccagaagctcttcactttggatgttatgtaccttcatgataaacctggaccagataactgcccccaggaggtttacgatacactggtggaggcacttgaacatgttagtgaatatgagggttatatcttggagagtggacaggggttggcacgtgttctattccgtcatgtgctgatactattgtcacatcctcagcagcgttgcatccaagagtatgttgacataccaaagtcaattgcaaagaagcctccccaggtggagcctatggctactgaagatagtgctcccatatcaagccaataatactatgagttgggaagtggatggcagttgcatgtggtcaacctcttaaggggaatggaatatgatcataattcagcaatgttcaagttggaggttagtgtcactaggttgacaagggaatgattgttactagcgtaacagtttctgaaattggattcgattcctacaaccctctttcgttctcaagttgataccatttactattttgaatcaaatgtatgaaaagtgtactttcaaacatatccatattcattagtaatcaagcgtttaggtctggtaatgaaagtgagcaagggatgtgattatacacaagctgttagattttattttatttttcttgtcggtaactttcaaagacaaagacaatattaataaatttataacacaaagacaatattaataaatttatacc

SEQ ID NO: 28919 - DNA, 640 bp, Glycine max
  Clone ID: TF_GmC167117_1
ctaaagcctatacaaacacaaagaacaatataacactttctaatatgttctagagtctagatctactcattctccttattcactctttcttgagatataaatggaagattcagaggaagaagagcttctgaatcttactctttcagttgatgccggtagggagaggagaattaagaaaggaaggacaagggataataataataacactaattctgttattattcctatgaagtccaatgacgggtatgaagggaagatcttcaggctcctccaaatgagggagctgatgctaagacaagaccacagaagaaaaggagtgctacttgaagatgtgaacaacaacaacaacgatggccttcctttgattcatttgcttctctcaacagccactgctgttgatgatgatcaaagaaactattgtgccgctcttgagaatctcattgacttataccaaacagtttccctaacaggtgactcggtccaacgtgttgtggcctatttcgctgatggtttggctgcaaggcttctcacaaaaaagtcacctttctatgacatgctcatgggagaaccaacaagtgaggaagagtttcttgcattcactgatctctatagaggctcaccctattaccaatttgctcac

SEQ ID NO: 28920 - DNA, 2280 bp, Glycine max
  Clone ID: TF_GmC42017_1
ctgattctggtccttcttctgggacaagctcgaatggagaacatgcagagagtactaagcactccaatcccattctcagatacattagtgacatcctcatggatgaagaagttgatttggagcgaaaaccctgcatgttgcaggattgtttgagacttcaggctgctgaaaaatcattctatgatgcattggttcgtagttacccttcatcaactggtcaatttaatgataatcctgacccagatgataattttggtggaactactagttctgagagttttagcagttataccactgataattcatgcgagtctgattggtttaacggtgctagtgacttggattcctctttcctacaaagatctctaattgattctccggaacacgcatatgtagctcctgatccgtttagagagacacaagctggggtccatttttcaaatggagcctggaatttgattcacccacagaacaagccgcgtgtgattgaggatggtgtgatgcggggttctgtaacagccacaggattgagggagaagaggagttatctcatgaatgatatgtcacatgaagaagagagaagcaacaagctttcttctgtctactccgatgattcggagccatctagcatgtttgatgaggtgctgctttgtaaggatggtaagagtgccatccattttttatgctggccgtgaaccatcaccatcgcagattgctgactcaagaggatctaatgggaagaaaacacgatcaaagagaggttccaataaggggacaagggcaagcgtgacgacggtggatttatggactttgctaattcaatgtgcacaggctgtggctagctttgaccaaaggactgcaaatgaaacactgaagcagattaggcagcactcttcaccttttggcgatggacttcagcgtttggctcattacttcgccgatggcctcgagaaacggttagctgctgggacaccaaagttcatttcctttcagtcagcatctgccgcagatatgttgaaagcataccgagtgtataggtaagtcacgaaccagatagcgatgtctaatttcttggcaatccgcactattctgaagctagcgctgaatgaaatggtgaagaaggaataccataatgggtttgtagttggtgaggatggcacgtgggttttccaacggctttcagagaggccaggcgggcctccaaagcttcttatgacaggaattgatcttccccagccgggatttaggccggcggaaagggttgaggagacggggcggtggctggagaagtactgcaagaggtttggagtcccatttgagtacaattgccttgcacagaaatgggagactataagacttgaggacctcaaaattgataggagtgaagtaactgtggttaactgtttgtacagattgaagaacctttccgatgaaaccgtgactgcaaactgtccaagagatgctttgctgaggttgatcaggaggatcaatccaaacatcttcatgcacggggtcgtcaatggcacttacaatgcaccatttttcgtgacaaggttcagggaagcactcttccacttctcatcattgtttgacatgtttgaagttaacgtgcctcgtgaaagaagacgacagaaggggattgagaaaggggtgttcggaagggatgcaatcaatgtgatagcatgtgagggggcagagagggttgaaaggccagaaacctacaagcagtggcaagttaggaaccagagagcagggttcaagcaacttccattggccccagagcatgtgaatagagtgaaggaaatggtgaagaaggaacatcataaagattttgtggttgatgaggatggcaagtgggttttgcaaggatggaaagggcgaattctttttgctgtttcctcttgggttcctgcttgaggaatgaccaactcctaacccactcattggcaaggaaaattgttttaggtgtaaggtgcactaagggtatatttatccttgaatagaagtgaatcatgatcatattttgtttctatttgaatagtgaaaataccctcttatatgtgcacttttatgaacaagagtagaagacttaaactcctctgaaatcactgattttagaaggatatctaatatccacattaatgtactagttttctagtgatgcctaggagcaacatagaaagaagttggtagttattataaatcttcatttgcttaatgctcactgctgtactctaaactttattttctcgtttatgttacaagtggtgaatcattccc

SEQ ID NO: 28921 - DNA, 2980 bp, Glycine max
  Clone ID: TF_GmC640_32
ccacgcgtccggaagaatacattcattcatctcatggctttcttcttcttccctcatcacaccttcttcaactgtttcaatctcaacacgccacagaagtatcagatagaagaagaaaaaaacaagctttatttttagagggtgcccaagttgtttgttcttttgtttttcctgcagcactctatgtgtttgttcagtgttcctcgaagatttgtattgtccccaaaacaaaaacaaaaattcagcctttttagctcttccaacccgaaatttcttgttttttttatgtgttcttcatttggggtggtttaaatttgcttaatttgtaatcttttttttctggggtgggttgtggggaaataaaggtggtaccttttgaaaaactggagtcttttgggtggtgggttttgtggtcaccaattttattgttcttcccccccctaggcaactttcttagatgaaggtcatgcccttgccttttgaggaatttcaagggaagggagtgttggatttctcttcagcctcagattcattttcagtgcttttgcataacccacaaccaaagtggaccatagacaaagaggactattgctatgtgggcagcatcactgagcccacctcagttcttggctccagaagaagccttagccctcccacttcctcctccacaatgtcttcttctcttggcagcagcaacaacagcactagcaagggtggtggtggcacctcagccaacaccaccaacaacccaacaccaccctcagactacaacaacaacaaccctcctcaggaatccagccccgaaaaatgtggcatcaggatggaggactgggaktgccaagatcaatccatcctgaggctaatcatgggggatgttgaaracccttctgctggattgagcaagcttctgcaaagcactgcctgtggctctcaaagtgctgatttcaatgctggatttggtgttgtggatcaacaaggattgaatatgaatatgaatatgaatatggtgggtggtaatattgacccaaattaccctgctggtttccctttcattgctgagaatatggatggccagaatgccaaggctggttctgggactggccaggtttcagaatctgttgttttctctgccaacaatcctctcatggtgtcatcatctgtttcccctggtgtgttcacttctcagcagcagcagcaagagtttggagtggtggatgagaagcctcaggttattaatccacagtttatgttgaaccagaaccaagttcagttctcagataacccttctttctttttgccattgatgtaccctcaggtgcaggaacagcaggttttctctcagcatcaggcgaaacaccatctctttgacaccattgggcacaattttcaagctccaaggttgtcccttttggattcagggcaagaagtgtttggtaggaggcagcaaacacagcttccattgtttcctcaccatatgcagcaacaacaacaacaacaatcaatggttatgccttctactaaacagcagaagggtgagttccaccggagacgatgcaagccaccagcttcagcaggctatatttgatcagttatacaaaactgctgagctgatagaagctggtaatcccgttcatgcgcaagggatattgggcgcggctcaatcaccagctctcccctattggtaggccttttcagagggctgctttctacatgaaggaggccttgatgtcactgcttcattcaaatgctcacagtttcatggctttttcgccaattagtttcatttttaaaattggagcttataagtccttttctgagatatcacctgttcttcagtttgccaattttacttgcaaccaagccctcattgaagctgtggaaaggtctgacagaattcatgttatcgatttcgatattgggtttggagtgcagtggtcatcttttatgcaagagattgccttgagaagtagtggtgcaccttcactcaaagtcactgccattgtgtcaccctccacttgtgatgaggttgagctcaatttcactagagagaatttgattcaatacgcgaaagacatcaatgtgtcatttgaattcaatgttttgagcattgaatccttgaactctccttcctgtccactgcttggtaaattctttgataatgaggcaattgtggtgaatatgccagtctcaattttcacaaactatccatcattgttcccttccgttcttcactttgtgaagcaactcaggccaaaagttgtggtcactttggacagaatttgtgatcaaatggatgtaccacttcctaccaacgtagtccatgttctccaatgttattcggccctgcttgaatcgttggatgcggtgaatgtgaatcttgatgtcctccaaaagattgagaggcatttcatccagccagctatcaagaaaattatacttggccaccaccattttcaagaaaaattacccccatggaggaacctctttatgcaatctggattctctccattcacatttagcaacttcacagaagctcaagctgagtgtctagttcagagggcacctgtgaggggatttcatgtggagagaaagccttcatcacttgttctatgctggcagaagaaagaactcatctcagtttctacttggagatgctgaggactgaggagcagcagcagaagctaattaccttatatttttaaaggtgcatggtaacttacattgcagtttatgtaattgtttgtgtaatttaggcttattgatgagatccacacccaaatgttttcttaactgcatgggttggaatctaccattctgtagttctaatatttactagtatgtcactttgaacatgggtagtaattatgcctttccccattcccatcatctaaagatgggtaactgtttctttgttatcttgaacacaaagcaaattgcttagtaagaaacgaacaatttagctaagaatgcagcctctatt

SEQ ID NO: 28922 - DNA, 2345 bp, Glycine max
  unsure (1)..(2345): unsure at all n locations
  Clone ID: TF_GmC491_1
cggatgctttcgaatcttcttagaaaaaaaaaagtagttttcatggggggcaaaagactcatgcattgtttaactgagataagatccaagttcttgcactagttcgccttggatttggtcttaaccgccaaccttgaataataaaaccacaaaaacaaaagcccacatgcatgccaattcctcgttgcttttacctgcaaaagtgctaagtccttgcatcagttctctattgttttggcttcaaagttcagatcatgctttccttttcatttaagaatatcttagattttgagaacactgctcatgtccagctggaattggagtaaaatgtggacaacgatcacggaccttaaatagaagtacctgttgtttgttgttcaaaaaaagagagaaatcagaaaattcaggagtgtttataccagacaaacattttggtgttatttgcatatattcaaagcaccagttacttttcaaatgcaaatgtctcagaaacataaaatgtcctatgactctagcaggttcagcattgagcctgcgcaaaatctggggtcatgttgcttcctgcaaagtgggaacctagactactactcatcctctgataatggtagccatgcaacctacccttctgtttgtattttcgaacaatattgcaccctggaatcttctacaaacaacaatttcccttccctaaactctccatctactgtcagtttctcacctaacaatagcccagtctcaaagctgcagtcaaaaccaaatgtgttgagttcacagaattcgcttgaaattgttgatgaatcgctagaaaacaaatctttcttgacacttaacgatgatgagctgaggcacaagataagagagcttgaaagtgctatgttgggacatgatacagatattctggatacttatgataccataattccagaagaatctgattcatttttgaaagaggcagaaaggtggaagagaatgatggaaatgatatctagaggggatttaaaagagatgctttgtacatgtgcaaaagcagtggcaggaaatgatatggagacaactgaatggttgatgtcagagttgcgtaaaatggtctccgtctccggcaatccaatccaacgattgggagcatacatgttggaggctcttgttgcaaggcttgcctcttcaggaagcacaatctacaaagtcttgaaatgtaaagagcctactggtagtgaactcctttcacacatgcatctactttatgaaatctgtccatatctcaaatttggttacatgtcagcaaatggagctattgctgaagtcatgaaggaggaaagtgaagtccacattattgattttcagattaaccagggaattcagtgggtaagcctaatccaagctgttgctggcagacctggagcaccccccaagattagaataacaggttttgatgactccacttcagcttatgccagggaaggaggccttgaaattgttggagcaaggttatcaaggcttgcacaatcatataatgtaccctttgagttccatgctatacgagctgctcccactgaggttgaactcaaagatcttgcacttcaacctggtgaagctattgctgtgaactttgccatgatgttgcaccatgttccagatgaatgtgtggatagtcgaaaccatcgtgaccggttggtgagattggcaaagtgcttgtctcctaagattgtgacacttgttgagcaagaatcacataccaacaacctcccattcttcccccgtttcgttgagacaatgaactactacttggctatttttgaatcaattgatgttgctctgccgagggagcacaaagaaaggattaatgtggagcagcattgtttggctcgagaagttgtcaacttaatagcatgtgaaggggaggaaagagtggaacgtcacgagcttctgaagaagtggagatcgcgttttactatggctggattcgcaccatatccactgaactcgtttattacttgttcaataaaaaatcttcagcgaagctaccgaggacattacactctagaggagagagatggggctctgtgtcttggttggatgaatcaagttcttattacctcttgtgcttggaggtgatgatccaatggcaactggttcatttttgttatttcagacttttagttagtttatgtatcatcataatcttcttacgcagaattcatagtcaagttactctgtagtttgttataaaataaaataaaaaaagaaacactagatttatgttaataatgccagtaccagcaagctcgatctcatcaaagtagaacaagaagcangcagcactatgtattctgtattttgctatgata

SEQ ID NO: 28923 - DNA, 1105 bp, Glycine max
  Clone ID: TF_GmC172_2
cacagaacacgccgagtcgactcagttgctgttcgagtactcgctcttcttcaaggtcgcacgcatggtcgccaacatcgcaatactcgaatccgcattaaccgagagcgggaagctctgcgtggtggatttcgatatctgcgacgagaaccaatacgtgagtcttcttcacgagctttcggcccggcggaagggcgctccggctgccgtgaagatcgtcgtggtgacggagaattgcgccgacgacgagaggctgaatattgtgggcgtgttgctggggagacacgcggagaagcttgggattggcttcgaattcaaagtgctgactcggagaatcgccgagttgactcgcgagtcgctgggttgcgacgcggacgagccgctggcggtgaactttgcgtacaagctttatagaatgcctgacgagagcgtctccacggagaaccctcgcgacaagcttctgcggcgtgtgaagacactcgcgccgcgcgtggtgacgctggtggagcaggatgccaacgccaacacggcgccgttcgtggctcgagtaaccgagttgtgcgcgtattacggcgcgctgttcgactcgctcgagtcgacgatggcacgggagaacttgaagcgagtcaggatcgaggagggactgagtcggaaggtggtgaactcggtggcgtgcgaaggaagggaccgcgtggaacggtgcgaggtgtttgggaagtggcgcgcgcgtatgagcatggctgggttcaggttgaagccactgagtcagcgagtcgctgattcgatcaaagcgcgactcggtggcgctgggaaccgagtcgcggtaaaagtagagaacggtgggatttgctttggctggatgggaagaactctcaccgtcgcatctgcttggtgttaactagttaactcaactttttactctctttattttaaatttctttggatatttcatatttgtatacacattgttattatattttaatgttacctagagaaagtgaaaaatcatagagttggaaaattataattaaacaatatcccgcgccccttctttcttatgccaaacaggcaaatagtaaaaagtctttggattccgagtaaacac

SEQ ID NO: 28924 - DNA, 2540 bp, Glycine max
  Clone ID: TF_GmC829_1
ggcctttccgggcacacgcgtccacccactgggagcatacatattgacctttgtgacttgccatgtgttccaagatataatctccaactccaaaaaaacctctttacatgacacatgtgtatgtttgtgcatgataaattctctttcatttttgggctgcaaatccaactgggtcattattactggttctgagtggtcttgcttcagatcaggtttttttgctaagaacaactcagattttcagtacagtgttactgccaagcagaagttgaattaacgtggataatgattaccgcgcttgaagagtagaagcaataattcagcagtgtttgtgtcaaaatattttgcagctcgagtatatcaaagaactggctagttctcaatgcaaacatctcagaatcataaaatttcttatggctctggcgggttctatgctgagcctgtgcaaaatttggagtcatattgcatgccatcaagtgagaacatagacaattactcttcctctgataacagcagccaaacaacctacccttcagtccaaactttagaacaatattgcacccttgaatctgcttccacaggcaacagtttccctaaccaaaattctccacctgctctcagtttctcatctaacaatagtccattgtcaaagctagagtcaaactcatatgtgttaaggccacagcattctcttgaaattgctagtggctcgcctgaggatgattcttatttgacgcatgaccttgatgacctgacacataagataagagagctggaaactgctatgctgggacctaatgcagatatgctagatatctatggtaccgtaattccagaacctgattcatttttgttagaggctgagaagtggaagaaaatgatggaaatatcatctagaggggatttgaaagagatgctttatatgtgtgcaaaagcaatggctgtgaatgatatggagacaactgattggctggtgtctgagttgcgtaagatggtgtccatttcgggcaatccgattcagcgactgggagcatacatattggagtcctttgttgcaaggatcggtgcttcaggaagcacaatctacaaatccttgaaatgtagtgagcctactggtaatgaactactttcttacatgaatgtgctttatgaaatttgtccatacttcaagtttggttacatgtcggcaaatggagcaattgctgaagctctgagggaggaaagtgaagtccacatagttgactttcagattggccagggaacccagtgggtgagcctgattcaagctcttgctcgccgccctgtaggccccccgaagatccgaatatcaggtgttgatgactcctattcggcctatgccaggagaggagggcttgatattgttgggaaaaggttatccgcacttgcacagtcatgtcatgtaccctttgagttcaatgctgtaagagtacctgctactgaggtgcaacttgaagaccttgaacttctcccttatgaagctgtggcagtgaacttcgccataagtctgcaccatgtgccagatgaaagtgtgaacagtcacaatcatcgtgaccaattgttgagattggcaaagcgattatctcctaaagtggtgactctggttgagcaggaatttaacaccaacaatgcgccattcttgcagcgctttgatgagacaatgaagtactacttggctgtttttgaatcgattgatactgttcttccaagggagcacaaagagaggattaatgtggagcagcattgtttggctcgcgaagttgtcaacttaatagcatgtgaaggagaagaaagagttgaacgtcacgagcttctgaataagtggagaatgcgtttcacaaaggctggatttacaccttatccattgagctccgttattaattcttcaatcaaggatcttctgcagagctaccatggacactacactctagaagagagagatggtgcactatttcttggttggatgaatcaagttcttattgcatcttgtgcttggagatgaaaatcctataacagttcattttttgttactccaggcttctagttaggttatgtatcatccttaacttcttcatacaatttctcctcacttcatagtcaaattactgttttgtaagagagcttccttaatcattatgtcagcaatgcaagtaatatcaagaaaaactatatatcctgaaattttctgaggtgtattttagaacatgtaatgcttaccaaaggtcagagtgatgccaatctataactgcaaagcatgtaagatgaaatctatagcaaaacaatgagtatgaaacttctatttcttagctcttaaaacaaaaaagttccgttttataagcttaattggatttctcctaaactgggttgggtcagagtcttcatattcaccagtaccactgcagcactagcaattatcctacaaaccctctcactgttccttatattgtttactcttctggtaactttatacacgaatctccatgctacttgaatttaattgaatatgggtatattctaatttg

SEQ ID NO: 28925 - DNA, 1887 bp, Glycine max
  unsure (1)..(1887): unsure at all n locations
  Clone ID: TF_GmC509_2
gtaagctncgaattcggctcgagcaaccatgtcctccacacaaacaacaaccctaacaccttcacctacgaacccacctcggtcctcgacctatgccggagcccaagccccgaaaagaagctcactgttcccaagccagaaccacaacacaacaaccagctagacctggatgatcatgttttgcctaattctgattggtgggagtccatcatgaaggacttaaccctacccgaagactctcccactccccttttgaaaaccaatccatcatgcatccctgatttcccaccttcttctcaagacccatcctttgatcaccccactcctgacttcacctctctctccgaaatctacaaccaaaacatccccttcaattacccctccaacactttagaaccttcctttcatgaccttaaccatagcctccacccccacaacaacaactgggacttcatcgaagagtttatccgcgccgccgattgctacgacagcagccacttccagctggctcaagccatacttgagcggctcaacaaccggcttcttcgctcgcccatgggtaagccgctccaccgagccgcgtttcacttcaaagacgcccttcagtccattctatccggttcgaaccggaacggaaacggttcgaacctcctttcctccatggcggagattgttcagacaattaaaacgtacaaggccttttcgggaatttcacccatcccaatgttctccatcttcaccaccaatcaagccctacttgaaaccctaaatggatcttcatttgtccacgttatcgatttcgagattgggcttggaattcaatacgcttctcttatgaaagagattgctgagaaggccggtcccggaaccgcgccgctccttcgcatcaccgccgtcgtgccggaggagtacgccgtcgagagccgcctggtccgccagaatctcaaccagttcgcgcaggatctagggatcagcgcgcaggtggacttcgtgccgcttcggacctttgagacggtgtcgttcaaggccgtgaggttcatcgacggcgagaagatcgccgtgttgttgtcgccaacgattttcagccgcctcggaggcaacggaggcagtgtcggcgcgttcctcgccgacgtgaggaggatggctccaggagtggtggtgttcgtggacggtgaggggtggacggaggcggcggcggcggcttcgttccggcgtggcgtggtgagcagtctggagttttattccatgatgctggagtcgctggacgcgtcagtggcttctgggggaggcggcgagtgggtgagtaggatcgagatgctgctgctgcggccgaagatcttcgccgcggtggaaggcgcacggcggaggactccgccgtggagggaggcgttttacggcgccggaatgaggccggtgcagttgagccagttcgcggattatcaggcagagtgtttgcttgccaaggtgcaaatcagaggcttccacgtggacaaacgacatgctgagctggtgctctgctggcacgaacgagccatggtttccacgtcagcatggcggtgttagcatattatatagaagagaagacaagagaagtgatgtattaatctaatgacaccttaaacctgcttatgtgaactttattatcaagttcacttttgacaaagaatgtagtttaactttaatttagttttttttttaattattatggaaaattacaaaaagaaaaaaactggaaagtacataaaaacttgtattttttccagacttttttgttttatgtaatgtagataaattgtgggggtgtctgtatttaatttgtttgagaagagttaccatgtaatgctggatatatacatctggcttttcaatcaaagtatttgggaaaaa

SEQ ID NO: 28926 - DNA, 626 bp, Glycine max
  Clone ID: TF_GmC164_4
gcggtgaagtccgccgttgaagaggttctgggatggatccggattctgaaccctaaaatcgtgacggttgtggaacaagaagccaaccacaacggggaagggtttttggagcggttcacggaggctttgcattactattccagcgttttcgactcgctcgacgcgtgtccggtcgaaccggacaaggctgctttggcggagatgtatctgcagagggagatatgcaacgtggtgtgctgcgagggaccggcgcggctggagcgccacgagccgctcgctaagtggagggatcggctggggaaagccggcttcagagccttgcatttgggtttcaacgcctacaagcaagccagcatgttgctcactctcttctcagctgagggtttctgcgtccaagagaatcaaggctctttgactctgggttggcatagccgccccctaattgcagcttcggcttggcaagccgcgcctctgggagacgacgaaacgctgcgttttgagcattgaggaaaagaacagaacagaacagatcacttgtttttgtttattctagtaactagtagcagtagtagtagtacacgggaagagtggtgaataataataatgtggtcatttttgcgtaaaaa

SEQ ID NO: 28927 - DNA, 1048 bp, Glycine max
  Clone ID: TF_GmC1717_1
gtccagtgggcctccctcattcaggctctcgcctccaacaaaacgggcccaccgggcccacaccttcgtataaccgcattgtcccgcaccggctccggacgccgctccatcgccaccgtccaagaaaccgggcgccgcttagccgccttcgccgcctcccttggccaaccgttctccttccaccattgcaggttggagcccgacgaaacgtttaaaccttcgtcgcttaagctggttcgcggagaggctttggtttttaactgtatgctaaacttaccgcaccttagttaccgcgcgcccgaatcggttgcgtcgtttttgagcggagccaaagcgttgaagccgaggctggtgactttagtggaggaggaagtggcctccattgttggagggttcgtggcgcggtttatggattcgctgcatcactattcagcggtgtttgactcgctggaggctgggtttccgatgcagggccgggccagggcacttgtggagcgggttttcttgggcccgaggatagtgggctcgctggcccggatgggggaagaggaggaaagagggtcgtggggggagtggttgggtgcggcggggttcaggggagttccgatgagcttcgcgaatcattgccaagcgaagctgttaattggtcttttcaacgacgggtatagggtggaggagttggggagtaataagttggtcttggattggaaatctaggcgcttgctctctgcctcgctttggacttcttcctcccactcagattaattttcctttttaatttctttgactccataaatggaaacaaaatcagaaactgtatcttttacacttttagttgtacttcccatttatagtagttttagttttaggatctttgctaacacgacagtgacctacctagcagtcctagaaaaattccaacacttctcctaacatgttttctttctcacagatctttttctctctgatgaaatcttgatgaacttcattatatttacgataaattagtgaatgtttagaaattcagtacaaaatgatttctatcaaa

SEQ ID NO: 28928 - DNA, 184 bp, Glycine max
  Clone ID: TF_4282525
agttgtgacgttcgccaatttcacttgtaaccaaacactgcttgaagctgtggaagggttagatcgcattgacataatatattctgttattgggcttggtggacagcggtcttctttcatgcaagagttagctctcaagaatggcagtgcacctgaactcaagatcactggatttgtgttaccc

SEQ ID NO: 28929 - DNA, 879 bp, Glycine max
  Clone ID: TF_GmC82216_1
gaaactgataacgaccgttgagcaggatctaagccacgcagggagcttcctggcgcggttcgtggaggccttgcattattacagcgcgttgttcgacgcgctaggggatggtttgggtgcggacagcctggagaggcacacggtggagcagcatctgttgggctgcgagatcaggaacatcgtggccgtgggcgggcccaagaggaccggcgaggttaagttggagaggtggggggatgagtcgaaacgggccgggtttgggcccgtttcgctcaggggcaacccggctgcacaagcgagcttgttgctgggaatgttcccttggagagggtatacactggtcgaagagaatggttccctcaagcttggttggaaggatttgtctctgttgatcgcctccgcttggcaaccgtcagatttgatgattacttatcctgattgaaacttttatgaatcattgcaactatcaactatgcttttggaatttatttaaaaataattgtttaattgattcagactcaaattgttagggttttctcccattagatgggagaggttatgcaatatggtatgagatgatgggggttgtgtatagtaataaattaataataccgataatgatgtggttgtggataccaaacaccagtcctcataggttcaataaataatgatagtagtagtagaattaagaagggaatgacgttagatccacgtccactggttccactacgctacacacaaagcccaagaatatttctacttctacttctactagtcaatttcctcatcgccttcttgtggagagagtgagagttcaccttacaattttcttggtggactcaactttttttttatgtcttcccatgtttaatgaattgt

SEQ ID NO: 28930 - DNA, 229 bp, Glycine max
  Clone ID: TF_5760190
tgggggtgatccaattcacatgctacgtgcttacatgttggagggtttaatagcaaggttggagtcttcaggtagcataatctacaatgccttgaaatgtgaacaaccaacacgcactgatctcatgacttacatgcacattctgtaccagatttgcccatattggaagtctgcttacacatctgctaatgctgtcattgcagaagcagtgctaaatgattctagaatt

SEQ ID NO: 28931 - DNA, 2143 bp, Glycine max
  Clone ID: TF_GmC4051_1
gcacgcccccagggggccttccggcctctgcgacgtcttctcctccgccctccatgggggcccctggttggggtcctcctggttcgcaggcctcagctcttcctgggccgaaccctctctcggcttctgcctttcccccgttggcttttgccttcgtcacagggcccccggctgggtgttcggcaccttctccctcagcctccggcgaaacgcctgaattgtggcccaaattatcaggttccaaagacaccctttttggactctggtcaagagctgttacttcggaggcagcaacagcagctccaactgcttcctcaccatctgctgcagaggccatccatgttggctgcaccaaagcagaaaatggtgaactccggcagcgaagacttggcgacccatcagcttcaacaggctataactgaacagcttttcaaagctgcagagctgatcgatgccggtaatctggaactcgcgcatgggatattggcgcggctcaatcaccaactttctcccattgggaagccttttcagagggctgctttttatttcaaagaggccttgcaattacttctccatccaaatgccaacaacagttctttcaccttctcacccactggccttttgctcaagattggtgcttacaagtcattctcagaaatctcaccagttctgcagttcgccaatttcacttgtaaccaagcactgcttgaagctgtggaagggtttgatcgcattcacataatagattttgatattgggcttggtggacagtggtcttctttcatgcaagagttagcactcaggaatggcagtgcacctgaactcaagatcactgcatttgtgtcaccctcccaccatgatgaaattgagctcagtttctctcaggagagtttgaagcaatatgctggggagttacacatgtcctttgagcttgagattctgagccttgaatctttaaattctgcttcctggccccagccacttcgtgactgtgaagctgtagtggttaacatgcctattggctctttctcaaattacccatcatatctacctttggtccttcgctttgtgaagcagctcatgccaaaaattgtggttacattggatagaagttgtgatcgaactgatgcaccatttcctcagcatctgatttttgcacttcagtcttattcagggctgcttgagtcacttgatgcggttaatgttcacccagatgtccttcagatgattgagaagtattatcttcagccatcaatggagaagcttgtcttgggtcgacatggtttgcaggaaagagcacttccttggaaaaaccttctcttgtcatctgggttttcaccattgacctttagtaactttacagaatcccaggcagagtgtttggtgcagaggactcctagtaaggggttccatgttgagaagaggcagtcttcccttgttctttgctggcaaaggaaggatctcatctcagtttcaacttggagatgctaagcagagccattttgcacctttgaactaccaatttaattttaaattctaaagtgctacataacttacagcttctattgatctttcttgcttgaatttgccttgtctatggttctatgctaattgtctgtttttaggatttattattttcagttaaggaagggaagtgaacatattaattagcaactgaatgacgatttatgagcgtgatatgcagtgtattattataaataggggcattctatatatgcattttgtcctgttttaattgcctaaatttatgggcttttcttgtatgttttacaagaaagtaacactaattaccctgtaaagttgaggctttgtttgatgtctttgatcctgataagtagtctctctctagcacatgtgctctatgaaaactattcatgtagttgttgaaggtaacactttaacagttccccatactattcagtgtggaatggaatgggaattattcagttagtttggtagtttgcagaaattgcattacatatacactttatctgcacacttttcacctagagatatggagccaggttttttaggaatatttattgtggttgctcaatgctgatcagcacttgctgccttgtatgatattttaagcagaaaggaggaaataagtaatctgcac

SEQ ID NO: 28932 - DNA, 572 bp, Glycine max
  unsure (1)..(572): unsure at all n locations
  Clone ID: TF_9564347
aattcggcaccagacgttatttgtctgatgatagaaagggaattagctgccaaagtttttcccttagggatgcttttttgaatctaatcaaaggccttaaccccaggattgtgctcttggttgatgaggattgtgatcttagtgcttcaagtctcacatcaagaataaccacatgtttcaaccatctatggataccctttgatgcattggagacttttttgccaaaagatagttgtcagaggtcagagtttgaatccgacataggccagaagattgagaacatcataggctacgaagggcaccaaagaattgagaggttggaatctggggtgcaaatgtcccaaagaatgaaaaatgtgggctacctcagtgttcctttttgtgatgaaactgttagggaagtaaaaggtttgctagatgagcatgctagtgggtgggggatgaaaagagaagaaggtntgttagttctcacgtggaaaggaaacagctgtgtgtttgcgacagcttgngtcccctgtgaaatattgagggatcatcatatcggtatggatgcaagcctgtcttaaacacac

SEQ ID NO: 28933 - DNA, 2174 bp, Glycine max
  unsure (1)..(2174): unsure at all n locations
  Clone ID: TF_GmC214_1
cgtggcgtacggctgagaggcgaggggagggggatgcagtagaatagtaatagtggtaacaaaaggcaacagagaacagaagagaaaggaaaagagagggtttggtgagttacccaagagaaaggatgaagagagagcgccagcagcttggttccaacgcaggaacctcaagctgcggttattcaagcggaaaatcgaatctttgggaggaagaaggaggcatggacgagcttcttgcagtggtgggttacaaggtgaggtcatcggacatggcggaagtggcgcagaagctggagcgtcttgaggaagccatgggaaatgtccaagatgacctcacggacctttcaaacgacgccgttcattacaacccttccgacatctccaactggctccaaaccatgctttccaattttgaccctctcccctccgaggagcccgagaaggactccgcctcgtcggactacgatctcaaggctattccggggaaagcaatctatggagctggtagtgacgcgctaccaaaccctaagcgcgtgagagccgacgagtcaaggcgcgcggtggtggtcgttgactcgcaggagaacgggatccgcctcgtgcacagcctcatggcgtgcgcggaggccgtggagaacaacaacctcgccgtggcggaggcgctggtgaagcagatcggcttcctcgctgtgtcacaggtcggagcgaggtaacaaaaggcaacctacttcgccgaagcgctcgcgaggcgaatctacagagtcttccctcagcagcactccctctcggattctctacagattcacttctacgaaacttgtccttaccttaagttcgcgcacttcaccgcaaaccaggcgattctcgaagcgtttcaagggaaaaatcgcgttcacgtgattgatttcggaatcaaccaggggatgcagtggccggcactgatgcaagcccttgcgcttcgcaacgacggccctccggttttccggctaaccggaatcggaccgccggcggcggacaactccgaccacctccaggaggtagggtggaagctcgcgcagctggcggagaggatccacgtgcagttcgagtaccgcggcttcgtcgcaaacagcctcgccgatctcgacgcctccatgctggatctccgagaagacgagtccgtggcggtgaactccgtcttcgagtttcacaagctcctcgcccgccccggcgcggtggagaaagtcctctccgtcgttcggcagattcggcctgagatcctcaccgtcgtcgagcaagaagcgaaccacaacggactgagttttgtcgaccggttcaccgagtcactgcactattattcaactctattcgactcgctggagggttcgcctgtgaacccgaacgacaaggccatgtcggaggtttacttagggaagcaaatctgcaacgtggtggcgtgcgagggaatggaccgcgtggaaaggcacgagacgctgaaccagtggcggaaccggttcggttcgaccgggttttctccggttcacttgggttcgaacgcgtacaagcaggccagcatgttgctatcgcttttcgggggtggggatgggtatagagtggaagagaacaatgggtgtctcatgttgggatggcacactaggcccttgattgccacctccgtgtggcaactcgctacaaaatcggtggttgctgctcactgagtcgactcgccgattcctcagccagctttttctttttattttttgttttaaattaatttctaatcatgcccaccgaaaaaaaggaaaaaaaaaaaaaagaaggggaacttgaggggggattgagaggtcagtgtgtaattgtgctatgctgagctgtgagcactgattgcatgagcctgagacccaccattgtctattttcctgccccaacttatgtctctctccaacccttaatttacttattttgcatttgccgcatttgtaaaccttgattttattttacttggctttctttggggatgggttgggtggaaatctcttgtaatttttcagggttgggaaatcaaaaagcttaatgtgtatttatttattatggtttaattaatatattagttgtattatgtagcttgctggtgatataataaattagaatatatttttagtgtaaaaaaaaaaaaaaaaaaaannaaacaaaaa

SEQ ID NO: 28934 - DNA, 3106 bp, Glycine max
  Clone ID: TF_GmC3121_1
tttttgtttttttttttaaccaacaaaaattgttgtatgcctatattttattacaaaatgacaatcagtccaacactccagtctccagtcacacgcacataatgcatgtttactcccttcttttattttgaaaaatgtaaattatattaaatcaaaaatgatacaacaataaacaggacatacccgcagctagaaaaaaataaaagtctccctaatacaaaaaagggctagatcaagatacttaaacaaattccacaagttcgtttgtttttatatccgaaccatgacccagtggcggagaaattcatagtctaagaacataaaaaacagacaacaaacatcttaagttaaaatgattccgtgtcacgtttagcagccatcaaaccaccaaagcaaattacaatgtccagtgtgtgatctcttctcttcagccaaaggaagaaaacggttttgtgacatctacctcacaacaaaaaaaagcgtaggctcctctcttaaatcttcaaaccccttaccgcaccatccgctgccgccagctctcaacacgcttctatcggaaacggcccactcctgatgttgcacaggtttccgtttctctctttagattctccaatcactgataagtaaatgggtgcggttggttcctcaccgggtgtggatcacatgaactgccagaaggagctagaaaggtcccggtacagtcttgaatgggtgtccctcaaagcaagcatgaataacttcctcaacacgattcagtgcaaaggatgagctttggggtcaggatgattctctacggtaaacttctcgttggactctctctgctggggaacgggacttgatgcactactcttgtttcctctttgctcgtttttctctagctctctctcatttttctctttctcgtcttagtttaaacttcacaatccaattttcttttcctatgtacccaattccaaaatccaaatctagctaattctaattccattcttcaggagttgaattgaattcgtgatgaagagggaccacaaagatagctgcggcggcggcggcgccgccggagggactgtgaagggtgagtgttcctcaatgcagtcaaacgggaaggcgaagatgtgggaggaagagcaacagcagcagcagcagcaacaacagcaacaacaacaacaggggatggacgagttgctggcggcgttggggtacaaggttcgtgcttccgacatggctgacgtggcacagaagctggagcagttggagatggtcatgggttgtgcccaggaagacggaatttcccacctggcctccgacaccgttcattacgaccctacagatctctattcctgggtccaaagcatgttaaccgaactcaaccccgaacccaacaacaacctcgatccatcttctttcttgatcgacaacaacaacaacatcatcaacagcacagcccctgttttcaacgacgattccgaatatgacctcagagccattcctggcatagcagcctacccttcttctcttcctcaagacaaccacctcgacgaaatcgaaacggctaacaacatcaacaagcgcctcaagccatctccagcggaatcagcagactccgccgcgtctgagcccacgcgccatgtcgtcctcgttgaccatcaggaagccggcgtgcgtctcgtccacactctcctggcgtgcgcggaggccgttcagcaggagaatctcaagctcgcggacgcgctcgtcaagcacgtgggcatactcgcggcttcccaagccggcgccatgaggaaggttgcttcctacttcgcccaagccctggcgcgtagaatctacggaatcttccccgaagaaaccctcgattcctccttctccgacgttctccacatgcacttttacgagtcctgcccttatctcaaattcgcgcacttcaccgcgaatcaggctatcctcgaagcatttgccactgctgggagagtccacgtcatcgatttcggcctcaaacaagggatgcagtggcctgcactcatgcaagcccttgcattacggcccggcgggcccccgactttccgtttaaccggaatcgggcccccacagcccgacaacaccgacgcgctgcagcaggtgggctggaaattagcccaattggcccaaatcatcggcgtccagttcgaattccgcggcttcgtttgcaacagcctcgcggatctcgacccgaatatgctcgagatccgacccggggaagccgtggcggtgaattccgtcttcgaactccaccgcatgctcgcccggtccggatccgtcgacaaggtcttggacactgtcaagaaaattaatccccagatcgttaccatcgtggaacaagaagcgaaccacaacggaccgggttttctagaccggttcactgaagccttgcattactattccagtcttttcgactcgcttgagggttcgtcttcttcttcgaccgggttgggctcgccgagtcaggatctgttgatgtccgagttgtaccttgggagacagatttgcaacgtggtggcttacgagggcccggaccgggtcgagcggcacgagactttgactcagtggagggggagattggactcggccgggttcgacccggttcatctcgggtccaacgcattcaagcaagcgagtatgctacttgctctattcgcaggcggtgatgggtatagggttgaggagaataacggctgcctcatgcttggctggcacactaggccactcatcgctacctccgcttggaagcttccctcctccagcgagtctagtggcttgactcagtgaatgtaaaactatagattaattggacttgttccagtgaactgagtcagtgaccgagtcagtgagccttccaggcagcaagaggataaataaatgagagggtgaacaaaaaaaaaaaaaaaaagtaaaaagaaaacccaaagaaagactgtaatttgtaattgtgctctcataattaccgtttctcctctttagtgttttgttttcctttctctaaattattattattatataatttgtttaattcttcagtattatgatgtccttttcgttttaatctttatcttttatttccattttattttttatc

SEQ ID NO: 28935 - DNA, 430 bp, Glycine max
  unsure (1)..(430): unsure at all n locations
  Clone ID: TF_4292932
accaggtgaccgagcttgccgggtatgtggatctaattccttggcataggtttgggtattgtgcgtccaacaatgaaatttacaaagcaataacggggttccaaagggtacatattgtagattttagcataactcattgcatgcaatggcctacttttatagatgggttagcaaaaaggccagaaggacccccttcacttagaatcacggttccatcttgtagaccacatgtaccccccttggtcaatatttcaatacacgaagttggattgcgtttagggaattttgctaagttcagagatgtcccttttgaattcaatgttataggaaacacagaaggaccattaacacctgcggaattgagcgatgaatcgactagctntcactttgaagcaatgttaagtctcttaaatcctaccatgctaaacct

SEQ ID NO: 28936 - DNA, 929 bp, Glycine max
  Clone ID: TF_GmC104019_1
tttttttgggaccagaaaagattaatattgctgataaagaaaaatgctgcctacaattcgtaagcaaagatcctctagagcggccgcttttttttttttttttttttttttttttttctgacaattagattggatttaatgttgagacctttgtcattaacttgtacatagtaatggaacagaaaaagaagagggatgttatgccttattgcagaactttcatttccaagcgcaagaagcaaccaaatctctattcatccaacccagataaagagctccatctctctcttgaagtctatatctatcactgtagttctcgagcaacttcttgatggtaccattcaccaatgaacttaaagggtaaggagtgaaaccggccattgcaaatcttgacctccacttgccgagcacctcatgtcgttccaccctctcgaccccttcacaagctatgatgttaaccaagtctcttgccaaacaatgttgctcaacattgattctctctttatgctctctggaaagagtcacatctattgactcaaacattgctgtgtaatagtccagagtttcaaggaaacgtggaaagaatgcagcagtgttggtgttagattcttgctcaacaagtgtcaccacctttggtgataggctcctaaccaacctcaacagcctatccctgtgattctgagtactcacactttcatccggcatgtgatgtagcatgaacgcaaagtttacagccagagcttcccctggtcgtactccaaggttatgtagttgaacatcaaaacctgagatagctgcagcatgaaattcaaatggcaccttaaaatgctcagcaagctttgataacctccttcccactatgtgtagtccaccaccgcgagcataagccgatgttgaatcatcaatacctgtaatccggatgtggggtg

SEQ ID NO: 28937 - DNA, 1025 bp, Glycine max
  Clone ID: TF_GmC7815_16
cttgtggagttccatttgaattccgcagtgctgcaatatctggctgtgaggttgtacgaggaaatattgaagttctacccggagaagctctggctgtaagttttccctatgttttgcaccacatgcctgatgagagtgtgagcactgagaatcacagagatagattgctgaggttggttaagaggttgtctcccaaggttgttaccattgttgagcaagaatccaacaccaacacgtccccattctttcacaggtttgttgagaccctggattattatactgcaatgtttgaatctatagatgtggcttgccccagagatgacaagaagcggattagcgcagagcagcattgcgtggcacgagacatcgtcaacatgatagcttgtgagggggttgagagggtggagaggcatgaacttttgggaaagtggaggtcaagactttccatggctggatttaaacagtgtcaattgagttcttcagtgatggttgctatacaaaatctcctaaaggagttcagtcaaaattataggcttgaacatagagatggtgctctttatcttggttggatgaacagacatatggccacctcttctgcttggaggtgaaactcactgattcgagagtttgcctcctttttgacctttaattgagcataattcaccatatatccgtagtagtctctccataggacttgagatttacctctgttctaaaatgctttctgtagaatctcaaagctcgttgtaaatgctaatactgaaacgaaagaaaagaaacgtctgttatgactctagcattattttcctgccctcttccgctggctgtagtgttattttaactaatgtgatatgagttggatactcgtttagttccttgtactgactcaaatgagaaaccttacactacagatttacattaagctcaaggttttgttggtctactactctactatatatcaccctgtagtcataatagatacataattctacgcatgcataatgaatttacttcttcttgagttt

SEQ ID NO: 28938 - DNA, 665 bp, Glycine max
  Clone ID: TF_GmC191976_1
ttttagtcaacaacgttaacatttattagccaaaactctagaaaattataagttaaaatttatcatcattttgtgtgcagatttttaccaaaacgatgaaagttaggacctaggaatgaaggagtatcttattctttcaaactggttgccatgctgagacagtgagaagaaacctattttgccaccccaaagagataactctcccttcatccctttcagaaactctgaatcccccaccaccctcttcctcaaactgtagtggataataatgggtcctcatcttcagaagcagctttgcttggatcacacactttgagcttatttttctcccaacaaacccatgattctccattctccctttccatgtttccatcctgtcatatttggggcaataatattccacaccatcatccatgtcatagttaagcatgctcttgatctctttccccaaaagctgcttctcaatcctcaacctgtgagtgctctcaaggggcaagcaatcatccagtgaatcaaacatggctgcaaaatagtgcaaagactcatggaaccttgacaagaaggtcttgagactcctgcagctaccttcttgtttcaccaacaccacaatggaggggctaagataatgaacaaatccaatgtgtgagacaccttcatgaaactac

SEQ ID NO: 28939 - DNA, 322 bp, Glycine max
  Clone ID: TF_15001148
gccgtggcaagctttgaccaacggaatgcaaatgacttactcagccagattaggcaacactcttcagcttttggggatggactccagcgtttggctcattactttgccaatggccttgagacaaggttggctgctgggaccccatcatacatgcccctagaaggaacaacttccgctgatatgttgaaagcttacaaactatatgttacatcctctcctttgcagaggttgacaaattatttggcaacccagacattgttagtcttgtggaaaatgagggcagtgttcatattattgattttggcatttgctatggttttca

SEQ ID NO: 28940 - DNA, 2658 bp, Glycine max
  unsure (1)..(2658): unsure at all n locations
  Clone ID: TF_GmC170_3
ctcactgattaccattattttcttttatggactcctcattcacacaaggcttaactaaactaaacacctgtgtctgcaaaacaaaacaaaccaaatatactctcttccttcccacgaagnnnngtcacctatcgcatatcactgatcatatcctcctactacctagcctttgattnnnnnaacaaaaggctttggctcttttaacacattggtgaacctttgtgcacaacacttatcacagaaacaacaacgctcactgattaccaatccatcgtttttgaactccacataaggctaaactaaacacctctctctgcaaaacaaaaccactctcttccttccaacgaatctctgccacacaacaaataactctgaacatataatcaacctaagacccgcctctgattctgaacaacaaaaggctaatttggctcttttgacgacaatttttgctgacacctaaagcatctagcagcttatcaaaatggagactaaccatacagcaaaacggtgttgtaggactttagtatgcatttgatcaggagcagctaggaagcatttttacaattacaaagtttgaccactcattgttctgatcactgagtaaataatttctttttagatgcaaacttctaagaagcacccaacttcagctggtatccatttatacctgcagcctgcacaagatattgatccttacactcattaccaaatattgcaaagcaattcatgccatgataatagcagcagccagggaaccactatttcttttgaaaccagcaaggagcaatactttacccttgaatcatccccagcaatcaatgatctcataggttgtgattctccttcctatgctagtgtatcatccaataggagtcctttttctccacaagcttctcattcagaccagcatcagtcatcagacaacacctatggatcaccaacaagtgcacactctagatatgatgatgacggctacgaattgaagaacaagcttagagaactcgagatttcgttgttggggcctgattcagacattgttgatagttggcactgctcctacaagggtggccgccacagagcatcatctccaacggctaaacacaattgggatcagattgtggaaatgattccaaaattagacttgaaagaagtcctcattcggtgtgcacaagccgtggcagatgatgatattgaaacagcagtgggatttatgaacaatgtattggcaaagatggtatcagttgggggtgatccgatccagaggttaggtgcctacatgttggagggtctaagagcaaggttggagtcctcagggagcataatctacaaggccttgaaatgtgaacaaccaacaagcaatgatctcatgacttacatgcacatcctgtaccagatttgcccatattggaagtttgcttacacatctgcaaatgctgtcattggagaagcaatgctgaatgaatcaagaattcacataattgacttccaagttgcacagggcactcagtggctgttgcttattcaggctcttgcatctcgtccaggtggagcacctttcattcgtgtaaccggagttgatgattcacaatcatttcatgcaaggggtggaggacttcacattgtaggaaaacgcctctcagattatgccaaatcttgtggagttccatttgagttccacagtgctgctatgtgtggaagtgagcttgaactagaaaaccttgtaattcaacccggggaagctctagttgtgaacttcccttttgttttgcaccacatgccagatgagagtgtgagcacagagaaccatagggacaggctattgagactggtcaaaagcttgtcacccaaggttgtgacccttgttgagcaagaatccaacaccaacacttctccctttttccaaaggtttgttgagaccttgagttactacactgctatgtttgagtccatagatgtggccctccccagagatgataagcaaaggatcaatgcagaacaacactgcgtggctcgcgacatcgtcaacatggtagcttgtgagggggatgagaggctggaaaggcatgaactcttagggaagtggaggtcaagattttcaatggctggttttgcaccatgccctttgagttcctcagtcacagctgcagttaggaatatgttgaatgaattcaatgaaaattataggcttcaacatagagatggcgctctttatctaggatggaagagtagagctatgtgtacctcttctgcttggagatgttactgactcattgtcattgtcattggtatatgtatttttttttatccacaaatattatttgttagtaatatattagcttttattagcggggaatttgaacccatcacctctccccattcccatcattggtatatgcatattttcctccttgttaatttctttcctttttatgacattaagtcattatttagtggtatccgctgtttctcaataggattaattagagacttagctttcttccaacgtgtatcctttaccttttgtgggttcagcttagtctttaaactttcttgtacatgtcaatactagaaagaacgaaagagaaacctagctcatatttattgacaaaccctgttttgcagtttttagagtatagtggttactcattttaaaaa

SEQ ID NO: 28941 - DNA, 234 bp, Glycine max
  Clone ID: TF_700837816H1
gggaaatgcttgatatcaggccaggcgaggccttggctgtgatcttccccttgcaactctatcacacagctgatgtgagtgttcatgttagcaacccaagggttggacttttgagcttggtaaggttactttctcccaaggtgaccacatttgtggagcaggaatcaaacacaaacacaaccccttttttcaacaggttcattgaaaccttggattactacttggcaatctttg

SEQ ID NO: 28942 - DNA, 765 bp, Glycine max
  Clone ID: TF_GmC96540_1
gcggttatatcttcgttgaggaggttgaaaccgaggatcgtgacggtggtggaggaggaggctgatttggacattggattggaagggtttgagttcgtgaaagggtttgaagagtgtttgaggtggtttagggtttactttgaggccttggacgagagttttccgcggacgagcaacgagcgtttgatgcttgagagggcggcggggagggcggtggtggacctggtggcgtgttctccggcggattccgtagagaggcgggagaaggcggcgcggtgggcgaggaggatgcatggaggtggggggttcaatacggtggcgtttagcgaagaggtatgcgatgatgtgagggcgttgttgaggaggtatagggaagggtgggcaatgacacagtgctccgacgccggaatattcctgacgtggaaggagcagccggtggtgtgggccagtgcatggagggccttgacgtagagtagaggagaatgacttgacgtgagtaaggtgttgagggacggattcccacgtgctctctgttccggaaacacgtgcccaacgctgagggttctttttttcttttttcttttaaggtaattaattaatggctttttttacttcctgttttgagtttgctacgtaaggcagtgggattaattggaaggtatgagggtgataggaggaaggggattttcctgtattattcaaaaaaggaatcatcatcaagtaaattaattttcattattaactttttttcacatttcgtttttt

SEQ ID NO: 28943 - DNA, 881 bp, Glycine max
  Clone ID: TF_GmC164_3
ccacgcgtccgaaaggggcagaaatgatattagcaccagtatctatcaatttgatgcattagtactcaacacatcatggtcataacattatacaaggcagtttctccgtcaatttcctcacacacctactcttaacttataataattactaactccacaattctccccatggagcgtttagagggcgtgatttcagacacaatcctctacgatccctccaacatagggttaggttccttggtggacactctcctctccgacttggaccaaaccatgtcgttaccctcacactaccatctctcatcagaccttcccgatttcgccaccaccgtggaagaacactccgggatacgactcattcacacgctgatgacgtgtgcggattccctgcaacgtggccacttctcattcgctgcctccctcatccagaacatgcaaggcttgttggcgcacgtcaacaccaactgcggcatcggaaaagtcgccgcctgcttcatcgacgccttgcgccgccgcatctccaacaagtttccagcatcatccgcttacgagaacgacgttctctaccacaactactacgaggcgtgtccttacttgaagttcgcgcacttcaccgcgaaccaggcgatcttggaggccttcaacggccacgattgcgtccacgtcatcgacttcaacctcatgcaggggctccagtggccagcgctgatacaggcgctggcgctccggcccggaggaccgccgctgctgaggctcaccggcatcgggcccccctcggcggaaaaccgcgacaacctccgcgaaatcgggctgagactcgccgagctggcgcgctccgtgaacgtgcggtttgcgttccgcggcgtggcggcgtggcggct

SEQ ID NO: 28944 - DNA, 1281 bp, Glycine max
  unsure (1)..(1281): unsure at all n locations
  Clone ID: TF_GmC161879_1
gccgtcgcttggcgctctccggcaggcagggcggtcccccgtggcttcgcatttctcgtgcccagcttccgcagccaggatttcggcctgcagaaagggttgaggagaccgggcggcgtttggcaaactactgcaagaagttcaaggtaccttttgaatacaattgtcttgcacagaaatgggaaactataaaacttgcagatctcaagatagacaggaatgaagtaactgttgttagctgcttctaccggctgaagaacttgcctgatgaaactgtggatgtgaagtctccaagagatgccgtgttgaagttgataaggaggatcaatccaaacatgttcatccatggggtggtcaatggcacttacaatgcaccctttttcctgactcggtttagggaggcactctaccacttctcatcactgtttgatatgtttgaagctaatgtgcctcgtgaagacccggaaagagtgatgcttgagaatgggttgtttggaagagatgccatcaatgttatagcgtgtgaaggggctgagagggttgagagacctgagacctataagcagtggcaggttaggaaccagagagctgggttcaagcaagtccgatttgatcctctattggtgaatgatgaaaaagaaatggtgaagaaggaatatcaaaaagattttgtggtggctgaggatggcaagtgggtttggctggggtggaaagggcgtattctgaatgccatttctgcttggactcctgcttaagcaatgtccagaaagtgtcttgtaactagtaatctactcttaggtcggttaatgaaaatgcaataaactactatttactatttttctttctccatttgtttccacatttttagatattgctgttcaattcgcttcctagctggtatggcatgacacatttccttcttttttttttcatgaagcacaaatttaccactgatggtaaggaatggcagaagcaaaaataagaaaaaagggcaccccaatggaagactagatgtagtcaatcataggagcaactcaaacagaagaccagcagctacatctgactaaaagtagctgacaatactctctcaattacggattagaattagataggggcatcttcaataatgttccacgtattgcaatgtcttctgtgagaaatcagtcattagccttgaccatctgcacaccataaacagttctattttatcagcaaataaactgcccaataaacagtaatgtctgtttcgcttatttgnngtaatcagagctnnccttgcta

SEQ ID NO: 28945 - DNA, 550 bp, Glycine max
  Clone ID: TF_LIB4200-008-Q1-N1-D10
cacaaaataatttcgcaaaactgaccatttcaaaagaagaagaaaaggaaaagaaaaaagaaatagagaggagagagagagagagagatagagagagaaaaatttacattatacatcactcttgtttactagttactactataattaaacaatttttccggttcttgaaactcattgctcggaaacgcagcgtttccctgtcctgcatcggcgcagcttgccaagccgaagccgcaatgagagggcggctatgccaccccaaagtcaagcatccttgattctcttccacggagtacccttcagcagagaaaagagtcagcaacatgctggcttgcttgtacgcgtttgaccccaaatgcagcggcttgaagccggctttctcgagccgctccctccacttagccagcggctcgtgcctctcgactcgcgccggtccctcgctgctaccacgttgcatatctccctttgcaggtacatctccgcaagtgccttgtccggttcgaccggacacgcctccagcgagtcaaaaacggtcgagtagtaatgcaac

SEQ ID NO: 28946 - DNA, 2187 bp, Glycine max
  Clone ID: TF_GmC172_1
attcatcagaatcactccaacatttcaaccgaacgttatattcatcagaatcactccaacatttcaaccgaaagaaacctctctctctctctctcccatgcgtttctcaaaaaaccaaagctattagtttagttgcttccttattttcttcgccagagatcgcaggatgtcgtcgccgaggttcccaggtggtggagcctccgatttctacggcggagcaggaggatttcccagtcagttcacggcggttcaacccaccatgaacaaccactccgccaccacaccccgccctctctaccgatcccaaccttcaattctgcttaacccctcgtcccacatcgcccaacaccaaccatcccctctcatcgggaaacgcaccctcgccgaattccaaacccacaacctcaacagccgcaacaacaacaacgataacccactcctttcaaaccatctacttcgttctgtgaagcccagaactttccagcacacagaattatccacctttccgtcacgtcgttacggcctaccccttctccaccaccttcgccctaacgctgttaacgcacaacaacaacccgttacgaattcgatcctcgccaatacaaattatttgtctccggttcacagcagactaaccgcaacccacgaaccggagaagaacctaatagccctccgtctccaggagttggaaaagcagcttctagaagacaatgaagacgacgccgtttcggtcattaccaccaccacttctgaatggtcacacacaatacaaaacctaatcactccgcagaaacccgcgtcttcgtctcccacttcctctacgacgtcgtctaacacctccgtagaatccagcagttacaaacagtccctaacggaggccgcaaccgcgatttcagaaggcaaattcgatgccgccactgagatcctaacccgattattgctgaattcagatcaacgcttcgtgaattgcatggtttctgcgctcaaatcgcggatgaatcacgttgagtgtccaccaccggtagccgaattgttcggcacagaacacgccgagtcgactcagttgctgttcgagtactcgctcttcttcaaggtcgcacgcatggtcgccaacatcgcaatactcgaatccgcattaaccgagaacgggaagctgtgcgtgctggatttcgatatcggcgacgggaaccaatacgtgagccttctccacgagctttcggcgcggcggaagggagctccatccgccgtgaagatcgtcgcggtggcggagaacggcgccgacgagaggctgaacagcgtgggattgttgctggggagacacgcggagaagctagggattggtttcgaattcaaagtgctgattcggagaatcgccgagttgactcgcgagtcgctggattgcgacgccgacgaggcgctggcggtgaactttgcgtacaagctttatagaatgcctgacgagagcgtctccacggagaacccacgcgacgagcttctgcggcgtgtgaaggcactcgcgccgcgcgtggtgacgctagtggagcaggaggcgaacgccaacacggcgccgttcgtggcgcgcgtgtcggagttgtgcgcttattacggcgcgctgtttgactcgctcgagtcgacgatggcgcgagagaactcggcgcgagttaggatcgaggagggactgagtcggaaggtggggaactcggtggcgtgcgaaggaaggaaccgcgtggaacggtgcgaggtgtttgggaagtggcgagcgcgtatgagcatggctgggttcaggttgaagccgctgagtcagcgagtcgctgagtcgatcaaagcgcgactcggtggcgctgggaaccgagtcgcggtaaaagtagagaacggtgggatttgctttggctggatgggaagaactctcaccgtcgcatctgcttggtgttaattagttaactctactttttactttttattttctatggatattgtatacacattgttattatattttaatgttacatagagattatggaaagctaaaaaaaccatagagttggaaaattgtgttaaagtataccccactcctcttccttctcccaaccaagcaatagtaaaaagtgtttggattccgagaaaatttatgtgacttgatgcagcatttatgaatataatgattcatttatgtacttttataaccaa

SEQ ID NO: 28947 - DNA, 2043 bp, Glycine max
  Clone ID: TF_GmC997_1
aaggcagaataacaatatatacaaaattctctaatccaacgaccacaaagtcttgtacgtgaacatatgtgtaattatcagtacatgtacagaagcaaagtgattaaaatactaacgaaagcgatgacaagttgtgaaaaggaccctgtatataatttcaaaatcacggttttgtgttggccatttgagcggcgaagagattggaattaacatctccccgaggactagcctccatccaccttttgagttcaaaggggtagggggtgtcaatagtcaaaggaggaggactagtccattgctgtccataatagaaattaagcatcaagatggacataagtccttacactactccaaagaagctatcaccacactccaataaccataacaacatcattgccgatgaggctgcagcgttattagatcacaacaacatgcaccgcagcaaccacagccacacttccacgagccgttcctcggactcaagtgagcctagtgaagacggtaaatgggcacccaaacttctcagagagtgtgcaaaagcaatatccgagagagactcaagcaaaacgcaccatcatctttggatgcttaacgagcttgcttcgccttatggggattgtgatcagaaactcgcctcttatttcttgcaagcgttgttctgcagagccactgagtctggtgagagatgctataaaactctttcctccgtggctgagaagaaccactcgtttgactcagcgaggaggttgatactcaagtttcaagaggtaagtccctggaccacgttcggacatgtggcctccaacggggcgcttttggaggccttggaaggcgagccaaagctccacatcatcgacctcagcagcaccctttgcacgcagtggccaacactccttgaagcgttggccacgcgaaatgatgagacgcctcatcttaaactcacagtggtggccatagctgggtcggtgatgaaagaagttggtcaacggatggagaagtttgcaagactcatgggcgtgccctttgaattcaacgtcattagtggattaagccaaatcaccaaagaaggcttgggggttcaagaagatgaggctatagctgtgaattgcgttggagcattgagaagagtccaagttgaagagagggaaaacttgattcgtgtgtttaagtctcttggtcctaaagtggtaaccgttgttgaagaagaagctgatttttgcagctcgaggggggatttttttaagtgctttgaagagtgtctcaagttctacacactttacttcgagatgttgaaggagagtttccctccaacgagtaacgagaggttgatgttggagagggagtgttcgaggagcatagttagggttttggcttgttgtggtactggtcatgagtttgaagatgatcatggagagtttgattgctgtgagaggagggagagagggattcagtggtgtgagaggctgaggaatgcgttttcgccaagtggattcagcgatgatgtggtggatgatgtgaaagcattgctcaagaggtaccaatcagggtggtcacttgtggtgactcaaggagatgaacatatctcagggatttacttgacatggaaggaggaaccagtggtttgggcatcagcatggaaaccctagaatatacttacttgaattcaatgaatgtgtgtgtattgatgatcattgtatatatatatatatatctgtgtttggtgtatggtaccattactatatatatatattggggggctaggctaaagctaaagctagctaaccttaaaaccaagggactgaagagaagtacactggaaattaaggtgctctctggggatatataccaataccaagagtattattattagatggagctagcaatggatggatggatctggatttttcttttaactttctcgtatgattcttgcacactttgtaatttttctcccgtccaagtctcctttaaagggcaagactttttgcttgggagtttgtgttgttagacttttacacctttttattatagttaagttaatat

SEQ ID NO: 28948 - DNA, 1487 bp, Glycine max
  Clone ID: TF_GmC7815_18
ctggctgtgtctgacgatgatgttccgacagcaagaggctggatagataatgtattggggaaattggtatcagtctctggtgatccaatccagaggttgggtgcttacttgttagaggggcttagagcaaggttggaatcatcagggaatctcatctacaaatcccttaagtgtgaacaaccaacaagcaaagagctaatgagttacatgcacattttgtaccagatttgcccatactggaagtttgcatacatatctgcaaatgctgtcatccaagaaacaatggcaaatgagtcaaggattcatataattgattttcaaattgcgcagggcacacagtggcatttacttatccaggctcttgcacataggccagggggacccccctcccttcgtgtgaccggtgttgatgactcacagtcgactcatgcacgaggtggaggactttggattgttggagaaaggctttcagattttgccaggtcttgtggagttccatttgaattccacagtgctgcaatatctggctgtgaggttgtacgaggaaatattgaaatccgagcaggggaagctctggctgtaaactttccttatgttttgcaccacatgccagatgagagtgtgagcaccgaaaatcacagggatagattgttgaggttggttaagagcttgtctcccaaggttgttacctttgttgagcaagaatccaacaccaacacttctcctttctttcagaggtttgttgagaccttggattattatactgcaatgtttgaatctatagatgtggcttgccccagagatgataagaagaggattagcgcagagcagcactgcgtggcacgagacatggtcaacatgatagcttgtgagggggttgagagggtggagaggcatgaactttttggaaagtggaggtcaagactttccatggctggatttaaacagtgtcaattgagttcttcagtgatggttgctacccaaaatctcctaaaggagttcagtcaaaattataggcttgaacatagagatggtgctctttatcttggctggatgaacagacatatggccacctcttctgcttggagatgaaactgactggttcgagcgtttgcctcctttttgacttttaattgagcaagtagtctctccataggacttgagatttacctctgttctataatgcattttgtagaatctcaaagctcgttgtaaatgctaatacataaatgaaagaaaaagaaacgtctggtatgacttcagcgttattttcctgccctcttccacgggctttagttttatttaactcgtgatatgagtaggatactcagcttgtttcctcgtttagttccttgtagtgactgaaatgagaaaccttacaccacactacagatgtacattaagctcaaggttttggtctactactctactatatattaccctgtagttgtttcctgagtcataatagatacataattctacgcaaa

SEQ ID NO: 28949 - DNA, 622 bp, Glycine max
  Clone ID: TF_GmC3121_15
aaatcaggatctgttaatgtccaagttgtacctggggagacaaatatgcaacgtggtggctaacgagggcacggaccgggtagagcgtcacgagactttgagtcagtggagggggagattggactcggccgggttcgacccggttcatctcgggtccaacgcgttcaagcaagcgagtatgctacttgctctattcgcaggcggtgacggctatagggttgaggagaataacggctgcctcatgcttggctggcacactcggccactcatcgctacctccgcctggaagcttccctccccgaacgacttgcactgtaaactgtagattaattggctcctggatgggtggtaaataataaaaaatggtttggttgaacttgttcgagtggagtgaatcaatgacccagtgagtcagtgagtcagtgagcgagccagcgaggcagcaagaggataaataaatgagagggtaaaaaaacaaaaaagtaaaaaagaaaaacaaaagactgtaatttgtaattgtgctctcgtaattaccgtttctcctctttagtgtttttttttcctttctctaaattattatataatttgtttaattcttaccccctgatgtccccctcttttt

SEQ ID NO: 28950 - DNA, 746 bp, Glycine max
  Clone ID: TF_GmC979_1
ggaattcggcaccagtaaaaaatgggaaatatacatacccaattttattggatgcagattggggttcaggaattgtgaaggatagagaagctctttgcttatatgcggcatcgtatggaaatgctgctagaggaactgtgaaggatagagaagctctttgcttatatgctgcatcatatggaaatgctgctagatttattaatcacagatgtttggatgcaaacttggttgagatcccagttgaagttgagggcccaactcatcactactatcattttgccttcttcacatccagaaaagtagcagcacaggaagagctcacttgggattatggcatcaactttgatgaacatgatgatcagccaattgagctgttccagtgcagatgtagcagtaaattctgtaggaatattaagcgattaaatagatccatgagatcgtcaagttcatgatggccattctctggtaaacagattttttggtctgatgcatgccatcgatcagtagtaacaagtttcaacctactgaattggtctctttttgtattttagttttcattattttgcttggaggttggatacaagttactattgacagccttctaaaaactacaaggcagtcatgggacagaataagaaaataacctctaggtgttaataaccccgaatagttctgtcaaatgccaatgtatgattctgcctctgggttttatgttgtgctgaatgcatgccagattaatggtttag

SEQ ID NO: 28951 - DNA, 371 bp, Glycine max
  Clone ID: TF_uC-gmroLIB3258053g01a1
taatttatgatataattggatccaaaataggggccaggtccagagggtcacatgatttatttataaacacacttaaacttgatttggaaccatacatccactaaacttgaacttccaaactggatctggctctcaacataagatcatcctcctcttttcagccatgaaagcattgcccgtaccatgccggtcttgagcaactctaaccaaaagaaccacggcattttgatgatccgcataagcatttctttctgcctttggctgccatgctaccttcggcacgatcagattgggcaagcccataatcatatgttaactcagtcattggcggaatgtgtctgagtgcacaaaatgccacatggagggatgat

SEQ ID NO: 28952 - DNA, 2058 bp, Glycine max
  Clone ID: TF_GmC1246_1
ccacagcctcagcttaggcacagtatccgattgcgtttgaagactgaatgcatcaagtggtattccaccaacgaacggcactcgacggttttttcgagttggttatataaatacgttcacaccgtcgcttccatttcgttttccaatctctcactctcttctccaatcccatttcaggcaaagtttgcctttgaaggaatcaagtaagtcttgtatgtggattttgtggtattgattttcaatatccgctttatggtttgagcttctattaagaaactgagatacgagctgatcacataggagtatccagtactctctcagatttcatgcctgccatgaaaaagaatcctgagctaacttgtattggttctgtattcaacatgttggggaaggagcttggagaacctgtagactttgaacttccagattcatttaataaatccaagccaatgcagtacacctatataaaacgcaatatatatctcactaagaaggtcaagagatcccggtttgatgatgatggcatattctgttcctgtactccttcccctggatctactagtgtatgtggtagagattgccactgtggaatgcttctgtctagctgttcatcaggctgtaaatgtgggagctcctgtctcaacaaaccaattcagaaccgtcctgtgaaaaaaatgaaattggtcaagaccgagaaatgtggttctggaattgtggcggatgaagatatcaagcttggggagtttgtcattgaatatgttggagaagttgtaaaaggggttttaacttaattttggtcatggtattttggtcatggttgaatgcatgatatttagttatgaatatattaatcatttagtggtaaaaagtttttcgtccctcttaattacatcatggtccaggttttttaaagatccttcattgccattttcccatataatttttcatacttgtggaaattaacttcattcctcttctgtcacctatgctaacagggcgagcatctgacttatgattaccagtttgttcaatttggtgcagatcaagattgccactgtggtgctgctgagtgtaggcgtaagttgggtgtccgacctaccaagtctaaactttcttcagatgctgcattaaaattagttgcatatcaggtttatcagaatggaggtttgcaaattggaagttctcgtgttgttgaccaaccaaagtgcttgcacaattgcattggtgaagttattaggataaaacatcttgaaaatgagaggtttggaattattaaacgatttgataagtattcccgaaaacattcgatcatgtttgaggatggttgtgttgaaatttatgacatgtcaaaagaggactttgaacttgtgagatagtgatgcaactgttgggtgcaggtgaaaggaattgaaaagctgaaaattggactcattattctttcattgcatgtgcataattcttgtagttgctgaggctcttatcaacagaatatgaagcggaatagctcaacacaactcttactgattgaagataataaattcctttttctactaacaaactgtattatcgtgtaaacaacattgttgttcaaggttctggaaataaaccttgtattttttaaaatcctgaaagtactgtaaaatgagaatcatcttgtaccattagctaggatgtgtagttgttgtttcaagtgtattcttttactttcttcctatttttctagtataaggttattgataaatgtgggagtttcgattaggaaaaacttgttttaatatgcaattaccctttgatcaatgctaaagacatgtaccctatgaagggggtcatattatatcttaataaataggcaataggcatctctccaaattggtaggcttttccatttttattcccatacaatttgtccccgagtaatttgcataatcagttgtattgaaaatggtactacatatataccaagatatctgatactgaatgcgagattgactagcagcagtatgtatgattgtagatgccgatgcttaagctaatagaatgaagattgtattttttgtt

SEQ ID NO: 28953 - DNA, 343 bp, Glycine max
  unsure (1)..(343): unsure at all n locations
  Clone ID: TF_18690744
agcatgtgtcccaggtgatttgaactgctcttgcattaggagaaatgaaggtgatttcccatacactggcaatggcattctcgtgagccggaagccattggttcatgaatgtggccccacatgtcagtgttttcctaactgcaaaaatcgagtgtcgcaaactggtttaaagcaccccatggaagtgttcagaacgaaggatagagggtggggtcttcgatcgctggatcctattcgtgctggtacttttatttgtgaatatgcaggagaagttgttgacagaggcaaggtaagtcagcttgtgaaggaaggaaatgaatatgtttttgatacncccgtattt

SEQ ID NO: 28954 - DNA, 1144 bp, Glycine max
  Clone ID: TF_GmC270_2
tttcacagtggcatttgctcgtctctaatgttgcacgttttaattgctgataaagaatgattctgaaaacggttacagcatttgcatgctagttaagggttgtaattcaaatgttttatgtgccttttttgtattgcaggttgtcaattattgggcagggaagggaatatccggatttacagtttacaagtttagacttaggaggcttgaagggcaacctacattaacccaaatcaggtatattttacttatggacgtgtacctcaaactctaacaaaaatacgaggattggtttgtgaggatatcactgaaggtcaagaaaatatgcccattccggccaaattagggtgatgccccccctgttcccccaggcaagttcaataaggggtttgcaatatatacatatatatagtgatataattaatataattagtttttatttttcattcaatcgttgattgtcatggtttcgaattcggaaagtctctttgtatatgcaagggtaaggctgcgtacaatgaccttctcccataccttcacatagtaaggagtcgtttctggcacaggggtttcacatattgtaagtttgttaaggttgcaaaaaatgtgaagcttcccatgaatgccactggatgcgaatgtaaaggcatttgtaatgacccaacaacctgtgcatgtgcattgcgtaatggctctgattttccctatgtatctcgggatggtggcaggttagttgaagctaaagatgtagtatttgaatgtggtccggaatgtggttgtgggccaggttgtgtgaaccgaacttctcaaagaggacttagatatcgtctggaggttttccgtactgcaaaaaaaggatgggctgttagatcctgggattttataccttctggagcacctgtgtgtgagtacacaggattacttgccagggcttaatttgttcaaaacattttctgttttgtgcctttgttttacatgaatttctgtttatttatgatgatgtcaagcattgatgcaatgataatgttgtcctccatgatttacatttttagtggaatcaaagctgtaattttttaaccttgtgtcaatttttattctatttttaggatgcaataaatgatctaaagccccccctctgtcgtct

SEQ ID NO: 28955 - DNA, 515 bp, Glycine max
  Clone ID: TF_jC-gmXLIB3563P049dd06a1
tgagctcaagcacatcttcaaggactggtattattcttgcagacctctctacaggagttgagagtattcctgtatcacttgtcaatgaagttgacaatgagaagggcccttcttttttcacttatttccattctctcagagatccaaaaccattcagtttagcacaatcatcatatggctgcaactgtaacaaaacatgtgtccctggggatttgagctgctcttgcattcaaagaaatgaaggtgactttccatatactgcaaatggtgtcctagtgagtcggaaaccattggttcatgagtgtggcccattgtgtaagtgttttcctaactgcaagaatcgagtatcccagactggtttgaagcaccaaatggaagtgttcaaaacaaaagatagagggtggggacttagatcactggatcctatacgtgctggtacttttatttgtgagtatgcaggagaagttattgacattgccaaggtaaataagaataggggatatgatgatgagtat

SEQ ID NO: 28956 - DNA, 856 bp, Glycine max
  Clone ID: TF_GmC5793_1
gtcttcgcaccttagaggacctgccaaaaggtgcatttgtgtgcgagtttgttggagaaattttatccatgaaagagttgcatgagaggaacttgaaatgcactgaaaatgggaaatatacatgcccagttttactggatgctaattgggattcaggatatgtgaaggacgaagaagctctatgcttagatgcagcttcctttggcaacactgccaggtttatcaatcacagatgttctgatgcaaacttgattgaaatcccagtcgaagttgaggatcctggtcattattactatcattttgcctttttcacttccagaaaaatatcagcacaggaagagctaacatgggactatggcattgactttgatgaccacgatcatcctgtcaagctgttccagtgcagatgtggcagtaaattctgcaggaacatgaagagatatagcagatctcttagatatgcgtcaattgcaggatgatagcctttctccgtgaaaccaattttgttgtctcaccgtgcggctggatgagatgtaatgaggtccagtctattacgagtggcgctttttgtctagtttagtggttgggagactcgttattttgtacagatctgcgaaaactatttataggcagactgacctagaaaggaaagagtgatcgtttattctgggatttattttgatatactttaggttcaaacttagataagaccaaaatggatgtttgcgaaagaaaaagaaacggttaggcggtagtgaaggtgaatattttagtttctaactgcagcgtttgtggggcttttaatatcaacgtactatgtgttggatttcatgatatgaaatactgtagttatttc

SEQ ID NO: 28957 - DNA, 396 bp, Glycine max
  unsure (1)..(396): unsure at all n locations
  Clone ID: TF_9819698
tggaacttcccaaaactgtaaactctgaaattaacgagattgagccactgtctgcagcgagatgccgtgtgttcataaggccttcccgtaagaaggatgaagtgccaatcattcacttgcttgggaggacaaaccttncattctttaagtgcaataactcaattgaacagcaataaggatgctcaagtattttcatctcttaaggaacgtcttcaccatttacagaaaacagaaaaccaaaaagtttgcttaggaaaatcaggtattcatggatggggcctctttgctcgtagagatctggaagaaggagaaatggttgttgaatatcgtggcgagcagttacgacgtagtatcactgacctaagggaagcacagtatcgttcagaaggcanagat

SEQ ID NO: 28958 - DNA, 2954 bp, Glycine max
  Clone ID: TF_GmC67530_1
gcgcccacgcgtccgtacggctgcgagaagacgacagaaggggggttaaacaaggaggtaccaaatattgttagtgaatttgttgggggcaccagtttagaaattcaggagaggtacaaaactatcaaggaaaagaacattggaaggttggaccagccttctcaaaactcaggagaatatgaatctactattggcatatgtgtagagaaaacgctgagtgctgcattagattcttttgataatcttttttgtcgccgttgcctgatttttgactgtcgtctgcatggctgttctcaacctttaatatatcatagtgaaaagcagacagtttggtctgatcctgaaggagacaggaaaccttgcagtgatcagtgttaccttcagttaaaggtagtaaaaaatgtgacagaagattcaacttctgggtctgatcagaataagagaactacaattacagaagaggcagatgtgatattggctccctccattatagaggaacctagtaatcagagtatagtaccttttccaacagaagttgattgtcttggatctcttaatttaaatgttcctatctcaggcacgagggaaaaatggaaagtcccaaatcagtcagacacagcactccgtgactcatcactccctcctgatgattctcagcattcttataaaaagctgaagacaatatctgatgatgtagttactgcaaatagtgattctagcaagaacataaattttggtgcatgtgatgaaagtatacatacaattactagtggacttttggacaaatctgttaaagataattcaaataaattaatagattcttctagcacttgctgtagtgatgagcaggacaaaagtattggggatggaccaaaagatcctacaaataagacagaatttaagaagttgtccaattcaatggaagggaaagttgatgggatgctaaggggtttcagattggaaacctctggaaaaagaattatacttaaggggagtagaaatgtttggcagaaacagttgcctcatagcaaggaacttactttctggcctgaagacttgtatggaaatatctagttacatgcattctggaggagtgtcaatgccccatggatctacggttgctcctagttcaatcatggaagaaaagggaaaatttgatgcagagtgcacagaccaggagatgccatctaggtcacggttgctgaggaaaaggggtaaaacaaggaagtttaaatattcttggaaatctgctggccacccatcaatatggaaaagaattgctgatgggaaaaaccaatcttgcaagcagtatacaccatgtggatgtcagtcaatgtgtggaaaggaatgtacttgtattaatggtggaacttgctgtgagaaatattgcggttgttcaaaaagctgcaaaaatcggcttagaggatgccattgtgccaagagtcagtgtagaagtcgacaatgcccatgttttgctgcaggacgggaatgtgatccagatgtctgtcggaattgctgggttagttgtggggatggttcgttaggggagccacctcggcgtggagaagggcaatgtggaaatatgaggcttctattgagacaacaacaaaggattctcttggcaaagtctgatgttgcaggatggggagccttcttgaagaacccggttaacaaaaatgattacttaggagagtacacaggagaactgatctcccaccgagaagccgataagcgtgggaaaatatacgatcgcgccaactcatcttttctttttgacttgaatgatcagtacgttcttgatgcttatcgcaaaggagacaagttgaaatttgcaaaccactcatcaaaccccaattgctatgcaaaggtgatgctggttgctggagatcaccgagtaggcatatttgccaaggaacacatcgatgctagtgaggagctcttctatgattatcgttatggtcccgatcaagcaccaccatgggcacgtaaacctgagggttctaagagagacgaatcaacagctcctcaaggcagggctaagaaacaccagtctcattgatgagcctgggccaaagtctagcgcatacaaatttttggcttctacattatatatcctatgcataaacaaatttgtgatatcccatgggatagattcaagatcaacggtcacaaaaggagataattagtggtttgctgatgctaatgtgcctttaaataggcaagagaagcaggcatgaagcaaattaatgttagcggcaacaagctagtagaaacaaacctagcagttcgtttcggatgctaggcgtgacatttcggcgaacttgttctgttcaaacttggttttgctcttcattatgtgattgtgagacatccaagttattattaaatggcttggtattcaatttggtttcttagtttaatttaaatacttaattaagttccttggtttttgaatatgcaattaggttattttgttttctaattttatccaattagatcattttcgtcaaaaaaaaaaaaaaaaaaacaaaaatgagaattacaagcctttctgtttccatcttctttatcctacattcttgtgtcttgaccatctttttgttattttctttttggaggtgaggggaggattggtaaagctaaaataaagttttccatatgtaatataccagatggctccaactgttttgataagttgtgattttgtattataccaataggttatgaccaatttttttaaaaaaaaattatataaccagcatcattatattctgaagaattggtatttctatagtctagttgggcatcaaacttaaaaaatattatctttgattgtaggaatttttctagcttttttttttggcttcctaataaataggatgtttctaggttgaacatgtaaagagaaagattaagttacttgtgcgttgataaatgttattttcttctttctt

SEQ ID NO: 28959 - DNA, 536 bp, Glycine max
  Clone ID: TF_LIB4164-031-R1-N1-A11
ataccggaagggtatcacaaattcactatcaaactcttaaatgattgtttctgcccatgacaaatgaaaaataatggaacgtatgtcatagttacaggcaatgcatcctattcctgcttttttttttttttttacaaaaacctattcgcttttcctgctcatcgggagcatatttgccttttttttattatttaaattaatcaaaggggatacaaattaatttaacataaaaaaataaaatacaagaatcgacaaatatttccccatggttgggtaactgcaatggctccacccccaaaaacaggggaaaacctagttcataaatccgctacagttaggggctttacagggacagacaacctttttttcatcccgctcatcatcgaacgagtaattatacgttagttcttcaccagctgaaacattggtcttggcaataaaaacaatcctgttctcctgatcactcaaaggcacaatccttgcaaagcagtttggcatgcaaaaatggtttattaaacgtgcaatattgcccttat

SEQ ID NO: 28960 - DNA, 1271 bp, Glycine max
  Clone ID: TF_GmC387_1
ctcgagccgattcggctcgagatgttttccaatacataaattgtgaagatggaaagatgtctggtcctcctggggatgttgcaaattccctcatggacggctattccaagggtaataatgaagtgagacgaaggtctagattcttacgtagaagaggaagagtccgtcgattgaagtacacctggaaatctgctgcttatcattcaattaggaaaaggattccacagaaaggggatcaaccctgccgacagtataatccatgtggttgccaaacggcttgtggaaagcagtgtccttgtcttcaaaatggaacctgctgtgagaagtactgtggacgccccaagagctgcaagaatcgatttcgtggctgtcattgtgctaagagtcaatgcagaagccgtcaatgtccatgttttgctgcagatagggaatgtgatccagatgtttgtaggaattgttgggtcagttgtggcgatggtacacttgggattcctagccaaagaggggacaattatgaatgtagaaacatgaagcttcttctcaaacaacagcaaagggttcttcttggaaggtctgatgtatccggctggggagccttcttaaagaatagtgttggtaagcatgaataccttggagagtatactggagagttgatttctcatcgggaagcagataagcgaggaaagatatatgaccgtgaaaattcatcttttctctttaatttgaatgatcagtttgttcttgatgcttaccgaaagggtgataaattgaagtttgcgaaccattctcctgacccaaattgttatgcaaaggttattatggttgctggagatcatagggtaggcatttttgccaaggaacggatttgtgccggggaggagctgttctatgattatcgttatgagccagatagggctcctgcgtgggctcggaagccagaggcatctggatcaaaaaaagaggatggggctccttcaagtggtcgtgcaaagaagcttgcttaatgggtgtttgttcttcaaaaatcaattcttttaagttattctttaacacgtaggggaagcaatctcattggtagcggaaagaagtattgttttaagttttttgttcgtagcaaggccgtgcaattgttgctgcataggtaactaactacatttaaacaattcattttaatattaatcgactgtatattcaccattccaaacggaaaatacaagcttaatcaaaattccatgcaattctttcccggagggaaatgggcaaatgcacat

SEQ ID NO: 28961 - DNA, 577 bp, Glycine max
  Clone ID: TF_GmC312266_1
tcgcgaatgaagagaacaaccaatcatacctccatgttgcattttttgcactcagacacattccgccaatgactgagttaacatatgattatggacttgcccaatctgatcatgccgaaggtagcagtgcagccaaagggagaaagaaatgcttatgcggatcatcaaaatgccgtggttcttttggttagagttgctcaagaccggcatggtactggcaatgctttcatggctgaaaaggttttgagatctctttcatgtttcaaacctcctatagtcattcagatttgacattgtaataaacatgtgtgcctctctttgtcgctttctatttatcttttttaagaaacaaatcgttttgtataatttgtgtaatagtttttagttgggaatggccatgatgcgccagagaagcatataggtagtgctatgcattcacatgttttatctgtggttttttcctttttacgcgattttgttgtgctgtaatatatgtagctaagaagattagaattgtttttattatttatttgttttattattattattattattattattattattattattatta

SEQ ID NO: 28962 - DNA, 2835 bp, Glycine max
  Clone ID: TF_GmC6450_1
ggagtaaggagaatagattgttatctgagaggaagcataggaataatgaaacacatggtggtttggataatggagattatgcttctgatagagaaagcaggaggcgtttatcaaagttgaataagaaatatttcaactcggagagtgagacatctgatgactgtgatagatcttcggtagatggcaagagtgatagtgatactaccaccactgacattgaaagcgaccaagatgtctattcagaaaatggaattggggactcgaggggagatgtgtatttcacacctgatgatgggttggatttcattactgatgagcgtgaatggggggctcgcatgacgaaagcaagtttggttcctcctgttactcggaagtatgatgtcattgatcaatatatcattgtagctgatgaagaggatgtgcgaaggaagatgcgggtttcattaccagatggctatgcagagaagctgagtgtgcaaaagaatggcattgatgagtctgacatggaactgcctgaagtcaaggattacaaacctagaaaacagcttgaaaatgaggttgttgagcaagaagtttatggaattgatccctatacccacaatctcttactagattctatgccgaaggagttggattggtctctacaagagaagcatttgtttgtagaagacaagctccttcggatgttgaataagcaggttaatcattttactggaactggaaacactccaatgagctaccctttgcagcctgctattgaagaaattgaaaggtatgcagaggagcagtgcgatgtgagaacagtaagaatgtgtcaaggtatcttaaaagccatagcaagtcgtccggatgacaaatatgtagcttatagaaaggggcttggtgttgtttgcaacaaggaagaaggctttgctgaagatgattttgttgtggagtttttgggagaggtttatcctgtgtggaagtggtttgagaaacaagacgggattcgatctctgcagaaagatagtaaagatccagcaccagaattctataacatctaccttgagaggccaaagggtgatgctgatgggtatgacctagttgttgttgatgccatgcacatggctaattatgccagtcgaatatgtcattcttgccgacctaattgtgaagccaaggttactgctgttgatggtcaatatcaaattggtatttatagtcttcgtgaaattcaacatggtgaggagatcactttcgactataattctgtaacagagagcaaggaggagtatgaagcgtcagtttgtttgtgtggaagccaagtttgccgtgggagctatctgaatctgactggcgaaggggctttcgaaaaggtactgaaggagtggcatggaattcttgatcgtcattatttgatgctagaagcttgtgaattaaactctgtttctgaagaggactataatgacctgggaagagctggtttaggcagttgtttgcttggaggcctgccagattggctagtttcctatgcagctcgccttgtgagatttatcaattttgaacgaacaaaacttcctgaggaaattctaaagcataatcttgaagaaaaaagaaaatatttttcagatataattcttgaagttgaaaggagtgatgccgaggttcaggctgagggagtatacaaccaaaggcttcagaatcttgctgtcactcttgataaggtaaggtatgttatgagatgtatttttggcgatccacggaaagcaccacctcctcttgagaagctcagtcctgaagcaactgtttcctttctctggaaaggagagggttcatttgttgaggagcttcttcagtgcataactcctcatgttgaagaaggcatcttgaatgatctcaagtttaaaattcatgctcatgatccttcaaattctggagatattcaaaaagagcttcgaaaatctctgttatggttgagggatgaggttcgaaaccttccttgtacatacaaatgtcggcatgatgctgctgctgacttaattcatatttatgcttataccaagtacttctttagaatacaggattatcaaactattacttcgccacctgtctatattagtccacttgacttaggtcctaagtatgctgacaaattgggagcaggatttcaggagtatcgaaagatatatggtgaaaattattgtttagggcaactggttttttggcataatcagagtaatgcggagccagattgtaccctggctagaataagccggggttgcttgtcattaccagacatcagttccttttatgccaaagctcagaagccttcacgacatcgtgtttatggtccaaggactgtcagatctatgctggcaagaatggagaagcagccccagaaaccttggcccaaagaccggatttggtcattcaaaaattctccgaaattttttggtagcccaatgttagacgctgtaattaataactctccacttgacagagagatggttcattggttgaagcacagacctgcaatattccaggccatgtgggaccagtgaagttttgcttgcatggtttggggaaaacccttgttagagattagagagtggttcatcattcagaactgcctgcctcttttagcgtggggagtctaattattaatccatagcataagttcttgtttcgctttgtccttcattcttgtgtatagttttcttgacctttgatttgtaattcatttggttgtagggcattgttttactcttgtctaatgtgaaaagaaatgaagggaaaataggtttaattcaaaataggtttatttcaagccatctgtcttatctgacttgagtcaaa

SEQ ID NO: 28963 - DNA, 840 bp, Glycine max
  Clone ID: TF_GmC477_2
cttgatgcctgcgttgcatcttgtgagagggaagcctttgatttttgaatgtggcccattttgctcctgtcctcctcattgtcgcaatcgtgttgcgcagaaggggctgaaatataggttggaagtgtttaggtctaagcagacatcttggggagtaaggtccttggaccttattcaagctggttcttttatctgtgagtttgcaggggttgttttgaccagggagcaagctcaactcttaacaatgaatggtgattcattgatatatcctaatcggttttcggaaaggtgggcagaatggggggatttgtctcagatatacccggattatgtgcgtccattgtatccgtcaattcctcctctagatttttctctggatgtgtcaacaatgaggaatgttgcttgctatatgagccatagttcaactccaaatgtcttggttcagtttgttctgcatgatcacaacaatttgatgttcccacaccttatgctatttgccatggaaaacatccctcccatgagagagctcagccttgattatggtgtagctgatgagtggacaggcaaactctctatatgtaactgaatggtccatgcacttcttgagttttaggcatggttttgtgaggtaaagcctagttctatcattctactttgttgcttttacaactatcttccttttgtttacatcttacttttgtctggtactctgcgctgtctccaatgtaaactctgtttaccatataccataatgagttatagacataaaactattgtgatatttcagaagttcatgcatgctttggacaatgaaaaaatgttgtaattaggttgatcaaa

SEQ ID NO: 28964 - DNA, 1173 bp, Glycine max
  Clone ID: TF_GmC27513_1
aaggctacaaaactaaacaccttgttgattgcgttgcaaacgctggctagctcgtttcccaaacggtaacgttgctcccgcttccctccgcgtggactgcgttgcccccacccccgccccccaatgcgttgggtgacgaggtttcccagcgtcatgagcactacccgtgtgggtccgaacatgcaacggaaccctatatcatttacaactgccaatcagttcatatagcgcctgcaattttttgaattgcagtaacatggaatctttccttcgtcttcgtgattaaagtggtaatcatacgtaatctcttcaccaggaaatatgtccctctctgccaagaagacaaccttcttttcatgccttacggtgatcacttttgccacgcaatttggcaggcatgagtggttcacaaatcgagcaatcccccctttccttgtggcatcaataatatgctctttgtctatcctgaagaagtagcaggcagtcttgtactgaagtttccttccagattgatattccttctctcttttatcagccacacgcagccccacaatttcaccaatatactcaacaaccatttcaccccgggaaatgaatcgagaagtgtaaagacctagagcatgtatacgggacttgtatacaacaaggtgtttccatccctttgcttgtttgtatcgagcatattcctttcgacaatcatgctcaatatctaaatctgggaattttggaagtccccgtgaacataatttctgcccattaatgtgaatccaagcatttagctgctcctcaggaacaaggcatccaccttggcactgattattctgaaaaccatcccacctacggcccttgtaaccctctgccctggcacaggtgaattccttttcttcttgacttccaatttcatcaagaggatcatatatgggcagacatctaggttcaataatatgaagcgtgcatcttccataaaatccaatcttctcatcatcaatgccttcagtctcactttgcaagaggttcacatctgctcttggacgcgaaacaccagatacatcaaaagcactcatggtgtcaacattcggccctcctgtccattcagtcaggaatctgcgcaccagcttaatccattgctttccggttagatcaaatccggcgtcggtgatactgatatgtacc

SEQ ID NO: 28965 - DNA, 1723 bp, Glycine max
  Clone ID: TF_GmC121298_1
acccggggatcctctagagtcgacctgcagtgacattataattaagggctgaccattcttgctccagttgactctccaaacactgatggaatagatccaggtaaattattattattattatttccactggctttcagaggaaaacattagataaaaagaaaaaagggaaaaagctatgtgggattaacaatatactggtacttagttgtttattagatgctatatgtgagctaaatctctgttcaaatattaggcgactcatgtttaagaaagaatttgacacaagctatgtgggattcaattctggatcagagcttctctctcgtcagaatttatgtaatgcgtaccttgacttctaaatacatgtcatcttgctaccttctatatggctgctctgtgccactatatggaattgactcctatgcttttgacattagtttgtaaatattgcaattcaacttgtttatttatggaagaattcattcagccttattttggttgctaaagaaacgaggtatgaaccaccgcctaatccgtctggttgtgctcgaagtgagccatatgattactttggcaggagaggtcgaaaagaacctgaagcacttgcagctgcatcgttgaaacgtttgtttgtggagaatcaaccttacttagtaggtggatactcccggcatggttcattaaacaacctagagccttctggcagaggagtctgctctaaattcttttgtagccaacaaaggctgagaacctctcggattgacacatcaaacagcatactttctatctctgaaaaatatacgtacatgagggaaacctttcggaaacggctggcatttgggaaatcaagaattcatggatttggcatctttgcaaagcatccatataaaggtggagacatggtgattgaatacactggggaacttgttagaccacctatagctgaccggagagagcacttcatatacaattcgttggtgggtgctggaacatatatgtttcgtatcgatgatgaacgagtcattgatgctactagagcaggaagcattgctcatttgattaatcattcttgtgcaccaaattgctattccagagttataagtgttaatggcgatgaacatattataatatttgcgaagagggacattaaacagtgggaagagcttacatatgattacagatttttctcaattgatgaacgacttgcttgttactgtggcttcccaaagtgccgaggtattgtaaatgatactgaggcagaagaacgagcagctaccctatatgcaccacgaagcgaattaatagattggagaggagaatgagattttttactgtaatattatgcgtttaagttccttctgaagatgaattgtttgtccaacaacttctctcatggattgtaccatttccttgaaaggacagtgttgtacatagtacatctgattcttcccattgttttcgtcataaccccagctgagcggtatatgttggcggctcaaggcgatttccattggtgttctggttataatgaagggaaagatgtcaccaaactttttacaaatgtttcatttgaaattcatggccacaattacggcccgtttaacttcaagaaacttgctgagatattgtaacttgtcattggataggtacagttgtaattacatcgaaccttcataaaaatgaaaagattacgagaattcgaatggaaaaaaaaaaaaaaaaa

SEQ ID NO: 28966 - DNA, 1389 bp, Glycine max
  Clone ID: TF_GmC1138_1
tgagctcaagcacatcttcaaggactggtattattcttgcagacctctctacaggagttgagagtattcctgtatcacttgtcaatgaagttgacaatgggtggggcccttcttttgtctctgtttgccagtctccctgggctccccagcccttccgctgtgcgcaatccgcttctggctgcaactgtaacaaaacatgtgtccctggagatttgagctgctcttgcattcaaagaaatgaaggtgactttccatatactgcaaatggtgttctagtgagtcggaaaccattggttcatgagtgtggcccattgtgcaagtgttctcctaactgcaagaatcgagtatcccagactggtttgaagcaccaaatggaagtgttcaaaacaaaagatagagggtggggacttagatcactggatcctatacgtgctggtacttttatttgtgagtatgcaggagaagttattgacgttgccaaggtaaataagaataggggatatgatgatgagtatgtttttgatacaagccgtatttacgatacattcaaatggaattatgaacctagcttattggaagaaataagctcaaatgtctctagtgaggattatgatataccgtctcctctaattatcagttctaagaaatttggaaatgtggctagatacatgaatcatagttgctccccaaatgttttctggcagccagtcttgtatgcagaaaataatcaatcctttcttcacattgcattttttgccctcagacacattcctcctatgacagagttaacatatgattatggctgttctggtcatgctgatggtagcagtgcacccaaagggagaaagaaatgctcatgtggatcatcaaaatgccgtggttcttttggttgatgttttgttgcagttgctgatggacaggcatggtgctggcaaatgtattcacagctaaaagatggggacattcaatgtgaaggccagatacagcttggaagttccaacttcgctgatgcttgtttccaaatatggttgtcaagggtggatgtactcgattaaaagttaaccatgttagtccttaggcatggctctttcttggcttctacttgtagttagtgacttttgatcatcttaccccattcctagttttgaggggaaaaagttttagtgagcagcttgtgtaaaattattgttgtagggaatggccatgagtacttgaaaatatcattaacatgcatatctttgtacccttttggcttttgtaattgtaatagagttagtgttgatgttgattagaaggctagaactatatatcatattttggattctagaaactattttgttaaaacatgctatgtatcttttctatgccaattgaattgatctgaactcc

SEQ ID NO: 28967 - DNA, 1982 bp, Glycine max
  unsure (1)..(1982): unsure at all n locations
  Clone ID: TF_GmC6450_2
ggccaaagggtgatgctgatgggtatgacctagttgttgttgatgccatgcacatggctaattatgccagtcgaatatgtcattcttgccgacctaattgtgaagccaaggttaccgctgttgatggtcaatatcaaattggtatttatagtcttcgtgaaattcaacatggtgaggagatcactttcgactataattctgtaacagagagcaaggaggagtatgaagcgtcagtttgtttgtgtggaagccaagtatgccgagggagctatctgaatctgactggtgaaggagctttccaaaaggttctgaaggactctcatggaattctcgatcggcattgtttgatgctagaagcttgtgaattaaattctgtgtctgaagaggactataatgacctgggaagagctggtttaggcagttgtttgctcggaggcctgccggattggcttgttgcgtatgcggctcgccttgtgagattcatcaattttgaaagaacaaaacttcctgaagaaattctaaagcataatctagaagaaaaaagaaaatatttttcagatataattcttgaagttgaaaggagtgatgccgaggttcaggctgagggagtatacaaccaaaggcttcagaatcttgctgtcactcttgataaggtgattctgcactctgctatccatatttcctttttcactattcttgtttttgatgttgataagaagaaaaacactttgcatttaaaatatgatcatagaggagagaaatggtaaaggccaatgcttttggtgtgggcttgttgttaaccattaatgactgagccgatactgttaagataaagaagctacatggtaaggtatgttatgagatgtatttttggcgatccacggaaagcaccacctcctcttgagaagctcagtcctgaagcaactgtttcctttctctggaaaggagagggttcatttgttgaggagcttgttcagtgcataactcctcatgttgaagaaggcatcttgaatgatctcaagtttaaaattcatgctcacgatccttcaaattctggagatattcaaaaagagcttcgtaaatctctgttatggttgagggatgaggtccgaaatcttccttgtacatataaatgtcggcatgatgctgctgctgacttaatccatatttacgcttataccaagtacttctttagaatacggaattatcaaaccattacatcaccacctgtctatattagtccacttgacttaggtcccaagtacactaacaagctgggagcagaatttcaggagtatcgaaagatatatggtgaaaattattgtttaggacagctgatattttggcataaccagagtaatgcagatcctgatcgtagcctggctagagccagcaggggttgcttgtctttaccagacaccaattccttttatgccaaggctcagaagccatcacgacattgtgtttatggtccaaggaccgttagatctatgctggctagaatggagaagctgccgcagagatcttggcccaaagaccggatatggtcattcaaaagttctccgaaattctttggtagcccaatgttagatgctgtagttaataactctccgctggacagggagatggttcattggtttaagcacagacctgccatattccaagccatgtgggatcgttaaatttttgcatggtttggggaattttggtcagagcacactcgataatttatagatatggaggatggttcatcattcagagctgcctgcctgttttagcttggggggaggaggtatgtaattattaaaatccaaaagcgtcattccttgtaccgcttttcagtcattcttgtgtacagttttttttgccattgatttgtaattcttttgattgtagggaattgtttaacacttatgtaatattaaatgaaagttaggaagaaaaaaaaaaggttaattccagtcatccnagcttacgtacgc

SEQ ID NO: 28968 - DNA, 1133 bp, Glycine max
  Clone ID: TF_GmC1246_2
ctctcttctccaatcccatttcaggcaaaatttgcctttgaaggaatcaaaatcctgagctaacttgtattggttctgtattcaacatgttggggaaggagcttggagaacctgtagactttgaacttccagattcatttaataaatccaagccaatgcagtacacctatataaaacgcaatatatatctcactaagaaggtcaagagatcccggtttgatgatgatggcatattctgttcctgtactccttcccctggatctactagtgtatgtggtagagattgccactgtggaatgcttctgtctagctgttcatcaggctgtaaatgtgggagctcctgtctcaacaaaccatttcagaaccgtcctgtgaaaaaaatgaaattggtcaagaccgagaaatgtggttctggaattgtggcggatgaagatatcaagcttggggagtttgtcattgaatatgttggagaagtcatgataggtcaatggatcgattgcttctgctgatagcgtaagttgggtgtccgacctaccaagcctaaactttcttctgatgctacattaaaattagtggcatatcaggtttatcagaatggaggtttgcaaattggaagttctcatgttgttgaccaaccaaagtgcttacacaattgcattggtgaagttattaggataaaacaacttggaaatgagaggtttggaattattaaacgatttgataaatattcccgaaaacactcgatcatgtttgaggatggttgtgttgaaatttatgacatgtcaaaagaggactgggaacttgtgagatagtgatgcaactgttgggtaggaactacgtgcgaatatttcttttgcatgattgtatctatctgcatgacattgtgaaatattatatcttaataaataggcaataggcatctctccaaattggtaggcttttccatttttattcccatacaatttgtccccgagtaatttgcataatcatttttattgaaaatggtactacatatataccaagatatctgatactgaatgcgagattgactagcagcagtatgtatgattgtagatgccgatgcttaagctaatagaatgaagattgtattttttgttaccttggtgttgatt

SEQ ID NO: 28969 - DNA, 594 bp, Glycine max
  Clone ID: TF_GmC91094_1
gggaaaaagggttatggactgaaggcaattgagaatgtagctcaaggccagtttcttattgaatacgttggagaggtacttgatatgcaagcatacgaggcacggcaaagagagtatgctttgaagggtcatcggcatttctattttatgaccttgaatggcagtgagggcacagatgcaagtgcaaaaggaaacttggggcgtttcattaatcatagttgtgatcctaattgtcggacagaaaagtggatggtgaatggggaaatctgtattggactgtttgcattgagggatattaagaaggatgaagaattgaccttcgattacaactatgtgagggtttttggtgctgctgccaaaaaatgttattgtggttcacctaactgtcgaggttatataggtggtggtgatccacttaatgctgaactgatagttcaaagtgattcagaagaagaatttacagaacctgtcatgctcaccaaagatggtgaaattgaagattctgtacctacacccgagtattctaataatgttgatacacaatctgctaaacatatgttgaaagacagggatatattggacaattctacaact

SEQ ID NO: 28970 - DNA, 571 bp, Glycine max
  Clone ID: TF_LIB4367-007-R1-K1-A4
tgctttttgtgaatttttgctttgggacatgatatacaggggtgttcagaatttttacatgtgtgagattcggaaagacttcacagtagatgcaactttcaaaggaaatacttcacgctttttgaaccatagctgtgatcccaactgtgttttggagaagtggcaagttgatggtgaaacacgtgtgggtgtatttgccgcttgttcaatagaagctggagagccgttaacatatgattacagatttgtgcaatttggtccagaggtgaaatgccactgtggtgctgcaaattgtcaaggctttctagggacaaaaaagaaaattggcaagctagacctctattggggttcaaaacgtatgagaacatcgaaagcttcttgcattacgttagtaacagctgtttgatttgccatcaacgttgtaatgtatacaataaagtgataagctgcttatatagggatggatggtcgaatggaggagtctggttgtgtaggaatgacgggagtagaacatctgaaacattctgttctattgttgtagagggaaatgacaatttaatcggatttagga

SEQ ID NO: 28971 - DNA, 565 bp, Glycine max
  unsure (1)..(565): unsure at all n locations
  Clone ID: TF_LIB4203-002-R1-N1-B11
ccaacaccaagttcaagttttctttattcaaatttgaaaaatgtcccatactgcattattgcaaaaactcactggtccaaaacactttgcagctggggaaaaggcaataaaaagttgattttaaaacattactataaattactgttacagtcctttgcaaattcaaaatttcaaactgcatttccgttttctaaattgcccacagtactcaaggttcctgaagctaaggcagctgtttcaaaaaaaaggggaaaaggtagtaaatgtcaagggatttccatttctcgttcgatgcccacatacttaagggcatcagcctggctgtatctgtaatcaaaaaacaactcttcaccagtctggatagcccttttagcaaaaatgcctatcctggggtcaccattaaccatcataacttttgcatagcagtttggatttactgaatgattagcaaaacaaattttgttgccctttcgggttgcatccaccacaaaatcattgttcaagttgaacaaaaagctgcacatgtatttgncatacacttttcctcttctggctgcttcatcct

SEQ ID NO: 28972 - DNA, 1368 bp, Glycine max
  Clone ID: TF_GmC138311_1
gaaacttgtgatcatgtatacctttttggcaatgactatgatgatgcaaaagacatatttgggaaaccaatgcgtggcaggttcccatatgatgagaatggccgaataatcttagaggaaggttatcttgtctatgagtgtaatcatatgtgcagatgcaataaatcctgtccaaacagagtattgcagaatggagtacgagtcaaattggaagtcttttaaacagagaaaaagggatgggcggtaagggctggtgaagctattctacgtggcgcatttgtgtgtggatacattgcagaagttttagatgtgcaggaggcacgtgataggcgcaagagatatggcgcagagcattgtagttatttgtatgacatcgatgctcgtgttaatgatatgggcagattggctcgagaacaagctcaatatgtaattgatgctactaagtttggaaatgtctcaagattcatcaatcatagctgctcaccaaatcttgtcaatcaccaagttcttgtagagagcatggattgtgaacgtgcacatattggtttttatgcaagtcgagatattgctttgggtgaagagctaacatatgactatcagtacgagcttatgcctggagaaggatctccttgtctttgcgaatccttgaagtgcaggggacgcctttattagaacctaaatctgtgtgttgttgcaaccatattttctgattttcaatttggaacacaaatgatctgctcaacattaaaagattccaacatggaatggcccaactctgaaggattccattagccttgatgtcttccaacagatgataacaaatcaatcacatgaggcaggcaacttgtgagggagtcagctgtaatttgttggctgtctggtaaattcactggattcaagtgatttggattgtttgccatgtacaatctgccgttatccccatctggtagagtaggcatgttttttgcagcttactgcacaaatgttctcctttctcttttgctttattctccaatttttcactttagtgcctgatgtcatgaaataatttggcaatcccccactccttttcttccgccttcacccttccacccactaccaaagaaagaaatccccaagagaagttcagcaaaaaaacatatatgcaattaaagctgtctggattagcaattgttacgattttccaaaattttttttcctccggatcatggttctcaatttctttcgccagtgtttcgggaatgtaaatatgttaagttttaacttattcgttcctccttttctatgttaagtaacttattcatagaaatagcttccttgtaaattgtgtcatttaaagatgagtgcagcttttgctccttttaattt

SEQ ID NO: 28973 - DNA, 1065 bp, Glycine max
  Clone ID: TF_GmC195940_1
gtcaaatagcctaagaaggcatactttaagataatttccatataaaacgatccctcggattgttatctcaaattatccttaactaaaaggatgattcaatcctaattgactacaataaaattctgacttaaattcaaattgagttatttatattcccactttgggtaggatgttacaattacaaatcaattaacaacaaatgcctaaaacatttgcagacaaaaataacataaaaagtctaaactactcccacctgtacatctagacacctgagtttcatagttttcattttcagcattgtacttccttccccaaatgatgaatagtagtagacaggcaacggcatcttaagccaaggcaccaagcagatcaaagagtgcttcatagaagacatcattggagagaaaaatttccagacaatcatctaattaaaagtgataatctgtacgaacatgatgcttcaatatatgaagtgaaccaaatggaggtgaaataacagtttagacacataatgaaaatagaacaaggaatccctcaaggaatttatttgtttcccaccttcgagttcttcactttactccaattgtttgagttcagacatccctcttgttacattaatctgattttctatttttccttttcctttttgtttcttatcacagcaaaagacgcttccacaacaacaccgaaatgctttaataggatggtcgtgatcatcaaaatcaataccataatcccatgtcaactcctcatttgcactcactgtcctgttggtgaagaaggcaagatgataataatgatgatcaggactctctatttcgacaggaatgtctatgagatttgcatcatagcatctatgattgatgaaccttccgacatttccattctttgttgcatctaaacatagtgcctcctcgtcctttaacccctgttctgagccccagtccgcatcaagagttacaggatatgtatgttttttcgtgccagtatcctgcataatccttttatataactccataattggtaatatttctcctacatattcacatacaaaagtttcttttg

SEQ ID NO: 28974 - DNA, 1057 bp, Glycine max
  unsure (1)..(1057): unsure at all n locations
  Clone ID: TF_GmC195137_1
aaacaaacacgcccctttattactaatataattagattaatacaccacaaaaatttctccttgcgttaaatacaggaagtaggctaagcttttcacaagtatgttcggatctataatagctgaaagcattttgataatatttgttttttaaatttagaaagctatattcacaataatgtccgcaatttagtcagcacaatcgccatgggcacacaagtatgacagtcgtactgtaaaacccgttacaccacgaccataaaatggcaacctaccaatttagcgtcacccttagggttaacaacattgattactaaccttcgtcttccttacattgaagaagaaggatattgatgaacttcgcattaagactgcagaaaaacactattacattaattaaccttgttgccctcaatacatcctgccagtacaatccacagaaccacaatagcaatacttcttttttatattgccatcagaatcacgaacttgatctatttcataattgtaatcataagtcagctcttgcaagggaggaatgttatcagcagcaaagaacattatgtgaggcatcctggtgtcatggtgatcataaaggacattctgagcaataagattaggggagcagctatggttgatgaatctccccaaattaccaaactgagcagcgtcaatggtgaaaccaccatccttcacaacttcacaagaagctgtgtgtgcatcaggcatgagagtcgtgagagtctaaagatcatcccaaagagtactgttgcctcgagcctcgacnctatagttatttccaatatcaaaaagatactcatcattaccggttctttgttcagcttccttgtcctcaagaagctcccctatatattcacagataaaacttcctgaagggattgaattcagggatctcacaccccatccccttgtatcggttttaaatatttcaagttggaactttatgccaagttggctgactctattatgacatgttgaaggacatttacaagtaggtccacactcatagaccagaggttttgcttgtacaatagcccca

SEQ ID NO: 28975 - DNA, 2123 bp, Glycine max
  Clone ID: TF_GmC270_1
cttaaggtcaaccggacgttaaggctgtggcatttgtattgcccccacttcctgcgcgtgggcgcaaagaggtgtgggaaggcagaggctgagcggaaagctgctaaaaaggcctcgttgaagccttcaaaattgaagaaaggtgctccacctgaagaatcaaagaccactgctaaacgaccagatctaaaggccgtaagcaagatgatggaaaataatgagatattgtaccctgagaaaagaattggcaacattccaggtattgaggttggatatcagttctattctcgtgctgaaatggttgcagttggctttcatagccactggttaaatggcattgattatatgggccggagctatgccaaagcgttttgctatgaactcaaaattgctgaagcttctcatatttcgggcatgtatggagaggatctggataatgcatgacccaacgagtacactggtcacggtgggcatagtctgactggtgataagcgtcaatttcgggatcaaaagttggagcgtggtaacagatgtcttatgtgattgtgggagggatttgtgctgtggagagtcattcgtgatcaggactcttcaagcagttacactggtaaagtatacacatatgatggcttgtacaaggttgtcaattattgggcagggaagggaatatccggatttacagtctacaagtttagacttaggaggcttgaagggcaacctacattaactacaaatcaggtatattttacatatggacgtgtacctcaatctctaacagaaatacaagggttggtttgtgaagatatcactggaggtcaagaagatatgcccattccggctacaaatttggttgatgacccccctgttccacccacagatttcacatattgtaagtcactcaaggttgcaaaaaatgtgaagcttcccatgaatgccaccggatgcaaatgtgaaggcatttgtaatgacccaacaagctgtgcatgtgcattgcgtaatggctctgattttccctatgtatctcgggatggtggcaggttaattgaagctaaagatgtagtatttgaatgtggtcccaaatgtggttgtggtcctggttgtgtgaaccgaacgtctcaaagaggacttagatatcgtctggaggttttccgtactgccaaaaaaggatgggctgttagatcctgggattttataccttctggagcaccagtttgtgagtacaccggaatacttgctagggccgaggatatggatagcgttctagaaaacaattatatttttgagatagattgcttgcaaactataaaggggctcgggggaagagagcgacgatcacaggatggagagattcctgcaaatcttttggacaaatatcatgatcaatgttctgaaagtgtgccagagttttgtattgatgcaggatctactggaaatattgctaggtttataaaccattgttgtgagcctaatctgtttgttcaatgtgttttgagcacacacgatgatttgagattggctcgtataatgttgtttgctgcagacaacataccccctttgcaggaattaacatatgactatggttacgtgcttgatagcgtgttggactcggatgggaagattaagcaaatgccatgctactgtggagcctcagtctgcaggaagcgattattctaatactctggaagttgtatgtggtatttttgcaattgcaaaactagtgcggttaagtattggttgtttaaaacatgagctgcaaagtggtctctattcattcacggttaatttgcgcagtttatgtattgggctgaaatggcagcagaggaacattgtaactttttgtgcagatgcaaggaaatgatataggtttattttttggctagtatatatatatatatatatatatatatatatatatatatatgggtaggctcctgtttcgcttgtggtatttttttttctaaagatataaggagtcgttcaaagcatgtatatgtatagagatatggtaacaactattaattggctatggagtagacaccagaaatactgaatatttatttgtatagagaaaaaataactgcacgaagcaaggattcctgatcaaaatgagcaaaaaatagaac

SEQ ID NO: 28976 - DNA, 3230 bp, Glycine max
  Clone ID: TF_GmC793_1
tgtccaaaacgccgagcagttcgggtttttggagaagtttcatggactctgattgaagcttagtttaatatgcaaaaaccacttcaggaactgtgttgtatttcccagtgttgactccaaggattgcatctttcattccttgtgtgtggtcttttgtacttaatttatattatctagcatttcattgatttttcggtacactgagattattgggtactatactgtgggcaaggttgcttgtagaagagagagtatttgtacttctttaaaattgtaccaatggaacaccattttggtcaaggcactacacctgcatctgaatcctttgataaggctagggttttaaatgtgaagccattaagaactcttgttcctgtgttcccttcaccatctaatcctgcttcatcttcaactccacaaggtggtgccccttttgtgtgtgtttctccttctggccctttcccttcaggtgttgcacccttctatcctttctttatctcctcggaatcccagaggctctctgaacagaatgcgcaaaccccatctggtcaacgcgttcctgcagctccggtatctactgcagttccaattaattcatttaggacacccactggtgctgcaaatggagacgtgggctcatcgcaaaagaatacccgaagtcgtggatgggtcacagaggaagatggctatagtaatgttgagatagaggaaattgatgcagatgaaggaactgggactgggaggtcaaagcgcaagtcaaataagaagactaaggcaagacagagtggtggttctgtttctgttgatgttgatccggatgcagtcgctgctgatattctcaaatcactcaatgcactggttttcgatgtacttagtcaaccagaaggtagcagggattcagttgcatatacactcatgatatatgaagtgatgcgaagaaagcttggacaaattgaagattcaaatagggcagctaactctggagcaaaacggcctgatttgaaggcaggtgcaattatgatgaataaagggattcggaccaacagcaagaaacgtattggagttgtgcctggtgttgagattggggatattttctttttcagatttgaattgtgcttagtgggcttacatgctccttctatggctggaattgattacattggcaaaaccagtcaagaagaagagcctttagctgtaagtatcgtctcatctggagggtatgaagataatgtggaggatggggatgtgttgatttacagtggccaaggtggggtgaaccgtgacaagggagcaagtgatcaaaagcttgaaaggggtaatcttgcattggagaagagtgcgcatagaggtaatgaagtaagagtaattaggggtttgagggatccacaacatccaactgggaagatttacgtctatgatggcctttacaagattcaaaattcctgggtggagaaagcaaaatctggtttcaatgtattcaagtataacttagtcaggttgcctgaacagcctcaagcatatatgatttggaaatccattcaacaatggactgagaaatctgcttcaagagctggggttatattgcctgatcttacttctggggctgaaaatgtacctgtttgtcttgtgaatgatgttgataacgagaagggccctgcatatttcacttacatcccaactctcaagaatttgaggccaactgctcctgtggaatcttctactggatgcccttgtgttggtggatgtcaatctaaaaattttaactgcccttgcattcaaaagaatggaggctatcttccatattcttcagctttgctacttgcggacctaaaatctgtgatatatgagtgtggcccttcttgtcaatgtccttctaattgtcgaaatcgagtttctcaaagtagcttgaaatttcgtttggagcctttcagatccacgaataaaggttggggtcttagatcatgggattctattcgtgcaggaactttcatatgtgagtatgcaggggaagtcatatatattgctaaaccgaagaagcttggaggtgacaatgcaaattatttaatttttgattctactcacatttatctgcaactggaagtttttcctgatgatactgatagctcctaaaattcccatcccccctttatatatcagcaaaaaatgaaggaaatgtttctcggtttaggaaccacagctgctctccaaatgtattatggcgtccagtcatacgtgaaaataagaacgagtcagatctccacattgctttctatgcaattagacatatccctcctatgatggagttgacttatgattatgggactgttcttcctctcaaagtaggtcagaggaaaaagaaatgcttatgtggatctgtaaaatgcaagggttacttttgttaattaattgtctatgatgaattttggaggaggaggcctccgaatgaatatacttaaggataagctttagctatgtaagtcagacagcaggatggaactgtgtagaaagatgatagcagaccaacttttcttttttggcaaacctagtaaattggcacatgaaagagcaagttgtctattttgctaatgagggtaagttaaggtgtaaaagttaactgtaagacacattttgtgtagattgtttctttttctgctgttagaagtacccttttattttttttgggatggattttgagtagtagggcttttttagtagtccacatggtaaaattaaatttgacctgtagaattgaatattttgtttgttgcccatcatttccaaaaaccatcctgatattctattcttttgcatgatggagttgccttatgattatggggctgtttttcctctcaaagtaggtcagaggaaaaaaaaatgcttttgtgggtttgttaaaagcaaagggtacttttgttaattaattgtctgtgatgaattttggaaaaggaggcctctgaatgaatatacttaaggataagctctacctttgtaagtcccccggcaggatggacccctgtagaaaaattatagccgcccccctttttttttttggccaacctagttaattggcccatgaaaaagcaagttgttttttttgctaatgtgggtaatttaaggggtaaaagtttactgttagaccccttttgtgtagattgtttttttttttcccgtttaaaaaaaaaaaaaaaaaaaaaaaaaaaaaaaaaaaaaaaaaaaaaaaaaaaaaaaag

SEQ ID NO: 28977 - DNA, 1970 bp, Glycine max
  Clone ID: TF_GmC88400_1
ggctcgagggaggtcgttgtttcttgattctgtgcccaagcaagtttttatatcatcaagcaccataaagaaacatttcaagtctgatggtcataagaaaagaaaaacggtcaatgcaagcaaggaacatttgaatagtgctacttctggactgggaagagtgaaggaaggagcaaagagttcttctgaagttcctccggtgattggaaagtatacctattgccgcaagaaactgtcaaggaaggagttaatttcctcaaaatctgtagcagaaaatgattctaggccaggtaagcagcctgtggccaagttgaggaaacatttttctggagatgttggtgaggctgcagaggttaaaatagcttctgttatacatggaaagacaaagatgattaaagggaagaaggatacaacttctaagggcaaatcttctgtcagtgtcaatagtagctcacacaatgatcaattatctttaaagaataaagctggtcaaaaagtgttgaagttttcgggtgaagttcaaaatgatgttaaagattttgtaaaatccaatgtaaagaagctttcagcatcaactgataatagcgttgtcatgaagaagattgtcaaaagtgatggcactgttaaagagaaggtcacaagtcattgctccagagagatacaaaatgcaacaatgaaagtatcaaaatcaaaaaggaaacatcaaatggatggtacagcatcttcacatcctacaaaggttttgaaaatttcaaatggtggtgcttatctgggagccagtaaacaagttactgtggcaagtaggaagtctgctaaatccaagccactgaatttgtgtcctagatctgatggatgtgccaggacttctattgatggctgggaatggcataaatggtcccgaagtgccagtcctgcatataaagcacgtgttaggggtcttccatgtgtccagaacaagtgcatagattctgaaaataatttatctcagttgtcaaatggcaagggtctttctgcaagaacaaatagggtgaaattgcgtaaccttcttgctgctgcagagggtgcagatcttctgaaagtgcctcaattgaaggcacggaagaagcatttgcgttttcaaaggagcaagatccatgattggggtcttcttgccttggagccaattgaggcagaggattttgggattgaatatattggagaactgattcgtcctcggatatctgatatacgtgaacgtcagtatgagaagatgggaattggaagcagttacctttttagacttgatgatggttatgtggttgatgctaccaagagaggtgggattgcaagatttgttaaccactcttgtgagcccaactgctatacaaaggttatatctgttgagggtcaaaagaagattttcatatatgcgaaacggcatatagctgctggtgaagaaattacatacaattataagttccccttggaggagaaaaagattccctgtaactgtggctccagaaagtgtcgtggatcattgaattaggctttgattgggtttctgatgctggttgttcttttcaaggtccacttgttaaattgttgagtgggcagaattttttccataggttatactcctgctattgttggatgttgcattctgaagacttgactcttattttatatttcaccttgcatcaaattggatgagttgcaaggtgcttgtttgtgatcataccttgttcattcttgtggacttttttgtggcagttgagtttcttctctcaaaacaatctggtgttcatgggggttattattagcatgttatatttatattacttgatagttgatatagatctggggtggctacctctggattgagataggtgactgccaaaggaatatataggggaatagttgtagagacagtttcctttgtataaagacttgatatgttcatctattaataaatgcgttgccttatacttatt

SEQ ID NO: 28978 - DNA, 1682 bp, Glycine max
  Clone ID: TF_GmC477_1
tcgggaattcggcttaattcggctcgaggggatgaagtatgaggggagtgctgctgggtctggtaaggtgtatgtgtatgatggggtgtataggattgttgattgctggtttgatgtggggaggtcgggttttggggtttataagtttaagctttggaggattgaggggcaggctaagatgggtagtgctattttgaaggaagctaggaatgttaggaggagtgagctggatttgaatcccacatctgcttgatgtttcaaataggaaggagaatgtggcggttcggcttttcaatgacattgatgctaactatgaccctctgcagtatgagtatcttgtgaagacaaattttccgcagtttgtgttccatcagagcgggagggggacaggttgtgagtgtgcggacgggtgtgttgaggggtgcttttgtgccatgaagaatggaggggattttccttataatcagagtgggattctcttgagagggaagcctttggtttttgagtgtggcccattttgtcgttgtcctcctcattgtcggaaccgtgtcacgcagaaggggttgaaaaataggttggaagtgttcagatctagggaaactggttggggagttaggtccatggaccttattcaagctggtgcttttatatgcgagtacacaggggttgttctgactagggagcaagcacggcttttgactatgaatggtgattccttgatatatccaaatcggtttactgatagctgggcagaatggggggacgtctctttgatagactccaattttgtgcgtccatcatatccgtcaatacctcctttggattttgctatggatgtgtcaagaatgaggaatgttgcttgctatatgagtcatagttcaactcccaatgtgttggttcagtttgttctgtatgatcacaataatttgatgttccctcgccttatgctatttgcgatggagagcatccctccgatgagagagctcagccttgattatggggtagctgatgagtggacaggaaagctctctatatgcaatgaatgattttgaaagtttcatacactttataatatactgaagctgactttcgggcattgtttgcagagatagtcaagttgatgcagcacaagttttcaacactgccaatttacaaagagcagtagtagaattgcttgctatacgacggtgtcaggaaatcaaaattcaaatataaagaaatgtctattacgttattctggtttttatctaactgtcaatggctagtacacggtgctcctctggtgaggaaggtcaagaattgaagttcccatttctgcttaatcttgaagacttcagtagttttctcacttgttgatgccatttgtttgttctgtaattgttgatgtcttcctcagctcggcgaagcattttcaaatcacatttttgtaagcaataatagtgcaagctgtattaactctttcttcttttggagaacttgtttgtatatagtataatttcaaagcttgtaaaggttttataatagtgactggtatcggatgcaacattttaattaatttagaagcgggtaaattgggcatctggatattaagattactaggatatagccattgttgctaatgatcttgtatgaggaaaatcaaattatgatgaaatggacaatttggttgttaatttcaaaaa

SEQ ID NO: 28979 - DNA, 1403 bp, Glycine max
  unsure (1)..(1403): unsure at all n locations
  Clone ID: TF_GmC276_2
atcttgggtttgtaaggcttgtgaaacacctgacatcaagcgggagtgttgtctttgtcctgtaaaaggtggtgctctaaagccgactgatgttgacacattgtgggttcatgtcacttgtgcttggtttcgacctgaagtctcttttgctagtgatgagaagatggagcctgctttgggtattctaagtattccatcaaattcttttgtaaagatttgtgttatttgtaaggaaattcatggttcgtgtacacaatgttgcaagtgttctacttatttccatgccatgtgtgcttcaagggctggttatcggatggagttgcattgtatggagaaaaatggtaagcagacaacaaaaatggtttcttattgtgcttaccacagagctcccaatccagacactgtttcaattatgcaaacccctcttggggtcatttcaaccaaaagccttcttcaaactaagagaaaagctggatcaagattgatttcatctaaaagaataaaggttgaagacacttctcctgcagagaacactagacatgagccattctctctgctaggtgtcgaatatatcgaagaacaaatcatacaaaaaagagagcagcaggtgaagccattgctcatcatgtgaggggtcactaccatcatcctttagatgcaatacagagtttaaatgcagacagaatggtagacaagcctccagcattttcttctttcagggaacgccttcatcatttacagagaacagaaaatgaaagagtttgctttgggtagatcaggcatacatggatggggcctctttgcacgtcaaaatattcaagaaggggaaatggttcttgaatatcgtggtgaacaagtgaggcggagcattgcagatctaagggaggcncgctatagattagaagggaaagactgctatcttttcaagataagtgaagaagtggtagtagatgccactgataaaggaaatatagcacggctaattaaccattcttgtatgcccaattgctatgcaaggattatgagtgtgggtgatgatgagagccggattgtactcatcgctaagactgatgtgtctactggtgatgagctaacgtatgactacttgtttgatcctgatgagccagatgaatttaaagtcccttgtttatgtaaagcatcaaactgccggaaattcatgaattaggatttattcagatcatgatgatagtattgcttctccgcaaggagcagtagcacatccccctcatcagtgggaacctcagttacacccaagctgtaattttaatcaaatcataagagaagtataggaaaaaaaaattgtggcataggtttgtcttctatccttctaatattctattatttgacattcatcaaggcctaataaaagatacagatttacc

SEQ ID NO: 28980 - DNA, 696 bp, Glycine max
  Clone ID: TF_GmC230545_1
ggtccggattcccgggtcgacccacgcgtccggtttctattactcctccgtcccgcggtccgaacggaccaactccaccgccatcttcggcgtcattgtaactgtacttcaccagcaccactaaccggaaatctggcccttgccagaaaatttatccgccagtgctggcggaggtcttctctttccacttggaaccgctaactgcattcgaagtttgttgatcattacgcatttttgcagtacaggttacaatacaaccatttgctctgatggatcctcatactgaagagttgcctcagtacatacatataaatcagaatgagttttgcatacgaaggcataagaagcagaaggaggaggatattgctatatgtgaatgcaaatatgatgctgatgaccctgacaatgcatgtggggatagctgcctgaatgtattaaccagcactgaatgcacccctggttattgtcattgtgatatattatgcaaaaatcagaaatttcagaagtgtgaatatgcaaaaacaaagttgtttaaaactgaaggccgtggatggggtcttttggctgatgaggatattaaggcaggacaatttgtcattgaatactgtggacaagggatatgatggaaagaagccaaacgtggatgccaggcttatgaaaatgagggtcttaaagatgcatttatcattttcctta

SEQ ID NO: 28981 - DNA, 555 bp, Glycine max
  Clone ID: TF_17020590
gctaggttcatcaaccatagttgtgatcctaacctatttgttcaatgtgttctgaactctcattatggggtcaaacaagctcgactcgtactatttgcaggaagaaacattcgtcctaaacaggaacttacttatgactatggttaccgacttgatagtgttgttgatgccgatggaaaaatcaagcaattgccatgttactgcggtgaagctacttgtcgcaagcgtttatactagttcggtaacacagcaatgcacatttgtctgattttagagtggagttattacacaaaattgtgtttaaaaatgatgacccaaaatttgaaagcgtgtatgagttgattaaatatggatcttgggtttgcttgaatgtctaataagatgaacaatttttccttttctttttatgattgatcgatgaacctcatgaaagacttcaaggaaattgagtcaattgctgtataagaagggttgaatgttatttggcatggctactatgtttggttttatatcatggcccttattacccctcatttaatacattgattttcttgc

SEQ ID NO: 28982 - DNA, 1351 bp, Glycine max
  Clone ID: TF_GmC143160_1
ccacgcgtccggaaaaaccaaaacggggaccgcttttggtagatgatgatgatgacgacaaggatttgcaaacaatggacagttcaagtcaaatgttaagtgcagaagacaataaaatatcaccaaagacatttgaccagaaaatcattgagtcctctcaaacattcatgaaagatattaagcccaaaaccagttcacaagcatcacatacaatgttgagtgaggtagaaaagatctcaaatttacctcgtgtggcagctaaagacagaaaatcataccctgagaatgcatcatctgcagttgagaaagagctcgtgaagccaagaactaagaaactcaagatgcaacttgcttcaacgaatcatattggtttacctgatgcgtcggatgaaaaactgtgtctcaaacctctgtcaactcaggatcaggatatggaaagtaaagatgatgttatatccgcctgcgaccgtaataccccagcttataatggaaatattacgattgctagttcttcacgtctgggagaagtaaaaatatctttgaattgtgactctgcgttgggacaaccaaacttcagtattcctaatttggatattgttatgaagttcatggacaagaagtacattcgctcttgcaacgctgttgagcctcaattttctatggcaaagctattggatgacctttgcaggatttatctcaagttgggatatcgaaagggatcaaattccaagcgtgccaatttacagcaatatgttaatcaaggtgaaaggaatccctttcgttttatcagtgacataacaaaaggttcagaaaaggtgaaaatatcattaatagatgaaactggcagtgaagacttgccaaagtttaattacataccatgtaatataacttatcaaagtgctaatgtaaatatttctttggctcggatttcggatgagggttgctgttctgattgttcaggcaactgtctttcctcaccattgccttgtgcatgtgctcaggaaactggtggagagtttgcttacactcctcatggtttgttgaaagaagaatttttaacagcttgtgtatctatgaagaatgaacctcaagaccatcattatgtgtactgtcaagagtgccctttggagaagtccaagaatgagtacatgcccgaacgatgcaagggccatatggttagaaaatttataaaggaatgttggagaaaatgtggatgtgacatgcaatgtgggaatcggatagtgcaacggggcatagcatgcaaattgcaggtgttttcaactcgtgaaggaaaaggctggggccttagaacgttagaagattacccaaagggaactttgtatgtgatatg

SEQ ID NO: 28983 - DNA, 307 bp, Glycine max
  Clone ID: TF_LIB3049-034-Q1-E1-G9
aggggaacatataggtgtcgtatcgatgattaacgagtcattgttgcaactagagcaggaagcattgcacatttaattaagcaatcgtgtgcacgaaattgctattccagagttatgagcgttaatggctatcagcataatacaatatttgcgatgagggacattaaatagtgggaagagcttacctatgatgacaggattttctcaattgatgaacgacgtccttgttactgtggcttcccaaagtgcctaagtatactaaatgatactgacgcagaagaacgagctgctaccctatatgcaccac

SEQ ID NO: 28984 - DNA, 1265 bp, Glycine max
  Clone ID: TF_GmC78230_1
attatgttgccgcggaaaaaggagattacttatctatgcaaacatgactgagcatcagaagaatttgcaggatcatttagttaataagacgttggggaactatttgaaagaaaatatgtcaagtggactttctgttcctgcaattatgattcgtaatttggctattcaacttaggaaggtgtgtaaccatcctgatctccttgagtcagcatttgatgattcatatttgtatcctcctttggaagagatagttggacaatgtggaaaattccatttgcttgatcgattgctgcaacgtttattttcaaggaatcacaaagttcttatcttcagtcagtggactaaagtgttagatataatggattattattttagtgaaaaaggctttgcagtttgcaggattgatggtagtgtgaaactggaagagaggaaacaacagatccaggacttcaatgatgtaaatagcaattgtagagtttttcttctttctactagggctggtgggttgggaatcaatctcactgtagctgatacatgcattctttatgacagtgactggaatcctcaaatggatttacaagccatggatagatgtcatagaataggccaaactaaacctgttcatgtttacaggctctcaactgcccaatctatagagggtcgcatgttgaaaagagctttcagcaaattaaagcttgagcatgtagtgattgagaagggacagtttcatcaagaacgtacaaaacctgccagtatggatgaaattgaggaagatgatgttttggcattgcttcgtgatgaagaaacagccgaagataaaaagatacatacagatattagtgatgaagacctggagaagctcttggatcgcagtgatcttatagtcaacgactcaaacgatgataacttcaaagctccagtcagtgcctttcctcttaaagggccggggtgggaggtggtgattccaactgcgactgggggcatgctctctactcttaactgctagtttcttgtcactatttatggccggagtataaaaaacttgctttttgtggtataagatggaatggctttttgaaacattcttttatgtcacggtggtaatgccctggatggcattcattttttgtagatgcttctaacggaactatgtttagaaatgaagctactctggatatgttttttgcgagttggaattgaacattctacttgtgtagtggcgaaagtgaattggtttggatacaataaaccttaatttaacagtt

SEQ ID NO: 28985 - DNA, 743 bp, Glycine max
  Clone ID: TF_GmC636412_1
acaattaagaacaagatatctcttgctgagttgtttgatagtaatcgtgggcagctcaatgagaagagaattctgaatttaatgaacattgttattcaactaaggaaggtttgcaaccatccagagttgttcgaaaggagtgagggaagcacatacctttactttggagagattccaaattcccttccacctcctccatttggggagatggaggatgtatattattctggtggtcacaaccccatatcatatgagataccaaaacttgtctatcaagaaattatacaaagttctgaaactctcagctcagctgttggtcctgttgtctccagagaatcttttcataaacattttaatatttttagacccgaaaatgtttatcggtctgtcttctcagaagatatgtacagtaaaagtggaaattttggttttacccatatgatggatttgtctccacaagaggtgacatttctggctactggttcttttatggagcgactactattttctatgatgagatgggaacaaaaattcattgatgaagctgtagactttctaacggagaccatagatgatgatccggaatgtagttaccttgagaaagaaaaagtgagagcagttacacgaatgttattggtgccatcgagatctgagaccctggttcttcaaaaaaaattccaaactggacccagccatgccccttttgaggccttggttgtcccccatcaagatagggtgttatc

SEQ ID NO: 28986 - DNA, 617 bp, Glycine max
  Clone ID: TF_uC-gmroLIB3259P248f08b1
caactacttaaagagaccgagaagtatcttcaaaagcttgggtccaagctacaggaagcaaagactgcagcaggacgttttgggcaggacgttgatgagacaggaaatgtcagttttcttgagaatagtgaaacagaaaatgtggatgaaagtgatcaggcaaagcattatatggaaagcaatgaaaagtattacaagatggctcacagtataaaggagagcattgcagagcagccatctagtttgctaggcgggaaattgagggaatatcaaatgaatggcctgaggtggctggtttccctatacaacaatcatttgaatggaattcttgctgatgaaatgggactgggtaaaacagtacaggttatttctttaatttgctatctgatggaggcaaaaaatgatagaggaccatttcttgtggttgtgccctcttcagttctacctggttgggactctgaaataaatttttgggctcctggtagttcataaaatgtctatgccggtccaccagaagagaggcgtcggctattcaaggaaaggattgttcaccagaaattcaatgttcttttgactacatatgagtatttgatgaataagcatgatagaccaaagct

SEQ ID NO: 28987 - DNA, 159 bp, Glycine max
  unsure (1)..(159): unsure at all n locations
  Clone ID: TF_700978727H1
cctgcntcngacaggaacaccnttgcagaatganttgaaggaactgtggtcgctttnaaatnnacttctnccagaggtttttgacaanaagaaagccttnaacgantggcttncaaagccanntcaaaaggaaggncccacacaacanacgacgcnnca

SEQ ID NO: 28988 - DNA, 829 bp, Glycine max
  Clone ID: TF_LIB4164-006-Q1-K1-F3
gtccggaattcccgcggtcgacccacgcgtccgattggcctgtgataccctatactgatgttcatctggagtttgtaagaagagttaccattgaccatgtggaaacatatacagtgttgttatctggtatttttgatggacctgatgaaggtgttactggtcttcttcacttggcaagtttgaagtttgttacattgaggccagttcttggggctaggctttctgaggaaatttcctccctccggataagggttgaggtattaaagagtgcctttgatgcatgcgagtcgcttcttgatagttctagacaactatggaaaaagagtatggtgaatgtaatgtcttggctacgtccagaaataatgacttcggaagttaggtatgggtttggtacctgtatgaaaatggaagttgatccgcagatagagatggcagatgacacttgcaaggcaaggaaacatgcaaggttcgatcctgcaggtttctgtgaagccattaagccttcaaaatcagagccaatgctcaaagatgacataccagagttacttcctaaattgaggccatatcaacggcgtgcagctttctggatggtagaacgggagaaagcagtggaagaaagtcggggtgaaagagaaaggaatctgtttcattctccattatgtatacctgtggattttctggacaccagttctcaaatcagtcaaatgtttttcaatccattcagtggaagtatttcattgtgcccagagacttcttcaccttatgtatttggaggcattcttgctgatgagatggggtttgggaaaaactgttgaattgcttgcttgcg

SEQ ID NO: 28989 - DNA, 415 bp, Glycine max
  Clone ID: TF_uC-gmflminsoy021g09b1
cacgcgtccgcccacgcgtccgcggacgcgtgggaagaatgttcagtttgcacccacagttctgtgcggcatttctgttggtggaataaatatgttgccacaccaattcaatcttatggaaatggggatgctgggaaaagagccatgatattgctcaaacacaaagttttgaagaacatagtattaaggcgcactaaaataggcagggctgctgatcttgcacttccacctagaattgtttcattgagaagggattgcttggatattaaagagcaagattattatgaatcattatacaatgaaagtcaggcacaatttaatacatatattgaagcaaatactctgatgaataattatgcctcatatatttgaccttcttacacgactgcgtcaggcagttgatcatccatacctt

SEQ ID NO: 28990 - DNA, 1598 bp, Glycine max
  Clone ID: TF_GmC1170_1
cttattgtcttgtctcaaaatggtggatcaaatagaggaggtttcaatatagtatcttcaagtgccaaaagcagcattcatctggatggactattcaacattatctcatacgatttggtgccaaagctacagaatatgcttatgacatgtaactttaaggttgtgattgctgatgagtcacattttctgaaaaatgctcaggcaaagaggacaactgcttctcttccagtcataaagaaagctcaatatgcattattgcttagtggaacacctgctttatcacgaccaattgaactattcaagcagctggaagctttgtatcctgatgtatataggaacgttcatgaatatggtaaccggtactgcaagggtggattttttggagtttatcaaggtgcaagtaaccatgaagagttgcacaacttgatcaaggcaacagtgatgattcgcaggcttaaaaaggacgttctttctcaacttcctgtaaagcgcaggcaacaagtcttcctagacttggctggcaaggacatgaagcaaattaatgctttatttcgagagttggagatggttaaagccaaaattaaggcagctaaatcacaagaggaggctgaatctctcaagtttgctcaaaagaatcttattaacaagatatatactgattctgcagaagccaagattccatctgttcttgattatgttggaactgtcattgaggcaggatgcaagtttcttatatttgcacaccatcagccaatgatcgattcaatacacgagtttcttcttaagaaaaaagtgggttgcatacgaattgatggaagtacacctgctgcatccaggcaacaattggttactgactttcaggaaaaagattctatcaaggcagcagtgctatctattaaagctggaggcgttgggttaactttaactgctgccagcacagtaatcttttcagaattgtcttggactcctggtgacctaattcaggccgaagaccgtgctcatagaattggccaggtgtcttcagtgaatatatactacttgctagcaaatgacacggttgatgacatcatatgggacgtagtgcaaaacaaactggaaaatttggggcagatgttagacggccatgagaacgccttggaggtctcagctagtctgccggtgaatagcccttcaaagcagaaaactctagaccagtttgttagaagatgtgataacacggatgggttggaatatgagcccaaccccaaacgtccccgaaactgagccttgaaacggtgctcaaagtggagaaagaataatcgcaatattggcactcttgctcgtcccattagaagagggtgtagcttgtcagcacagtttacaactctaaactatgcagctgatgccgaaggagcttaacggttttgaggaatatgtatgggatgaaaatggtgatcaagtttcctaacagattttaggcttaagatttcctgtcccctaaagttgttagtggaaattgtacagagtacatgatcatatgaatgtaacttgtaaattgctttactcaatataatttcgttgccatgtcataaatggtatttaaaaaacaagaaaacagt

SEQ ID NO: 28991 - DNA, 142 bp, Glycine max
  Clone ID: TF_7795170
tattgagtctacctacgaaagggcattaattggcactccccttcaaaaccatgttggggaactgttttctctgattcggttcctgctatttactccttattcctattacttgtgcatggactgtgactgcttgatttttgat

SEQ ID NO: 28992 - DNA, 401 bp, Glycine max
  Clone ID: TF_GmC157_5
atcaaagcaagctaagaaaaagaaaagagaagttaccaaggggaagaccaagaaatctgacagtaagatatcaaagagttctaacacgaaaaaggaagaggaaatgtggatggatgaagaagatttagatgcacctgtgcgtagcgataggtcaattcttcatgctgtgaaatggcagcggatcatattggatgaggcacactatataaaatctagacattgtaacactgctaaagcagttcttgctttagagtctacctacaaatgggcgctaagtggcaccccccttcagaaccgagttggagagctgtattctctgatacggttcctgcaaataactccttattcctattacttgtgcaaggactgtgactgcaggattcttgatcatagcactaaag

SEQ ID NO: 28993 - DNA, 1798 bp, Glycine max
  Clone ID: TF_GmC1248_1
ctgcagccttagagccaaaagaaggtggtgcttatctggaactcctattcaaaatactattgatgatttgtatagctactttaggttcctaaagtatgatccttatgctgtatacaaatcattctacaatacaataaaagttccaatatccaaaagtactattcaaggttacaagaaacttcaagcagttttaagggccataatgctacgtcgtacaaaaggaactttgcttgatgggaagccaataatcaatttgcctcccaagacaattgagctaagtaaggtggatttttcgattgaggagcgagcattctacaccaaattggaatcagactcgcgtcttcaatttaaggcatatgctgctgctgggacagtgagccaaaactatgctaatattcttttaatcgcttttacgtctccgacaggcttgtgaccacccgcttcttgttaaagattttgattctgatcctgttgggaaagattctgttgaaatggcaaaaaatcttccaagggatatgctgattaatctttttaattgtttggaagcaacatttgccatatgtcttgtttgcaatgatcctcctgaagagcctgttattacgatgtgtggccatgtcttctgttatcaatgtgtatcagaatatttgactggtgatgataacatgtacccttcagttaattgtaaagaactaattggcgacgatcttgttttctccaaagctactttgagaagttgcatctctgatgatggtggcagtcttagttcagcaaattcacatctttgtgattattcactagtgcagcagcgtgactacacttcatctaaaatcaaagctgttcttgaggttctgcagtcaaattgtaaattgaagatttctagttctgacttactgaactcctctggaggttgtagagattcaccgtcttcggataatttatatgttgaagactgtgattcagatgttagggttacaaaacacacaataaagtattcagagtccacaactgaaggaccaataaaggctatagttttttcccagtggactagcatgttggacttagttgagacatcattgagacaatttagtatacagtaccggagacttgatggtaggatgactctgggtgcgagggacaaagctgttaaggatttcaatactgaacctgagattgctgttatgctgatgtcactaaaagcaggaaaccttggtttgaatatggttgctgcatgtcatgttatacttttggatctttggtggaatccaacaactgaagatcaagctattgatcgagctcacagaattgggcaaactcgtcctgttactgtgacacggatcactataaaagatacagttgaagataggatactggctcttcaggaagataagagaaaaatggttgcatctgcttttggggaagaccatgctggcggtactggaactcgcctcacagtagatgatctgaagtatcttttcatggtctagactctagaccactccttgcttgttctccccatttgaagttttgggcggtttggcatggagttaggagttaggacttaggatggttcttaaggagggtatggctgttttttcagtgcctgctgacatcggttgcacaagttggcaggcgaggccaggcttgcttgatccaagtcgtaacttgatctgttttgaagtccacaagggcatttttgtcctccaaactgctatatagctgaaggctgtgtctgtaaatatactaattaaattatatggtttatgaaaatatgtccttgcgcaactgccctttctgttgt

SEQ ID NO: 28994 - DNA, 654 bp, Glycine max
  Clone ID: TF_GmC154492_1
ggaagtttagaggagtttcaggaagagtttaaggatatcaatcaagaggaacagatttcaaggcttcataaaatgttggccccacatctcctgcgaagagtgaagaaagatgtcatgaaggagctacctcctaaaaaggagcttattctacgtattgaattgagcagcaaacagaaagaatattataaggcaattttgactcgcaattatcagatattaactcgtcgtggtggtgcacagatttctcttatcaatgttgttatggaactgcgtaagctctgttgtcatccttacatgttagaaggagttgaaccagatattgatgacgcaaaagaagcattcaaacagctgctggaatcatcggggaagttgcaattgctggacaagatgatggtgaagcttagagagcaaggacatagagtcctcatatattcccaatttcagcacatgctggacttgcttgaagattactgtgcgtacaagaattggcagtatgaaaggattgatggcaaggttggtggagctgaaagacaagttcggatagatcgattcaacgccaaaaattcttcaagattttgctttcttctttctactagagcttgggggcctggagataaaccttgcaactgctgacacagctattatatatgatag

SEQ ID NO: 28995 - DNA, 3274 bp, Glycine max
  unsure (1)..(3274): unsure at all n locations
  Clone ID: TF_GmC1755_1
ngaggggnnggngncgctcgaggcactaatgaaaagccagttactatgtctattgagtctgttaacgatcctcagaccttgattaacaatatccaggtggtgcgttctgttgctcccgtcttaaatgaagagttgaagccaaaactgttgacacttcttccatgtatttttaaatgtgttcagcattctcatgttgcagttagattagctgcttcgcgctgcatcacttccatggcacagtcaatgactgtgaaagttatgggagctgtggttgaaaatgctatccctatgttggaagatgcatcatcagtttatgctcgacaaggagcaggcatgttgattagttttcttgttcaggggctgggtgtagagttggtaccttatgctcctctattggtggttccgcttctaaggtgcatgagtgattgtgatcagtctgtcagacagagtgtgacccatagttttgctgctcttgtacctttacttcctttggctcgaggccttcctcaaccaattggattaggggaaggtgtatctagaaatgcagaagatttgcagtttttggagcaactacttgacaactctcatattgaagattacaagttgtgcactgaactgaaagtaacattgaggaggtatcagcaggaaggcataaattggttagcttttttgaaacgtttcaagcttcatggaattttatgtgatgacatgggacttggaaagacacttcaagcatcagcaattgtggcctctgatatagctgagcatcgaacttcaattgggaatgaggatcttctgccatctttaattatttgcccatcaactctagttgggcactgggcctttgagatagagaagtatattgatgtttctgttatctctagtcttcaatatgttggttctgctcaggagcgaatgcttcttcgggatcatttttgcaagcataatgtcatcataacgtcatatgacgttgtccgtaaagatattgattttctaggacagctgttgtggaatcactgcatcttagatgaagggcatataatcaagaatgccaagtctaaagttacacttgctgtaaaacagttgaaagcccaacaccgcttgatattgagtggtacacctatacagaataacatcatggatttgtggtccctttttgattttctgatgcctggatttcttggaactgagagacagttccaagccacatatggaaaaccacttttagctgcaagagatccaaaatgttctgctagggatgctgaagcaggagcacttgctatggaggcattgcataagcaggtaatgcctttcctccttcgtaggacaaaggatgaagtcttgtctgatctgcccgagaaaataattcaagacagatactgtgatttgagccctgtacaatttaaactttatgaacaattttctggttctcgtgctaaacaagaaatgtcatctgttgtaacaacgaatgagtctgctgcagcagaaggaagtagcagttctactaaagcatcttcacatgtattccaggcgctccaatacttgctaaaactctgtagtcatccattgcttgtcattggtgagaagattccggagtcactttctactatcctctcagaactgtttcctgctggctctgatgttatttcagaacttcacaaactctatcactccccaaaattagttgctcttcatgagattcttgaagaatgtggaattggagttgacaattctggttctgagggtgcggttaacgttgggcagcatagggtcttgatattcgctcaacataaggctttcctggatataattgaaagagatttgtttcacacacacatgaaaagtgtcacatatttgcggttggatggatcagttgagccagaaaagcgttttgaaattgtcaaagctttcaattcagaccctatcattgatgtcttgctgcttacaacacatgtcggtgggcttggtttgaacctgacatctgcagatacccttgtttttgtggagcatgactggaaactgatgcgagaccatcaggtctatggatagagcacacaggttaggtcagaaaaaagttgttaatgtccatcggctaataatgcgtggtactctggaagagaaagttatgagtctacaaaggttcaaagtgtcagtggctaatgctgtcattaattctgaaaatgctagcatgaaaacaatgaatacagatcagttgcttgatttgtttgcgtcagcagaaacctccaagaagggcgcatctgttgtgaagagtccagagaacaactctgatggagacgctaaattagtaggcagtgggaagggattgaaatcaatactggggggattggaggagctatgggaccaatcacagtatacagaggagtacaatctgagtctctttttagcaaggcttaatggctaatgttccagattcatttcagagtcagagtgtacatatccatgagtacaaattttggcattgtaacatcttattttttttcccaccatgcccttcagtcatttttggtcgtcactttttttgtataccccaatgctggctggaatctgctcgtgtgcatgcagaccaggtaaatcagtgtctgtattttacagggcatttgagtgactggtggaagcccttggtggtgatatgtagagaaatgaatcggtgacggcttcaggagggatggagtaatattttttggattttgtacatatacagtcaatcctaattatagttataattgttgctaacataaaaaatgccctgcattttgcaatgttatttggaaagctactaataccaaaatacccattcagagaacaactcttatggagacgctaagttagtaggctgtaggaagggattgaaatcaatactcgggggattggaggagctatgggaccaatcacaatatacagaggagtacaatctgcgtcaatttttagcaaggcttaatgactaatattccagattcatttcagagtcagagtgtacatatccatgagtacaaattttgccattgtaacatctcaatttttttcccaccatgcccttcagtcattttttgtcgtcactttttgtataccccaatgctggctggcatctgctcgtgtgcatgcagaccaggtaaatcagtgtctgtattttacagggcattttagtgactagtggaagcccttggtggtgatatgtagagaaatgaatcggtgacggcttcaggagggatggagtaatattttttggattttgtattaaactttatgaacaaat

SEQ ID NO: 28996 - DNA, 267 bp, Glycine max
  Clone ID: TF_701101675H1
attgcaggatatcagtcaacctaaaacagaatatgacttacctgctggtgtactgtctgtctctcttctgagacatcagaaaattgcattggcttggatgcttcagaaggaaaccaagagtttgcattgcttgggggggattttggctgatgatcagggccttggaaagacaatttcgatgatttccctcatcctggcacagaggacattacagtcaaaatcgaaaatagatgatacatgcagtcataaaactgaagctttgaattt

SEQ ID NO: 28997 - DNA, 443 bp, Glycine max
  Clone ID: TF_GmC129655_1
acgcatgcaggagatgtgtcgatttggggttaagaactgtgcttatagtcacacctgtcaacgtgctacataattggcgtcaggagttcatcaaatggagaccttctgagttaaagccactcagggtcttcatgctggaagacctatcgagagatataagggcacaattgcttgcaaaatggagatctaaaggtggtgtctttttgattggttatgctgctttccgaaatttgtcttttgggaagcatgtgaaagatctgcacatggccatataaatttgccatgctttgcatgatggaactgacattcttgtttgtgatgaagcccatatgataaaaaatactaatgatgacgtaacttaagccttgaaacaagtaaaatgccagagaagaattgcacttactggatcacctattcaaaacaatctcatggaatatcactgt

SEQ ID NO: 28998 - DNA, 428 bp, Glycine max
  Clone ID: TF_7589119
cgtgttcttcataattatgcttcaatattggagttacttttacgtcttcggcaatgttgtgatcatccatttcttgtaatgagtcgaggtgatactcaagaatttgcggatctaaacaaactagccaagcgcttccttagaggaacctatactgcttcagaaggtgaagtaaaagatacaccttcacgggcttatgttcaagaagttgtggaagagctacgtaaaggggagcaaggagagtgtccaatatgtcttgaagtatttgaagatgcagtgttaacgccttgtgctcaccgcttatgccgggaatgcctcttgtcaagttggcgaaatgctacatctggcttatgtcctgtttgtaggaaaacaatcagcaggctggatcttatcactgcccctactgagaatcggtttcaggtggatattga

SEQ ID NO: 28999 - DNA, 620 bp, Glycine max
  Clone ID: TF_GmC423697_1
cagaaatcgaaagattcaatagattgcggtttagatccagcaagttttcctctggtaaacaaaaaaacagtgttaaggatgatgcttaattgaagaaacagcagaaagaatttcaacattatactcaaagtcctgtgtttctttctgaaggtacattacatccatatcagcttgaaggcttgaacttcttacgattctcttggtccaagcagactcatgttatacttgctgatgaaatgggacttggaaaaaccatacaaagtattgctttcttagcatcactttttaaagagggtgtctctccacatctggtggttgctccactttcaactttgcgaaactgggaacgtgaattcgccacatgggcacctcatatgaatgtgctaatgtatgttggatctgcccaagctcgtagtgttataagagagtatgaattttactttccaaagaaacagaagaagatcaagaaaaagaaatctggtcatttaattagtgaaagcaagcaagacaggattaagtttgatgttcttttgacatcatatgaaatgatcaactttgacacagcatcactaaaacctataaaatgggagtgcatgatagttgatgaaggtcaccgtctc

SEQ ID NO: 29000 - DNA, 452 bp, Glycine max
  Clone ID: TF_GmC131581_1
ctcgagccgaatcggctcgagggctgcgagaagacgacagaagggcatgacaattgctttgatactcagtaaccaggcaggggtaactcagaaaacaatgatgtggagaatggagatgataattttatcacaaataaaagaaagaatgctaataccttacataaatttgagggtggcactcttattgtttgtcccatggctttgttaagtcaatggaaggatgagcttgaaacacattcaaaggaaggtagtatatccatatttgttcattatggtggagcaagaaccactgatccctggatgatctcaggccatgatgttgtcttgacaacgtatggtgtcctacaagctgcatacaaaaatgatggagagaatagcatctacaacaaggtcaagtggtacagggtggtgctagatgaagctcataatataaaagcccatcggaatcagac

SEQ ID NO: 29001 - DNA, 518 bp, Glycine max
  Clone ID: TF_GmC2542_21
gcgctcgtgaggctgctatggcagttcaaggaaagatggtagattctcagcgtaagaagagcaaagcaagtttgcggaagcttgagaaacaacctgaatggttgaagggtggagagctccgtgattatcaacttgagggtctgaattttcttgttaacagttggagaaatgatacaaatgtcattttagctgatgaaatgggccttggaaaaactgttcagtcagtatcgatgcttggttttctacagaatgcccagcaaatccatggtccttttcttgtagttgttccattgtccactttatcaaattgggccaaagaattcaggaagtggcttcctgatatgaatattatcatatatgtaggtactcgtgcaagtcgagaggtttgtcaacaatatgaattttataatgagaaaaaacctgggaagccaataaaattcaatgcactgttgactacatatgaagtagttttgaaggataaggctgttctctccaagatcaaatggaattatctgatg

SEQ ID NO: 29002 - DNA, 1170 bp, Glycine max
  Clone ID: TF_GmC189298_1
agggaaacacaaggttgaaaatgagctgcctgaaaagattgagagactaataagatgtgaggcttcatcatatcaaaaacttttgatgaagagggtggaagaaaatcttggcgctattggcaattcaaaggctcgatcagtgcacaactctgtcatggagcttcgtaatatatgcaatcatccatatctcattcagtttcatgcaaaggaggtggataacttcatacctaaacattatctgccaccaattattagactttgtgggaagcttgagatgtaggaccgtttattaccaaaactgaaggcgacagatcatcgggttcttttcttttcgacaatgactaggcttttggatgttatggaggaatacttaacttcaaaacagtatcgctatctccggttggatgggcatacatcaggaggtgatcgtggtgctctgattgaactatttaaccaacccggttccccatattttattttcttgctcagcattcgagctggtggcgttggagtgaatcttcaagctgctgacacggtgatcttatttgacactgactggaacccacaggtggatctgcaagctcaagcaagggctcatagaattggtcaaaagagggatgttcttgttcttcggtttgaaacggttcaaaccgttgaagaacaagtcagggcttcagctgagcacaaacttggcgttgctaatcagagcattactgctggttttttcgacaataatacaagtgctgaagatcgaagagaatacttggaatcactcctgcgtgagtgtaagaaagaagaggttgcacctgttttggatgatgatgctctaaatgatctcttagcccgaagtgaaacagagttggatatatttgaggctgttgacaaagaaaggaaggaagatgagctggctacatggaagaaattagtgcttggacaggccgctgatggctctgactctgatattcctccacttcctgctcgtctggtcactgatgaagacctgaaacagttctatgaagcaatgaagatatccgatgtgcctaaggctgaggtagaatctagtggagtaaagagaaagggtggatatattgggggccttgatactcaacattacggcaggggaaaacgtgcaagagaggtacgttcctatgaagagcaatggacagagga

SEQ ID NO: 29003 - DNA, 2296 bp, Glycine max
  Clone ID: TF_GmC300_1
tggaggattcaggttttaagcctctgctcaagccgtatcagttggttggcgtcaattttttgctcctactgtatcggaaggggattggaggagccatattggcagatgaaatgggtcttggcaaaacagttcaggccatcacatatttaactttgttgaaacacttgcacaatgattctggtccacatcttatagtatgtcctgcttctgttctggaaaactgggaaagggaattaaaaaggtggtgtccatccttctctgttcttcaataccatggggctggacgggcagcatactgcaaggagttgaactccctgtccaaggcaggattgcctcctccatttaatgttcttcttgtgtgttattcactttttgaacgacacagtgcacagcagaaagatgatcgcaaaatcctgaagcggtggaggtggagctgtgtgaagaaagctggtattagatgctgctgttctcgagtccatggaggagattaaaatctaatgtctgtccgagaaaatgatgggagaggcttgatgctgcaattgtattgagttaaaaatgagatctaagaaaaacagtttaagttggagtcacttcattcctatatttttaatcttgaagatgttgacctaaaaaagttacaaaatgcagaagatggagatttatgtggtcgtatgaagtccatcttaggtccatttattttgcggcgactgaaatctgatgtgatgcaacaacttgttccaaaaatacagcaggttgaatatgttataatggaaaagcagcaggaaactgcttacaaggaagccattgaagagtatcgtgctgtttcacaagctcggatggaaaaatgttccaatcttaattcaaagagtgttcttgaagttcttcctcgacgacagataaacaactattttgttcagttccgcaagatagcaaaccatcccttgttaataaggcgaatctacaatgatgaggatgtcattcgctttgctagaaagctcgagaagacaacagaagggggttttgaatgtactttggacagagttatagaggagcttaaaaattacaatgacttctgtattcaccggcttttacttcattatggtgtcaatgatagaaaggggatccttccagataagcatgttatgctttctgcaaaatgtcgggccttagcagaacttcttccttcactaaaggagggtggtcatcgagccttgatctttagtcaatggacttcaatgcttgacatattggagtggactttggatgtcattggattgacctataaacggcttgatggaagtacacaggtggcggagaggcaaacaatagttgatacgttcaataatgatacttcaatatttgcatgcttactttccacgagagctggtggacagggcttaaacttaacaggagccgatacagttgtaattcatgacatggattttaacccacagattgatagacaagccgaagatcggtgccatcgaattggtcagacaaagcctgtaaccatatatcggctggtgacaaagggaacagttgatgaaaatgtgtacgagattgcaaaaagaaagctagtattagatgctgccgttctcgagtccatggaggagattaatgaaggtgacatgcccgagaagaccatgggagaaatattgtctgcaattttattgagttaaaatattgatctaagaaaaacagtttaatttatcgtcactcctttcctatagttccaatcttgaattaatctgttgatttgggatagaagagaactggcagcctacaaattagtgagattcttctctcctaattatgtttttttctttaactcgagattttgtttaaagggatcgaatacaatacaatatcaattgaccaaccacttgttggttggaatgaggtgtttataccaagaaaaagagagatcagaaataaagaaaaaaaaaacaaatatgataaattatgtataaaaagtcatggcgaagattaacaaatttgttggacattaattattcctgaagcactaatgaagccttaccctttccagtgaaaagagaaatggaggcaaaaaaaaaaacataacaaaaaaaggagcgcgatgagggaaccgaacgagccctaattgaaacgggatttcaagagggagaaaacagaatgctggaactgtattagtggagcgtggtatgcgacgacgaccccttttgacctgtaccaatttctgaccgtgcagtacttgccgctgcataactggtcttcgttaccctgctgtgtccgatggtaaagaaatttaatgctg

SEQ ID NO: 29004 - DNA, 1881 bp, Glycine max
  Clone ID: TF_GmC300_2
tgacgtcctgccgcgtcgtagctcggattcgctcgggccatatggggcgagaaagggtcttggcaaaacagttcaggccatcacatatttaactttgctgaaacacttgcacaatgattctggtccacatcttatagtatgtcctgcttctgttctggaaaactgggaaagggaattaaaaaggtggtgtccatccttttctgttcttcaataccatggggccggacgtgcagcttactgcaaggagttgaactccctgtccaaggcgggattgcctcctccatttaatgttcttcttgtgtgttattcacttttcgaacgacacagtgcacagcagaaagatgatcgcaaaatcctgaagcggtggaggtggagctgtgtgataatggatgaggcacatgctttgaaggacaaaaatagctttaggtggaaaaatctgatgtctgttgcaagaaatgcgaaccaacgcttgatgctgacagggacaccacttcagaatgatctgcatgagttatggtcattgttggagtttatgctgcctgatatttttgcttctgaagatgttgacctgaaaaagttattaaatgcagaagatagagatttaattggtcgtatgaagtccatcttagggccatttattttgcggcgactgaaatctgatgtgatgcaacaacttgttccaaaaatacagcaggttgaatatgttataatggaaaagcagcaggaaactgcttacaaggaagccattgaagagtatcgtgctgtttcacaagctcggatggaaaaatgttccaatcttaattcaaagagtgttcttgaagttcttcctcgacgacagataaacaactattttgttcagttccgcaagatagcaaaccatcccttgttaataaggcgaatctacaatgatgaggatgtcattcgctttgctagaaagctacatccgataggtgcttttggttttgaatgtactttggacagagttatagaggagcttaaaaattacaatgacttctgtattcaccggcggtggcatgattatatgctgagattgagctactccatggataatgtaggccttagcagaacttcttccttcactaaaggagggtggtcatcgagccttgatctttagtcaatggacttcaatgcttgacatattggagtggactttggatgtcattggattgacctataaacggcttgatggaagtacacaggtggcggagaggcaaacaatagttgatacgttcaataatgatacttcaatatttgcatgcttactttccacgagagctggtggacagggcttaaacttaacaggagccgatacagttgtaattcatgacatggattttaacccacagattgatagacaagccgaagatcggtgccatcgaattggtcagacaaagcctgtaaccatatatcggctggtgacaaagggaacagttgatgaaaatgtgtacgagattgcaaaaagaaagctagtattagatgctgccgttctcgagtccatggaggagattaatgaaggtgacatgcccgagaagaccatgggagaaatattgtctgcaattttattgagttaaaatattgatctaagaaaaacagtttaatttatcgtcactcctttcctatagttccaatcttgaattaatctgttgatttgggatagaagagaactggcagcctacaaattagtgagattcttctctcctaattatgtttttttctttaactcgagattttgtttaaagggatcgaatacaatacaatatcaattgaccaaccacttgttggttggaatgaggtgtttataccaagaaaaagagagatcagaaataaagaaaaaaaaaacaaatatgataaattatgtat

SEQ ID NO: 29005 - DNA, 450 bp, Glycine max
  Clone ID: TF_GmC128210_1
ccattgctgaataagtgcagcaatgcccaaaaatttgaactagaaactttgaatctggatgcagatgatgatcagcttcctgagaatggaatagtaaagaacgaatctaatatgtgtcaggatttgtctagtagaaatccaaaccagaacatgaatttgttagtgcctgcgaagggaaggccatctgcaggaacccttattgtttgtccaacaagtgtcctgcggcaatgggccgaggagttgcacaataaggtaacctgcaaagcaaaactctctgtgctagtatatcatggaagcaatcgaacaaaagatccttatgagcttgccaaatatgatgttgttctgacgacttattcaattgtcagcatggaggttcctaagcagccttttgttgacaaagatgatgaagaaaaaggaacttatgatgatcatgcaatatcaagtaagaaa

SEQ ID NO: 29006 - DNA, 575 bp, Glycine max
  Clone ID: TF_7685168
acgcgtccgcagatgatgaagatgcactggttgactcttcagatgtgatgcccgatgaggaggtagatcctgaagaggctgaattgaagaaggaagctttgaaggctgcacaagaagcagtttctaagcagagaatgttgacaagtgcttttgacactgaatgcttgaggctgcgccaagctggtgaaactgattcacttccaccagatgttgctggagcgagtaatattgatttgcaaaccccctccaccatgccagtggcatccactgttcggacacctgaattatttaaaggggttcttaaagaatatcagctaaaaggtcttcagtggcttgttaattgttatgagcagggtttaaatggtattctagctgatgagatggggcttggaaagaccattcatgccatggcttttttggcccatttagctgaggaagaaaatatatggggaccttttctggttgttgcacctgcttctgtattaaataattggaatgaggaacttgagcgcttctggcctgcactgaaaagacttccatattggggtgggctttcagataggacaggactttgg

SEQ ID NO: 29007 - DNA, 637 bp, Glycine max
  Clone ID: TF_LIB4167-054-R1-K1-B3
ccacgcgtccgctttagaggaaggctaaaaaggcagttgctgccatgctgacaagatctaaagaaagtgagaagactgaagatatgaacatgactgaggaagaaagagttgagaaagagcagaaagagctcatgcctttactcacaggtggaaaattgaagaattatcaactgaaaggtgtaaagtggttgatttccttgtggcaaaatggattgaatgggattcttgctgatcaaatgggtcttgggaagacaatccaaacgattggatttctctcacatctaaaagcaaaaggtctggatgggccgtacatgataattgctcctttatcaaccctctcaaactgggtgaacgagatttctaggtttgcaccatcactccctgccgttatctaccatggtgacaagaaacagagagatgatatccggaggaaacatatgcccactagaacaattggcccgcaatttcctatagtcataacttcttacgagattgctttaaatgatgccaagagatatttcaggtcatacaattggaaatatcttgttgttgatgagggacacagactcaaaaactcacaatgcaaattagtgaaggcattgaaattcataaatgttgaaaacaagcttctttttac

SEQ ID NO: 29008 - DNA, 2892 bp, Glycine max
  Clone ID: TF_GmC795_1
ccacgcgtccgggcatggcattgaagctaaaggcatcgtgcaacacgggccgagaaattgagattccaatccttaaatgccgatgttcaggaagcttacatgagaatggtaaaagagagtaataatgaaagattgactttgcttcttgaagaaacaacttgattacttgtaaatttgggagtagcggatcaagcatataacaaataaaaacaatgctaagtcatggaactctatgaagattcagaatcgaatttccctgagtccgctggattaaagaatgtaatttctaaggaatcccctcttgaggaagatgtggatttaatagattctgatcgtaacggtggtgatactagtgatttacttgaaggtcagcggcaatacaattctgccatacattcaattcaagaaaaggtaagcgagcaaccatctattcttcaaggtggagaattaagaccataccaactagaaggcctccagtggatgctttctttgtttaataacaatttaaatggaatattggctgatgaaatggggcttgggaagacaatacaaaccatctcattgatagcatatcttatggaacacaagggtgtgactggtcctcacttgattgtggctccaaaggctgttctgccaaattggatcaatgaattctcaacatgggctcctagcatcacaaccattctttatgatggacggctggatgagagaaaagcaatgaaggaagagttgtcaggggaggggaaatttaatgttctgataacacactatgatcttataatgagagataaagcatttctcaagaaaatccattggctctacttgattgtggatgaagggcatcgattgaagaatcatgagtgtgctctagcaagaaccctggactctggctatcacattcaacgaagactgctgttgactggtaccccaattcagaacagtttgcaggaattatggtccctgctcaattttctccttccaaacattttcaattcagttcagaatttcgaggactggtttaatgctccctttgcagaccgagtggatgtctctctaactgatgaagaacaactattgatcattcggcgtctgcatcaagtgataaggcccttcatattgagaaggaaaaaagatgaggtggaaaaatttcttcctagtaaatctcaggttatactcaaatgtgacttgtcagcctggcagaaagtatattatcaacaagtcactgatgttggcagagttggcttagacaatggttctggaaaatcaaaaagtctacagaacttgacaatgcaactcagaaaatgttgtaaccatccctacctctttgtgggtgactatgatatccataaacacaaggaggagattttcagagcatcaggaaagtttgaacttcttgaccgtttgcttccaaaacttcgtagagctggtcacagagtcctccttttttctcagatgactcggctcatggacattcttgaaatttatctgcgacttaatgattttaaatttcttagacttgatggctcaacaaaaactgaggaaagaggttccctactacggaaattcaatgcacctgattctgcatactttatgtttctcttgagcacccgtgccggaggtcttggtttgaacttacaaacagcagatactgttataatctttgacagcgattggaacccacaaatggatcaacaagccgaggatcgagcacatcgcattggacaaaaaaaggaagttagagtttttgtgttagttagtgtgggatctattgaagaggtgattttagagcgtgctaaacaaaagatgggcattgatgccaaagtcattcaggcagggctctttaacacaacttctacagcacaagacagaagagaaatgttgcaggagattatgcgtagaggtactagctcacttggtacggatgtcccgagtgagagagaaattaaccgccttgcggcccgatctgatgaggaattttggctgtttgagaaaatggatgaagagcgaaggcaaaaggagaattacagatctcgtctcatggaagagcatgaactgccggattgggtatactctccactaaataaggatgataaggtcaaaatatttgacagtggtagtgttactggaaagcgtaaaagaaatgaagtggtatatgcagatacattaagtgacctacaatggatgaaggctgtggagaacggacaggacatatctaagctttcagtcaaagggaaaagaagagaccacctccctgttgacaaccatgcacaagctagtgatgacatggggacagaagaacggttatttagaagtgaagacactttcgacgtgacacctgcctctaagagactcaagcccgaagaaataaattcccagaaacatgaaaacgaagatgtcagtgttggtggtttgaacgagcatatattttcctggaatactcgtagaaagaagagatcaggctaccttggccagggttcattctctgatagtagagggcagaattcaaatggaagagcaaactggaactgatagttctaatttagtcatggatgccagaaattttccctacatttgtattgtgattctgcttcattgtgtttgtcaaggtaaatggtagattacactcgatcagcaaatgtagataccagcaaattccttctggcagttgtgaagtttatcagtgtgaatgtaaaatctaattgatgaaacacatttccccttgttcatttttcaatctgagagaaagaaagagccatgagagagagcaagagagtgtgagaaaaagacctatgttaaaagtatgaagtgatccttggtaattgtaatggagccctttacatttatgaaatatttagatatttccaacaaaaaagttgggttttcctaatcctc

SEQ ID NO: 29009 - DNA, 441 bp, Glycine max
  Clone ID: TF_GmC78074_1
gctcggaagggggctcgagttggaacttctacaaaactcagagaatatgaacttcagtacatacttcaggacaatggagttcttctcacaacatatgatattgtccgcaacaattctaagtccttacaggggaataattattttgatgatgaggataatgaagaaggcgcaacatgggactacatgatacttgatgagggacaccttataaagaacccaagcacacaaagggctaaaagtttgcttgaaataccaagtgctcatcgcattatcattagcggcactcctttgcaaaataacctgaaggagttgtgggcattgttcaatttctgttgcccagagttgcttggtgaccacaaatggttcaaagaaagatttgaaaatcccatacttcgtggaaatgacaagcatgcttctgacagggagaagcgtgttggttca

SEQ ID NO: 29010 - DNA, 541 bp, Glycine max
  Clone ID: TF_uC-gmrominsoy142a11b1
cctattcgtccgagataacttagatcccttagtgaaacgtgctgttgctgcagcgtctgcagttccagatcttcaagatcgataccacaagatccctagttatattgaatcaaagctattgccatttcagcgagaaggtgttaggtttatattacagcatggaggacgtgttctcttagcagatgaaatgggacttgggaaaactttgcaggcaattcactgcctaatattaaatcatttccatacgtccactgtgcattatgatgcatagcagtgttttgcttctttgcaaacaaacatacaattatttgtgctagaagttaaatcttggcaggatttctgcttttctatctaatatctattggtgggttgtaaattttgttatctatcttctacaaattaagaagtgcatcttagtgtcttagatgctaattggctaatgatagaaaacatcctgaatgatacagtaaaatatgtaacttaattaacaattaacactagtacacataaataacatcagtcacagtagcatcttatgagc

SEQ ID NO: 29011 - DNA, 694 bp, Glycine max
  unsure (1)..(694): unsure at all n locations
  Clone ID: TF_LIB4280-051-Q1-K1-E4
ccacgcgtccggagaaacctgtgtctcaagagagtctagagctggcaagagatcaatgtcatcgtcttcattagccttggtctttgaatcttcttcagggatctgcttctcctgagaaacctgtgtctcaagaaaatgataacgtttgggtgttaattcccgaacttaaagcaaagttgcacgcccaccagaagaaagcatttgagtttctttggcaaaacattgcagggtccatggacccgggattgatggaagcagcatccaaaagaagaggtggctgtgtggtatctcatactcctggagcgggaaaaacttttctcatcattgcttttcttgttagctacttgaagttattcccagggaagaggccattagtccttgctccaaagacaacactctatacttggtacaaggaatttatcaagtgggatattcctataccagtgtatctgattcatggtcgtagaacctaccgtgtattcaagcagaaatcctcgattgttattcctggagttcctaagcccactgatgatgtcaagcatgttntggattgccttgagaagatacaaanatggcattcgcacccgagtgttctgatcatgggttatacttcatttttaacattgatgcgagaggattcanagtttgcacataggaaatacatggcttaaggtattgagggaaagcccctggg

SEQ ID NO: 29012 - DNA, 3711 bp, Glycine max
  Clone ID: TF_GmC143184_2
atgatgcatagaaaaagtcatttacgtcaacggaagcatccattccatgcttgtcccttcgaggcatatttgtctcggtcatggcgagctgtggagctcataaaatttgagtctggaactacgaccctatattttgtagataatcaccatatgaccattaagaaaggctccttttcagacgttcgagttaggtcaaggaaagctactttatcagattgctcctttttacgaactgggattgacatatgtgttctctcagcctctcagggtaatgacaattcagatgaatctagtgctaatcatgtgtggcttgatgctaaaataaattccatacagagaaaaccacataatccagagtgctcatgtcagtattatgtaaacttctatgttaatcaaggttcacttggtacagagctgagaactcttaggaaggaggttaaagtagttggaataaatgaaattgccatcctccaaaagcttgaacgtaatacttgtcaacacaaatactatcgatgggaatcatctgaagactgctccaaagtgccacatactaaattgttaggaaaatttatatctgacctttcatggttggttgttgcatctgctataaggaaggtttcattctgtgcaagatctgtggaaaacaatattgtgtatcaaattttagggagtgatgctacaacctcttcattatacatggattctgaaataagtgttgtgaactttaaagtgaacgaagacggcatgcaaatgcctgttattcatctagttgatttatttgagactgacaccaatacaagcggcgataaacatgattcccactatgatgaagtgccatcatcttatggttttgagggcttacgacgatccaaacgtaggaacatacaacctgaacgttactctgattgtggtaatgtttctgagataaaggttggtaatgttcgaacctggccatacaagttaaacaaaaggaaagatgatgatggtggtggtgaagagtcattgccattagcacaagagaatagtgacaatagtcaaaaggtcaatgaactgagttcttgccgggagattatagtgtaccatgggaggaatgaaacgctggaattaaagtcaggtgaggccaatcaaactcaacttgctagtgttcctcttcttcaagaaggtgattcattagcccttgagcatcatcatctcaatgacaatgttactagaagaagtgatgcatattatagcacccctaagcttaagaggaagagattagttgatctggaagctgatgtagattttgatcctggaagggaaggcataaattccaataaaggagttagcgagaaaagacatggttcatcatggtattcaagaagcagaagccatgctgcagaacacagttataaagacagaagcttaaatgcaactgcctacaaggaaatgatagattcatacttgaaggatgtcaatagaacaccaactacagaagagccacctgtaatggaccagcggaaggaaataggcaactttgggcaaaagaaggaagcagaaatacctgaaagagaggacgaggaacaaatctctgagatcgatatgttgtggagagaaatggaaatggcactggcatcaagttatcttgaagaaacagagggttcaaatagtgccaattttgccaagactacggaagaatctaatcgcacttgtccgcatgattacagattgtctgaagaaattggaatttattgctacaaatgtggctttgtgaaaaccgagataaaatatattacgccacccttcattgaaatgcaacgctcagtgaggcaccaagaggaaaagcaatgcaatggaaaagatacaaaggaaaaggctagtaaagatgatgatttccatctgctctcaactcatgctcctacagatgaacataactctatggaacatgataacgtttggaagttaattccccaatttagagaaaagttgcatgaccaccaaaagaaggcttttgaatttctttggcaaaatattggagggtctatggagccaaaacttatggatgcagaatccaaaagaagagggggttgtgtgatatctcatgctcctggagctggtaaaacttttctcatcattgcatttctcgttagctatttaaagctattcccagggaagaagcctcttatccttgctccaaaaggcacactttacacttggtgcaaagaattcaacaagtgggaaatttctatgccagtgtatctgattcatgggcgtggtggaactcagaaagatactgagcaaaattcaattgttcttcctggttttccaaatccaaataaatatgtcaagcatgttttggactgcttgcaaaagataaaactgtggcaagagaaaccaagtgttttggtcatgagctatactgcatttttagcattaatgagagagggttcagagtttgcacacagaaaatatatggctaaagcattgagggaaggtcctgggatcttgatacttgatgaagggcacaatccaagaagcaccaagtcaaggttgaggaaagggttgatgaaactgaaaacagatctaagaatactactttccggtacattatttcagaacaatttttgtgaatacttcaacacactttgcttggcaagaccaaagtttatctccgaagtgcttgatacattagacccgattaccagaaggaaaagcaaaacagtagaaaaggcaggtcatttgctagaatcacgagctagaaaattgttcttagataaaattgctaagaaaattgactcgggtattggaaatgagaggatgcagggtctaaacatgttgagagaaaccacaaatggttttgtagatgtttatgagagtgaaaattttgatagtgctcctggtttacaaatctacacgttgctaatgaatacaactgacaagcagcgtgagattttgccaaaactacacacgagagtggacgagtgcaatggttaccctctagagctagagcttttggtaactcttggatcaatacatccatggttggttaaaacaacctcatgcgcaaataagtttttcactgcagaccaattgaagcagctagacaaatacaagtatgatatgaaagcaggatcaaaagttaaatttgttctgagccttgttttccgtgttatgcagagagagaaagtacttatcttctgccacaaccttgcacctgtgaagttattgatagagttatttgagatgttcttcaaatggaaaaaagatagagaaattctgctgcttagtggggaactagacctctttgaacgcgggaaagtgatagataagtttgaggagcatggaggagcatcaaaggtactccttgcttcaattacagcttgtgctgaaggcattagtttaacagcagcttctagagtgatttttttggactcagaatggaatccatcgaaaacaaaacaggctattgcacgggcttttcgtcctggtcaagaaaaaatggtttacgtttatcagctcttggtaacaggcacattggaggaagataagtacaaaagaaccacttggaaagagtgggtttctagcatgatttttagtgaggcttttgaggagaacctttcacattcgcgagcagtgaacattgaagatgatatactgagggaaatggttgaggaggacaagtctaaaacaattcatatgattctaaagaatgaaaaggcttcaacaaattga

SEQ ID NO: 29013 - DNA, 2396 bp, Glycine max
  Clone ID: TF_GmC290_1
ggctcgagaaaagattctctggagagtcaaaattttactgatgtgaggagaagctctaatggttcaggtactggtggacgggagaaagctattgtgtcttctcagtggacgaggatgctagatttgcttgaagcgtgtctcaggaattcttcgattaactatagagggcttgatggaacaatggcagttgttgcaagagataagagctgttaaagattttaacacttgtcccgaggaaaccgtgattactatgtctttgaaggccgccagacttggtctcaatttggtggtagcttgccatgttcttatgctagatttatgggggaaccctacatctgaagaccaagctttagatacagcacatcggatggcgcacactcgtgctgtgactggctcgaggctaagcgaagatggtgtttgtcagggactcctatccagaatgcaattgatgatctctacagttacttcagatttctaagatatgacccttattctgaccatgcatcattttgtactagaattaagaacccaattagcagaaatccagcaaacgggtatagaaagttgcaagctgtcttgaagacaataatgttacgccggaccaaaggtacacttcttgacggggaacctattatttccttgccgcctaagtatatagagctgaaaaaagttgatttttcaatggaggaacgtgatttctattccaaactagaggctgattcacgtgcacagtttcaggaatatgctgatgctggaactgtcaagcaaaattatgtcaacattttgctgatgcttctgcgccttagacaagcttgtgatcaccctctgcttgtcaagcgatacaattcaaactctctatggagatcttcggttgagatggcaaagaagcttcctcaggaaaaacaaatctctcttctgaaatgtttagaggtttccttggccctctgtagcatttgtaatgatcctcctgaagatgcagttgtctcagtttgtggccatgttttctgtaaccaatgcatctgtgaacatctttctggtgatgacaatcagtgccctgctgcaaattgcaaaagtcaactgagcacatcaatggtattttcaaaagccacactgaacacttgtctttctgaccatggttgttatatttcacccatttatggtggtactgtagcagaagaaactgagccttggtcagaaagtaagccatatgattctctaaaaatgaaggcggcacttgaggtattgagagcaatatagaagaagatcgtgtactaatcctgcagtaatagaaaagatagaagtttgcgtctgcatttggagaggatggaactggcgatcgtcagactcgcctcactgtggatgatttaaaatatttgttcatgatgtgattagacgtacatatttacagatataatctacattttttggattggtgattttttgacctgggggcagatgtcatcttgagtttctttccggtgactgctgacgaaacagaaacagaacatttctagcaagggattggaagtggtaacaaggttgctagtaacttttgacattaagattatatgaagaaatgtttatatgtttagaatgagatgttcattctttgacatggaaattttagtttaatctcacgtatagctagccttgagagtatggtagcttaaagtggaatcctcaaactgaagaccaagcaatagatagagcacatcgaataggccagactcgtcctgtgactgttttgcggttaactgtgagagatacagttgaagatcgtattctagctctgcagcaaaagaagagaatgatggttgcatctgcatttggggaggatggaactggtgatcgtcagactcgcctcactgtggatgatttaaaatatttgttcatgatgtgattagacgtacatatttacagatataatctacattttttggattggtgattttttgacctgggggcagatgtcatcttgagtttctttccggtgactgctgacgaaacagaaacagaacatttctagcaagggattggaagtggtaacaaggttgctattgacttttgacattaagattatatgaagaaatgtttatatgtttagaatgagatgttcattctttgacatggaaattttagtttaatctcacatctttgtaggatgtagagagcagtagcatatatagcaacacacagaagatttttatggattgttcttttcactgtaaataatagaaatttttgctttaccgttttgttcctttttatttctccatttcgtgttcagtttttaagtgcaatgtcaccgcaggtgaaaatcgatatccatgtataccttgagattatctcgaactgaacaattgtgaatgtttttgtaaagctgcattttgtcgaat

SEQ ID NO: 29014 - DNA, 664 bp, Glycine max
  Clone ID: TF_GmC737624_1
gtatgggttgtacaagaacaatcatggaggcatacttggagatgacatgggtcttggaaagaccattcaagcaatagcatttcttgccgccgtctttgctaaagaaggacattctactctaaatgaaaaccatgtagagaaaagagatcctgcattaataatttgccccacttctgttatccacaactgggagagcgaattctccaagtggtctaacttcagtgtttccatttatcatggtgcaaaccggaacctgatatatgataaattggaagcaaatgaagtggaaatactcattaccagttttgacacatacaggattcatggaagttcgttgttagatattaactggaacattgtgattatcgatgaggctcatcgacttaagaatgagaaatcaaaactctataaagcatgtttagaaattaaaaccctaagacgctatggtctcactgggactgcaatgcaaaataagatcatggaattgttcaatctctttgattgggttgcacctggatcccttggaacacgggaacattttcgtgagttctatgatgaaccccttaagcatggcccgaggtcaactgcttctgataggtttgccaaattgctaataagagaaaacaccaccttgggtgagttctttattaaatatctgttgaga

SEQ ID NO: 29015 - DNA, 3968 bp, Glycine max
  Clone ID: TF_GmC143184_1
atggaggcaagtgttcttcttggaaacagttatggggtggtagctcgcgtggctgtggcgggtcttcgtggtggagtgatgggttcggccatatctcccttcgaggcatatttgtctcggtcatggcgagctgtggagctcataaaatttgagtctggaactacgaccctatattttgtagataatcaccatatgaccattaagaaaggctccttttcagacgttcgagttaggtcaaggaaagctactttatcagattgctcctttttacgaactgggattgacatatgtgttctctcagcctctcagggtaatgacaattcagatgaatctagtgctaatcatgtgtggcttgatgctaaaataaattccatacagagaaaaccacataatccagagtgctcatgtcagtattatgtaaacttctatgttaatcaaggttcacttggtacagagctgagaactcttaggaaggaggttaaagtagttggaataaatgaaattgccatcctccaaaagcttgaacgtaatacttgtcaacacaaatactatcgatgggaatcatctgaagactgctccaaagtgccacatactaaattgttaggaaaatttatatctgacctttcatggttggttgttgcatctgctataaggaaggtttcattctgtgcaagatctgtggaaaacaatattgtgtatcaaattttagggagtgatgctacaacctcttcattatacatggattctgaaataagtgttgtgaactttaaagtgaacgaagacggcatgcaaatgcctgttattcatctagttgatttatttgagactgacaccaatacaagcggcgataaacatgattcccactatgatgaagtgccatcatcttatggttttgagggcttacgacgatccaaacgtaggaacatacaacctgaacgttactctgattgtggtaatgtttctgagataaaggttggtaatgttcgaacctggccatacaagttaaacaaaaggaaagatgatgatggtggtggtgaagagtcattgccattagcacaagagaatagtgacaatagtcaaaaggtcaatgaactgagttcttgccgggagattatagtgtaccatgggaggaatgaaacgctggaattaaagtcaggtgaggccaatcaaactcaacttgctagtgttcctcttcttcaagaaggtgattcattagcccttgagcatcatcatctcaatgacaatgttactagaagaagtgatgcatattatagcacccctaagcttaagaggaagagattagttgatctggaagctgatgtagattttgatcctggaagggaaggcataaattccaataaaggagttagcgagaaaagacatggttcatcatggtattcaagaagcagaagccatgctgcagaacacagttataaagacagaagcttaaatgcaactgcctacaaggaaatgatagattcatacttgaaggatgtcaatagaacaccaactacagaagagccacctgtaatggaccagcggaaggaaataggcaactttgggcaaaagaaggaagcagaaatacctgaaagagaggacgaggaacaaatctctgagatcgatatgttgtggagagaaatggaaatggcactggcatcaagttatcttgaagaaacagagggttcaaatagtgccaattttgccaagactacggaagaatctaatcgcacttgtccgcatgattacagattgtctgaagaaattggaatttattgctacaaatgtggctttgtgaaaaccgagataaaatatattacgccacccttcattgaaatgcaacgctcagtgaggcaccaagaggaaaagcaatgcaatggaaaagatacaaaggaaaaggctagtaaagatgatgatttccatctgctctcaactcatgctcctacagatgaacataactctatggaacatgataacgtttggaagttaattccccaatttagagaaaagttgcatgaccaccaaaagaaggcttttgaatttctttggcaaaatattggagggtctatggagccaaaacttatggatgcagaatccaaaagaagagggggttgtgtgatatctcatgctcctggagctggtaaaacttttctcatcattgcatttctcgttagctatttaaagctattcccagggaagaagcctcttatccttgctccaaaaggcacactttacacttggtgcaaagaattcaacaagtgggaaatttctatgccagtgtatctgattcatgggcgtggtggaactcagaaagatactgagcaaaattcaattgttcttcctggttttccaaatccaaataaagatgtcaagcatgttttggactgcttgcaaaagataaaactgtggcaagagaaaccaagtgttttggtcatgagctatactgcatttttagcattaatgagagagggttcagagtttgcacacagaaaatatatggctaaagcattgagggaaggtcctgggatcttgatacttgatgaagggcacaatccaagaagcaccaagtcaaggttgaggaaagggttgatgaaactgaaaacagatctaagaatactactttccggtacattatttcagaacaatttttgtgaatacttcaacacactttgcttggcaagaccaaagtttatctccgaagtgcttgatacattagacccgattaccagaaggaaaagcaaaacagtagaaaaggcaggtcatttgctagaatcacgagctagaaaattgttcttagataaaattgctaagaaaattgactcgggtattggaaatgagaggatgcagggtctaaacatgttgagagaaaccacaaatggttttgtagatgtttatgagagtgaaaattttgatagtgctcctggtttacaaatctacacgttgctaatgaatacaactgacaagcagcgtgagattttgccaaaactacacacgagagtggacgagtgcaatggttaccctctagagctagagcttttggtaactcttggatcaatacatccatggttggttaaaacaacctcatgcgcaaataagtttttcactgcagaccaattgaagcagctagacaaatacaagtatgatatgaaagcaggatcaaaagttaaatttgttctgagccttgttttccgtgttatgcagagagagaaagtacttatcttctgccacaaccttgcacctgtgaagttattgatagagttatttgagatgttcttcaaatggaaaaaagatagagaaattctgctgcttagtggggaactagacctctttgaacgcgggaaagtgatagataagtttgaggagcatggaggagcatcaaaggtactccttgcttcaattacagcttgtgctgaaggcattagtttaacagcagcttctagagtgatttttttggactcagaatggaatccatcgaaaacaaaacaggctattgcacgggcttttcgtcctggtcaagaaaaaatggtttacgtttatcagctcttggtaacaggcacattggaggaagataagtacaaaagaaccacttggaaagagtgggtttctagcatgatttttagtgaggcttttgaggagaacctttcacattcgcgagcagtgaacattgaagatgatatactgagggaaatggttgaggaggacaagtctaaaacaattcatatgattctaaagaatgaaaaggcttcaacaaattgaagagaggagcttgcgcgatacttgaaacaggagcagggacagtggaaaataaaggagccatagcgccatctgcttgcttatgtaatgtaacccaatctgtctatatttcaatacacaccccattacgataaaattatgctagggcttaatttgaattgatttctattttatcggaaattttcaacagaaaaaagtatttgaatttaattttcaag

SEQ ID NO: 29016 - DNA, 276 bp, Glycine max
  unsure (1)..(276): unsure at all n locations
  Clone ID: TF_701010777H1
gcaggatctatctcagccaaagtcagaagttagtccaccagaaggattgctgngcagttcctcttttaagacatcancagaattgctttatcatggatggttcaaaaggaaacatcaagtttatattgctcaggaggaattcttgcagatgatcagggacttggaaaaacagtatcaactattgcattaatattaaaggnnagacctccattcacttaatgggtgcaccaatgcccganaaagtgaattggnaactctgaatctggntgtggatga

SEQ ID NO: 29017 - DNA, 2124 bp, Glycine max
  Clone ID: TF_GmC27_1
cttatgatgatcatgcagtatcaagtaagaaaaggaaatgccctcctagttctaaaagtggaaagaagggattggacagtgcgatgcttgaggctgttgctcgtcctcttgcaaaagtggcttggtttagagttgtcctggatgaggcccagagtataaagaatcacagaactcaagttgcaagggcctgttggggtcttcgagccaagcgtagatggtgcttgtcagggactcctatccagaatgcaattgatgatctctacagttactttagatttttaagatacgatccttatgctgtgtacacatcattctgttccacaattaagatccctatcagcagaagtccatcaaaaggatacagaaagctacaagctgttttaaagacaataatgttacgtcggacaaaagccacacttcttgatggggagcctatcatttccttgccacctaaatctgtggagttgaaaaaagtggaattttcaccggaggaacgagatttctattccagactagaggctgattcgcgagcacagtttcaggaatatgctgatgctggaactgtgaagcaaaactatgttaacattttgttgatgcttttgcgccttagacaagcatgtgatcatcatctccttgttaagcgtgacaattctaagtcgctctctaaatcctcatttgaggctccgcaaaacaattcttcgaaaataaagtctggacttgagatgtttcagttggtgtcttaaccacaatgtggtacttccaaaaacaattctgaacatactgctttttgagatggtgctgatggcctttgtagttagtgtactggtgatgtaatgaatgaagctatagagttttcccaggggacaaacatgaaagatatactaagcacgccttcagtgttttccaaagtcacactgaatagttctttttctgatcaggctggtgataatttgcctgattactctggttgtgaagtggaggaatctgagtttttttctcaggctcagccatgttattcttcaaaaattaaggctgcacttgaggtgttgcagtcgttgtctaaaccacaatgctttgcttcccaaaacaattctgtgcagagcacttctggggaaagtactgatggccttggtagttcatctagtgctgacagaatgaaatccttgaatgaaattcctgagagtcaaaatgtgctttgaggagagaagctctaataattcagttggtgtaggggagaaagctatagtgttttctcagtggacaaggatgctagatatacttgaagcatgtcttaagaattcgtcgatccagtatagaagactggatggaacaatgtcagtcactgcaagagataaagctgttaaagattttaacactctccctgaggtttcagttatgattatgtctttaaaggctgctagtcttggtctgaatatggttgctgcctgccatgttcttatgctagatctatggtggaatcctacaactgaagatcaggcaatagaccgagcacatcgaattggacaaactcgtcctgtcacagttttacggttaactgttagagatacagttgaagaccgtattttagctctgcagcaaaaaaagcgaaaaatggttgcgtctgcctttggagaggatggaactggtggttgtcaaagtcgccttacagtggatgatctaaaatacttgtttatgatgtgattagacatatatccatacagatatataattttaattttttggattggtgattttttttttctgggagcaggtgtcagtgggttgttcttttggggggaagcagaagaaacagggtgctgaaaattttgtagcatggcctctgttgacactcgacatgaagattatatgaattgtcttttatagagagatgattcaattgtttaccttgaaattttggtttagttgttaacatttgtataggttgtagagagtagtagcatagacagaaacatagaaattgtgctcattgtaaatattatagatagataatatctcttttccttttccaatcttaatctatttcgtttcttttaattttcaggtggttttgacttttcattttaaagtgaaccttctgataataaagtgcacttgttgaatttc

SEQ ID NO: 29018 - DNA, 1195 bp, Glycine max
  Clone ID: TF_GmC358725_1
ttcggctcgagtccaaaatccaatagagaatggacagcacaccaattcaactctgatcgatgtgaaaattatgaaccagaggtctcatatcctctatgaacagttaaaaggctttgttcaaagaatggacatgaatgtggtgaagaaggatctaccacccaaaactgtcttcgtgataactgtcaagctatctcccttacagagaaaattgtacaagagattccttgatgtgcatgggttcactactcaggtgcatcctgaaatgttaaggaagagatgtttttttgctgggtaccaggcattagctcggatatggaaccaccctgggatcttgcagttgacaaaagaagtcaaggactatgtaaaacacgaagatgctgttgagaattttcttgtggatgatagttacagtgatgagaattctgattataatgtacttgctggaggtaagtcttcatgaataggatacgtaggtacctgttcttttatgcttctaatatttgttttgtttattgattaatatagttattacttgattgaactgtctaatttcagtgagttttttttttctgtttgtactttcttaatcaattattattgttagttttattgtaagtgatgaaagctgtatttgtttctgtataaatattgagataatacacttagcagggacttatattgaggaactattggttctaaaaatgtatgaacatagttcagttgtctttagtgccatcgattttatgatggaacaaatactttctctttgttttggaggcacaataagaactggtcaaatttcttttctgatggatttcctaattttactatttttttgaatgtttgtgaaagtacaaatgagaaaagggaactataaagcatagtatgtgaagagcaagggatatggtatttataggctttatattttataaatttatataatttgtaaagtcttcaggaattagtttcctgtttttcaaacattatgttattgttggctttgcaatttcatagttccagtgacattatgtcaacaataaaatttggtgtccaagcttagtctcagctttaccttacagcacttacaataggctgaatagcatgatgaatgccaatgctgtttttatatcctcatgcttggtgctagaaagttatgttttttaccttagaaattagagtttcaggtagtttctaa

SEQ ID NO: 29019 - DNA, 457 bp, Glycine max
  Clone ID: TF_GmC122791_1
cggagaatatgtatgtcagatgtgctctgaactaatacaagctactgaatctcctattgcctctggtgccactctcatcatctgcccagctcctattttgccccagtggcatgacgaaattatacgccatacacatcagggctccttgaaaacttgtatttatgaaggtgtgcgagacacatctttttccaatacgtctctgatggatatcggtgatcttgccagtgctgacattgtattaactacatatgatgtgcttaaagaagatttgtcccatgattctgataggcatgaaggtgatcggcactttctgaggtttcagaaaaggtttgctccaaagagtgccatattcctcctttgtcaatatatatttatatcatatgtaggatattttacctatacatttctagatgagtttgaaattcaccgttcttttcattcatcaagttttcatttt

SEQ ID NO: 29020 - DNA, 640 bp, Glycine max
  unsure (1)..(640): unsure at all n locations
  Clone ID: TF_LIB4167-057-R1-K1-E8
cccgcgtccggactccctcgattgattgtttcttattatatgtccaccaaattgatttctattatgtgtgttgtctggtattttgtttgctttggttttcttgtttgtttgacaattcccctcccctctccctccctgttttgtagggctttgcttcatttccttgatccagacaagttcaggagcaaggatgaatttgttcaaaactataaaaatctgagctcttttaatgagaatgagcttgcaaatctgcatatggaattgagacctcacatacttcgaagagttatcaaagatgtggagaaattattaccccccaaaattgagcgtatccttagggttgaaatggcgcctcttcagaaacagtattataagtggattttggaacgtaattttcacaatttgaacaaaggagttcgtgggaatcaggtttctcttttaaatattgtggtggaattaaagaagtgctgcaaccatcccttcttgtttgaaagtgctgaccatggctatggtggggactcangaagtagtgacaacagtaaactagagaggaatggttttagcagtggcaagcttggcatacttgacaagctccttgttaaattgcatgaaaccaagcatcgngggtttgattttctct

SEQ ID NO: 29021 - DNA, 1979 bp, Glycine max
  Clone ID: TF_GmC291_1
ggctcgagattgacgctgacatgaacaatagagggaaggggcgtctgaagtatctcttgcagcagactgagctgtttgctcattttgcaaaaggggatcaatcttcgtctcagaagaagtcaaggggaaggggtcgccatgcatccaatttcaccgaggaagaagaagatgaagaatacctaaaaggagaagaagatggtctagcaaacacacgtctggtgacacaaccatcatgtatccaagggaaaatgagggattaccagctggctggactaaactggctcatacgattgtatgagaacggaataaatggaattctggctggtgaaatggggcttggtaaaacattgcaaactatatccttattaggttatttgcacgagttccgaggaatcaaaggtcctcatatggtggttgctccaaaatctactcttggaaattggatgaatgagattcggcgcttttgtcctgttcttcgtgcaatcaagtttcttggcaaccccgatgaaaggagacatatcagagatgaattgttggttgccgggaagtttgatgtttgtgtcacaagttttgaaatggcaatcaaggagaagtctgctttgcgtcgatttagttggcgctacataattattgatgaagctcatcgaatcaagaatgagaattccttgctgtccaaaacaatgaggctctacagtacaaactatcgtctccttattactggcacaccacttcagaataatcttcatgaactctggtctcttctcaactttcttctgcccgaaatttttagttctgctgaaacttttgatgaatggtttcaaatctctggtgaaaatgaccaacaggaggttgttcaacaattacacaaggtcctccgcccatttctccttcgaaggttgaagtcagatgttgagaaagggttgccaccgaaaaaggaaactattcttaaagtaggcatgtcccaaatgcagaaacagtattatagagcactacttcagaaggatcttgaggttgtaaatgctggtggagaacggaagcgtctcctgaacatagctatgcaactacgcaaatgttgtaatcatccatatcttttccaaggtgctgaacctggtcctcccttcactacaggagatcatcttattgaaaatgctggtaaaatggttcttttggataagttacttcctaaattgaaagagcgcgattctagggtccttatattttcacagatgactaggctgctagacatactcgaagattatttaatgtttcgtggatatcaatattgtcgcattgatggaaatactggtggggatgatcgagatgcttccattgatgctttcaacaaaccaggaagtgagaaatttgtcttcttgttatcaactcgtgctggaggtcttggtattaatcttgctactgctgatgttgtcattctgtacgatagtgactggaacccacaagttgacttgcaggctcaggatcgtgctcataggattggtcaaaagaaagaagttcaagttttccgtttttgtactgagtatacaatagaagagaaagtcattgaaagggcctacaaaaagcttgcacttgatgctctggtgattcagcaagggcgattggctgagcagaagacggtaaataaagatgaattgcttcaaatggttagatttggggctgaaatggttttcagttccaaggatagtacaattacagatgaagatattgatagaattattgctaaaggagaggaggcaactgctgagctagatgccaagatgaagaaatttactgaagatgccatcaaatttaagatggatgacactgccgaattatatgattttgatgatgagaaggatgaaaacagatttgatataaaaaaaattgtgagcgagaactggattgaaccaccaaaaagggagcggaaacgcaattactcggagtctgaatacttcaagcaaacaatgcgccaggtgtctacaaac

SEQ ID NO: 29022 - DNA, 765 bp, Glycine max
  unsure (1)..(765): unsure at all n locations
  Clone ID: TF_LIB4280-053-Q1-K1-G10
ccacgcgtccggtataaggctcgtgaggctgctatggcagttcaaggaaagatggtagattctcagcgtaagaagagcaaagcaagtttgcggaagcttgaggaacaacctgaatggttgaagggtggaaagctccgtgattatcaacttgagggtctgaattttcttgttaacagctggagaaatgatacaaatgtcattttagccgatgaaatgggccttgggaaaactgttcagtcagtatcaatgcttggttttctgcagaatgcccagcaaatccatggtccttttcttgtagttgttccattgtccactttatcaaattgggccaaagaattcaggaagtggcttcctgatatgaantattatcatatatgttggtacctcgtgcaangtcgagaaggaatttagcaccaatgaaccaagttgcttatcacncggtacttcctctacagnnaacagtgtggaagaacctatggnngctttgcttcanntttccttgatccagnacaangttcaggaaagcaaggatgaaanntttgttcaaaactattaaaaatcntgagctcttttttaatgagnnaatgagcttgcaaatctgcatttatggaattgagacctcacatacttcggaagagttatcannnagatgtggagaaatcattaccccccaaaattgagcgtatcctttagggttngaaatgtcgcctcttcagaaacagtatttataagtgggatttgggaacggtaattttcacaatttga

SEQ ID NO: 29023 - DNA, 1348 bp, Glycine max
  Clone ID: TF_GmC6683_1
gaacaatcagaatctgaacgggacttttatgaagccctgtttgagagatctaaagttcaatttgatcagtatgtcgcacaaggaaaggttcttcaccattatgcaaatatccttgacctactaatgcagttgaggcggtgttgtaaccatccatttttagttatgtgcggaagcgatacccagaaacgtgcagatttaagcagactcgcaagaaaattctttcagactaatactgaattccccgatgaaagcaatcaaaatgatccacggcagcaagcagagttgaacaaacttgcaagtagattacttctaaaatctgcttcttctttgcactcggttcaacctcatgcatacattgccgaggttttggagaatattcaaaagggtgacatcatagaatgctctatatgtatggaatctccagaagatcctgtgtttacaccatgtgcgcataagttttgtagagaatgtctatttagttgctggggcacctcagtgggtggcaaatgtccaatctgtcgtcaattgctccagaaagacgatctgattacttattcatctgaaagcccattcaaggtcgatattaagaacaatgtgacagagtcttcaaaggtttcgaagctatttgaattcctgcaacgtattctgaacacatcaagtgaaaagagtatcgtcttcagtcagtggacatcattttttgatctgttggagaatccattgaggaggagaggaattggtttttttgagatatgatgggaagttgactcagaagcagagggagaaagttctggatgaattcaatgagacaagagagaaaagggttttgttaatgtcactaaaagctggtggtgtgggtttgaacttaactgcagcctcaaatgttttcattatggatccatggtggaaccctgcagttgaggagcaagcaataatgagaattcatcgcataggacaaaaccgaagagttgtagtgagaagattcatcgttaaggacacagtggaagatcgattgcaacaagttcaagctaggaaacaaaggatgatatctggtaccctcaccgacgatgaggttcggactgctaggattcaagacctcaaaatgcttttcacatgagatatgagataatttatttatttagaagctgatttatttctctagattcttagacctgggaagccaattttgtataggttgtcggatcctttctacaagctaaaggcttccttttcttttgtgtacatacatgaaatgatgatatgatcattctgaactctaaaaggaagcccactgttttgtaaatcatgaggctttagtggttatggtaaaagggttaatttcattttggtc

SEQ ID NO: 29024 - DNA, 1190 bp, Glycine max
  Clone ID: TF_GmC972_1
gttgaaacccaagcacaaggcgcaggtgattcttttctgaatacctatatagcagtgtataattgtttctgacattagttcatatattattcggaatataagacttcggtatgttgccggcaaagacgagaaggaggcagcgttgaatctttgctaaatacctgtgtgtcaaagttcaaattattgcgagttttggatttaaggaattcgacatgcaagactttgccacgttccattgatagttgaagttgtttgctgcaggttgactccactacagtcaaacctatataaacattttatacaatccaaaaatgttaagcgggcaattactgaagaactgaagcaatcaaagattttggcctacgtaacagctctcaaaaagttgtgcaatcatccaaaggttcctataaatgctgctggtttgatcagatataactggtgccaccccttttttggtaaaattatcatccatctcatgaatatgataatatatagctcactgctgcagctgtgaaagattggaggttcctatatcaatatccttttgggttgagtaggttcctataaattctactggtttgatcagatataggtggtgccaccccttttttggtaaaattatcgtccatgtcatgaatatgataatatacagctcattgctgcagatgtgaaagattggagatactggaaggacttcttgaactactacagaataaagaatgtgctcactggaaagctaagtatgtatctggctggatctaaatgatccaactatgcctttgaatgtcagaaactgcatgcagttagcttgatactccctagaaataccggtattttatgactgatattgctcatacttaaacaatgatccttagctttgacctaatatatagcctacttaataactcaaatttttcataatagttaaatgaaaaccgcagacagtttcatgcatgatgtatcatttacaataaagcattctttatgcttatgcacccttttttattttgttgagtacttcctgacgaggttagcattaatatttgtaaaaggccggtcaattatgtaggatttgtattacgaaaattctgaacaattgatttttgttctaacagttattagtttcagactcttatacatattcaaaatggtattggtagaagaaagtttaaccaaccttcttttttatt

SEQ ID NO: 29025 - DNA, 1536 bp, Glycine max
  Clone ID: TF_GmC27_2
aattcggctcgagatcagcagaagtccatcaaaaggatacagaaagctacaagctgtcttaaaaacaataatgttacgtcggacaaaaggctcacttcttgatggggagcctatcatttccttgccacctaaatctgtagagttgaaaaaagtggaattttcacaggaggaacgagatttttattccaaactagaggctgattcccgagcacagtttcaggaatatgctgatgctggaactgtgaagcaaaactatgttaacattttgttgatgcttttgcgccttagacaagcatgcgatcatcctctccttgtcaaacgttacaattctaactctctctggaaatcctcagttgagatggcaaagaagcttcctcaggaaaaacgattatgtcttttaaaatgtttagaggcatcattggccctctgtggtatctgtaatgaccctcctgaagatgctgttgtttcagtttgtggtcatgttttttgtaaccagtgcatttgtgaatatcttactggtgatgacaatcagtgccctgctccaaactgcaaaactcgactaagcacgccctcagtgttttccaaagtcacactgaatagttctttttctgatcagccttgtgataatttgcctgattactctggttgtgaagtggaggaatctgagttttgttctcaggctcagccatatgattcttcaaaaattaaggctgcacttgaggtgttgcagtcgttgtctaaaccacaatgctttgcttcccaaaacaattctgtgcagagcacttctggggaaagtaccgatggccttggtagctcctctagtgctgacagaatgaaatccttgaatgaaattcctgagagtcaaaatgtgcttgaggagagaagctctaataattcagttggtgtaggggagaaagctatagtgttttctcagtggacaaggatgctagatatacttgaagcatgtcttaagaattcgtcgatccagtatagaagactggatggaacaatgtcagtcactgcaagagataaagctgttaaagattttaacactctccctgaggtttcagttatgattatgtctttaaaggctgctagtcttggtctgaatatggttgctgcctgccatgttcttatgctagatctatggtggaatcctacaactgaagatcaggcaatagaccgagcacatcgaattggacaaactcgtcctgtcacagttttacggttaactgttagagatacagttgaagaccgtattttagctctgcaggtgtcagtgggttgttctttttggtggaagcagaagaaacagggtgctgaaaattttgtagcatggcctctgttgacactcgacatgaagattatatgaattgtcttttatagagagatgattcaattgtttaccttgaaattttggtttagttgttaacatttgtataggttgtagagagtagtagcatagacagaaacatagaaattgtgctcattgtaaatattatagatagataatatctcttttccttttccaatctt

SEQ ID NO: 29026 - DNA, 4275 bp, Glycine max
  Clone ID: TF_GmC157_1
ggctcgagccgcaacttctcaaattcatgactttgtcttgttcctagccaaagaagcaatgacagctcatgatatatcttctgatggagatggaataagccaaaagatgaaggagttctctgttacttttaataaagttacatgcaatgaagcaagtttgctgcagttcgttcttgacctgtctaatgttctagccaaagcaagtgaatttagatttaatatccttggttataagggtagagaagctgaaactaatagtcctgattgcatagataagattgctctgccagaaaataagttagttcaagacaattcacccacggggccgtttcaaaatggtcgttcacatattcttaatccctgttctgatcctgagattcctgatgatggaaatttggccccaggctatgaatcaaatgccacgtcacagaagttctcaatggaggactttgaagaattgaaattagagaaagagaaggcagttgttgatctgtcaaagtgtgttgaaaatcttgaaatgacaaagtctcgattactagagacagagcaacatctagctgaagttaaatcacaattggcttctgctcaaagatcaaacagcctggctgagacgcaactaaaatgtatgacagaatcatacaggtcaattgaagcacgcacaaaggagtttgaaactgagcttaatcatctgcgaatgaagacagaaactctggagaatgaacttgaagatgaaaagagggctcatgaagaagctttggctaagtacaaggagctagaagaacaactacaaaggaatgagagctcagctgctgataatgacattaagactaagcaggagagagacttggaagctgctgctgaaaagttagctgagtgtcaggaaaccatatttcttcttggcaagcagttaaaatcgatgcatcctcaaacagagccaacggggcctccttattcaaaggctgaaggcttcgcagagcgtgaacctaatagcccaaattttcaggatcaagcagagatggacagtgctagttctgcatttgtgcaaagactgggtggagagtcccccttacatttttctaacagtttatacagtccatcagataatgagtcaaactttccagccatatcttctgtacagaatccaaaccacaggcctacaaagtcaacctcttcgtcagcttcttccactcctacaccggagaaacacaaccgaggtttcagtagattcttttcatcaaaaggaaaaaacggtcattgagcatgcatgaccgatgggaattcttgacttaagggaccacacagcaatggcatttggaaagcatcaaggttcaatccgcttcatgatttaacagaattgagtttttaggaggtttgtgtagttaaaggacaggatgccatgaatatcgggtgattcttgtatctaatggttgtacatggtaaacatgtcttttcttcttttcctttccattgttttgttctctgttctgtaatttaattagcaaacattgacatagcctctgaactattacaggatatgttgaatattgttgtatttcacaaatttatgcagcataccttgattctttaccaaagacaacttaaaataaaaaaaaaaaaaaagggcggcgctcgcgaactagacccacgcgtacgacggcgagaagacgacagaaggggacaaaaccgaacccaggcacaaaatccatttcactcttcataaatagagaaagagaaagaaaggggaaaacactgttttcactgaccaattatcttcgtctctctctcgattcttccaaacggtgcttcgatcggaaaccctaactttcacttacgtccgtcaatggagcttcgttctcgtcgacgcctctccaatccttcagtttccgggaaggagcaaccacctggggatgatgctgttggggaagatgaaactactactggcaagggcagtaacaataaagataaaggtgttgctgttatatcatcaaattcagatatagtttctggtcctgattcagattctgattacgaagatgaagaatttggtgttggctccttacctgacttgaatcaagatccttcaagcattagtttttctagtggagaagattatgcttccgattcatctgatggtggcaagtctttgtacaaaaggggaaaggcgctgctgtccagagggaaaagaaaaagtttcaacactgaatatggggaaccgagtgacgtggttagagtagcggagtacaaagatgatgatgctcaatttgcaatctttcaggaactatcagttccgtctgtttctaagggtactaagaggaggaaatattcaagaaaaggaagaaaaggagattcaaagtctgtgttgttgtggaatgcgtgggaagaggagcaagagaaatggattgataggcatatgttagaagatgttgacttggataatcatagtgaggtaatgaatgaaactgctgacataccctctgatctgacaatgcctttacttagatatcaaaaggaatggttagcctgggctttgaaacaggaaagttctgcaagtaaaggtggaatacttgcagatgaaatgggaatggggaagactgttcaagcaattgctcttgtcctcgccaaacgtgaatttgaactaggttgtgaaccagatcaatccataccatgttcatccagcctgaagcctgcgatcaaaggaacgcttgtcatatgtcctgtggttgctgtcactcagtgggttagtgaggttgatcgctttactttaaaaggaagcaccaaggtgctgatttatcatggggcaaatagagggaggagtgggaatcggtttgcagattatgattttgtgataactacgtactctgttgttgagagtgagtacaggaagcatatgttgcctccaaaagagagatgcccatattgtggaaaattatttttgccgaataagttgatgtatcatcagatttatttttgtggtcctgatgctgttagaacagaaaaacaatcaaagcaagctaagaaaaagaaaagagaagttaccaaggggaagaccaagagaagttaccaaggggaagaccaagaaatctgacagtaagatatcaaagagttctaacacgaaaaaggaagaggaaatgtggatggatgaagaagatttagatgcacctgtgcgtagcgataggtcaattcttcatgctgtgaaatgagcggaatattggacgacagaaaggggaagcgcagttcgttccacgttgttgttcgctctgtgtctctcactctctctatatttgcatcattcatcggaaatggctctcgaggttgctgttaaggctgctgttggggctccaaatgttctcggagattgtccattttcccaaagggtcctcttaactttggaggagaagaaaatcccttacaaactccacctcatcgatctcagtaacaaacccgaatggtttttgggtgtgaatcctgaagggaaggtgccagtggttctttttgatggcaaatgggtggctgattctgatgtaattgtggggatactagaggaaaagtacccagaaccctctctaatcactcctcctgaatttgcctccgtgggatcaaagatatttgggtcttttgtgagttttctgaagagcaaggatacaaacgatggaactgagcaagcattggttgctgaattgagtgccttggatgaacatctcaagacccatggtccatacattgctggggagaaagtcactgctgttgatctgagtttggcaccaaaactgtaccatcttgtggtagcactgggccacttcaagaattggaatattccagaaagtttggtacatgtgcacaattacactaagctgctgttctcccgagagtcatttgagaaaacaaagcctccaaaggaggaatatgttattgctggatgggcgcctaaggtgaatgcttgaagtaattctaaattatgaggcatctgaacatcagatatgtgatgtactgtgactgaacctggttaagaataggatggcgaactcatgatgtttaagagtattgttacccttttaataatgaataaacatgtagtttgttggtgtttttattggtgatgtgacaacagttgtcactagtagtacatagtgttttagattttaatgtcggaaaaagatcctctcaaattaagaaaaaaactggatgaaatgtcaagcttacttttaatgttagataaatttaatttataaaggatacaaaaatgtattaacggtgaggaaaaaaaaaaaaaaaaaa

SEQ ID NO: 29027 - DNA, 601 bp, Glycine max
  Clone ID: TF_GmC400016_1
ggctcgaggacgaatgcattcgtcaaagtttagctctactgactcatgtgaccttctcatatgtgatgaggctcacagactgaaaaatgatcagacgataacaaaccgggcgtttgcaggggagagctgccaatgcccggtttgttatcgtctgcaaacgtagaattttgttgtcaggaactcccttgcaaaatgacttagaagaattctttgcaatggttaactttactaatcctggaatattgggtgatattgcacattttcgacgttactatgaggcaccaattatttgtggaagagaacctgctgccactgcggaagagaagaagctaggtgctgaacagtctgctgaattaagtgtcaatgttaaccggttcatattaagaaggactaatgcattgttatcaaatcacttaccacctaagatagttgaagttgtttgctgcaagttgactccactgcagtcagaactatataaacattttatacaatccaaaaatgttaagcgggcaattactgtagaactgaagcaatcaaagattttggtctacataacagctctcaaaagttgtgcaatcattccaagcttattctttgatac

SEQ ID NO: 29028 - DNA, 688 bp, Glycine max
  unsure (1)..(688): unsure at all n locations
  Clone ID: TF_LIB4281-011-R1-K1-C10
cccgcgtccgccaaaggctgttctaccaaattgggtcaatgaattcacaacatgggctcctagcatcacagctattctttatgatggacggctggatgagaggaaagcaatgaaggaagagttgtcaggggaggggaaatttaatgttctattaacgcactatgatcttataatgagagataaagcatttctcaagaaaattcaatggaaatacttgattgtggatgaagggcatcggttgaaaaatcacgagtctgctctggcaagaaccttggacaatggatatcgcatccaacgaagacttctgttgactggtaccccaattcagaacagtttgcaggagttgtggtctttgcttaattttctccttccaaacatttttaactcagttcaaaattttgaggactggtttaacgccccctttgcagaccgagttgatgtctctctcacagatgaggaacaactattgatcatccggcgtctgcatcaagtaataaggcccttcatattaagaaggaaaaaagatgaggtggaaaaattccttcctgggaaatctcaggtcatactcaaatgtgatatgtcagcctggcaganagtatattatcaacaagtaactgatgtaggcagagttggcttggacaatggttctggaaaatcaaaaagtctgcaaaacttaacaatgcaactc

SEQ ID NO: 29029 - DNA, 613 bp, Glycine max
  Clone ID: TF_GmC23376_1
atggaggaagaggaagatgaagtgggttggtgttcttctgattcgggcgacggcgacggcgacgacgatatcgaagaacggaaatctcagaatgtggatgccttgctcaggggcaacctcgtggtgaagagacaatcgttgctaccgcgacttctatcagtatcgcaaggagcggctgtttgtagaaagcccttcaaacctccatgctctaaatctcatgcttccgcttccgcttacaatcaagaccttactcgtaagctttccgctcgcaaaaggtttgttccctggggttcttcctctcctattcctattcctattcctagatctgccttagacgactccaaattcaatgttgctgttgctgttgctgatgttgccgaggagctcaagccctctttgcctcccgggattgatcctctcgtattgtggcaccctcaagactccgaggatgctaatgctaattttaccaccataacagttgatcccgtgcttgttcgttaccttcgtccacatcagagagaaggggttcagttcatgtttgattgtgtctcaggcctgtctaccacaccaaatatacacggatgcattttggcagatgatatgggtttgggga

SEQ ID NO: 29030 - DNA, 522 bp, Glycine max
  Clone ID: TF_13791645
gctgcccgaaaaagtgaattggaaactctggatgtggatgatgacatgcttcctcagaatggtatagtaaaggaagaatctaatatgtgtgaggataagccaagtggatatccaatgaatttgttgaagcaagcaaagggaaggccatctgctgggacccttattgtttgcccgactagtgtcctgcgtcaatgggctgaggagttgcgtagcaaggtaaatggtcaggcaactctctctgtgctagtataccatggaagcaatcgaacaaaagatccttatgaggtggccaagcatgatgttgtcctaacaacttattccattgtcagcatggaggtccctaagcagcctccagctgacaaagatgacgaggaaaaggaaatttttgaagatcatgctacaccaagtaggaaaagaaaaagcccttctaattctagtaaaagtggcaagaagaaattggatggcacaaatcttgaaactgttgctcggccacttgcaaaggtgtcatgggttagggttgtc

SEQ ID NO: 29031 - DNA, 1167 bp, Glycine max
  Clone ID: TF_GmC1383_1
ttgcttatcactggcactcctctcagaaagtgtggaagaactatgggctttgcttcatttccttgatccggacaagttcaggagcaaggatgaatttgttcagaactataagaatctgagttcttttaatgagaatgagcttgcaaatctgcatatggaattgagacctcacatacttcgaagagttatcaaagatgtggagaaatcattaccccccaaaattgaacgtatccttagggttgaaatgtctcctcttcagaaacagtattataagtggattttggaacgtaattttcacaatttgaacaaaggagttcgtgggaatcaggtttctcttttaaatattgtggtggaattaaagaagtgctgcaaccatcccttcttgtttgaaagtgctgaccatggctatggtggggactcagaagtagtgacaacagtaaactagagagaattgtttttagcagtggcaagcttgtcatacttgataagctgcttgttaaattgcatgaaaccaagcatcgtgttctgattttctctcagatggttaggatgttagatatactgggagagtatatgtcacttcgagggtttcaatttcagaggcttgatggcagtacaaaagctgagcttcgacaacaagcaatggatcatttcaatgcacctggtagtgatgatttttgcttccttctttcaacacgggcaggaggtctgggtatcaatcttgctacagcagacactgttataatatttgattctgattggaatcctcaaaatgacctgcaggcaatgagtagagctcatagaattggacaacaagaagttgttaacatttatagatttgtgacaagcaaaagtgttgaggaagatattttggaacgtgctaagaagaaaatggttctggaccacttggtgattcaaaagctaaatgcagagggtaggctggagaagaaagaagccaaaaaaggaggaagttattttgacaaaaatgagctgtctgcaatcttacgattcggagcagaggagctctttaaggaagaaagaaatgatgaagaacaagaaacaactcttaagtatgaatatagatgagattcttggcccacccggaacgggcggctcctgcactgtgtgaaaaatgccaacagcagagttggacggaagccttccaag

SEQ ID NO: 29032 - DNA, 1497 bp, Glycine max
  Clone ID: TF_GmC47363_3
cgcgtccggcttgttggtttgcaatggatgctttccttgtataacaacaaattaaatggaattttggcagatgagatgggtcttggcaaaactgtacaggttatggcattaattgcatacttgatggagtttaaaggaaactatggcccacatcttataatagtcccaaatgctgttatggttaactggaagagtgagttgcatacttggttaccatctgtgtcatgcattttttatgctggagggaaggattaccggtcaaaattatattcacaagagattatggctatgaaatttaatgtcctggtgactacttatgagttcatcatgtatgaccgggcaaggctttcaaaaattgattggaagtatatcataattgatgaagcacagagaatgaaggatagagattcagttctagctcgtgatcttgatagatatcgttgtcaaagacgcctgcttctgacaggaacgcctttgcagaatgatttgaaggaactgtggtcgcttttaaatttacttcttccagaggtttttgacaataagaaagcctttaacgattggttctcaaagccatttcaaaaggaaggtcccactcaaaatacagaggatgattggcttgagactgagaaaaaagttatcattatccaccgtcttcatcagattcttgagcctttcatgctcaggcgtcgtgttgaagatgttgagggttcactaccaccaaaggtctctatagttttacgatgtaagatgtcagctgtccagagtgccatttatgactgggtcaaatcaactggtacccttcgtcttgatcctgagggtgagaacagtaagattcaaaagaatcctcattaccaggcaaaagagtacaagactttaaataacagatgtatggagctacgtaaaacttgcaatcatccatctctgaattacccattacttggtgaattatctacaaattcaattgtaaaatcttgtgggaaattgtggatcctggataggatccttataaagcttcaaagaactggtcatcgggttttgctgtttagtaccatgacaaaacttctagacctcttggaagactacctgagacttcgccaaaatgtaaactaattaatggatgcaatgcctaatttggatgacaatgcacaccaataataaaaaataatagccctgtaccttcaaggagcatcgccttgccatccaaactacatggatctccaaagtcaagccgtctgaattgcatttctgtgccttcacaagatgctggtgaccactccaaagaaagcagggaaggaaaacctatcaatccaagtggatcttcatcacatggtactaagatgactgaaattatccagagaaggtgcaaaaatgttttttgcaagctccaaaagagaattgacaaggaaggccatgaaattgtgcctttgttaatggaattgcggaagaggattgaaaaatctggatctggaaacatctctgtagatctcgcaaagattg

SEQ ID NO: 29033 - DNA, 468 bp, Glycine max
  Clone ID: TF_uC-gmflminsoy047c04b1
gggggccgggccccagaatcccggtctaccctcacgcccccattgttatatacacctgagcgcgagaaagagaaggggaggaatttgagagagctctggggctgttaacactggcgcccaagagaattggcaacaagatcaaccggaatgcgatcctttgtacacgcaggagcaggctattgaagaaagcttatgagctttccgttctctgtgactgccgagcttgctcccatcatctctctccaatcacaggaaagcagctacgactttcgcagtggttcaagcatgctcaacacgcgggagaggtgccagaaatgcacctatggaccgcctgaggacaatcgtggcaacaaaggcagccttgttattggagtcaagcactcaacaagaatacttggggctgcaagcactttaccgaactctactactggcttacaggcaccttatgggagaagaccttggtcccct

SEQ ID NO: 29034 - DNA, 313 bp, Glycine max
  unsure (1)..(313): unsure at all n locations
  Clone ID: TF_700984421H1
ctcttgtntttcacaaatctcggntcagtagagtactgacccagncanagaagattcaacaggtacctaagagaaggnaagagnggggatngaaagnnagacaaagagatagaaactgcacgtanaanagnnnnnnnnnnnnnnnnnnnnnnataggangaantcngcaaatattttgtttggataagatataaggcaatagtantattagtattgttganaataattaggtagaaganatattatggggaggggaagagtggaactgaaaggntagagaaccaagataaacaggcaggtaacgtttgcaaag

SEQ ID NO: 29035 - DNA, 378 bp, Glycine max
  Clone ID: TF_jC-gmXLIB3563P040ca04a1
ctcccgtcgggggggtcagagaccactgaccccgcaacaaagatgctgaacacaagtccccttctggcgagctggtaaccactctcactttgatctagaaagccaccctattataacatcgccattgcacccggaagaccatgcgagatcaatttttctagaaaagagagatggagaactggggagcggtaagattgctatccacacgatagagaactcaaccaacaggcgagatacttactcaatgcgaacgaatgtgatcctagagaacgcctagggagtaactgttctatgtgacgctcaccttcacgcttatcatcgtttgccgtctctggaaagaggcaggactacatgatccgttctaccaagttgatctga

SEQ ID NO: 29036 - DNA, 811 bp, Glycine max
  Clone ID: TF_GmC73666_1
cccacgcgtccgcggacgcgtgggttcagaaaacgtgccaaacttgagcgacgtcactaagaagaccaaaggtcggcaaaagatagagatgaagacgatagccaacaagtgtagccttcaagtgacattttcaaagcatcgaactggagttttcaagaaagcgagtgagcttgccaccctttgtggtgtggaccttgctgtgattatgttctctcccaataaccatgtttactccttcggtagccctaatgtggattctgtaatccaacgttatacgacagagggcccacctcccctcttcacccaagacctcaatgaggccccttgcaccatggatgagggtgagctccaagcacacctcaactgtttgtccaaccaaattgacgcggagaagcaacgtgtagaggatctaaaccatttgttgatggctgcgaaggatcacatctggtgggatgtgccaattgaaagcatgagcaatgcccaactcgagaagtaccataagatgttgaaggagataaagttgaaacacatgagacatacacatggagaatgatctatttttgggttcttttgatttcttcatatgagatctatcattgttgatgtcctacttaaatttttagtttgtgtttttcaattctggtttagaataagcactagcttaatcggtttcatgtgtgggacatggttaggactgattatctagggtttaggttttgttatcttaaatataatcttcatcatgttgttggtgaaccgtgttttctttatgttgtttctttgatttttaattggggattgtagttgttcc

SEQ ID NO: 29037 - DNA, 1279 bp, Glycine max
  unsure (1)..(1279): unsure at all n locations
  Clone ID: TF_GmC1806_1
cctgccggtacgcggcccggaatgtcattgctcggtcgacccacgcttttttcccacgcgtccgtacggctgcgagaagacgacagaaggggacacacaacaaagttctcattttttctcattcctttccgaccatggcatcaccggcatccaacccccaaagcgccgagactaagaaaagccgtggccgccaaagggttgacattaagaaaatgagcaacgaggccaacctccaagtcacgttctctaagcgccgcagcgggcttttcaagaaagccagtgagctttgcactctctgcggcgctgaagtggctctggtggtgttctcgccggggcagaaggtgttctccttcggccaccccagcgtggatggcgtgattgagcgctatctcactggggtcgcaccgccggaggcggacaacatgaattacatcgatgtgcaccgcatggccaaagtggttgaccttaacgcccagctgactcatatcaaagatcagctcgaggcggagaggaagcgcgccaaggagctgggcggcattcagaaggaggccgaaacccatctgtggtgggcccggcccgtggccgacattaccgatattaacaacctgctgaagctgaaaaaagctttccagcagctgaaacaagatgtgtccggtcttgctggtatggctttgttccagtctgttgcaaatggaaacccggggcatcagttttttgctggggcttcttcctcagccgttcccaatgttgtgcttcagtcacaaccactgccagtggcccaggtgttccctcctgctgttccacagatgatgtttccaccacccatatttgagaactacatggtgaaccccaatgggtttgatgacatgggaatgggaggaggaggatttggaggagcaggaccttctagtgctggtggtggtggtggtggtttcttttgatcctgccagctggattttgatgcccttttgtttttaattaagagttcatgttgttttaatttctgtactgttccgggttagctagtttcatatgtacgtgacaacatgcttaattagcactgattagctagggttcggaattcggatatccttgtcttgaaccatcatcagcattgtcatgtaatgctagcagctggaatgttttccctttcgtatcgtttctctgttatgttgctcggactggagtgatgtactttcatttgagttgtttaaattgaataaagggcatcttttttatttgtttctcccaaaaaaaaaaaaaaaaaaaaaaccccnna

SEQ ID NO: 29038 - DNA, 807 bp, Glycine max
  unsure (1)..(807): unsure at all n locations
  Clone ID: TF_LIB5118-045-A1-PF1-B9
atagtaccagtggtgtgtcttctgtgctttgctttcttttctctcttagctaaaacagataggtcatatctcaattatgtaacattagcatacccttttttctttctttctttcttcaatttctctgcagtgtgcagtgtgtgtatgctctttctcttttgaggttcttcttgctttctttggattcttggttcttattttttctgtttccttttcttttataggctcgagcctttattattcctagctcccttccttggctctaaagataaattttcccttgattttgccaatttggtggatatctgcttcgttttgtcaactaaacttttttcccttgcttactgagagaacactgcttgtaattgaagttgcttttctggctgctttctgtgtcttcaagtcttacttggaagactcagatttgctgcaaatctctcaatttcctcatcatcacaaggtttaatttcttggttttgctctatagctacttgcagaaagaactcaaagaagagatcatcatggtgaggggaaagactcagataaagcgtatagagaacgccacaagcaggcaagtaactttctcaaagcggcgaaatgggttgctgaagaaggcctttgagctatcagttctgtgtgatgctgaggttgctcttatcatcttctcttcaagtgggaagctctatgaatttgctagctccagcatacagtgttcaattgaacgataccgcaggcataccaagcatgataatccaactacattcagatcagttgaacaanatatgcagcatttgaagcaagaggcag

SEQ ID NO: 29039 - DNA, 1021 bp, Glycine max
  Clone ID: TF_GmC1804_1
ggtgaccaagccagcatttccaatcaagtaatcgagatagtgctccaactagctaatagagtgaaatatatcaacaaattaaaatcgaaccccaccaatccaaagctatcatacccttgcatgttcacgagcttccttttgattggtttgtgcagctgctaattattaaaatgacgagaacgaggataaagataaagaaaatcgacaacataacggcgaggcaggtaacattttctaagaggaggcgagggctattcaagaaagctgaagagctttctgtgctatgcgatgctgaggttggtctcattgttttctcatctaccgggaagctctttgattatagcagctccaggtacgtgtacggacgacgactggtatattataacacaccactcttgagtttttgacttttctctcagtattttgtatacacatactagtagacgtatacattgttgggaaacctaggggataaaaactggggtataaacatgtgtaaagcacgttcttaattccgttgctttcaattaatattaatatgtctgtatggttctttctatcctaattcctagccagtagtgccagtggtttatgtacggagtgagtatctggaagtctgttagagagagagagagagagagtgtgtgtgaaaactgagaggagaaggacggggattagatgtaatctcatgatgggtttggagcagaaacctcgtttcactcgcttatggttctaattttatggaaatttaatagtaggctattgaagtttccatgaaaggttgtgttgggagagaaaaaagaaaatgaagcattagttaaatagtaattcctaagcgatcgttttaactattttttttgtaaatattcgtggtgaaagagtcttgccccgttttgagcgttattaagattttttttcttaaaactgtaccaatattttttttaattaagaaaaaaactgcaccactatatatatgtttttgttggatttgtttataagtgagaagtgtataaaaagtaaa

SEQ ID NO: 29040 - DNA, 1186 bp, Glycine max
  Clone ID: TF_GmC1920_1
tttttgttaataagcatatctaagtataacattctctgaatacatgcaagatagaatcctctaccatgatataaaagtatcaccaactctctcaaatactgtcaaaacaaccaccaaaatcctgaaggtgggtgtgttgcggtggagaaagagaaatgcgaatccgaaaggagaatttaacatataagagtatgaggacctaatatcaatttacaatacacttatacacatattatgttcagaattcataagtcacaaacaaaatggaggtttcatgctttcatctactgaccattccaagtaaaaacatcataaccaaagctgccactatggataatcccgctcctgataaccacgccaaagtcaaatctctcgggatctactagataaaagtaataacaaaaaactcaaatactatctaatcaataaccaaattcctgaaggtgggtgtgttgcggtggagaaagagaaatgcgaatccgaaaggagaatttaacatataagagtatgaggaccattccaagtaaaaacatcataaccaaagctgccactatggataatcccgctcctgataaccacgcctcagtcaaatatctacaaaagatgaaccacttcccaaagtgcatcctttttttaaggaacccaaagaaatcaaacatacaatagcaaagtggaatcttgaagtatcagagttctgggtataaggtttctaagcctattctatacatgccttgaaatgccatgtaagcctctcatttgtaacatataagaggcagccaaaaccatgtgggacctgcgggtgcagatgaaaatccaaaatggggcaaaaaggaaatagtctctaaatgcaccaagaacgcggagccatgcaaagttgctgtttccagccaacctctctggtcatttgaggtaaaacgctttccattctcgcaaccttacttagtgtggtgccttccttcgcatcttcaaccgtcgaattgctactcctcccaaaacaccagctctaatttctcgttcagttgggcatgtttgtgctctgagagagcgagaaattaagccaatgggtcgagggaagatcgagatcaaaagaatcaacaatgccaacagcagacaagtcatgttctcgaaggggaggaccgggttgttcaagaaggctcaggaactttccatagactccatgggagga

SEQ ID NO: 29041 - DNA, 469 bp, Glycine max
  Clone ID: TF_LIB3108-017-Q1-K1-D12
tctcatgctcccggtcgacatggccgctggatttcgagcggccgcccgtgcaggtgctccccttcccccacatacactggctcttgggggtttatgttctcttttccccctctaattttggtaaaaatctcactagctttttgcaaagattgttccccaacataatctccaaaatagaaagccttgcgcaccactcaacagaaattaggtcaaccccattttcttacacatccatctctttatattttggcttattctgtgaagtgggtaattcttgaaaatattgatgagtatatatattcaaaatggttaaagagaaaattcacatcaagaaaattgataatgcttcagcaaggcacgtcactttattatagagaagaagagggcttttcaagatatctgaagaaccttcatttctatgtgatgctgatgatgctctcaacattttctttactactggaaaactctt

SEQ ID NO: 29042 - DNA, 491 bp, Glycine max
  Clone ID: TF_GmC134_4
cataattattattcacaccttttgttttgttttctttccctttctcttgagtttatttggtttgatgatttgcttttttttttttgataaaaaaattattgaataatagcactaactaattatttggtataaatattacttatagcttccaaccatggaggatccaaatcaagctccacaagcgtcttctcagaagaaaatgggaagagggaagattgaaatcaaacggatcgagaacaccaccaataggcaagtcaccttctgcaagcgccgcaacggtttgctgaaaaaagcttatgaattatcagttctgtgtgatgctgaagtcgcccttgttgtcttctcaacccgggccgtttgtatgagtatgccaacaacagtgttagggccactattgagaggtacaagaaggcaaatgctgctgcttcaaacgcagaatccgtatctgaagctaacacacagttttaccagcaagagtcatccaaattgag

SEQ ID NO: 29043 - DNA, 2602 bp, Glycine max
  Clone ID: TF_GmC7683_1
ttcgttctttgacgtccgggaacattcatctaagtcttgtcctccctccttcttcttctctcccctgcttctctttctccttccaaatcactcctataattttcaattcaaaggtggtatttgtgaaggaaccctaaaatataattttttgaccaaagatggggagaggtaagattgcgattcgaaggatcgacaactccactagccggcaagtgactttctcaaagagaagaaatggattgctgaagaaagctagagaattatcaattctttgtgatgctgaagttggattgatggtgttctccagcactgggaagctttatgactatgcaagcacaaggtaattaattaattaagatcaatttatttttagacaaatttattagtcctttcgctttaaatgatggaaatcgatctaaaattttgggtgcaatattattgtctcagcttttctttgctaatataaaatctgtactatataaagtgaataaaataattacatagatagtactaaaatacaagatgattgtgattctcgtatacttcgtggttggtgtcatgccgtgctgtacgaaacattttatatatgtccacttgcattaggaatatatctgtgactgtgacttcaatttctttaatggttgccaagctataattaaccctctcccccatttgatattgcctaggttgagtgtatataataagaaatgtgcatgcgcgtttgcatggtacggtgttaatcttcatgacactttagcatttctgatagcagaataactctgagaaatggttttctcttctgcctcctcaatcttcccaatctttcttggtcttttcctttttgtctccagctagcgcctccagttttgtgttattaattggctccaagttacaacacagtatgatactcctagctaattaattaataaagttatgatgaaaaggacacaaacgtaaccttccactttcactctattaatctaagaactcatattagttttgattgtaggactatttttatgtaggtattttaaactggtaaaacctcatactataagatagaatattacagattaaggcatattgtggtataatatttgggtaatctataacttacctacttgatcgagcatggatacgggaatgcatataacttatattctcgaagcagtaattgagtttattattttttcttttacatcgagtttattatgaattagtactaatctataaaatactctcgtaaaattacttttaacataaattactgaaagaattgttcttctggataagtgagctgccttatattacaatatgattcacgcatgcatgcgacgatgattgtttcacacatgcgatgtacaaagtgaagacacacaacaaaaggaaacaatagatttagctacaatatatatatatatatatatatatatattggaatatgttaaagctatgatgcaaacctaaagttatcaaattaattaacaatcctagttgtttcaaatgtatcggaaatgtctcaaatttcaaaatgtgttggaaatgtctcacaattcactttggatactctgtgtacaatctttagcaataaagtgataacatttgtttcccatactcccattattactattgaattgtgcacctctcattgtattaaaaaactcattttgaaatacaaataggcatattcctaaatgcaatgagagatgtagaatttaaataagagagtgctggattcaaatgcctaaagtgatttaatccaacaccttggatgaatcatgatgagagcttaaatttaagaataggttaacccaatccaactttcagttcagatttaaatactgtctaaatcggttttatctataaggttggtaagttaaatgatttgggtcattaaagtccagaactacaaaaaaaattacattcaaaaaataccaaaaaattaagtgatttagatttttgacaatgtatatcagaaaatgacaaggatgaagctcgtgggtagagttttcaaaatggatcaacctggccaggtcacaggttattagtgaattaaacagattggtccatttagactaaaaaaattagaaatgcattacagaattgtattttaaaaagtcttgcttcaactaggtgcaattgatgttaactagcacgctagccctattgaaatggtatctcgttagacatggtgtgacaatgctgcctgagcaccaagtcaaagaagaaaacattttgtagtggagagaattccccttcaatgttgctggtaaaccttaaatgctcaatccttgaaggtcccgcgctctctctttttggaaagaaggttggagaagattaattaaaagaagaggttaaacccaattcctaagtttaacttgtgagttaagtgagctataggttaatctaacttgaggtgaggattgtttggattaatgaggattttggggccggcatctgtgggagttttctgtcaatttttttttttgggttgatttagatgtatatatgactctacgtaccatgctattctgggtacttattgtgctcaaagcttagctcttttattcttcaataaatacatttttgcttataaaaaaat

SEQ ID NO: 29044 - DNA, 725 bp, Glycine max
  Clone ID: TF_GmC138_3
gactgcggtttttggctcgaggaagaagaaagatccgtaaattaacattctctccctcccttcgctataatagcaagcttttcaagcatatttctggggtttggtcccttttccttgtttggggttttcttgggaaaaaagaagtaattaggtataataatagtataactaaagcaaaaaaaaagacagtaatatgggaaggggtagggttcagctgaagaggatagagaacaagatcaatcggcaggtaactttctccaaaaggagagctgggttactcaagaaagcacacgagatctctgtgctctgtgacgctgaggtcgctttgattgtcttctcccacaaaggaaagctctttgaatatgccaccgattcttgcatggagaagatactggaacgctatgaaaggtatgcctatgcagagagacaacttgttgcaaatgattccgagtcacaggtttgttatttgttccacaatattttagccgaaagacatttacacaaatacaggcatgaaaatgtttaggaaattaaagcttatactttaggataataataataaataaaaaaagcttatactttaggcaatagttgtgttttaatttctttttcattaagttcttaaagtgtttttttccctaaaaatagtacccatgcacttttgtcatatttttctcttatgattattaaatttatacaatcaaaagaagtgtgtgcattctttc

SEQ ID NO: 29045 - DNA, 163 bp, Glycine max
  Clone ID: TF_19052527
ggctccaggaaagatgcatatcctcatgatagagaactccacctaccgccaagtcacttattctatactaccgaatggccttttcaataacgccaacgagctcaccgatctatgcgacgccaacggtgctatgatcatgctctccagaactgggaaactccag

SEQ ID NO: 29046 - DNA, 932 bp, Glycine max
  Clone ID: TF_GmC182_3
aaagaactccaaccctaagctgcactccatttttttctggtggagatggaaaatcctgaggataaaaaggaaacttagaaaagagagtacatatacaatacaagacaacttcacacacacaacactttcctctctctctctctctctctctagggttccgagtttgaagttgaaagtgttgaactatctctagctagcttttcacaaatttggttgcacttgcaactgaggcaggaaagaggggcacgagaggaggaagaggaaagagaagaaaaaccaagaaaagtggagaaagggataggtgttgtacagaaatagaaattaaaattgagtgaaaattaaagagaagaaggagtgatagggagatatgggtaggggaagagtggagttgaagaggatagagaacaagataaacaggcaagttacgtttgcaaagaggagaaatgggcttctcaagaaagcctatgagctatctgttctctgtgatgctgaggttgccctcatcatcttctccaaccgtggcaagctttatgagttctgtagcagctctaggtatgcagtgtgtgttgatccttttttttctgtttcttctctttgtgagatactgaaaatcactttttctttgttgacctatgagatctacttgctccattattttatattttatttttttggtgcctttctttggatttgtttaatttgttagcttcaacaattaaggacaaaattatttagtgactcctcattttttatatttattattatgtgaacttgtggctttttgtaagaagccctatatgtgcttcattgctccattagaatagtaagagttcatttctaatttgatcttttttgtaagggatggtagatttatcagatctagtaatatggcacatgatctggtggatatctaatatttaaaaaaaagggcg

SEQ ID NO: 29047 - DNA, 237 bp, Glycine max
  Clone ID: TF_LIB3242-424-P2-J1-C3
gattttatacattcttaattgtgtgagtgtggacatactctgagcgtgagaaagataatgggaagaaagagagagagtgatgggaaggcgaagagtggagtttaagagatttggcaacatgatctactggcgagtgatcttcgcataacgaaagatcgggcttttgaagaaagcttatgagctgtgcgacctttgagatgccgaggatgctctcatgatcttctacaatagaggaaa

SEQ ID NO: 29048 - DNA, 525 bp, Glycine max
  Clone ID: TF_uC-gmrominsoy040a11b1
tttggttcttatttttctctgtttccttttccttttctaggctcaagccttcctagctcccttccttggctcaaaagattttcccttgattttgccaatttggtgcatatctgcttcggtttgctttctgtgtcttcaagtcttacttggaagggtcagatttgctgcaaatctctccatttccccatcatcagaaggtttaatttcttggtttactctatagctacttgcagaaagaagtcaaacaagagataatggtgaggggaaagactcagatgaagcgtatagagaatgccacaagcaggcaagtaactttctcaaagcggcgaaatgggttgctgaagaaggcctttgagctatcagttctgtgtgatgctgaggctgctctaatcatcttctctccaagagggaagctctatgaatttgctagctccagcatgcaggagtcaattgaacgacaccgcatgcataccaagcatgttaatccaactacattcagatcagttgaacaaaatatgcagcatc

SEQ ID NO: 29049 - DNA, 438 bp, Glycine max
  Clone ID: TF_uC-gmroLIB3258052e05a1
gaagaaactagcaaacttgaggatgcaaatattacattccaaatgatatttttcagtcaattctttttccacattcaggcatttctaatggtctatgcaaattatatatctcctaagtaattcatgtgaagattgtaaactcccatgcatatattggcgcaagatatctataataactaccttaatttctgaagctgaactcccaagttgacaaggttcttcttttgatttgttgtatcggtcaattactgatttcatgccggagctggcaaaatcgtagagttttccggtgctggagaagatcataactccgacttcagcatcgcacaagatcgcaagctccttcgccttcttcagcaaaccgctcctccgcttcgagaacgtcacttgcctgctcgtggaattgtcgatcctccttatcacgatcttacctctccc

SEQ ID NO: 29050 - DNA, 1119 bp, Glycine max
  Clone ID: TF_GmC1919_1
actggaaatatggggagagtgaagcttccgatcaaaaagattgagaacacaaccaataggcaagtcactttctccaagaggaggaatggactcatcaagaaagcttacgaactttctgttctttgtgatgttgatgtggctctcatcatgttttccccatcaggaagagccactttcttctctggcaacaaaagcattgaagaaattctagaacgatatgttaatctttcggagggtgaacacggaaggatgcataataaagagcacattcaaaagttgcttagtaagttgaaagatgaagctggtcaaatatgtcaagcccctagctcaatgacttcagattcccaaattgaggatcttcgaagagaaattttcacttgcaagtctcaattggaagagatggagaagcgactaaggatatttgaaggtgatccttcagagatcacaacgctcagcgaggctgaatatcgtgaatatgtccttcgggatactctaaaacaagtgcaactgcgaaagtgtgttttggaggagtacaattctcatgccactcattctccacaggtacatgctgcaaaaactgtagatgtaaatggatttatttccagagcctcaaagaacccagtagattggtttccacagggagatccactacatgtccagactctgaactttgcgaatgtttatgacactgctcttgtcagagatcaacaatcacatcattgcacggttgttgatatgttaacaccaacttcgacccttctgcattccgcaaacatggatctgaatggccaaatgaatccgaggagtagtttagacgctggcattagtaatacattacatccccagtttggacaagctattcacaccaattcgtcctcttggcagcatcttaatcctttaggtacttactggagttagataatgtggcttgattttgttatttattttcatttaaggatactttagacggctactctttacattcttgtaatttaagttgacttatgcaatacaaaccctagtggtcattgatctcatttctctcttctattctggttgggtatatgtattttgatgatcagatcatgaaattaatatagtcgtcgagattataggttt

SEQ ID NO: 29051 - DNA, 842 bp, Glycine max
  unsure (1)..(842): unsure at all n locations
  Clone ID: TF_GmC742252_1
atannngtgaaacaaagaaataaacatgcgactcctagaccatgaatgaatccatggtcacttattttcgtgccatgatagctaaacatcaaaccaagcacgtgacatttctcaatggaaaaaaggattaggccaaaagccattttgttgattaacatctccgacaataggcatagcctcattcccaccaccaccaccattattcatcaaattcatgaaccaattctgcttctgcatgagatccatgttgatatcaaacccctgatggccatgctgactcccttgtcccttgtcttcaaccttggcagcaacatcagtcaccgctggtgctgcaatctgcggttgactttgagcattcttagtcaacacctcaatccttctgttgatgtccttcaagttctggtcaatcaaccatgccaaatcattcaaatcaaccatgcttatattgtgcataatcttacctgcactaaggtactgaaacatgagctgagtcatctccttttccctattatccttcctttgtttcttcaactggtctttggccttcatgattctctgcctcagaaaactctcttggttcaccatcttcttgctttgctccaattcaggcattctcctgaacttagcaagcaccctttgaacccccatcggggatggccaaacctcgggttgaggatcatagggactgtaaacaattgcacatgcatcaatcccacaaagggtgctaagttcactaaccttcttcattagacccttcttcctcttcttgaatgttgccttcctagctgagtcgttggctatgaatgccaactttaccttctttctagtcatggtgctgatga

SEQ ID NO: 29052 - DNA, 514 bp, Glycine max
  Clone ID: TF_GmC734_2
gttttccaaaaggagaactgggctgcgcaagaaagccaacgaaatctctgtgctctgtgatgctcaagtagcactgattgtgttcaatgctaaagggaagctttttgagtattcttctgaatccagcttgcttcaaagtcaaactgaaatagtactcgggaaggtttttaaattgtgcggccgtgattacaatttcgttgcaatctttggtattgtggaaaattaagaaaaatgcagctgatgttgtaacaattgcgattatgacgcggttgtgatgagttgaaaaacttgatgctgccactcatggtcacagacggtgtttccaaaccttggtgcagtaaaaagaaatgaaatagtagtaatatacatttccatacaatttcctagctaatttgttattgtgttttcattacctttttttatttattttttcctattttgggtttaatgcattctaccctctggtgacacatatccgagttataattctatggaataagtttacattatattc

SEQ ID NO: 29053 - DNA, 327 bp, Glycine max
  Clone ID: TF_GM459L07.C16.o13.fg
atggggaagaagaaggtggagataaagcgaatcgagaacaaaagcactcggcagataacattctccaagaggcgcaatggattgatgaagaaagctcgcgagctatccattctctgcgatgcgaaggtggcgctgctcatcttctccagcaccggaaagctctacgagctctgcaacggtgacagactcaaaaatagcgttcatcctgacagtgtgggtgtttggacaagtatcaaaaaccttcatatcaactgcatggtcagggtacaggtgccaccatttcataccttgtaccatatccaggggagtggcagaagggttaattga

SEQ ID NO: 29054 - DNA, 290 bp, Glycine max
  unsure (1)..(290): unsure at all n locations
  Clone ID: TF_LIB3242-252-Q1-J1-E2
cataattattattcacacctttagtttagatttctttccctttctcttgagtttatttggttagatgatttgcgagggtttttttgataaaaaaagtatcgaataatancactaactaattattcggaataaatatcacttatagcttccaaccatggaggatccaaataaagctccagaagcgtcttttcagaataaaatgggatgagggaagatagaattcaaacggatcgagaacaccaccaataggcaagtcaccttttgcaagcgccgaaacgttttgctaaaaa

SEQ ID NO: 29055 - DNA, 266 bp, Glycine max
  Clone ID: TF_700786334H1
ttggcagcgcagtgacggtctcgatgttgtccgcaatgaggtccctggactggaggctttagcacatgacacgagaccgtcatggcagcgcagccctgccacgtactatcattggcatgagccatgggtactgctgatggcgagggagaaggttcagattaagacgattgacaacgccactgcgaggcaggtcacattctccaagcgtcggagagggctcttctagacagctgaggagctttcggttctaagtgatgctaatgctg

SEQ ID NO: 29056 - DNA, 855 bp, Glycine max
  Clone ID: TF_GmC401_1
gttttcttgcttattcttcttttctcctttctgatcactaccatggctagaaagaagctgaatcttacatacataaccaatgacccgaagaggaagacaacattgaagaaaagaaagaatggtttgatgaagaagatgaatgaaattagcactctttgtgggattgaatcatgtgctataatatatagtccaaatgatcctcagccagaggtttggccatctgactcaggagtccaaagggtgctttccaggttcatggaaatgtcagaagtgaaacaaagcagaaagatgttgaatcaggagaacttgttgaggcaaatgatcaacaaaggccaacagcagttgacaagacaaaggaatcaaaacaggaagaaagaaatgaccaatcttatgtttcaatacctgactgctgggaagatttttggcaaccctagcttggtggatttgaatgatctctcatggttgattgatcagaacctcaatgaaatagaaaagaagatcaccatgctccaaatccaagaagtgactccagtgatagaaaatggagaacaggaacacatgcatcatgttcaagggctagagagcaacatggacaccaagcaaaagaaacattgatccatggaatttatcaatggtggtattggggatgggatgctcccattggagatgttaaatgtccaaaatagtccttggcctaaagcatctctcctttaaaaaagtatgttcttttaagtgtttcagttgtctttcccatttaaatcagtgatgcttaattttattgtctttctttgaaagtgtctgtgaatacaatagccgtatgtcatagtttggaaaatagtcaaatcttcttgtttt

SEQ ID NO: 29057 - DNA, 373 bp, Glycine max
  Clone ID: TF_LIB3242-181-Q1-J1-H8
tccggctgcaagaagccgccaaaagggcacacacaaaatctgccatacacaaaagactttatgatgtttgagtgtgtcttactatggccgctgcagtgctcatacaccttgtcacggatggagaagatcataagggccacctcagcatcacagaagccagagagttcgtaaccctttttgagcgaaccattcctcctgtatgcaaatgtcactagacggatgatgttgtactcaatcctattcaggtccagctttaacatacccacgttgatattaatggcttgctttatatctgtttgcgtacataaatcaaactagtctttttagaattccagatcgaaaagacataattgcgtatacagtagaatagatt

SEQ ID NO: 29058 - DNA, 1543 bp, Glycine max
  Clone ID: TF_GmC1003_1
ccgagaagacgacagaaggggagaactgataatgttataaagaaacaataattatgtatcaacaagaattacccattaaaacaaagaaaagaaaatttacttggttgagttggtctcaatgattatattagcattgaaatttcgcagcgaccaaatctgttatgaaccaattatatctctaaaagatttgattttttttggagaatcgattgtcttgggtgttatatatactccaacggtagcattaagaaacaaccacagcttctttcctcgatcactttctttcatgcttcttaggctttgatcgatctcctttttaccttctcatcttctctctttctccttccttctgccagttcgtcttgggacagggatttgactacaggataaaatgggtcgtgcaagaatcagcttgaaacatatctcaaatgagagatctcgcaagaaaactttcatggagagaaggaaagtacttataaaaaaaatctctgaattttccaccttgtgtggagttgaagcatgcttgattgtgtatgatgatgggaatggtgacattgaaccagtgacttgtcccaaagaccctgtattggcacactccatacttcaaaactatgagtttcaaaagaatcagagacctcccaagaagtttggtattcaggactttgttgaggataggaagaacatcattgaagctgagatttccaaagtgcataaagagatcaccaacatcaagtatccaacttcggatccaagtttcataaacatggaagaggatcaattgagggccttcattgctctggtggatgctaagattaggacctgtgatcattctttgaaaaacatgcatcaaagtgaagccaacttcatgcaaaacatggcttggggaagtgcttcctcctcccatcctactcctatggagccacttaataataatgggagggtggatgttacaaactcaatagatcaggtttatgaagctatgcaactagttgatgctccctttagttacattccagacatggttcagaaaagttttaattgcttgcaaaacatctctcaaagccaacccatacttgatgttgaggatgagatggtaggttttagtaatagagttgatgtgtcactggatacaactaatcaaattgctgacttgttggactggtttgatggacctattattggttggtctgatcttgtggattggactagtcaacctgatgaatctcagaatgagcaacaaggtggaggagatttggatggatttcaaacagaatgctataatctgaatttctgaatggctaactatgagttaactttgattttgatgctcttagtatttagtttaatgtgtaacttttagccatttatgtgcttgaaagtgctttcagctggaaatgtaggttttatgttgctagaaagtgtaggtttgggtatcatatatattgtttcagagtattgtctattttgcatataatatttatttcgaattcattgttcaaagtttgaatttacacatatatgataattaatgttttgataaaaa

SEQ ID NO: 29059 - DNA, 633 bp, Glycine max
  Clone ID: TF_LIB4391-011-R1-K1-G8
gcttcttaggctttgatcgatctcctttttaccttctcatcttctctctttctccttccttctgccaggtaatttacaatttattattattgaattgttgttttttatttagttaaatactatagtccaagttctaagcatgtctaattaaccatctttgtattttttttcctgtattaaccctccagttcgtcttgggacagggatttgactacaggatgtaagtaaagtctgactaaaaattgtttccatcaaggatgaaattcggatattattctaacaatttaatcttaacttcagcatattaagcatattaaccagttgtgtttaatcatctttgtatattatgttcttattttgaagaaaatgggtcgtgcaagaatcagcttgaaacatatctcaaatgagagatctcgcaagaaaactttcatggagagaaggaaagtacttataaaaaaaatctctgaattttccaccttgtgtggagttgaagcatgcttgattgtgtatgatgatgggaatggtgacattgaaccagtgacttgtcccaaagaccctgtattggcacactccatacttcaaaactatgagtttcaaaagaatcagagaccctccaagaaggttgggtattca

SEQ ID NO: 29060 - DNA, 2070 bp, Glycine max
  Clone ID: TF_GmC1805_2
gaaagagagaagtaacatcaaggtgcagagagaggaattgaagcatgggaagagggaaggtggttctggagagaatacagaacaagatcaatcgccaagtaaccttctcaaagcgcagaaatggtttgctcaagaaagctttcgagctatctgttctatgcgatgctgaaatcgctctcgtcatcttctccagccgtggcaagctttttcagtatagtagcactgagtatttttcttcgatctctcatcttttttatcattataatcctaggttttgatttttcaacatatattgctggttggtttgggttgtttttttagtattacacacacacacatatatatatatatatataggcaataaatctctgaaatttgcgtggttccgattgttttcttctattaattgggatgtagctagggttttccaattcttcatccaccccctttcccctctttttgccactttttatttatttatttgtcattaaaacagaaaagataatatcctctcattattcatatacgaacattatgtatcttatatgaattaaatagaggtggccgggggtattgtaatttggtgaagggtaatttttcgtacgtctaaaagaaagcaatactcagtttttctttcttttcttttttccatctcaattttcatgcatgctgttatgccacggtatttgtcatccgatcaattactcttgccatattaagaattaaaaaatagatgctattttcagcagaacaaaagtattatgctaattagtcacttgtagaaaatatcaactttctatgagaccccatgtttaactttcatgaaaagaatgttaattgggagctctagaaatagtattttcctattaaaagaaacattttttttactcatataataacttggtagctgtgcagatctgtttgtcgcttacttcgtttcaattctaaaaaaaaagaacacagtaccgtttccctttttttaagacataatattttactcataaatctaattactagtatacaagctttaccaaaaaaatactatattcaagtgcatgtcactgtccaatatgatttaatttgtttgtttattagaatgaaactatgattacccagcttgttagaattatattatttatttaagaataagtattttcttataaattaaaactaaataactaatattatttgaatagttaacattaaaaaatattctttagagggtggtaattctttgtttgaattaggtgttttgcatgcttttagtaggtttagattgtttcgtttatagagaaaattaacagtaaaatcactatttcagtattatggctaatttttttctcctcaagtcccaaatcactaggataagtataggtcattcatgtaggggtaaaggctcttttgttagggggtagagtagtcactacctgtaggtacaagacacacacagcttccttcttctttttactcttttttaactaagggttattttgtaattaagttttcatattagtattgtcatattctcttctagctcactttcatcctttttttcccttcatatttctatctttattttttatatttatcatatcacataggcggaggaagatagaaaaaaaccaaaatatgatttgttctttctattttcctgcacctatatatacaccaaaaaatgggatgtatatatattggtttttttcttgtatccggcccgttcataatcataatataatgattcaacaatattaattcatgttttgtttcaagatagttaaaacaggataggaaagcaactgaaaaactcttgattgattatttatacatataataattttattattaggtctccctgtaaatctacatataaaactgtacgtaaactgggacagattggttcaaatatttcttttagtcacgcactactaaaatatttcttttcagcattaacagaatcattgagaagtatcgtcaatgctgcttcaacatgtctcagactggcgatgtagctgaacatcaatcggagcgggtttgcactacctttaattaattctccattaatatctattg

SEQ ID NO: 29061 - DNA, 426 bp, Glycine max
  Clone ID: TF_LIB3242-724-P1-K1-D8
ccacgcgtccgtacggctgcgagaagacgacagaaggggagagtgagttgggtaattgttggagggtctatggttcagtccataaatacctgtctgctaggccaacccacttccatattttgcatcctttgtacctgagttcaaggttaacaccaaataacacatatagtgcagattcataagctttcaaccatggaggatccaaatcaagctcaagaagggtcttctcagaagaaaatgggaagagggaagattgaaatcaaacggatcgagaacaccaccaataggcaagtcaccttctgcaagcgccgcaacggtttgctgaagaaagcttatgaattatcagttctgtgtgatgcggaagttgcccttgttgtcttctcaacccgtggccgtttgtatgagtatgccaacaacagtggtagg

SEQ ID NO: 29062 - DNA, 503 bp, Glycine max
  unsure (1)..(503): unsure at all n locations
  Clone ID: TF_jC-gmXLIB3563P038dh09a1
ttaggaagcagggaaagaccgagcagcnanggcacgaggaaagaaccagancaagagganagagaacaccaccaaccgccaggncacnaaaacnaaacgacggaagggccnnnncaagaaggccaacgagcncaccgnncnacgcgangccaaggtttttattannanggnctccagcacngggaaacnccacgagnacaacagccccnccaccncaacaaagcanggcngcgaccagnaccagangacncnaggagncgancncnggaacncncagnacgagaanangcaagagaacnngaagaaacncaaagacgngaanaggaancnncgnaaggagaanaggcagaggaagggagaangncngaacgaacngagcanggaagaacncaagcnccnngaggaagaaanggacaaggccgccaagggngnncgngaacgnaagnnaaaggggaaaacaaancagaangacacccaaaggaaaaagcnnaaaaacgagaaag

SEQ ID NO: 29063 - DNA, 451 bp, Glycine max
  Clone ID: TF_6747007
ctggttgttgtttaaattccatgattacaattattagcttaaaattaaagggtgcattgacaaagactctggggaccttgcaggtctcagaggatcccggaaatctatcattctgggcacacaacacagaagggatgaacatgtgaacaacccatcaaacacgccggctctctgcacaatcggacactagaccctgagggagctcagaggcgggaatgggggccgagccagtcgtgaggctgacctgattgtgactgaggagctggtcatgatcactttcgagacctatgtgtatgagccatgactcaggatagacctctatacgaattggttggagttgtggtgatgtacagcaatgtacatgctgtatgctgcggtgcgtctggtggacgacatgctgaccagcaggccagatatgcagaatttttaccgacccgcctgggaacctgtg

SEQ ID NO: 29064 - DNA, 847 bp, Glycine max
  Clone ID: TF_LIB5118-019-A1-PF1-B1
attccgtgcctacccttcaaatattagtgtctcccctcaccttgaactgcaagatgaaccttaaatcagttgcacttctcgctctccctgtctaagacctccccagagttttgctgctgctattatgaggatcagggaatcagaaactactgcactcatttttgcatctggccttatgatctgctctggagctaagagcgtagccacagtctaaattggcgcttcgggaccatgctagaattagcccaaagcttgcattcccacctagatgtacggagtttacccattcagaatattgttggctcttgtgatgtaaagttccccattctactggaagctcttgcctattcccatgctgctctcttgaggtatgagccggagtcgactccctcagctcacctgatgatgccacacaacttgataactacctctgtaagaatttccttggaggccaaactgaatcaggcccattaggtgatggtatcttgcatgccatttcctttcccctttcccctcgttcattgcctccccccgccttatcccactcccttccctctcatccttcccctttatttatttcccccccttccccgcctttcttctttttctcccccccttttccatcccccccctcatttagtatccaccttctttctcctccctcccccccctcccccccccccctccctcctccccctacgtcactccttgtcctctctacctcccccccccgccccgctctcccccctcgcctcctccccccttcccctcctccttttccttttattctcttccccccctcccttccttttccactattaccccccatcccctctcttgccccccc

SEQ ID NO: 29065 - DNA, 1697 bp, Glycine max
  Clone ID: TF_GmC1803_2
cccacgcgtccgcttttttccacacacacaacacaaatacctctctttctctctcttcttcgcattcttcggacatacaaaaactcacactctctctctctctcttcaaatcaaaacccctcacaaaattcacaacaacatacacacaaatcccaaatcctgtcttctcatataaaagaacccttctttcgaatccttcccgctctctctctctcttattctttttccctatccgattcaattcgcgcgcagttccaaaccctagtccccctctccgagctctgtgatttttgggttgataaaaaaaattagggtttgatggctgaccaaggattggaagggagccaaccagtggatctacagaagcatccttctgggatcgtctttaccctcccatcaaatcaaaccctttttaaacgctcaaatataaatttctggcaccaaatccttcccactctcctcaattctattcatctcaactcaacaatctctcagatccgtcaaacaaaaaataaaacatagaaaaccctagttctataaatatataaaggaaaaaactttttgctggttttgaggcatagcattaaattggattttgattattcatggctgaacaagcattggaaggtagccaacctgtggatttaacaaagcacccttctgggattgtgcctacccttcaaaatattgtgtcaacggtcaatttggactgtaagttggagcttaaatcaattgcacttcaagctcgaaatgcagaatacaatcccaagcgttttgctgctgttattatgaggatcagggaaccaaaaactactgcactcatttttgcatctggcaagatggtctgcactggagctaagagtgagcaacagtctaaattggcggcaaggaagtatgctagaattatccaaaagcttggtttcccagctaaatttaaggattttaagattcagaacattgttggctcttgtgatgtcaagttccccattcgacttgagggtcttgcctattcccatagtgctttctcaagttatgaaccagagctgtttcccggactaatctatcgcatgaagcaacccaagatagtcttgcttatatttgtctccggaaaaattgttctgacaggagccaaggttagagatgagacttacacagcttttgagaacatatatccagtgcttactgagttcaggaaaaaccaacaatgattactactgtcaagagagcaggagcaagacttgattgaactgtaaatatgaagaccagagatagaaatatctgtaatcaggattgagttttaataagacacctgtgtttgttctgtctttttctctcttttaagaaaagggatcctgctttagtaaagtggaagaaaaaaaaaaccgtgtattgaatttgactgtagaaaaagagatatataagaggcagaatgaaaagaaaaagtggaagcttgtgcaaatcatgaatatctttcactgaagtggaaactatttttggttcatttcaactatgagcaactttgttttttagttaatcaagttctaaagcttaaggatagtgtcttcgtatactgttcaaaacagcaacgacgtgtttaatacactatgttttatgaagctagcaacatctaggtattttaatttcatattggaatttgaagacgttatgataaataaaacactacatttgataactaa

SEQ ID NO: 29066 - DNA, 1561 bp, Glycine max
  Clone ID: TF_GmC1803_9
ccacgcgtccgagcaaccttacaactcttctcaatcccatcaaatcgaaccctttttaaacgctctaatacaaatttctggcaccaaatccttcccactctcctcaattccattcatttcaactcaacaatttctcagatccgtcaaacaaaataaaaaagatcgaaaaccctagttctataaatatataaaggaaaaaagctttttgctggttttgaggcatagcattaaatcggattttgattattcatggctgaacaagcattggaaggtagccaacctgtggatttaacaaagcacccttctgggattgtgcctacccttcaaaatattgtgtcaacggtcaatttggactgtaaattggagcttaaatcaattgcacttcaagctcgaaatgcagaatacaatcccaagcgttttgctgctgttattatgaggatcagggaaccaaaaactactgcactcatttttgcatctggcaagatggtctgcactggagctaagagtgagcaacagtctaaattggcggcaaggaagtatgctagaattatccaaaagcttggtttcccagctaaatttaaggattttaagattcagaacattgttggctcttgtgatgtcaagttccccattcgacttgagggtcttgcctattcccatagtgctttctcaagttatgaaccagagctgtttcccggactaatctatcgcatgaagcaacccaagatagtcttgcttatatttgtctctggaaaaattgttctgacaggagccaaggttagagatgagacttacacagcttttgagaacatatatccagtgcttactgagttcaggaaaaaccaacaatggtatggaagtggctctttttcaattgctataggatatacatgttgtaatccctgggctaggaatataatgaatcaatatcattgtctctattatttttttttctttgttcagctatcagaatataattgtgtcagatgtagggctgaggttttcctaattgaaatgacgaaattctttacgcagtttcttttctgggtcatatatttgtataagttctgaaatctgaataatgtaaaatgcgatttaactacaaaagtaaactgaaactttagtttggaggcactcagtgtgactagtagtgtgtcatgaagtttatcttgttagttctgatgtctttggaatatttgctattaatggcacagattactactgtcaagagagcaggagcaaggcttgattgaactgtaaatatgaagaccagagatagaaatatctgtaatctggattgagttttaataagacacctgtgtttgttctgtctttttctctcttttaagaaaagggatcctgctttagtaaagtggaagaaaaaaaaaaaccgtgtattgaatttgactgtagaaaaagagatttataagaggcagaatgaaaagaaaaagtggaagcctgtgcaaatcatgaataactttcactgaagtggaaactatttgtggttcatttcaactatgagtaactttgttttttggctaatcaaacactacatttgata

SEQ ID NO: 29067 - DNA, 1091 bp, Glycine max
  unsure (1)..(1091): unsure at all n locations
  Clone ID: TF_GmC1803_8
tctctttccacacacacaacacaaatacctctctttctctctcttcttcgcattcttcggacatacaaaaactcacactctctctctctctcttcaaatcaaaacccctcacaaaattcacaacaacatacacacaaatcccaaatcctgtcttctcatataaaagaacccttctttcgaatccttcccgctctctctctctcttattctttttccctatccgattcaattcgcgcgcagttccaaaccctagtccccctctccgagctctgtgatttttgggttgataaaaaaaattagggtttgatggctgaccaaggattggaagggagccaaccagtggatctacagaagcatccttctgggatcgtgcctacccttcaaaatattgtgtccacagtcaatttggactgtaagttggacctcaaaacaattgcacttcaagctcgtaatgcagagtacaatcctaagcgttttgctgctgtcattatgaggataagagatcccaaaacaactgctctaatttttgcttctggcagttgtactggagctaacaacaatctagcagcagtatgcccgtaatccaaagctggcttcagcatgaagcaacccaagatagtcttgcttatatttgtctctggaaaaattgttctgacgggagccaaggttagagatgagacttacacagcctttgagaacatatatccagtgcttactgagttcaggaaaaaccaacaatgattactgtcaagagagcaggagcaaggtttcctggtagagaagattgcggaacaccggcttgaattgattgaactgtaaatatgaagacaagagatatctgtaatctggattgagttttaataagacatccctttttgttcttgtctttttctctctttaaaaaaaaaaggatcctgctttagtaaagtggaaggaaaaaaaactgtgtattgaatttgacactgaaaaaaaaagagatttagaagaggcagaatagaaaagaaaaagtgagaaattctaagcttgtttaggtatggttaactcaagtaagcangatctctcaccattagtgcgatgcaaatcattaatat

SEQ ID NO: 29068 - DNA, 2175 bp, Glycine max
  Clone ID: TF_GmC1803_1
ctatttatatcccacattctcaaccaattaaaacccatcccaatttcctctctcaaaccaatccctcagacccctattttctctctctctttcaaaattccaaaacccatcactaacaacattcttacaaatcccaaatcctatcttatcatataaaagaacccttcttacgaatccttcccgctctatcgaacaatgtctttttttccctatctgatttaattcatgcgaagatccaaaccctaatccactctccgagctcttatatttatttcacacatggttgtttcaaagaataatcaaactgaagaagaaactaaaattgaaattatggagatttttataaataaaatctttttcttctagtattaagccaagccacctctattatgtatcccataatatattcttttgttactttcatatgttaatatatagaactgaatccttcccactactctccaatcctttagtttaaactaaacaatctataagattgcttcaaggcaaaatcaaagaattgaaaacgtagttcattatagatttaaaagaaaaaagctttctgcggtcgttcagacatttcattatattgtgtttacattttttatggcttgtaaggtgttctcagccaatttacatttgaagctcgtaaagcacagtactatcctaagcgttttgctgctgtcattatgtggataagaaatccccaaactaagggacttattttagcttctgttaaaatagtttgaactggagcttacagtgaacaacagtatgctatagctgctatgaagtaagctcgtgcaatcccaaagcttgggctcccagttccaggaactgttaacaatattaaaaacatataaggttcatggatagaattatcgacagacggttggggtgcccctcatattccttaaatattgtgtccacagtcaatttggactgtaagttggacctcaaaacaattgcacttcaagctcgtaatgcagagtacaatcccaagcgttttgctgctgtcattatgaggataagagatcccaaaacaactgcacttatttttgcttctggcaagatggtttgtactggagctaagagtgaacaacagtctaaattggcagcaaggaagtatgctcgtattatccaaaagcttggcttcccagccaaatttaaggatttcaaaattcagaacattgtcggctcttgtgatgtcaagttccccatacggctggagggtcttgcatattcccatggtgctttctcaagttatgaaccagagctgtttccagggctaatctaccgtatgaagcaacctaaaatagttttgcttatatttgtctctggaaaaattgttctaacaggagccaaggtgagagatgagacttacactgcctttgaaaacatatatcccgtgcttactgagttcaggaaaaaccaacaatgattgtaattcaagaaagagcaggagcagtggtttggcagagaagttcgtggaactgtaaatattaagacaaaggatataatctagattgatataaattaaagacagccgtttgtgttgccccttgtctttgtttttttgatttgtcttgatgtagtaaagtggcagacgttgtctattgaattgacatttttgaaaaaaaaaaagagaaaagaggattttgaggtgtcagaaatgaggaaaaaaaaagtggagctaaatggaaaaagtagcacattgagtcctgacagtagcttgaaaatgttttgataacttctactatcaattgaccgtagtgtgatctaactactgagtagcattgaatatcttgatcaacaaatcgaaaatttgagcctgctaaatttgtaatcgttttcagaatttggtttacattgatagatggaactacttatttagtattttggaccttgattttttggttcatgtggaagcttgtgcaaatcatgaaaatcttccactgaagtggaaactatttatggttcatttcaactatgagcaactttgttttttagttaatcaagttctaaagcttaaggatagtgacttcgtatactgttcaaaacagcaacgacgtgtttaatacactatgttttatgaagctagcaacatctaggtattataatttcatattggaatttgaagacgttatgataaataaaacactacatttgataact

SEQ ID NO: 29069 - DNA, 1369 bp, Glycine max
  Clone ID: TF_GmC1803_3
aattcggctcgagctgttctctatatgtctctatttcttttctctctctataaataagcagccttacaactcttcttaatcccatcaaatcgaaccctttttaaacgctcaaatacaaatttctggcaccaaatccttcccactctcctcaattccattcatttcaactcaacaatctctcagatccgtcaaacaaaatataaaagatagaaaaccctagttctgtaaatatataaaggaaaaaagtttgcctcgagctcgagccgaatcggctcgagatcaaaacccatcacaattcacaacaacatacaaatcccaaatcctatcttttctcttctcatataaaagaacccttctttcgaatccttcccgctcttttccctctgatttaattcatgcgcagatccaaaccctaatccatctctccgagctctttgatttttgagttaataaaaaaaaaaaattagggtttgatggctgaccaaggattggaagggagccagccggtggatctacagaagcatccttctgggatcgtgcctacccttcaaaatattgtgtccacagtcaatttggactgtaagttggacctcaaaacaattgcacttcaagctcgtaatgcagagtacaatcccaagcgttttgctgctgtcattatgaggataagagatcccaaaacaactgcacttatttttgcttctggcaagatggtttgtactggagctaagagtgaacaacagtctaaattggcagcaaggaagtatgctcgtattatccaaaagcttggcttcccagccaaatttaaggatttcaaaattcagaacattgtcggctcttgtgatgtcaagttccccatacggctggagggtcttgcatattcccatggtgctttctcaagttatgaaccagagctgtttccagggctaatctaccgtatgaagcaacctaaaatagttttgcttatatttgtctctggaaaaattgttctaacaggagccaaggtgagagatgagacttacactgcctttgaaaacatatatcccgtgcttactgagttcaggaaaaaccaacaatgattgtaattcaagaaagagcaggagcagtggtttggcagagaagttcgtggaactgtaaatattaagacaaaggatataatctagattgatataaattaaagacagccgtttgtgttgccccttgactttgtttttttgatttgtcttgatgtagtaaagtggcagacgttgtctattgaattgacatttttgaaaaaaaaaaaagaggaaagaggattttgaggtgtcagaaatgaggaaaaaaaagtggagctaaatgggaaaagtagcacattgagtcctgacagtagctt

SEQ ID NO: 29070 - DNA, 1171 bp, Glycine max
  Clone ID: TF_GmC1803_6
cacactctctctttctctctcttcaaatcaaaacccatcacaattcacaacaacatacaaatcccaaatcctatcttttctcttctcatataaaagaacccttctttcgaatccttcccgctcttttccctctgatttaattcatgcgcagatccaaaccctaatccatctctccgagggtttgatggctgaccaaggattggaagggagccagccggtggatctacagaagcatccttctgggatcgtgcctacccttcaaaatattgtgtccacagtcaatttggactgtaagttggacctcaaaacaattgcacttcaagctcgtaatgcagagtacaatcccaagcgttttgctgctgtcattatgaggataagagatcccaaaacaactgcacttatttttgcttctggcaagatggtttgtactggagctaagagtgaacaacagtctaaattggcagcaaggaagtatgctcgtattatccaaaagcttggcttcccagccaaatttaaggatttcaaaattcagaacattgtcggctcttgtgatgtcaagttccccatacggctggagggtcttgcatattcccatggtgctttctcaagttatgaaccagagctgtttccagggctaatctaccgtatgaagcaacctaaaatagttttgcttatatttgtctctggaaaaattgttctaacaggagccaaggtgagagatgagacttacactgcctttgaaaacatatatcccgtgcttactgagttcaggaaaaaccaacaatgattgtaattcaagaaagagcaggagcagtggtttggcagagaagttcgtggaactgtaaatattaagacaaaggagataatctaaattgatatataaattaaagacagcctgtgttgccccttgtctttgttttttgatttgtcttgatgtagtaaagtggcagacgttgttctattgaattgacatttttaagaaaaaagaggattctgagtcagaatatgaggaaaaaaaagtttgagagctaaatggaaaagtagcacattgagtctgtccctgacagtagtttgaaactcttttgatagcatctactatcaattgagcgtagtgtgatctgactactgagtatggaatatcttgatcaacaaatcgaaaatttgagctgct

SEQ ID NO: 29071 - DNA, 3177 bp, Glycine max
  Clone ID: TF_GmC1803_5
actcacactctctctctctctcttcaaatcaaaacccctcacaaaattcacaacaacatacacacaaatcccaaatcctgtcttctcatataaaagaacccttctttcgaatccttcccgctctctctctctcttattctttttccctatccgattcaattcgcgcgcagttccaaaccctagtccccctctccgaggtctgatttcacaccccaagccccccaattcttgttttcttaaagaaaatttttaaagaaataagagggtttcgtttcattgggtgaaattcataaagaaaaatgttttttttggggggtttttttgactttcgagatctggggtgtttttttgtttatgttttaaaggttttatctttttgtgttttgagttgagaaaaagagaagcgaagttgatttttttttgttattggtactgattggtgttgaacatggtgggttttttttttcttggtgggcagctctgtgatttttgggttgataaaaaaaattagggtttgatggctgaccaaggattggaagggagccaaccagtggatctacagaagcatccttctgggatcgtgcctacccttcagtgagtatctgatttttgatgaacaaattacactttctcttttgattggcttcaatttcaattgcaagcttcagatggttgaatcttaagttgtggggttaccctttttgataatttgttagtgataagtatccaactaagtcaaccgttatgcttgtagagcctatccacagatcacactattgcaagttctcaattgtgtaggaattttgctcccttaagttttgtgacttttgtctatttggcactttaacagacttgttgagtgctatttttgaatatttatgaatactttacatttcttttatttttttatgtacgctttcaattatcaatcatgactgtgcattacaaatttggaagattttagattgcatccactattttagcgttagtgatcccactgcgtcctgctatgccactataggaatttcctaattgagttttaacttttaagaggtggctgtttatgttgtgatctactctctaccatttgttgtatttgattgataacatttgcttttatttatatttgaatgtataataattttgcttctattcacattggaatgctaaggattttgcttcaattttctctggattatttattaattttgtttttgtttacaatttactctggattatggaaataatttccttcaattttcattagcatacatgataattttttctctatttatgcggagtaatctaataatcaagctgtttgtaccgtcagaaatattgtgtccacagtcaatttggactgtaagttggacctcaaaacaattgcacttcaagctcgtaatgcagagtacaatcctaaggcaagtatcatttgcttgtagtgattttcactgaaatatgctatctgcacatgtttacatgtttctttttctgcttttgcatctgaattacaataaagattaactggtggttgtgcagtcacctatcctgctttctggattgttttctgttcctttctggaccagagaagtgtggttaatccaagactattttatatttatatcccacgtgatatcttctgcttgctattcagaatcattaattagcaaatgtattatacacgccagttctaattggtttgtggtatactgtactgatgtttgtgatgtgtttgtttgcagcgttttgctgctgtcattatgaggataagagatcccaaaacaactgctctaatttttgcttctggcaagatggtatgatcctttgctgcactgctatgtctatcttttagatgatagtagtgcattttgttatttttaatgctgtcctcaaattagttctatgttaatttatggttgtgtggttctcttgttgaattctttttggtattggttatattttaattaactatgtttatcaaaccaatggtcaaactggtgttatttagaaactctgtaaaattcaggcttgcctttgcccttagtatgtctttgaaggtgctagtaatgaggttgcaaacatggttgtcacttgtcagaattccttgaatcaactggttctatatagcatgatgagagaatcattaatttatgtaaaatggaaataaggaagatattctatttctaaatttatttttacagttttatttagcagaaaaccatatattttctcttgttttaataattgtgcacaattcttgcaatttactatacatttcaattcgtgatttagattatagcccttctggtctgtgattcatagtttgccaaccatggttgcaaaaagttgaaatttgtcttttccgctttctgtaatggctcttatttggtacccttcttgtaatggtttctctcgtgaactttaaatttaattttttatgactattgactaggtttgtactggagctaagagtgaacaacaatctaaattggcagcaaggaagtatgcccgtattatccaaaagcttggcttccctgccaaatttaaggatttcaaaattcagaacattgtcggctcttgtgatgtcaagttccccatacggctggagggtcttgcatattcccatggtgctttctcaagttatgaaccagagctgtttccaggactaatctaccgtatgaagcaacctaaaatagtcttgcttatatttgtctctggaaaaattgttctaacaggagccaaggtgagagatgagacttacactgcctttgaaaacatatatcctgtgcttacggagttcaggaaaaaccaacaatgattgctgtttcaagaaagagcaggagcagtggtctggcagagaagttcgtggaactgtaaatattaagacaaaggagataatctaaattgatatataaattaaagacagcctgtgttgccttgtcttaattttttgattggtcatgatgtagtaaagtggcagacattgttctattgaattgacatttttaagaaaaaagaggattctgagtcagaatatgagggaaaagtagcacattgagtctgtccctgacagtagtttgaaactcttttgatagcatctactatcaattgagcgtagtgtgatctgactactgagtattgaatatcttgatcaacaaatcgaaaatttgagctgct

SEQ ID NO: 29072 - DNA, 1471 bp, Glycine max
  Clone ID: TF_GmC1803_4
ctcgagccgaaataagcagccttacaactcttcttaatcccatcaaatcgaaccctttttaaacgctcaaatacaaatttctggcaccaaatccttcccactctcctcaattccattcatttcaactcaacaatctctcagatccgtcaaacaaaatataaaagatagaaaaccctagttctgtaaatatataaaggaaaaaaggtctgatagatacccattgtcaataagatctaattcttcacacacggatttccccacaatttcttaacgattataacctgattgcgggaaaaaaaaattgcccttttgttgatttttttttgtcaaaaacaattttgtgtgtgtataaaaccatccgtgatctgggttcttttaaaaattggttcttttgtgtattttgttacttttgtaaggaaaattgagggttttggtactgatcactgtggaacatggtggttttcgttgatgggcagctttttgctggttttgaggcatagcattaaattggattttgattattcatggctgaacaagcattggaaggtagccaacctgtggatttaacaaagcacccttctgggattgtgcctacccttcaaaatattgtgtcaacggtcaatttggactgtaagttggagcttaaatcaattgcacttcaagctcgaaatgcagaatacaatcccaagcgttttgctgctgttattatgaggatcagggaaccaaaaactactgcactcatttttgcatctggcaagatggtctgtactggagccaagagtgagcaacagtctaaattggcggcaaggaagtatgctagaattattcaaaagcttggtttcccagctaaatttaaggattttaagattcagaacattgttggctcttgtgatgtcaagttccccattcgacttgagggtcttgcctattcccatggtgctttctcaagttatgaaccagagctgtttccaggactaatctatcgcatgaagcaacccaagatagtcttgcttatatttgtctctggaaaaattgttctgacaggagccaaggttagagatgagacttacacagcttttgagaacatatatccagtgcttactgagttcaggaaaaaccaacaatgattactactgtcaagagagcaggagcaaggcttgattgaactgtaaatatgaagaccagagatagaaatatctgtaatctggattgagttttaataagacacctgtgtttgttctgtctttttctctcttttaagaaaagggatcctgctttagtaaagtggaagaaaaaaaaaaaccgtgtattgaatttgactgtagaaaaagagatttataagaggcagaatgaaaagaaaaagtggaagcctgtgcaaatcatgaataactttcactgaagtggaaactatttgtggttcatttcaactatgagtaactttgttttttggctaatcaaacactacatttat

SEQ ID NO: 29073 - DNA, 196 bp, Glycine max
  Clone ID: TF_4292721
agaccttcataccatagtagagtgccgaggttggaggatccgaatgccctgcatttgtgcggtacggatcttccatctgacccgttaacttgatcataaatcctactgttacaccatccagttgcattttctactcgctctaccttccattattgtctccacctgcaccggtactaaccccttcatctctattgct

SEQ ID NO: 29074 - DNA, 1235 bp, Glycine max
  Clone ID: TF_GmC2268_16
gatgcaatagaggggcgtttccacttcttgtttgaggggcgtttccacttcttgttagaggcggcttctttctcgttggatgagctggttgatattttgaacgtgccagtggccttgatgatagccgactcggcgtgctccaagagccaccggatggtcttgccgtcgaacttgtggtcgatctcttgggtcagctggaagatccgggcgacgcaggcgttggtctacggcattggtctctccgaggagagacatggccaagctgcaggtcggcgtctccttggtctggtgcgagggcaaccgttgtgtgacgacggacaactcttctctgccatggtggttcgcaagccgttgggcactggatcgttaacaaaggcaaacttcaattggaaaataacttgggcctcaaagcttgagaagtgttattgcatcgttgttctaccacaaaatgagttggaagtgaaagcagaagacacaacatacactataccatgccttctgctccttccaaactctacgcaggttctctgcattctctcaatcccttattcactatatatgcagggtccgatgttttgggcgatgatgatatcagagcagaaggtggctcatttggcattgaagccgttggggaggaacaatgcaattgatggaacgtgtggagttggaacgaaagaaccccagcttattttcgcttctgcagacagtgagtcttatattgtatacttaggatcacattctcatggcccaaacccttcagcaagtgatcttgagtctgcaacgaattcccattacaaattattaggctcacacttggggaaggagtggaatgcttcggggcctatgcacgtggatttgctagagggtgccttgcaacgccaaacatcagttgaactccaaactaatctctggtctccctggctttccaaggatggaagtcttgtactgagcgtccaaaaccaccttgtgagttcaaattgaatattgaatttcattttcttttacacattggacatttatttctcaagaaaacgagggctctgttatctgttggtagtgtctggtattttacatgtttctttttacttataatttcttgcagcactacctgaaaagtcatggggttatatcccagggctatagctctccctggtattttacatgtttctttttacttataatttcttgttgatgatgggcatacagagtaaatattttatattattatttgatca

SEQ ID NO: 29075 - DNA, 1887 bp, Glycine max
  Clone ID: TF_GmC2268_8
ccacgcgcagcagctaaaccgcgatctctcgaactcttgaggggcgtttccacttcttgtttgaggggcgtttccacttcttgttagaggcggcttctttctcgttggatgagctggttgatattttgaacgtgccagtggccttgatgatagccgactcggcgtgctccaagagccaccggatggtcttgccgtcgaacttgtggtcgatctcttgggtcagctggaagatccgggcgacgcaggcgttggtctacggcattggtctctccgaggagagacatggccaagctgcaggtcggcgtctccttggtctggtgcgagggcaaccgttgtgtgacgacggacaactcttctctgccatggtggttcgcaagccgttgggcactgaattgttaacaaaggcaaacttcaattggaaaataacttgggcctcaaagcttgagaagtgttattgcatcgttgttctaccacaaaatgagttggaagtgaaagcagaagacacaacatacactataccatgccttctgctccttccaaactctacgcaggttctctgcattctctcaatcccttattcactatatatgcagggtccgatgttttgggcgatgatgatatcagagcagaaggtggctcatttggcattgaagccgttggggaggaacaatgcaattgatggaacgtgtggagttggaacgaaagaaccccagcttattttcgcttctgcagacagtgaggaaattgttgatgattaaacttacttttaaattagcaagatatatagcttttcttttctttctgtttggtccctacttaattatgattttaatttatttgggcttagaacaagtttattaattgtttgggcttacaaatgtgcccgttacaaataccaagtgagcaatctatttcccaaaactgtttgagctatatttacaacaataatttgcatcatacatgcgtactcccatgataaggttattactttaatatctgaaaattaaatttattattttctaattatttactttgaagatttagtcatcatgaagagtgattttgaaagtttgtttccctacatgattgattgattgtgttcgatgttgctttcataatgaagtccaattctatcacattgttgacttatcacttcaagaacaagtgaaactatatgcaggtgaaagcatagcttcaagttgacacatcacatagaggaactgaggaacatataatgggtttctctgttttacaccttatttcattgttgcttctttggtattttttgcttgtgccagttatgcttataaatttcagtggttttttaagttttgtcttttctttgttgcagtcttatattgtatacttaggatcacattctcatggcccaaacccttcagcaagtgatcttgagtctgcaacgaattcccattacaaattattaggctcacacttggggaaggagtggaatgcttcggggcctatgcacgtggatttgctagagggtgccttgcaacgccaaacatcagttgaactccaaactaatctctggtctccctggctttccaaggatggaagtcttgtactgagcgtccaaaaccaccttgtgagttcaaattgaatattgaatttcattttcttttacacattggacatttatttctcaagaaaacgagggctctgttatctgttggtagtgtctggtattttacatgtttctttttacttataatttcttgcagcactacctgaaaagtcatggggttatatcccagggctatagctctccctggtattttacatgtttctttttacttataatttcttgttgatgatgggcatacagagtaaatattttatattattatttgatcatcaattatcagt

SEQ ID NO: 29076 - DNA, 770 bp, Glycine max
  Clone ID: TF_GmC18388_2
ggatcttccagctgacccgagagctcggccacaagtccgacggcgagaccgtccggtggctcctggagcacgccccgccggccagtgtcgaggccaccggcaccggtacagttccggccatcgcggtctccgttggcggcacgctcaaaatcccaaccacctcatcgaacgagaaagaagccgtcgccgacgcctcaaacaagaagcggaaacgcccctcaaacagcgagttcgtggacataaacataaacgacagcgtttcgcagtcgtccggtctggccccggttcatgtggcgcatggcctggtcccggtctgggccgtgactaaccccagcatggtggtccccgctaacgccttctggatgacacccaacccccccatgggacccgcaaaccagcagcatcagttatgggccttatctccctccgtcttcaacgtcgcggccaggcccatatcgcctctggtcacaacaaatattccagaagcatggcccattatgacggcgtgcagtaacgactccaactccgccgttagcacgagcacggtgggggctaaggtggcaacggagtccagcatggcacccagtgttagttctagtgggaccaagagtgccaggactcggctattaagggatttttcgctccaaatttacgataagcaagagttgcagttcttgggccgctctgggactcacgcgcagagttagctgctagcaacttttttatttattttatgtccaggtcaataaatgtgaccatgtgcaaataaa

SEQ ID NO: 29077 - DNA, 250 bp, Glycine max
  Clone ID: TF_LIB3093-012-Q1-K1-E3
ttcacgcgtccggcatcctgatcggaaaccgtcttctgcggctactgtcgagcatgcatgaacgacgtctttcagggatgggatggtcagaggaagcggctgtgatatagttcaagttgaaggcggtcacattgtgcgctccacaaggcataaggaccgtcacatcaaagtgtgcactctcaaaggccctattgaccgacgagtgaggttatcggcccacaccgccatccaattttacgacgtccaggac

SEQ ID NO: 29078 - DNA, 1830 bp, Glycine max
  Clone ID: TF_GmC539_1
ggctcgaggagagagagaaccaaaccaaaccaaaccaaaaccatggtgtgaaaaacttgacatggggggcatatagggagtagatggatcccaagggctcaaagcagcagcagccacaggaggtggtaccaaaattcctcagcctcccccaacaccactaccaacaactcaatcaatagaggacccatcatttcctttcccttattataattattattatgaatttttttttctttctttctttgggtgtgctgttgatggatcccaagggctcaaagcagcagccacagcaacacaggaggtggtaccaaacttcctcagcctcccccaacagcaacaagggaataccaacaacaacaacatgggagagaacaaacctgcagaggtgaaggatttccagatagtggtagctgagaacaaggaagagagcaagaaacagcagcaacagttggcaccaaagaggagttccaacaaggacaggcacaccaaggttgaaggcaggggaaggaggataaggatgcctgctctctgcgcagccagaatcttccagttgaccagggaattgggtcacaaatctgatggggaaaccatccagtggctcctccagcaggctgagccatccatcatagctgccactgggactggcacaataccagcatctgctcttgctgctgctggaaactcactctcaccacaagctgcttctctttcatcatccttacaccaacatcaacaaaagattgatgaattgggtgggtcaggggggagtagtagtagggccagctggcaaatggttggggggaatttggggagaccccatttgggtgtgggtgtggccacagcagcaggcctatggccccctcatgtcagtggatttggatttcaaacaccaccaacaacaacaacaccaacaacaacaacatcatcatctggtccatctaatgccaccttagccactgagagctccaattaccttcagaaaattgcattccctggctttgacttgcctacttctgccactaacatgatgggtcacatgagtcctgctaaggatgattctcaaggctcaggaggacagtagtagagttttattatggatttggatgaaaagaaacaggaaagaaagaagcatcattgtgcagatgctggctgaggtttctacaatggcttttgtattgtagtataattgggagactgtgaggaaaagaaaaaggtgatcagcatcatcagcagcaacaacaccatcagcaaactcctgctaaggatgattctcaaggctcaggaggacagtagtagagtgtttaattatggatttggatgaaagaaagaaaaagaaaaagaaagtagcatcattgtctagatgctggctgaggtttctagtttctacaatggcttttgtattgtataattgggagactgtgagggaaaaaaaaaataggtgtctcagagaattcaatagaaagctggatttggtttacccctttggtttaccccccccatattgtttcttctccccagtactcaagtctccatatacaggtggaattgcatggccagatggcttggctgctttggtctggccttaaaaaactattgtttaattcagaggtgtgttgattattttgttcttctctaggtcagggtggagtgctgatcggtttgttttgtgaatttgaagatatagtttcataatcatatttgttaaatttcatattggatatggtatttagtacttttatgtcatctgggaaattttaatctttgtgtggaacagcacttgcgagttacatctgtgaagccttcaactagtactttatcatctgtgattta

SEQ ID NO: 29079 - DNA, 1490 bp, Glycine max
  Clone ID: TF_GmC616_1
gaacctgtctagggtttctgtccattggaaattgcaaaatctgcatatgtaaacatgttcccttccactaattatacctcctcaggctcttaccctcgtttcccttcatcttcttcttccacttcaccctatccttcttttactctccttcatcctgaaaattcttcttccagcaacaacacctttcttcatgatccacttgctcttacctacataccctctcattaccatgctccaatcccagaaacactagccaattgggcagttgcagattgtgcaatactgaatcaggatctaggtggtgccctttatggcatcaccaagaaaccaatgaagaaagcaactaagaaagacaggcacagcaagattcatacttctcagggtttgagggacagaagggttaggctttccattgagatcgcacgcaagttctttgatcttcaagatatgttagggtttgacaaagccagcaacacccttgactggctcttcacaaagtccaagaaggcaattaaggagcttactcgaagcaagcacagtgttgaaagcttcgagttctcctcatcttccgagggtgaagtagtttctactatccagcaacaagacctacaacaacaacatgggataaatttggaaaatgggaagttgaaagaacctgcagcttattgtgttaaagcaaagatgaaggaatcaagggaaaaagcaagggcaagagcaagggaaaagactagtagcaaggtattgtgcaacacaagtggcgaagggaaggtgcaagagttgaagaaaaagtgccctgcaactgaaaaccctcaaatcctgaaccagttaaggtcaacccttcaacctcctcatcctcaaaatgtgggtggagaagtgccaagagatgatgacttcaacgttattgaggaatccattgtcatcagaagaaagttgaaacacactttgatgtcttccaatattcatcatcaaaacgctgtgatccctaaggaagcaagtgtaaacaacagtgactaccactccttccccaatttgtctccaaattgggaagctaataatggtgccaatggacgctccaccttttgtgcaatagccagcatgaatctgtctacagggcttcaaatttttggaaaatcttgggaggagtgcaccaatcctcatccaagctaatatgttagctttcagtattatccgatgattgtctctagtgttttgctaagaaacatcatggtcatggaggcatctttctgtgtttttctacctgtaactttttctgtcctatatttcctttctacaatgtactgattttttgttgttgctctatatcagccaagaagggcatgtgacagttggcaaaaaaggatgcttcgtgtataatttctgaccaatattttaagtgtggctgatattataagggtcaaatatatttatcaggaaccgtcctttcttttgctagctgatttcaatttttatataattagtttttgatcaat

SEQ ID NO: 29080 - DNA, 1482 bp, Glycine max
  Clone ID: TF_GmC12923_1
ttttttttttttaaggcattcaaatctttccctttaaattcttttgtttgaattgttttttatgctgtcatacatagagagaaaaaagaagcaaataaagtaaataaaaataaaaataccaaagccaaatttcctcctatacaaactctctctgtctgctaagtccctttggaccaaaaccaagctgtaaaataaataaacataccaagatctccaaatgaagctaaagaaaaatgcacttcttcgaaagagaagaagtacaaaaaaacagtgactagagcaacatctaattagaaactcaactcaagtactgtgatgagctaactagcatgcatccatagatatttcaaaagcactcactaatcacaaattcattcaactcaacttccaaccaaataaagttcattgggagctattaggatcatcttctccactctcacttggttgagattgatgctgatgttgatgatgatcggaattaacattcaaactagcccttgtgtaagcattaagtgctgccaacatgcccaagttggagtcggacatggcgaggcccagatgctgttgctgcggcattgacatggaccccaactgaagcgaacccgcacgtgcgccttggaattcaagtgcacccggaaccggaaggttgaaccttggcatgaaaccactcacactttgaggaaacggccacatctgagtctccgaggaagcagaagacgaagcccccgcggtaacgggaagcatccaaattgtgctaccagggggcccactggcgggagagggtgccacggcccacatcgctgttgcgggaagcaaattgctgggccgaagaagcccagaaccagcttcggattgctgcttcggtaacttaggcgaagacccatcaccatcaccgctctcgttctgcgattgggtattgttgttgttgatgttatcgtctttgaagagatcttctcggtagcgttttctaaggtagttgtcgccggagtcaccggcgccgctgggaagggattctgggatgtgatcggcggagagaagctgctgcggttgatggtgagggtggaagccaagtaagagcggggtgttgaaaggcttcgtcgtaagggtggtgagcgagtgcgagggcgccatgaaaggtgtgcggggctgatttggagggcggggccgagagcgtggagccgctgctgcgtaaggagacgttgagggaggagaaattggcggggatggttccggttccggtggcggcgatgatggcgggctcggcctgctggaggagccattcgatagtttcgccgtcggacttgtggcccaattctcttgtcaactggaaaaccctagcggcgcaggtggcgggcattcgaattctgcggccgcggccgtcgactttggtgtgcctgtccttggtggatcgcttagggttggcggtggggatggctagggaggatgaagaagcaggactactagctccacctgtcagcttct

SEQ ID NO: 29081 - DNA, 2000 bp, Glycine max
  Clone ID: TF_GmC361_1
aattcgtctctctctctctctctctctctctctccacacagagaacaactcagctgcaatctcccatctgaaaggaattccatgctccacaaaacacacaaacagagaaaagagagacccactagcccactaagcgatacaaattgagggtcacctcatcacctcctagctactacacacaaacacaacaacatacataggaaaaaaaaaatatagaaaaagaaatctagtggcagtactactactacttccactatagctgctagctaccagataggagaaagagaaagagtgagactttttttttttaataccccaccaattcatttatttttcttcttttttttcattaaaaaaaaaaagtgcttatagagaagcttggttatatgagataacaagatcatggaattggaggctgatcatcaaaatgggatccgaagcaggcccaatttccctctgcagctgttagagaaaaaggacgttgatgacgtcaccgaacaaccttgttccaccaccagcgtggtaactactgctgctgctactattacttctggtaacaacgacctccacgtggcggagcagtcgaagaagcctccgccaaagcggagttccacgaaagaccgccacacgaaggtcgatgggcgaggccgccggattcgcatgccagcggcctgcgccgcaagagtgttccaactcacgcgtgagctgggacataagtctgatggtgagaccatcgagtggctcctccagcaggcggagccggcggtcatcgctgccacaggcaccggcaccattcccgccaacttcacctcccttaacatctccctccgcagctccggctccaccatgtcggcgccttctcactacttccgcggaaactacttcaaccctagcacgttctccacctcagccgccgctgcttccgcggcggcggtggcacagctaaggagccgcgcggagtgggaccggaacatgagcatggtgatggaggattctcgtaggagcatgctggagaacacttcttccatctccgcaattttgaatttcaaccctatgggtaacgtcaatgtaattcaacaagcgaaacaagagcttcgagaagaatccgccgccgccggtggcggcggcagtcttgattcggtggcttcggattccgatggaagcttagggagaaagagaaggccagagcaagagctatcacaaatgggaagctacttgatacaatcaagcacagggtcgcttccgtcgagccacgcttccaatacggcggcgttttggatggtggccggtcacggcaaccaagccatgagtggtggtggtggcagcgatggtagcagcgataatcccatttgggcaattccctctgttgggaatagcggtgtgtatagaggagctatgtctgccccaggtggcattcatttcatgaattttgcttctccgatgaaccttatccccggagctcaactaggttccgccatggttgggggcggaagtggtggcggcaacagtggttctcaacttctaagtgaaagtaacttaggcatgcttgcagcccttaatgcctacaggcagattccggctaacggcgtctcggagtctccggccagcgccgggcaacctcacggcggagacgatggacgtgattcctccggtcaacattcctgagggtaaaaataatcacaagtgtatgatctgatgctagcttcttaatttttcttttaattactagtatattattactagtgctactattactactattagttctacaactaattagtggtttctataatatatatatatatatatatatatatatatatatatatatatatatatatatatataaatatattaaatacgtaattatatatgttatgtccatttgcaaaaacatgcaagaagcgcaagtttgattgcttattgagttcagattgtggtgtgatttttttgctgaggatgatcatgttagggttcaatacgtatactttaccaatggt

SEQ ID NO: 29082 - DNA, 1637 bp, Glycine max
  Clone ID: TF_GmC361_2
ggctcgagaaaagtgcttatagagaagcttggttatatgagataacaagatcatggaattggaagctgatcatcaaaatgggattcgaagcagactcaatttccctctgcagctgttagagaaaaaggacattgatgacgtcacggaacaaccttgttccaccaccagcgtggtaactgctactactactgctattactactactactacttcagataacaacgacctccacttggcggagcagtccaagaagcctccgccgaaacggagttccaccaaggaccgccacacgaaggtcgatgggcgaggccgccggatccgcatgccggcggcctgcgctgccagagtgttccagctcacgcgtgagctgggacataagtctgacggcgagaccatcgagtggctcctccagcaggcggagcccgccgtcatcgccgccactgggacaggcaccattcccgccaacttcacctccctcaacatctccctccgcagctctggctccaccatgtcggccccgtcgcactacttccgcggaaactacttcaaccctagcacgttctccacgtccgccgccgcggcggcggcggctcagctgagaagccgcgcagagtgggaccggagcatgagcatggtgatggaggattctcgaaggagcatgctggagaacacttcttcaatctccgcaattttgaatttcaaccctatgggtaacgttaatgtaattcaacaagcgaaacaagagcttcgggaagaatccggcgggggcggcggtcttgaatcggtggcttctgattccgatggaagcttagggagaaagagaaggccagagcaagaactatcacaaatgggaagctatttgatacaatcaagcacagggtcgcttccggcgagccacgcttccaatacggcggcgttttggatggtggcgggtcacggcaaccaagccatgagtggtggtggcagcggcggcggtggcaacaatggtagcagcgataataatcccatttgggcaattccctctgttgggaatagtggtgtgtatagaggagctatgtctgctccaggtggcattcatttcatgaatttcgcttctccgatgaaccttatgcccggaggtcaactaggttccggtatcgttggtggcggtggcggcggtggtggcaacggcggtgctcaacttctaagtgaaagtaacttaggcatgcttgcagcccttaatgcctacaggcagattccggcgaacggcgtctcggagcctccgggcagtgccgggcaacatcacggcggagacgatggacgtgattccaccagtcaacattcctgagggtcaaaataatcacaagtgtatgatctgatgctagcttcttaatttttcttttaattactatattattcctagtgctattattactactattagctctactactaattagtgatttgcataatatatattaaatacgtaattatatatgttatgtccatttgcaaaaatatgcaagaagcgcaagtttgattgctttggtatattgagttcagtttgcggttttggttggacctttggtgtgattttgctgaggttgatcatgttagggtttaattcgagaagaaattaatacacgtatattttaacc

SEQ ID NO: 29083 - DNA, 2373 bp, Glycine max
  unsure (1)..(2373): unsure at all n locations
  Clone ID: TF_GmC430_1
cttttattctccgtctctctactctcttattctcaacgtcaaacccaaaaccccttcttcttcttcttcttctctcgcgccgcaataataatactaaaacatgtccaactctgatggagccactaacgccgtccctcccaacgacgccaacaacaacacaatcgttgagtaccagcagcgaaccaccaccaccaccaccgccgccgccgccttttgtttggagaaccctatcgcacagacaccgccattgacgggaaatgttcacatcagatcgttcctgaaaaggtcaagaaaggattagggggaaaaaggtgaacgccgaaatggaggcagtgcaggccatacgctcaagttctctgagtaaggttctccaacagacgcccccctaccacgcacctgcacacccaccgaaaaccccgtaagacagggtcgtccagcaccccccggctccttacgctccattgctttcacttccttcacatgtcgaactccgacgccaccagcacggaccgctatcggcgcaatctcagagacgcagagacagcacaggcaatagggggggaaggccttcgccgtctaagaaaccgccttcaaaggatccgccacagcaaggtcgacggccgcgggcgccgcattagcatgccaatcatctgcgccgcacgtgtgttccagctcacgcgcgagcttggccacaagtccgacgggcaaaccatcgagtggctcctccgtcaggcggagccctccgtcatcgcctcccccgccagcttttactctgtttcccttggctgcaacaaaagatgttctgccctgttctcatgctccgcccccaggccccagcaactcgctcccactcccttcatcctcggcaagcgcatacgcaccgacgaagactcttcaaaagacgaagatggttcagtgggcccctctctcgtggggccgtatgcccctcccggaccaggggtcgtcccggcctggcccgatttcggacaaatttggagttttgtcgccgccgctgctgctcccgaaatggtgtcggtgccgcagcagcagcagcagcaggcttcgttgttcgctcatcaccaccgtcagcagcagcagctggccatcggagaagctttggcggcgagggtgggaaattaccttccgggacatctgaatttgctcgcttcattgtcaagtggacctgggaattctggtcggagagacgatgagccgtcgttgattgtgacatctcttcaacggtggcggtgaggatggttgtggactgtggtggggtggtgactatgcaaagaatgtgtttttttttcttcttctcgtgttgtggacttgctttagttgtgtgtcagccaagcaagagattcttaaggatatgttttgatcaacctttgatttatcttacattgaaattagggttttttgttttacttctgctggtttggaaaacttaactaggtttttagatgttggagttttcaccttggttcccgtgattttttttgattctggtgctgtattggaagagaggagtatgaaaaagggagaatgtaatgaacggatgatttaatttgtgaaattgtgatggagagagagagttgggagcttccggttggtggaagagtgggagtggttcttcgatgggtctggagaggatgagcgtggagcagctgaaggcggtgaaagagcaagccgatctggaagttaatcttctccaagacagcctctccaacattcgcaccgtcaccacccgcctcgagatcgcctcctccgccctcaacgatctctccctccgcccccagggcaaccacatcctcgtccccctcaccgcctccctctacgtccccgccaccctccacgatttccaacatgtcctcgtggacgccggcaccgctacttcatcgagaaaaccatgcccgaaggaaaagtgttgtgggcacgttttatgagattgcggttcttgtaaggtggtcatgttgtgaatttggtgcacctgcgggggacttatgctctctgaccctatctcctccactttcacactccttgatggtctttgttgttttcagaaatgactggtgagtgaaagatgaaaaaaagaagaagaaagctctggttgtactccgtatgacttctgttttgagatttttatcttcaattcttagccatttattagattgatcagcgtgagaataatgttttcttgtatgtaagtggattgttttgggtgccagtgatttgaataaaaaactcatcttttcttcaaaatacattatctcttattcgagaagactgttgctgttcccgtaagaagaatcaattatttcagtgtgctttctgttcttaaaaaaaaaaaaaanagannnnngaggggtaagggga

SEQ ID NO: 29084 - DNA, 2079 bp, Glycine max
  unsure (1)..(2079): unsure at all n locations
  Clone ID: TF_GmC909_1
cccacgcgtccgtccacgcgttctgctgttgactccacttattcaccaatttaggctatatgcaatcaaatttgcaaaacacaagtttgaaaccttgataaatattgttgttccattggcatcaaaagtaaggtgcacaattcgtccttcaccataatttgcatgaaatcaaacagtgataccagcaaatagtgacaagcagaaaattcatactgaaactaggaggttcattgtagaaggtggaagaagagaagttttccacgaagaaaaaccaacaacaacaatgaaagaaattatacaatgatcaacagcacaaaagaagctgattttccactaaaacaagaaggtctttcatcaggtgatcatgaaaaggctaaggctccatcgacctcatcatcatcatcacaatggctaaaactgaaggatccaaggattgttcgtgtgtctcgagccttcggaggaaaagacaggcacagcaaggtgtgcacaataagagggctaagagatagaagagtgaggctttcagtccctacagcaattcacctctatgatctccaagataggcttggactcaaccaaccaagcaaggttgttgattggttgctcaatgcagcaaaacatgaaattgatgaacttcctccactttctattcgtccggctaacttcaccccttggtaatccctctgttgattgttgtcttgaagttagcacctctcgtgaaggttcaggccagaacactttattgtggaaaccaaaatcaggagaaatggttagtgatgataaagcaaattggatgaatagaagtgaaggagatgatgacaacgcgcacgaccatactatcggtaaacaaggaagcaataataatatttgtcatggtggtacacttgttttgccaaataatctcttgccaagaccaaaccatccttcttttttgagcttgatgaacattatgccatcacttggttaccaatgggaggctaattattcagctcatgatgttaatattggtcaatggcaaaaccatggatttcttaaccaaacagatgtacacagcatcaatgtggttccatttccatcaacattggctctatcaactgggaatgatactactactacttctcagattttggtgtgtcctcctcatggagcaacaacacagccatattttccttcttcacatcatgttgcagcaatggagatgaatgcaagacaaatcaaccactatcagatgctgagttcaagttctcatcaaaatctcttggcaaattctctcaatccatcatcacagcaactcatgagccaatcagagaaattgccattcagcttgggaattaggcctaaacttttccattctcctaacagaagtgaaagccattcccaaaaagaccaggatttgccttccaagtgatgcacaaatagtgcaaaataaagttgtcaaaatttcttctcctcacaagttatggattgatatcatgagggcagtgtgagaagttcattattatagttgcaagacatctttttattcaacgttttgcggtttgaacaaacatttcgttttagtcaaagttatgtttggttaattttctgattttccattcagtttgatctatatggataccaagcaaaggtctacaaaagaatggctttttttcaagggtaagagcttatcctgaagtgatagtgtgattgctacgctaaagggaacgcatgctcagataagttctctctctctctctctctctctcttctacattgagaaaggttggaaggttgaataataatgttatcattttgatagtgcgttttggatttggttaaacatgtttttcgtttgaatcagacaggatttctcagtgtcctatgttatatattatgtctaattttgttaattatagtacgtttttattaaggaaatcatgttttattctttacatcttatgtgtttttccatgagatgagactgagaaaaataatttctccttcatgagttcatgtacactcacccggcacatgaaaaatgatgcatagacacttgtttgcttgtgtttgtatatattccatgcatgagannnaacatgc

SEQ ID NO: 29085 - DNA, 757 bp, Glycine max
  unsure (1)..(757): unsure at all n locations
  Clone ID: TF_GmC355_2
ccacgcgtccgggaagtgggaaaattgaatggcaggaacttttggaagaggcagaagcaagtttcagagtggtggcagttgcacaagcaacaagaagtgcaaagctgggagtgcaaggaatcaacaacccattaggaataagtgcaaagcttcattaaaagctggaagaggaaaatcacaacaggggtctgactctggatcctaacaggaattatcatcatcatcatcttctgcatcaacaacctcatcatcaaaatctgattctaaattcaagaaggcatgtaacaaaccaagaagaccaagaatctcatcctcaccaattccatatccaattccaacaacaaagggaacaacaatcctacacagctttagacacggaactcttaaacccactccaaccaccaaagaaacggtcttgccgcccgcctcttccgccgccaccaccttcctcgcttactttatccgaacatgcaagaaaaatgggagaaccacaacaccctcaccagcaccatcaacaagcagcagcaacaccgtcgagagcggcgatgagaggcggcggcggcggcgagattgtggaggtgcaaggcggccacattgtccgctccaccggacggaaggaccgccacagcaaggtctgcactgccaaaggcccccgagaccgccgcgtgcgcctggcggcgcacaccgccatccagttctacgacgtccaggaccgnctttggctacgaccgtcccagcaagggcggtcgactggctc

SEQ ID NO: 29086 - DNA, 1818 bp, Glycine max
  Clone ID: TF_GmC430_2
ctccgggggggtgactctcttattctcaacgtcaaagccaaaacccctccttcttcttcttcttctctcgcgccgcaataataatactaaaacatgtccaactctgatggagccattaacgccgtccctcccaacgacgccaacaacaacacaatcgttgagtaccagcagcgaaccaccaccaccaccaccgccgccgccgccgccctcgccgtcaagaaaccgccttccaaggaccgccacagcaaggtcgacggccgcgggcgccgcattcgcatgccgatcatctgcgccgcccgcgtcttccagctcacgcgcgagctcggccacaagtccgacggccagaccatcgagtggctcctccgccaggcggaaccctccatcatcgccgctaccggctccggcaccactccggcgagcttctccactgtctccgaccacaagcccctcctccctccccctacccccttcatcctcggcaaacgcattcgccctgacgacgactccgccgccaaagacgacgccgtctcgctcgtcgccccccccacgccgcccgccctctgggccctacctccccgccccgacttcggccaggtctggagcttcgccgccgcgcccgaactcgtgtcggtgtcgccgcagaattcaatgtttcaccatcaccatcaacaccaccagcagcaacagcaacaggccgccatgggagaggcctctgccgcaaggctcgggaattacctccccggccacctcaatttgctcgcctcgttgtccggcggccacgggaattccggccggcgggacgacgagcctcgctgaatgaatcaatttctgaaattatgatggatttgattgtgatcttcttcgtatataaatatatgtattattgtgtgtgggtgggtgagtttgtattttgtctctgtgactttgttgttgtgtgtggactactgtggacaaggagaaggattgaagattcttagtgaaatttttagggttagttttttttttatttttaatttttggtagtatttcgagtggacaagtccatgaattaaggaattcaattggattattagggttttccttgtttggaaaactgattaggttacttgttaggagatgatgatgaatttgtttagaacattgctggaggagagacaacagagagtatgatgatgagatgaataaccagggattgaggcttggaagtgggtttcaggacctcgatccattgatcggtatgcagatgcagatgcaaatgcaaatgcagacgcagatgcaagtgtaatgaaatgaaaaattaatttaatgatgttattgtggaaaatatcacaccagagtccaaggcgaatgaattcaaggttaagcttcttcttgtttcttctgtctcgctttcactgtgggttttgatcaacttgacttactttctttcactttcctaatttgctcattaaaagtgattagtgttcatagtcttagtttgagtgattgtgtgtttgacaatcaagcgtcactcccattttcttggagtaaacttctttccaatgtttattgagaattcatgttattgcgcatcattgaaggattgtggtccttctaattatgcattctaccttgcttagttgctctctccttcactttcggggatgcctaacagcctgcttctgcaatgtaagacctctgtttctagatttttatctgaaattctcagccatttcttagattcgtcagcgtgacaataatgtcttttctagtatgtaactggatttccgtggggtgttagtgaagtgaataaagacccatctgctcatttctctctaa

SEQ ID NO: 29087 - DNA, 2221 bp, Glycine max
  Clone ID: TF_GmC430_5
cttttacgttttcttaacatttttcgggaatgcgagctgaaatgtcaatcatcatgacatgagattggtcctctctatattgatcgcacaatgtatcacaggaaatataggaagagacgtagtggggtccagcacccatgtgccctcctcctgtctccaccagctgctgccgctcaatgattagagccctgttccccttcaagttcaagttcaattcccacaccaaggaaactctctcatctctcaaacccaacaaaaaaaaaccattactttacttcactttacatgtcgaactccgacgccaccactaacggcgtcagtaacggcgccatcattgatgcgcagagacagcaggccttagccgttaagaagccgccgtctaaggaccgtcacagcaaggtggacggccgagggcgccgcataaggatgccaatcatatgcgccgcacgtgtgttccagctcacgcgcgagcttggccacaagtccgacggtcaaaccatcgagtggctcctccgccaggccgagccctccatcatcgccgccaccggctccggaaccacccccgccagcttctcctccgtctccctctccgtccgcgccgccgccaactccctctcctccccttcctccacctccgaccacaagccccagttactctctcccactcccttcatcctcggcaagcgcatacgcaccgacgaagactcttccaaagacgaagctgtctccgtggggccctctcttgtgggcccttctactcctcccggactgtgggccctcccggcccggcccgatttcggacaaatttggagcttcgccgccgccgctgctcccgaaatggtgtcggtgtcgcagcagcagcaggcttcattgttcgctcatcaccaccgtcagcagcagcagcaagccatcggagaagcttcggcggcgagggtgggaaattaccttcctggacatctgaatttgctcgcctcattgtctggtggacctgggaattctggtcggagagacgatgagcctcgttgattgtcacatcttcaacggtggtggtgatggtggtggtcggtggtgttggtgtttttttccgtatatatgcatattctcgtgttgtggttgctgtttttgttgtgtgtggcaagcaggagattcttagggttaggttttttcttagatttgagtggagaagtccatcgattaagaaattattcaattagggtttttgttttacttcctgctggtttggagaacttaactaggtttttagatgttggttaattgctttagattccggggctttgttggaggagaggaggggaaaaaaaaggggagaatgtaatgaactgatgatttaatttgtgaaattgtcatggtgagaaatttgtaccgattgaggctggaattgggtttcagaagcttggtccgtgtgcgagtgcagttgaatttgtaatgtaatgttgttgtactcaaagagagttcttctaagttgaagagcatggattggattgcattgttgcttctgtttcactttcatagtgggttattttgggctttgacttactgggtctacaagtatggtgtggttgaagtggttgcagttgaggtaattagtgcttgcaagcttgtttctgaagccagtgaattgtgtttccaaagttcaattgtcagtcccagaatgttggagtaccctactttccaacatgggttgagaattcatgtctcttggatgttgttggggcatgttttgagggattgaggttcatgtaaggtggttatgttgtgaatttggtgcagctctctgactctctcctccactttcacgctccttgatggtgttttattcgttttcagaggtgactggtgtgtgaaagatgaaaaaaaaaaagaagaaagctctggttgtactctgtatgacttctgctttgagatttttatcttcaattcttagccatttcttagattgatcagcgtgagaataatgttttcttgtatgtaagtggattgtttcgggtgccagaataaaaacccgtctgtttctttctttacctcttttcttcacttgtcactttctttgtttctatgtacacgggaacttgttttgctgcttgatgacgattcaattatttcagtgtgctttctgttcttaaattattgtagccaaattgacccttttcttttctgaatgtgttgtggcctagcaatataatattataggagtaaattc

SEQ ID NO: 29088 - DNA, 1594 bp, Glycine max
  Clone ID: TF_GmC18388_1
acccggcacaccgaaaaaaaaattctttccgggctccttccttgaatttcactgaagccataaaaccaaactcattcactagactttttatagacacaaatcagaaaaaagcagttccaattccctcttggtgcttcgtgctccatctcttccaattgatggatcaagacgacgacgaagcaggaacaacgaacctcagcaccagcgacgccgacgtggcagagaaagaaaccacaaacaacctcaatggagtccccaaacagaacaacgcgtttgaagaaacaacaggttttcaagtcttgccgctgaaaaaggaggagccaacatattcggaccctgacacggagattgttccggtcaaactgccaaagcgctcctccacgaaggaccgccacaccaaagtggaagggcgcggccgcaggatccgaatacccgccacctgcgccgcgcggatcttccagctcacccgagagctcggccacaagtccgacggcgagaccgtccggtggctcctggagcacgccgagccggccatcatcgaggccaccggcaccggcacagttccggccatcgcggtctccgtcggcggcgcgctcaaaatcccaaccacctcatccaactctaacgaggaagccgccgccgccgccgcctcctccaacaagaagcggaaacgcccctctaacagcgagttcgtggacataaacataaacataaacgacgccgtttcgcagtcgtccggtctggccccggttcatgtggcgcatggcctggtcccggtctgggccgtaagtaacccccagcatggtggtccccgctaacgccttctggatgacacccaacccccccatgggacccgcaaaccagcagcatcagttatgggccttatctccctccgtcttcaacgtcgcggccaggcccatatcgcctctggtcacaacaaatattccagaagcatggcccattatgacggcgtgcagtaacgactccaactccgccgttagcacgagcacggtgggggctaaggtggcaacggagtccagcatggcacccagtgttagttctagtgggaccaagagtgccaggactcggctattaagggatttttcgctccaaatttacgataagcaagagttgcagttcttgggccgctctgggactcacgcgcagagttagctgctagcaacttttttatttattttatgtccagttcaataaatgtgaccatgtgcaaataaacgagaaatgtctgtgctgtttttgcgacttgtggaagatatgaaagatgtcatgtgtgataatatcatttggaaatgggaaatgaaatagtatcagtccggaactgctctggctgaatatttgcagatttattcatctttcgaccaccacgtgtggtgaggggggactgagggagtggggagtggggcccacctacaaatggagatgggtctccccaaaaaaaaccacttcatattttcactctagctactaagaatagaaataattcatttttttgaatttctgaaggctctgtaatagtagcgggtgggtggcctaaaattcaaagccggcagctgctcttgcagtttgcgcacac

SEQ ID NO: 29089 - DNA, 453 bp, Glycine max
  Clone ID: TF_GmC897_2
gccaaaaaccacacaaagcacaatagaggaggaacaacaatcacaaagggcatgaggaccaatgtaggagatattgttcaagtagaaggagggcacattgttaggtccacaggtagaaaagatcgccacagcaaggtgtacacatcgaaagggccacgcgatcgtcgcgttagactctcggcacacacagccattgagttctatgatgttcaagacaggcttggctatgacaggccaagcaaggctgtggactggctcatcaaaaaggcaaagacttccattgacaagcttgctgagcttcctccttggcatccacctactaatcatgaggaagaagagcagaatgatgctgcaggatcaagtggagtcatagccattgaacaacaacaacagcaacagcagcagcagcagcaacaacaacaacaacaacaacaacaacaacaacatcaacag

SEQ ID NO: 29090 - DNA, 1532 bp, Glycine max
  Clone ID: TF_GmC7250_7
ctgccattcagttctatgaccttcaagatcgcttgggttatgaccaacctagtaaagctgtggaatggcttatcaaatctgcttctgattccatttctgaacttccttctttgaacaatttccctgacacccccaaaagtgatgatcatgagaagagagcaaacactgatgttgctgctggggcagtagatggtgagaattatgaaaatgagaatggcaataacaataaccagagtcagaacatgtctttgtctaaatctggttgtagtagcacttctgagacaagcaaaggttctggcttgtccctctcaaggtctgatattcgtgtgaaggctagagagagggcaagggagagaacaacaaaggaaaaggagaaagagaaaaatgagtctcatcatcatcacagcaatgttgttgttcctcatcatcgtcatcatcatcatcataaccccgtttcacaaacagcttctttcactgagcttctcactggtgggattcccaaagggtgtgatgatgaggagcctaataacatgatgatgttcaacaaagaagctgcagcagcatcatctggtagacagcaatggtgttcatcatcatcagcagcagcagcagcacctatggactactttctggggccttcctcttctagaacaacaacaacaccaccacacaatcaccatcaccatcatcatcaatattcttcttctggtgggttctcattggcacaaatccaactaggacattctcttcctgaggcaatgaatcacaatgtttcagcattcaacaataatgtgagtggtgagaaccaaaaccactcatcatcagatcctcatctgcaacagcagcaacacttctcattcataccggatcatcttatgtcagctgtggttacttcttcttctcatcatcaacctagcgggagcgactacaatctgaacttcaccatgtcttcgggcctcgctggttacaatagggggacccttcagtccaattctccgtctcttttgcctcacttgcagaggttttcgcctctagacggatccactgtacctttcttcattggagctgctccttctgctgcagttgctgctcctgccatggagaacaacaccaccaccaccaacaaccatcaccaccatcagttctcatctggtttcgatggcagccgcttgcaactctactatgggcattctgaccagaaggggaaagccaaaaactgatgtttggattgctacatttcctcctggacttgaaaattaaagtactagcagcaagttgtgtcctaaagcttgcttttgccaaaagggatgagccggcgttgtcaagtgttggtatttcttgttggatcatttgaagtcattcaattacatttagtatttgaatatatatatatatattgatctatgcgtgtgaaatcattgtgtttttggataaatgtaaaagctacttgattcaagatattcttttactttctgcaattattttgatattgttgtctatactataaatggagaaaagagttgttcatcagc

SEQ ID NO: 29091 - DNA, 1813 bp, Glycine max
  unsure (1)..(1813): unsure at all n locations
  Clone ID: TF_GmC553_1
ttggtcgaggcccccggtttaatcagagcgtccgcaagcatcaagtctaataagcttccgttcgtgcgtggattgaacaacatcaagtggtcgagtctggatcctcaacggaaacgggcttttgcggctacggtggagcatgcaggaacgacgtcgtccagccaggggatggtgagaggaagcggaggggagatagttcaagttgaaggcggtcacattgtgcgctccacagggcggaaggaccgtcacagcaaagtgtgcaccgccaaaggctctcgtgaccgacgggtgaggttatcggcccacaccgccatccaattctacgacgtccaggaccgcttgggctacgaccgccccagcaaggccgtcgactggctcatcaacaaggccaagtcctccatcgaccaactcgcccacctccctccctggaaacccactctcccctcacccgcaccacctcatctaaacgacgaccattcagacaaacctaaccctaaccccaaccccaaccccaaccccaaccccaaccccaaccatagccctgatgcccaaattctcaaccagttcgaccacgacgatggagctggagctggttccagttatcttcctatggataacgacgcgataaggtcgttcttccccacgacgacttcctcgttggttcaattccagagctacccaccggatttgctctccagaaccagtagccaggacctgcgtctctcgcttcagtccttgcaagaccctattttacttcaccacaaccacaacaacaacgagcacgtgcttttcgctggaaccgcctttgataacatggtagcgtggaataataatagtaataataatcataataataataatcataataataataataataataataataatactgcttctaatgatacttgtggtggtggtggtggtggtggaggaggaggaggagggtttgtgtttaacgctccttcgactttgccggggccggcgacggtggcgtcgccgacggtggtgtttggtcatggttatggtcaaggccagtatttttctcagacggctcgagcggctcgaggtaacagcccttccgttcgtgcgtggattgacgcgccatcgttcgtcgctgctgccgccgatcatcggcatcatcactatctgtctcccgcggcagcggcagcggcgttggtgtatcagtctgctccttccacggcggcatttacggcggcgcccggtggcttctcgggattccgcgtgccggcacgaattcagggtgaggaggagcacgacggcggcatgtccgataagccgtcctctgcttcctccgattctcgccgttgaaccgtcgagatcgtcagccgatttctgtctccttggaatcaattgggtatgtgtgtgatctgttttttgcagggatggaggagacgaagttggacttggaatggttcggttcggttcagtggactattatgcttgtggaatgaagaaaatctggggttgaatatccaggtttttgaattctccagtctgttatgttaatttattttatgtttttcatgtttcattagggagactttcaagtttgagtactgttgtgttggattgtctgtttgatgatgtttgttacaatttgtactagtggatgtatttgtacttgggtatctagtttcttagttttggtttgaagacatgcacgtagatactactatatcacttattattcacggcctagttggtcgatttatctttgtatttccaaaaaaaaaaaaaaaaagggggnccnnnnnnannnnnnnnnnnnnnnccgggnnnaannnnnnnc

SEQ ID NO: 29092 - DNA, 866 bp, Glycine max
  Clone ID: TF_GmC63399_1
acgagcacaaaccacttccaccaaagtagttggcactactcttctagaatcataagggtgtctcgagcatctggtggcaaagacaggcacagcaaagtgatgacctaaaagggttaagagacagaagggttaggctctctgtgaccacagctattcagttctatgaccttcaagatcgcttgggttacgaccaacctagcaaagctgttgagtggctaatcaaagctgcttcagaagctatctctgagctgccttctctcaacaaccctttccctgatacccctaagcagcctagtgatgagaaaaggcctaccagtggtggtggtcaacaacaacaacaacaaggctttgatgatgcagatggagacacaaattaccaacaaaaccaaagccagaatctttctctctccaagtctgcttgtagcagcacttccgagacaagcaagggctcaggcttgtccctctcaaggtctgagatccgtgtgaaccgtgtgaaggcaagggagagggcaagggagagagcagcaaaagagaaggagaaggagaaagagaaagagagtgattttaacattgcacaccaccatcaccaccacaatgtgaacaacatgtctcacactgcttccttcactgagcttctcactggtgggattgggagcacggtaacagttaaccccaacacaacaacaacaacaacaacaacagcaacaagtcctaatggatcatcggttcatcagatccatgagggtcatgatcatgaggctaatctattcaacaagggaagtcaacaacagcaacagcaacaacatcaccattggtctcaaacagtgacacctatggactacttcagcgcaggccttttggtagga

SEQ ID NO: 29093 - DNA, 2077 bp, Glycine max
  Clone ID: TF_GmC122255_1
gaagtttggagtgagggttatctatttagtgaggagaaagtgaggggtggtaactcaagagaaagtgggttggaccagccttattgtatttatatatttgagttttgtggggctaaaaaacggaccaaaagatctttaatctcttctccgagcacactctgcctctctttgcagaagcatcaacaagctctcataggccacaggttttggttttttgggatcagcagcagtgacagaagcagaaccctcagtagctggcagatgaagcctcaacaagtaaccacagttaatagtgtcaggaactaagcaaaatcaaagagtactatactaccatactaccataccaaaataccaacctcaacaagacctacaagaaaccctttagacaagtaaaagaaaaaagggaatctgaatctcaccctatagacacaagaatcaaaaaaggaagaacaatttatgagcatataaagtgaggagggtgtcaattgtcatcactcatcaacaagttgtgcaaactgcaaaggggagcaaacttaaactatgcagaaagcacaatagaagaagctgaggaatgggcatgaagagcactgggggagcgatttttcaagtccaaggagggcacattgttcggtccacaggtagaaaagataggcacagcaaggtttacactgcaaagggtcctccgtgatcgaagggttaggctctcagcacacactgctattgagttctatgatgctcgagaacgttcacgccctgatagaccaagcaaagccgtggactggctcatcaagaaggccaagaatgctattgacaagcttgctgagcttcctccatggcaccctaatcctaacactactgctgcagatgccgagaacaacaacaacaacaatgcagggtcaagtgacatggccattgcagaacaatcagagtcttctggttacaattttcagctgcaaaggcaattaggtgaggaccatgataaccaccaccattcagctttcattccttcacctattgacactgatgcaatagccttctttcccacaaccactgcaacctcctccatcaatttccaaacctaccctcctgacataatctcaagaaccaacaactccactgaggatcttggcctttcccttcactccttccaagaccctggtttgattcatcatggccagtcccaagcaggtgcaaatcaaacaccttccaatgaccaaaccctcttctctggctcaactcaagtggggtttgaagccaattaccccaggattgtgacttggaacagtgatgcaagcatagatatgaacagaaccgggttcatggttaattcaccatcagcacttctaggccaaggtggttctgctgcgtattcccaaagggggacccttcagtccagtttctcaccatcacttcgtccttggagtgacattccaatggcttcatcagaacatcatcacaagtcacaacaagcttccatctttggcagcaggtttttgtctgatgcattgccagggttctgcattcctgctagaatccaaggagaggatgagggccatggagttggtaacgacaggccatcatctgcttctcctaattctcatcactgaccacaaacttgaactgcacaatactgcactgttccttatctatcaggacaggagcattgcctaccagactttaaaacgtgggaagattaagatggacacattttgatgatctacacaattttatctggttggattcagcttttatatggctttctttcccccctacttattgcagccatttacattggggctttatatattttttaaggaaaagagatatttatgtattatgcattatatttacctgatactttgctcattttatatatggctttaagctggattccaaaaaaaaaaaaaaaaaaaaaaaaaaaaggactataaattgtaaatgtagtcatgtagttgcaaaaagtccaaaaaccttgatgttaatgttatagccacaattataaatgcgggtacaattgctagtacaatacattgcaattgtgggctatttttcctaaccttggtaatatggcaagtta

SEQ ID NO: 29094 - DNA, 563 bp, Glycine max
  Clone ID: TF_jC-gmfl02220071b11a1
ggctcgagctcctccccacaccctcctccgaaccttcccccaaaaaaccaccccccaaaagaacctccaccaaagaccggcacacgaaggtcgacggtcgcggtcgtcgaattcgaatgccggctctctgcgccgctagggtgttccagctcacgcgtgagctgggacacaagtctgacggcgagaccatcgagtggctcctccaacaggcggagccatccgtcattgctgccaccggcaccggcactatccccgctaacttcacctccctcaacatctccctccgcagctccggctcatccatgtccgttccctcccaactacgatccagctacttccacaactcaaacttctccctccaacctagaagaagcctattcctagaaaacaccaacactccttccacaacaacaacactccttcatttccaatccaacaacaacaacgccatcttccaacccaagcacgaattgcgcgaatcttcatcactagacttgtcctcagagaacaacaacgaagagggttattttggaagaataagaagacccttggagcaagaccta

SEQ ID NO: 29095 - DNA, 1113 bp, Glycine max
  unsure (1)..(1113): unsure at all n locations
  Clone ID: TF_GmC125579_1
ttttttccttctttaacatggaaattcgcaaattgtcatcaattaggcacaaaactggaacaggaacagtgaattcacagtagaacctagactccctacgtggcacaatcccagtggcccagttaacgcgaggagtgtatccagccattgattcaatttcactgtgaaaaataaatacagaactctgagcgtgagggtccctctcttccatacggataagtggggctctcaccattgttagggtttgtttctctctgcgttctttgctgtcccaattatttatttattttttcacattcacaatttttttaattacgaaaacccctattccattctgaattggggctctcaccattgttaggcgccagaaagcttcaaaccacagtcaacgtttcaaaactccgcttcgctgttcttctctacccctgcaaaacccactgaatggaagcgaatcccacccacgacggggatgacacctcggagacgccaccgccgcccatggtggacccgtccccatctccgccgcctcaaatgaaagaagaggtgatggacgcggagcaaggcggtgacacatctcttccgatgaccgttgttccggcgcatttgccggtgtcgaaggcggcggcgaagaggccgtcgaaggatcggcacacgaaggtggagggtcgtggccggagaatcaggatgccggcgacatgcgcggcgaggatcttccagctgacgcgggaactgggacacaagtccgacggggaaacaatccggtggttgctggagcacgctgagccggcaatcatcgaggccaccggcaccggcaccatcccggcgatcgcggtctcggtcggcggcaccctcaagattccgacatcctcggcagcaagacccgagggagaagttgacactccgaaaaagcgaaggaggagagcatcaaacagcgaattcatcgacgtgaacgaaaaccaggtttctgtctcttcagggctggcaccaatcgcgcaaagcgcgtatggaagtggtgttggtggtggacttgttcctctgtggcatggtaacgctgctgcttcggggcctttcttcatgtttccgaacgcttcaaacccgnctcagtattgggcc

SEQ ID NO: 29096 - DNA, 2754 bp, Glycine max
  Clone ID: TF_GmC355_1
ctcgagccgaatcggctcgaggtgttggttgtattgtgtataatgttgtgtgtagtgtagtgtagtgtggtagaagaacagcagcagaagaggggcagtgatgcactcacagatatttaacacctccattccgaccaaacactgtcaccctttaccactgccatcatcaagccctctcccatagggccagaatgaattcctcttccctataacggttatctagtgtctgcctattgtgttgatgggagatatgaaagaattgttagtttttttgcaaaaagacaggagttagcgaaaacagggagaggattgagtaacgcacccgtattgcgtagcttcagctgggtctggccattgatttaaagaataaagggaactcccctactataaacgcacaaaagttttgttgtggagagagaaatagagagagaggggaaacagatgggttaggctgaaaagtgagttggtataacattgttggtttggtttagtttactttcctcggtggagagggctcttttttttattttggtagtgatggaagtgggaaaattgaatggcacggaactttttcaagaggctgaagcaagtttcagagtggtggcagttgcacaagcaacaagaagagaagaagagtggaaagaaacaaagctgggagtgcaaggaatcaacaacccattaggaataagtgcaaagcttcattaatagctggaagaggaaaatcacaacaggggtctgactctggatcctcacaggaatcatcatcatcatcatcatcttctgcagcaacaacaacaaccacctcatcatcctcatcctcaaaatctgattctaaattcaataagacatgtaacagaccaagaaggagaaaaccaagaagaccaagaatctcattctcatcctcaccaattccatatccaattccaacctcttcatcatcaacaagaacaacaacaacaacaatcttacacaggtttagacacggagatcttaaacccactccaaccaccgaagaaacggtcttgcctaccgcctcttccgccgccaccaccgccgccttcgtcgcttgcttcatccgaacatgcaagaaaaatgggagagctacaacaccatcaacaacaggcagcagcagcagcagcaccgtcgagagcggcgatgagaggcgtcggcggcggcgagattgtggaggtgcaaggcggccacattgtccgctccaccggacggaaggaccgccacagcaaagtctgcaccgccaaaggccccagagaccgccgcgtgcggctggcggcgcacaccgccatccaattctacgacgtccaggaccgcctgggctacgaccgccccagcaaggcggtcgactggctcatcaagaaagccaaggcggccatcgaccagctcgcggagctcccgccatggaaccccactgccacctcaatgcaaccacgacagctgccacaagaaatcgtccactgcgagaacaaatctctcgcgatggacgattcaatgaccgctgccttcagtagccgcggcgaaagcaacgctttcgcctcccaccaacaagtggaggataatgaaaatgctaacaacattagcagcagcagcggcaacaaatacaataccggttctgggtttctgcccgcgtctttggacactgacaacattgcggagacaatcaagactttctttcctgtggaagcgacctcgacgtcgtttcagagttacccgccggcgccaccggatttagggcaccaagatctgcggctctcgttgcagtcctttcaggaccctattatgcttcaccaccagcctcatagccaccaccaaccggttctctttgccggaaccgccgccgcggcgctcgacttcgacggcggttccggctggtcagagcacctgcaccagcaccagcaacagaaccaccactcggaggaacagcgattgctctatgctggtggtaacagtggccacggcggtgggtttgtgttcaacacgccggcgccggtgcaggtgccggcgtttggccagtttttttctcagaggggaccccttcagtccagtaacaccccttcgattcgtgcttggatagacccttcggtcgatcaccaccaccaccaccatcactacctatcacagttgatccaccaaggatccgtcgccggtggcggcggattctccggcttccgcattcctgcacgaattcagggtgaagaggaacacgacggcgtgtccgacaagccgtcctctgcttcctctgattctcgccattgatttgaaaaacacacatcaaaaaccccaactttgttctccctcagggtttgtggggttgcattgaagatggttcaattgatggagagaacatgattttggaagatcatgatgaatggattttcaagctacaacgggaattcaagaaaatctgaggtggatattcaggttttccaatccctcggtttgttatgctttttatgttcaacttatgtttttcatgcttaatttaactaggactaggagtattgtgtttcttttgtttcttctgtattggagtgctatgtttcttttgtttcttctgtattggagtgctatgtttccctttgttaagtgattgtgtcttctttgtacttcttcagtttcgagtttcttgtagtgatctgaaaaacatgcaaattcaataaaagagctagtttgctctagttattgtatatttccaagttagtgcaaaaaaaaaaaaaaaaaaaaaaaaaaaaaaaaagaaag

SEQ ID NO: 29097 - DNA, 1703 bp, Glycine max
  Clone ID: TF_GmC4156_1
ggctggagcttctacactaagtttattaggtgcaatcagagccaagtcaagctctttaaattttgttctatcttggtatgcaaaagcacagtgcaaacttcctccttctaccttggggtgtttagtatccaaagtgattcttaggatcgagagacaaccagtaaatccaaacaatgaacttaaaatttagcagtttccttgttgatggtaccgtggaacagaattttgacaatcacaaagtggaaggacaaaactcagcacctagcaaccaacaatgagagacataagatcatgattaagagccccaaagaagcagattttccattaaaacaggagggtcattctcaatcaattactgatcctgaaaaggcaaaggcttcagcgagctcagtagcacaatggccaagattgaaagatccaaggattgtgcgagtatctagagcctttggaggaaaagacaggcacagcaaggttttcacaataagagggttaagagacagacgggtgaggctatcagtaccaactgccatccaactctatgatcttcaagataggctagggctcagtcaacctagcaaggttgttgattggttgctcgatgcagctaagcatgaaattgatgaacttccaccacttcctgttgttccttcagtgaataacttcacccttggtcatccatctgctgttacctctaatgaagctaccacctcaaattctcagcctaatgagcaacttcttaatatcaacagaagcattcagtgggaaggttcaaaccagaattctacatggaaattaaagcctaaagaagtttcacgagaaatgattagcactgataaaccaaattggataagtagaagtgaagaggataagcaaggaagcaataatgaaggtcctagcacacgtgttataccaaatattaatctcttaccaagagcaaatcttaatcatccttcattcttgggcttgctgaatactatgccacatggttaccaatgggaaccttctgctggtgatgtttctcatcagttgggaaacaatggatttgcaaaccaaacagatatgcacagcattaacgttgtacctttcccaacatcaacattgtcattatcaactgggaattctcaaattctgctatgtcctccaggaacagcacaaccatatttcccttcacatgttacaatggacatggatccgagacaaatcaaccactatcagatgttgagttcaggttctcaaaatccattggcgaattatctcaatcattctttcagcttggctatgatgactcataaacctcttcattcacccaacagcagcaaaagcccctcccacaaagaccaagatttcccttccaactgatacacaaaatacaaagtatgtctcaattctcctctcgcaatttgcatggatcatgaagactgtgagaaagattcttcagttacaagatattccacggttaccacgggtttgaataatcattttgtttgtgaatgcatgtttggatttccttttatttttttgaattatataggtaagccttaaattttcccttcagttttttgagtttatatatgtattccctgaatcgatctaacatgaatagctttctaagggtataatgtaagagctctcctttaagtgacaatgaatagcttaagaactataagggaatgtaaaaaaaaaaaaaaactgagactagttcc

SEQ ID NO: 29098 - DNA, 1314 bp, Glycine max
  Clone ID: TF_GmC909_2
cctctatgatctccaagataggcttggactcaaccaaccaagcaaggttgttgattggttgctcaatgcagcaaaacatgaaattgatgaattgccaccacttccaattcctccaggtaacttcacccttggttatccctctcttgtttcttgtaatgaagttagcacctctcgtgaaggttcaggccaaaacactttattatggaaaccaaagccaggagaaataatggttagtgatcatgataaggcaaattggatgaatagaagagaaggagatgatgatgatgataataatcataataatagtaatggtgataaacaaggaagcaataataattgtcatggtggtgcacttgttttgccaaataatctcttgccaacaagaccaaaccatccttcttttttgggtttgatgaacactatgccatcacttggttaccaatgggaacctaattcttcagctgctgatgttaatgttcaatggcaaaaccatggattttttaaccaaacagatgtacacagcatcgatgtggttccatttccgtcaacactggctctatcaactgggaatagtactagtactactactacttctcagattttggtgtgtcctcctcctccgggagcaacaacacagccatattttccttcttcacattttgcaacaatggagatgaatgcaaggcaaatcaaccactatcagatgctgagttcaagttctcatcaaaatctcttggcaaattctctcaatcatccatcatcacagcaactcatgagccaatccgggaaagcaccattcagcttgcgaattaggcctaaacttttccattctcctaatagcagtgaaagccattcccaaaaagatcaggatttcccttccaagtgatgcacaaatagagcaaaataaagttgtcaaaattcttcttctcctcacaaattatgcatggattgatatcttgagggctgtgtgggaattagttgcaagacatattattcaacgttttggggtttgaataaacattccgtttttgtcaaagttatgtttggttttatgattttccattcagtttgatctatatggatatgccatgcaaaggtctacaaaagaatggttttcttttcaagggtaagagctttttcctgaagtgatgatgtgattgctacactaaagagaacgcatgctcagataagttcacactctcttctatgcattgagaaaggttggaaggtggaataataatattatcattttgatagtgcgttttggatttgtttttgttttggttaagtaaacatcttatgtgtttgaatgag

SEQ ID NO: 29099 - DNA, 1847 bp, Glycine max
  Clone ID: TF_GmC956_1
tccggctccagcttttatcttttacatccttaaacacttggtgcttctttggtttaccgaagatcctaacgacccatgaatcaaaaatttcaaatttttatttttcaaaaaaacgtgcatgtaaatgtgtgtttattcaatttaacgtcgaaactgtgagtttgtttcatacgttgttgttggttgtgtttttctttttttacgttgttgttgagttatggctgatgaagcttctggagatgttgatctaaggttgggagagcccaaggggcctaaagaggagcccgagacggaggaggggtccgccatacgtgtgatgccggtggcggtgcacgtgccggcggggatgtctatgtccatgtccaaggctctggcccaggcccaagcccaggcccaaccacaaaagcgggcctccaccaaagaccgccacaccaaagtagaggggcgaggcagaaggatccgaatgcccgccacgtgtgcggcgaggatcttccagctgacccgagagctcggtcataaatccgacggcgaaaccatccggtggctcctcgagcacgccgagcccgccatcatcgccgccaccggcaccggcacagtccccgccatcgcgatgtccgtcaatggaacgttaaagattccgaccacctcaccttccgatcaagaacccggagagccgcccgagaggaagaagcgcaaacgacccgcgaatagcgcctacgtggacataaacggcgccgccgtttcggtctcggccgggctcgcaagctctattattaataataataaccaaaacgcagcaacgacgatgacgacaacgatggcaattccgcaacatacagcaattccgttgccgcaaggaatggttcccgtgtgggccatcccttcaaacgccgtcgttccggctgcaggagctttttttgtggttcctcaaacggcgtcgtttcagcatcaacctcagtttttcaccatagcgagacctatctccgagtttgtctcttccatggtcacacccgtcgttcagcttcaaccaacctcgataaactcttccaccaacactaactctaacgcttcctccactgcgccgtcgtcgaagtccccggcgagagccaccgtcatggctccgacaaccaccaccaccaccacgaggcagatgctgagagatttctcgttggagatttacgacaagcaggagctgcagttcatgtcgcgcgcgtcttccaagcattgagagaattagaagaacgttgaatctggtttgtatcttcgtttccgccatgaacgacgacgacgacgacgtcgttgctgcgggagagagaggaagagcacgtgcgcacgtgcggcgggattaaaaaatggtggggaccacgtgtgtgtgtgtgtgggtgtgggtcaacacgaaaaaagtggagggcatggtggggacccagtgcggggtactacataaccagcaccagaagatcagaactacggagagaagttttttctttagtatttctcagaataataatgtccatgacaattaattagaataaattttagactttaattttcatgtactagtattttttttttttttctaaaaaaaatttgactgtcacaatttaaaactaaggcaactatgaattttagatagaaaaaaaaaaaaaaaaaaaaaaaaaaaaaaaacttcgggggggggcccggtccccatttcgccttatagtgagtcgttttacgcgcgctcactggccgtggttttacaacgtcgtgactggaaaacccttggcgttacccaacttaatcgccttgcagcacatccccttttcgcagttgcgtaataacgaagaggcccgacggatcgcccttcc

SEQ ID NO: 29100 - DNA, 428 bp, Glycine max
  Clone ID: TF_22521769
gcacgaggtcacgttctctctaagcctttttctatgtaaagcgaaacaactcaactgccacctccataccaaagcaaaatcgatgctccacaaaacccacagacccacagaattcatggtcacccactacacaaagacaaatctacatatcaacacagtatcactatcttttcataactctgtaacaatttttattattatttgtatatgatactgcttcgtcatggaagaagaatgtgttcatcaacaaaacgtggctggtaataagtccaatttcccgctacagctgctgaagaaaaaggatgagggaccaccaccatcaccaccgccgagcgccgccaaggccaagcgaccaccgacgaaggacagacacaccaaggtggaggggcgggggcggcggatccggatgccggcggcttgcgcggcga

SEQ ID NO: 29101 - DNA, 712 bp, Glycine max
  unsure (1)..(712): unsure at all n locations
  Clone ID: TF_GmC3142_2
nctgcgttactcaaaaaaagcttttaagccaaaaagaggcagtggctaccaagcaacaatcgattggagtgaaagatgagtagcatgaaattttgccgccgctgcaacaacgttctgtaccctacggaggataaggaggagaagctacttctctatgcttgccgcaactgcaatcacgaggagattgccgatagtaacgttgtgtatagaaataagatacatcattctgttcaacggcgcactcgagagctggaaaatgtagctgcagatccaacacttcctcgcaccaagtctgttcgctgctctcaatgcaatcatggagaagctgtctttttcaaggcaccagtaaaaggggaagaaggcatggccctcatttttgtttgctgcaacccaacttgtggctaccgttggagagactaggactcttaatagtcaaggttcaacattggggagttgagcatatcaaattcttcactcttggatggatgagaaactttatttgtatatataaaacttggctagtgtgaggacgttcataattaagtagttgtgatcactgtttaatctccctaaacaattatgttgacgcagttaatggtccaatcctttagtttatgggttatgaaagaaattcgcatttcttatttgagctcccagacatttatgaaagggcaatccttagcatttaaaaaaaaaaaaaaaaggcccccta

SEQ ID NO: 29102 - DNA, 556 bp, Glycine max
  unsure (1)..(556): unsure at all n locations
  Clone ID: TF_jC-gmst02400020f11a1
ggctcgagctgagcccgtctcaccctctcacgcagcatttccctgcttaaaccctccagcagcctgcaaacaaaaaccctaattcactaaccccatttcaaatcccaatcacgtttccgatcaatcatcaccttctccataatctctccgttcgcgtcgcaaatcgagcgagatagtgtcgagtcgaaccaacgatcgagaagatatagaagatggagttttgccccagttgtggtaacatgctacagtatgaattgccttatatgggtcgcccttcaagatttttttgttctgcttgcccatatgtttgccacattgagaatagggttgagatcaaaagaaagcaaaggttggtgagaaaagagatagagcctatattctccgaggatgacatgacaaatgcaccatcaactgaagcgacgtgcccattttgcggtcatggtaaagctgctttcaaagaatttcagactcgatcggctgatgagccagcaactctattntataagtgctggaacaatgactgtaaaaaacaatggcgtgaaggtgacttcaacat

SEQ ID NO: 29103 - DNA, 1723 bp, Glycine max
  Clone ID: TF_GmC38330_1
cttcccggtcctcacccacgcgtccgacttgccacaccaccgccgccgcaggagacaacaacaacaacaacacgttccattctcgaggagagagtggttgggttcgatggagaaggagttggtggaattgtacgaagcggcgaagaaggcggcggatgctgccatctccggcgacggcaaacatgaggaaagccgatgcatcgatgcgctcgagcagctcaagaagtttcccgttaattacaagattctcgtcaacacccaggtgggtaaacatcttaaagttttgacaaagcacccgaggctgaaaattaaggcctttgctattgacctaattgagatatggaaaggcataattatcaaggaaacaagcaaaaataaaaatgggggctctgatagtaaggttgagtcggctaatggggagaaatctaaagctgggaaaatgcaaaagagtccttcggtaaaggttgaaaaaggtgaaactgttaaggttgagaaaattgataggaatggtacaacaaagtcaagctcagaaaatatgaaaaaggtacaaaacgatgtcaagaatgagaaaactgatcgttctgcaagtgtcaaggtggaaaagatagccaaggaggaaaagccagtttctggagcaaagaaaatgtcatccagttctgccgctcccccaaaactaaaaactatgattaaatctaatgatgcaacacgagacaaaataagggaaattctccacgaggctttatccaaggttactggagaagctgatgaagatcttgtagatgtagtcaataattctgatcctatccgtgttgctgtgacagtggagtctgtattatttgaaaaatggggcccttctaatggggcacaaaaggtcaagtataggtccttaatgtttaaccttaaggattcaaacaaccctgatttccggagaaaagttctgcttggtgttattgagccagagcaactgatcaacatgagcacagcagaaatggctagtgagcaaaggaagcaggaatatcagaaaatcacagagaaagctttgtttgaatgtgagcgtggaggtccgccaaaagctacaaccgatcaatttaagtgtggccgatgtggtcaaagaaagaccacctattaccaaatgcagactcgcagtgctgatgaacctatgacaacctatgtcacttgtgttgtctgcaataaccgttggaagttctgttagtgcagttgtgattagtgagtctcactagagctgttgtcttctgttactgatttagggtatgaaggtgcgagtatcatggttccgaattgcaatcgtgccagaattttccatcagactgtttagatgtagaaatttttaggcagaaaaattgtactttttattctttcagttttaactcaagttttcgcattattgtagtttgctgtaactttacaagtgattgcaccaatgtttttctcaggttctactcatcagtaactaagtacttaacctaatggcatccaacctatacgattagttaacagaatggtcagttagagctaggttttattcataaacactaagtgcattgtacttaattttctttgtaagcttgcagcacactttacaatgtagtctcttcgtttcattttaattttgaaaacagcttagctttagttgcaatgcgttgcttgtaagctgcgaaccctttcaatgcatctgtagttcagtgaagaactcttacctttt

SEQ ID NO: 29104 - DNA, 850 bp, Glycine max
  Clone ID: TF_GmC158666_1
tttatttcacttgctcaaaacgtctgagcccgtctcaccctctcacgcagcatttccctgcttaaaccctccagcagcctccaaacaaaaaccctaattcactaaccccatttcaaatcccaatcacgtttccgatcaatcatcaccttctccataatctctccgttcgcgtcgcaaatcgagcgagatagtgtcgagtcgaaccaacgatcgagaaggtaaaagcgttccaaaaataccatcgaggataacgatatagaagatggagttttgccccagttgtggtaacatgctacagtatgaattgccttatatgggtcgcccttcaagatttttttgttctgcttgcccatatgtttgccacattgagaatagggttgagatcaaaagaaagcaaaggttggtgagaaaagagatagagcctatattctccgaggatgacatgacaaatgcaccatcaactgaagcgacgtgcccattttgcggtcatggtaaagctgctttcaaagaatttcagactcgatcggctgatgagccagcaactctattttataagtgcttgaacaatgactgtaaaaaacaatggcgtgaaggttgacttcaaacatggccttatatttcttcattttgctgaggatagaaaagcttttgttgtaattgggccaatatgacagctaagagtgtttggatagtttttacattttcgctgacaataatctaagtgatacattttttttttctttctttattactatcgaagtttgttttagggattagaaaattgagatggtaagcattcctcgtgtttcatacgaaaaaaaaaaaaaaaaaaaaaaaacaaaagttaata

SEQ ID NO: 29105 - DNA, 539 bp, Glycine max
  Clone ID: TF_GmC7695_2
ccacgcgtccgggaaaacaggagcacccaaaaggagcgaagaaggaacatcgagtagcttcgctactcccttctcatcgttgccaagatgagtgccatgaaattttgccgtgaatgcaataacattttgtaccctaaggaagacagagaacagaaggttcttctcttcgcttgccgcaactgcgaccatcaggaggttgctgataacttctgtgtgtataggaatgagatacagcaccctgtaggagagcgcactcaggtgttgcaggatgtagctgcagatccaacgcttcctcgaaccaagtctgttcgctgcactcaatgcaatcatggtgaagctgtctttttccaggcaactgctagaggggaagaaggaatgacactttttttcgtttgctgcaacccaaactgtggacaccgatggagagactgaagtttgtgcttcctcggatcaagattcaatgttggggagatctaacatattttatttgtatttggcttagcttattttgagaagttaatcttttttttttcttgtcc

SEQ ID NO: 29106 - DNA, 231 bp, Glycine max
  Clone ID: TF_GM310N10.C12.o20.fg
atggtagttacacaggtacagcttgaccgtgccaaggatatcagaagagagcttgaaatggaaataattgaggaacatacggtgatggaatattctaaggtcagcaagaaatgtgaaaaatgtggccatggggaagctacctattatactagacagatgagatcaacagacaaaggacaaactactttctacgcatgtaccggctgtggtcatccgtctcaggagaattag

SEQ ID NO: 29107 - DNA, 961 bp, Glycine max
  Clone ID: TF_GmC7695_1
cccacgcgtccgtacggctgcgagaagacgacaggaacgggacacaaaaggagcatcgagtaggtttcctactcccttctcatcgttggcaagatgagtgccatgaaattttgccgtgaatgcaataacattctgtaccctaaggaagacagagaccagaaagttcttctcttcgcttgccgcaactgcgaccatcaggaggttgctgataacttctgtgtgtataggaatgagatacatcactctgttggagagcgcactcaggtgttgcaggatgtcgctgcagatccaacgcttcctcgaaccaagtctgttcgctgcagtcaatgcaatcatggtgaagctgtctttttccaggcaactgccagaggggaagaaggaatgacactttttttcgtttgctgcaacccaaactgtggacacagatggagagactgaaatttgtgcttcctcagatcaaaggttcaatattggggagatctaactatttgtggttatctgaaaaaacttggctgatgcggggacagtaatactgaagtatttgtgttacctgtttaactgcagttcctgatcaaataattaatacagttaatggacaaactgttgtttgccaatgctgataaattctgaggatgggcataaatttcatggtttgttaaaaggaaaaaggatgagtgacactgcttttatggatgggcctaactttcttggtggggagttaggaatcaaaatgacttttttttttgttatatgctatattatttgatgaaaaattcttattaaaagttcatttggactctctttgatttttccccaaagcgatgacaccgattaacatataaatataggtcatccatctgcccctaaaaggggttggacgttcccaggaaaatataaatatgataatgtaaaaatgttatggttttgtatggatttgaaggcaactattataatagtaacc

SEQ ID NO: 29108 - DNA, 276 bp, Glycine max
  Clone ID: TF_GmC869826_1
tacaacgaggtcatgttcaacagattttttcgcaattcgagtggcagcgacttggacggggtaaggcaggctgagattgccacagaaacgggacatgaaatcggcactggttatgtggtccaagttggtctccatggtcttctggatgagcttgaaacagcgtccaatttccttcttcgacacttttgacaccgcacaaacttccttgaacgttctgggaaccccctcttgacgacatgcgatgtaaaggcaagcggccgcctgtgcctcgttgta

SEQ ID NO: 29109 - DNA, 674 bp, Glycine max
  Clone ID: TF_GmC615_4
tttacggctgcgagaagacgacagaagggggctgcggtagttggctctctctctttctctcataaaaacactccgagtacaaagaccctctctcctctcctctttgcattcgagtgaaagaagcgaagaaaaagaaacatgtcagacgcgttctgcagcgactgcaagaggcagacggaggtggtgttcgaccactccgccggcgacacggtgtgctcggagtgcggcctcgtccccgaatcccactccatcgacgagacctccgagtggcgcaccttcgccaacgagtccggcgacaacgaccccaaccgtgtcggtgggccctccaatcccctcctcaccgacggaggcctctcgaccgtcatcgccaagcccaacggcggcggcggtggcgagttcctctcctcctccctcggccgctggcagaaccgcggctccaaccccgatcgcgccctcatccaagccttcaagaccatcgccaccatgtccgataggttgggactagttgcgaccatcaaggatcgggcaaatgagatatataagagggttgaagatcaaaagtctagtagaggaagaaatcaagatgctttattggctgcttgtctctacatcgcttgccgacaagaagacaaacctcgtactgtaaaggaaatttgctctgttgccaatggggc

SEQ ID NO: 29110 - DNA, 1874 bp, Glycine max
  Clone ID: TF_GmC1028_1
tcccacgcgtccgtacggctgcgagaagacgacagaagggggatagagaaatagagataagtacggtgcgaaaagagtgaggcggagaaaaatgaagtgcccgtactgttcggcggcgcaggggcgttgcgccaccacgagcagcgggcgttcgatcacggaatgcacgtcttgcgggcgcgtggtggaagagcgacagtcgcatccccaccacgtgttccacgtgcgcgcccaggacaaccctctgtgtctggtcacatcggatctcgctctccccgcgctcaatcaaaacaacgaggaggaggaccctttcgagcccacgggcttcatcaccgccttctccacctgggccctcgagcccagcccactctacctccagtcatccctctccttctctggctacctcgccgagctcgaacgcactctggaatcatcatcatcatcctcttcctccagttcttcttcttcgttgtcgtcgacggtggtggttgataatttgagggcgtacatgcagattatcgatgtggcgtcaattctagggttggactgcgatatctccgaccacgcttttcagttattcagggattgttgctccgctacgtgtttgagaaaccgcagtgtggagtcgcttgctactgcagctcttgttcaggccattagagaggctcaagagcccagaacccttcaggaaatttcaattgcagccaatgtgccgcaaaaggaaattgggaaatacatcaagatactgggagaggctttgcagctaagtcaacctattaacagcaattccatctcagttcatatgccaagattttgcacgcttcttcagctcaataaatctgctcaggaactggctactcacataggagaggttgtgatcaacaaatgcttctgcacccgcaggaatccgattagcatctcagctgctgctatatatttggcttgccaacttgaagacaaacgcaaaacccaggcagaaatttgtaaggtaactggtcttactgaggtcactctccgtaaagtgtacaaggaactattggagaattgggatgatttacttccctctaattacaccccagctgttcctccagagagggcatttcccacaacggtaattgcttctggtcgttcttcaacggctaaggttgatgctgtagaggttatttcttctttggacccagaaaagttgccagatattaaacatagcaaacctaatgagggcccgggcatggttcatcatcccagagggaaggatgaggctgttggtggttatcatgcaagccattccacactgaatcaacagtcaactttttggcaatcccagcttcccagtgggacacacaatcatcagaatgttttgcaaggaatggatattgatgtatcgcagcgaaaccaccaacagccagaacacatggcagaggatacaacaaatggtgctgccaatggtagttctctaaaatcaaaccaactttgtagtcctcctgcttctagtgcaagttctgttatgaggcagttttcagctcccccttcatctgggccttcaaatgttcgataagtacagtcacctaagataatgccaggttatccggatcactgaagaacaatgaaatctaaatggttggggaaattccggttccttgtgccaacacctaacctagcacggataaaattacttcgcctcttttaagtatactattgtattgtatatatatgcatgcattatgtcacatttgatttgttttttatgtgtgaactttggtgtggacgtgtggttattgctagaaccggaatctctcatcgacgctagaaaaagactgataatttgtggtggttttactaatttcaggtacttaattacaaaaaattacatgtct

SEQ ID NO: 29111 - DNA, 2401 bp, Glycine max
  unsure (1)..(2401): unsure at all n locations
  Clone ID: TF_GmC1205_1
aattcggctcgagaccttctcgatcgtgtcgagcttttcatcccctctgtccctctttctttagtcctttctcacctcttttgttgcctttctttcacgttttttcgtttcgctcgcgttgaaatcgcagagaccaccggcacgccaccgtgaaccaccgccgccgcctccgtcagtcactgtgccaaaaatgttgccggcgagcgactagatgatggtttcttatgttgtggaagctgtgggagggtgttggaagattacttttttgctgaggagccttcatttgttaagaatgcggcagggcagagtaaattatcaggcaattatgtaagaacagttcaaagtgagtactctgaatcacgtcaaaggactttagatagagcttatgatgaaattaaatatttaagttttggccttggagttaatgatgaacatatggctgaacaagctttgaccttttataaaatagcgcttgagcgaaatttcacccgtggacgtaaatcagaacaagtacatgctgcttgtctctacattgcattccggcacaacaataaaccataccttcttattgatttttcaaattatttaaggacagatgtttatgtgctaggagcagttttcttgcagctttgtcaagtgttaaggcttggagagcacccaattgttcaaaagcctgttgatcctagtctttttattcatagatataccaagaatttgttaaagcgagggagtaaggctgtctctgatactgcactggccattgttgcaagcatgaaacgtgactggatgcagacagggaggaaacctagcggattatgcggtgcagcattatacatatctgctcttgctcatggtattaagtgctctaagccggatattcttaaaattgtccatgtatgtgaagcaacattgaccaaacgattggtagaatttgaggataccgagtcttctagcttgacagttgaggagttgaatacaatggcaaaagagcatgaaaaaaattcaatgataatgccaggaggtggattaaaaggttgtatttcaaaagacctactgtgtgagcacaaggaggatagtggggtgacccattttgcacttggattatgtgaagcttgctataaggattttgataagctctctggtggacttggtggtggtttggatcctcctgcattccagcgtgctgagagggaaagatttaaaaaaacacttcctgaggagagtgtcgatgaagcatgtgctttggcgaatgcatcaaatgatcagtttaagagccacaaagaagatttgcatgcctatgtgccagaaagggctaatgttgagcatgaggccactaaagatggtaaatatgatgattctcatagagaagatgaatcagaaactttatctgatattgatgatgaagaagttgatttgtacattcatgatgaggaggggaagcatatcaagaagttactatgggaaacagcgaatcgggagtatcttgaggagcaggcagccaaggaagcagctgcagcagctaataagaaagcttttgaggcaaattttgaaaactgttcggaggatttactagcagcaagagagcttgctgcatcttctgctgaagccgtggcaaaatccagaaaggaaatgagacagaaacgagcctatgaggcaaaaaatacaaggccagctcaatctgctgcagaggcctttggccaaatgtctaataaaaaaaggaatttgcagggtctcaaatctaaagtcaattttgaactcctgaatgaattgtttgatgaaatggaaaataccgatgatctcaagaaaccgaagaaagtacggtttgatctgcccctagataatgatgacaatataccgtccaaggttgaggacaaaaatgaagatgagatgggattagcggatgaattcgatgatgaaggtgatatgggggagatgtatcaaaatactgaaaatatggctgataaatatttccctgaggatggtgatttcggctatgatgactatgatgattattactaaaatgttgctagatgatgtttctgattttttttagcaattcatactcaacatggctggcagcgtggaaccgaagattgtcagagacccagaaatctttggaagctaagttgcaatctgataagctagtatcactacacgagcttttttaatgattccacatgctttaaagaaagcttgggaattattgtaccggaaaatttttaggtaggtattaccagcatcactctgcttaacacaaaatagggggttagattatgtgtttcattttaaattatacttatctctaaacatttttttaaatatgacaatcaggaagttgattatttatgcttagtttgtgtagaaattctcgcttnnnnnnnnnnnnnnnnnnnnnnnnnnn

SEQ ID NO: 29112 - DNA, 1443 bp, Glycine max
  unsure (1)..(1443): unsure at all n locations
  Clone ID: TF_GmC615_1
atttagaacatcaaaaggctccggttgtcgccacccgagatgctggctctctctctttccacgcttccgattaacacactacgcgtgcaaagaacctctgctctcctcttgcttttgatagagaagaaagaagcgagaagatgtcagacgcgttctgcagcgactgcaagaggcagacggaggtggtgtttgaccactctgccggcgacacggtgtgctcggagtgcggcctcgtactggagtcccactctatcgacgagacctctgagtggcgtaccttcgccaacgagtccggtgacaacgatcccaatcgtgtcggcgggccctccaaccccctcctcaccgacggcggcctctccaccgtcatcgccaagcccaacggcggcggaggtggcggcgagttcctctcctcctccctcggtcgctggcagaaccgcggctccaaccctgatcgcgccctcatcatcgccttcaagaccatcgccaccatgtccgacaggttgggactcgttgcgaccatcaaggatcgggcaaatgagatatataagagggttgaagatcaaaagtctagtagaggaagaaatcaagatgctttattggctgcttgtctctacatcgcttgccgacaagaagacaaacctcgtactgtaaaggaaatttgctctgttgccaatggggccacaaagaaggaaattggccgagctaaagaatacatagtaaaacaactgggtttggagaacggtaatgctgtggagatgggtacaatacatgcaggggacttcatgaggcgattctgttctaatctttgtatgaataatcaagctgttaaagctgctcaggaagctgtgcataaatcagaagaatttgatataaggaggagtcccatttcaattgctgcagcagttatatacatcataactcagctttctgatgataagaaacctctcaaagatatatcacttgccacaggcgttgcagaaggaacgattaggaactcctacaaggatctttatccccatgtttccaaaataataccaaattggtatgctaaggaggaggatttaaagaatctttgcagcccttgaattgtagagcaaaatattaccatccacatttaaatagttacaagttataatgtcattagagcattgtgtttctaatgtaactgaactgcttattacaaagtgccttttttttagttgtcattcattgccgtcaatcgcaccattttttaaactctcctaatttgattactcgttgggagcaaggcaacaacatacaaagtatgaatttctcgtttctggtaaaacgttagagttattttttaaaaaaaaaaannnnnnnnnnnnnnnnnnnnnnnnnnnnnnnnnnnnnnnnnnnnnnnnnnnnnnnnnnnnnnnnnnnnnnnnnnnnnnnnnnnnnnnnnnnnnnnnnnnnnnnnnn

SEQ ID NO: 29113 - DNA, 557 bp, Glycine max
  Clone ID: TF_LIB3242-570-P1-K1-C9
ttttatcaaaaggattatattagagtatttaccattgtcatgctacaaataaccgtcaacctatatgacccagcaatttcaacgcaagaacaaaatgaacttactatcataaaggttgagctaattttatatatatcagcggtgcctctcccctagaattctcaaattgagagggttaaccaaaatgaatgtgcagttaactaactaactacaaggaaaatgccaaacagaagaaaataactaataaaagaggcattttcattttgaattagaagtataaaacagttcagtacatccagaacagaacgttttccaatggtatctaagttgttaaatgtggtcactattgtttttcttttaagggctggataggttcttcaaatcctcttcctttgcataccagcttggtattatttttgaaacatggggataaagatccttgtacgagttcctaatggttccttctgcaactcctgtggcaactgatatatctttgggaggttttttatcatcagaaagctgagttatgatgtatataactgctgcaacaattgata

SEQ ID NO: 29114 - DNA, 142 bp, Glycine max
  Clone ID: TF_11689812
ggctgcttgtctctacatcgattgccgacgggacaacgaacctcgtactgtaaatgaaatctgctctgttgccaatggagcctcacaaaaggaaattggccgagctcaagaatacatagtaacacaactggattgggagaac

SEQ ID NO: 29115 - DNA, 710 bp, Glycine max
  unsure (1)..(710): unsure at all n locations
  Clone ID: TF_GmC615_2
aatggggccacaaagaaggaaattggccgagcaaaagaatacatagtanaacanctgggtttggagaatggtaatgctgtggagatgggtacaatacatgcaggggactttatgaggcgattctgttctaatctttgtatgaataatcaagctgttaaagctgctcaggaagctgtgcagaaatcagaagaatttgatataaggaggagtcccatatcaattgctgcagcagttatatacatcataactcagctttctgatgataagaagcctctcaaagatatatcacttgccacaggcgttgcagaaggaacaattaggaactcctacaaggatctttatcctcatgtttccaaaataataccaaattggtatgctaaggaggaggatttaaagaacctttgcagcccttgaattgtagagcagaatattaccatccatattaacaatttacaagttataatgtcattagagcattctgtttcagatgtaactgaactggttattacaaatcaaagtgccgtttttattcattgccgtcgatcgcaccattttttaaaccctcctaatttgagtactcgttgggagcaagcaacatacaatgtatgaatttcttgattatggtaaaacatcagagttattttttgctgtcaaaaaaaaaaaaaaaaaaaaaaaaagcgaccgcccgctctaaaggatgctagcgtacg

SEQ ID NO: 29116 - DNA, 997 bp, Glycine max
  Clone ID: TF_GmC299358_1
ataggccaagtgatcataggagggtgagaaaaagctggagaacaaaagtggaggagatagtggattcccacatgaggaagatcatacagactcaagatgcttggatggagagaatgttgagtgttgttgagcaaagagagcaagagatggcatctagggaggaagaaaggaagagaaaagagtcaatgtggtttgaccaacaggtgcatgaactgtgggccaaagagaaagcatgggttgaggcaagagatgctgcattgatagaggttgtgaggaaacacattgggatagggataggacttgaagcattgccattggtcgaagaagaatcaccgaataagaataagagccagggaagtattgatgccaatgagtttccctctgagggtgttgatcctggtagaagtagtagtagtaggtggacagaaatggagatttcaaatttgatgcagctaaggactagttttgagcaaagattcagagaaaataataatgggtacatggagaatggggtttgggatgaaatagcagcaaaaatggcttgtttggggtttgataggagtgcaagtgagtgcaagcaaatatgggaagagatcagcatctctctcagaaggacagtggatgagtgtgatgatggtgcaaaagaaggccttggtatttgggacttaagctgacggatgatgatctttgacacattcttgttctaaccgaaggcatcgatcagagagattaagtatatatgacactttgcttttgatgagttctgagcgtggaaggaaacttgtgggagaaacaagctagggcttgagagggttattaactaggatgtaacaagtttggatcattagcgaatcacaaggtattctaggccacgtgtttaactatatatttaattaatataacgtatgaggactcattcttgagtgtaagcattgactttgttgtttattattaattttatccatgcatgcatcagatgctagagtcatcagttatt

SEQ ID NO: 29117 - DNA, 1346 bp, Glycine max
  Clone ID: TF_GmC134585_1
cctccccccgctccctcctccactcatctctgtctctctcgaaacggcgtaacggaacgactccagtgccgtggctcatgtctggtcacggagaaacggcgtaacggaaggagtcacgtgacgtggatggctttagagcaggagtgggtcagaataggaacacaaacggcgtggatggtggagacgagggagggaaagcgccgagactgcctcggtggacaagacaagaaattctggttctgatacagggaaagagagacgccgagaacaagttcaggagggggcgcaccgcgggtttggcatttgggtcgggtcaggtcgagccgaaatgggcatcggtatcttcctactgcagaaagcatggagtgaacagaggtccggttcagtgccggaaaaggtggagtaatttggccggagactacaagaagatcaaggaatgggagtctcagataagggatgagacggagtcgttttgggtcatgagaaacgatttaaggagagagaggaaattggccggatttttcgataaggaggtctatgatattcttgattcactcccaacgaccttggctctttctctttcctcatcgcctccaccaaccacaaccataacaacaacaacagtccctgacgaccctcctcacctctatgatagtaatcggagcgcgcccggtgacggtgaggatggcttgctctcagattttgaacaagatgaagagaagaacccgccctccaacaaggacattcctgctcccattcctatctcagagaagcaatatctccgtcgttgccaagctgaagatgtgactaacgagaaacagtctacttcaaatccagaaatgggttctacttctcaaggagagaggaaaaggaagcggttagcaactgacggagaggaggaaactttgcaatatcaattaattgatgtcttggaaagaaatggcaagatgctaagtgctcaacttgaagcgcaaaatataaatttccagttggatcgtgagcagcgtaaagaccatgcaagtaatttggttgctgtgcttgataagcttgcggatgctctagggagaatcgctgataaattatagtgcaagagcaatcagactacagtgtacataacagttgaagtcctgtagataatagtggtttctgttatttatctcagcaggtctcctagaaaatgactgccacacttgttccccgtttgtttttctttctggatatgccatatttttgtggtttattactgccattttaggattatatacacacatttggattactgctctttctctcttactgttatattaatattcacgaggtcattcgaatcaaaaactgggaagtaa

SEQ ID NO: 29118 - DNA, 988 bp, Glycine max
  Clone ID: TF_GmC134585_2
ctcacgcgtccgcccacaaagccaaagccctctctctctctctctctctctctctgtctcctccatttctgtgcctcttctctgtcgttacgaccctctctcctaaacggcgtaacggaaggagtcacgtgacgtgccgaagaaaaaggaaaaggttgatggctttagagcaggagggtcagaataggaacacaaacggcgtagtggatgctggagatgagggagggaaagcgccgagactgcctcggtggacaagacaagaaattctggttctgatacagggaaagagagacgctgagaacaagttcaggaggggccgaaccgcgggtctgccattcgggtcgggtcaggtggagccgaaatgggcatcggtatcttcctactgcagaaagcatggagtgaacagaggtccggttcagtgccggaaaaggtggagcaatttggccggagactacaagaagatcaaggaatgggagtctcagatacgggaggagacggagtcgttttgggtcatgaggaacgatttaagaagagagaggaaattgcccggatttttcgataaggaggtatatgatattcttgattcaccagcggccttggctctcgctctttcatcctcatctcctcctcctccaaccacaaccaaaacaataacactccctgctgaggagcctctgcctcacctctatgatagtaatcggagcgcgcccggtgacggtgaggatggcttgttctcagattttgaacaagatgaagtcgctgccagttcgaagaagaacaaggacattcctgctcccattcctatctcagagaagctataccaaccactcctccgtcgatgccaagctgaagatgtgactaacgagaaacagtccacttcaaatccagaaatgggttctacttctcaaggagagaggaaaaggaagcggttagcaactgacggagaggaggaaactttgcaatatcaattaattgatgtcttggaaag

SEQ ID NO: 29119 - DNA, 468 bp, Glycine max
  Clone ID: TF_GmC61615_1
tgtacactttcttttcctttttctctctcactactgtctttggggtgaagatatgggtgacccttatgggctaccggaggatctccggcggcttataccagccagaagtacccatttgaacccttcaaacacacacctacttgagccactttgtcttcaccatggtctcagtagtgctgtttcttctgctactactccacacactagttttgaccccaacatggttggggacgttttcttccctcgtggtttcactcaccactttgctcatcatcatgattattcttcttcctctggtgtaaaccctgttgttacttgctactgctgctgctactactactgtctcggatcatgcattctgcagcatggaaagtgcaaagaaagggtggtttgggtttgactccgggaacaacaggtggcctagacaggagaccctttcgcttctagagatcagatctcgtcttgatt

SEQ ID NO: 29120 - DNA, 489 bp, Glycine max
  Clone ID: TF_LIB4391-037-R1-K1-H3
gtcttaatggatgtgtactgcaaatatggtttgttatttacttgtttcctttagcttttgtttatttttctgtttaattacttaaaacaacttttaaaattcatttgtatttgtgtgtttcgtttccttaatcttaaataagattttgagtttggatgtataaatgaaaaaaataattaaaaaaagaaatattacatattaactaagtttttcgatatgatagagattagttattttagtagaattgaaaggagaaatcttaccggccaaccaggcttggtgaagtgggtgataaagaagcactcatggatgaaaaaaaaaaagaaaaaaaaaaattaagaggaaaaccgaagaacaggacaagagactataaggcttcataagtgatacgctccgatatggacctggcgttttgtgatgcaagtgtcaacggttccttgtggcaagacgtattcataaaaatggcagagctggggtatctctgaagct

SEQ ID NO: 29121 - DNA, 2752 bp, Glycine max
  Clone ID: TF_GmC247_2
aattcggctcgagcatggccttcactctcagattgggggtcccctttttctttttctttttcgttttccttttcggtttccgagagattgaaatggtggtggcttagcaattgctttgtatttatgttagtcttaggaatggagtttgtttgaggtgtatttatgctttacatacatacatatagtgtggtggtcagaaaggagggtagaggaagaaggaatattctgtgaggatgacagattttcagccgttacagcagaagcctgagcctgctgatgcccatgccgaagttgagagggagagagttagacagattgttcagggatggatggaaagcggtattagtgatcattcgtctaatgtgagtcagataaacaatagccggagagcagaatggcttggtgttctatttcactttaccatattcttctcaattttcctcaatcgcatgtgtttgatgtcttccggttcacggttccaagatatcagcagtagttggccaccctgggaatatgttgaaatgaaactctcaatactgggtgaccatcgaagagcacaaaagtacaaagaaaaattcgagaaggagcaaaaataccacaaaagaaaataagtgtgctgaattacgaaacacgggggagaaaccatcagaattttttacatatcagcagaatggcttggagaaacagagcgcgagagggtaagaaatatcagggaatgggtgcaaatgattagccagcagagaggttcacgtgggagccggagggatgctcaagtaagtgagggtgcccaagctgatcgagctcgttactgaatatgggaaaatgatgaaagtaaagaagagcatgtttggggggacatgtaaacgtttggtggaatcctgtctgtactttatctccggaggcacctaggtaagcttttatctctggtacttctgggtttcttaaacctccttgctctttcaaataatgcttttctcccacccattcagtcactgcacagatgtagatacgcccgaaatgaaagaacttttgaagatcagatgcaaatgtctatggctgctagtgaattagttcagctatgacaacgacacactgtctgtggttagagggaaggtttaagttcaagattagcatatattgtttgtggttgtgcaggaaccagtccctgacaccacatgtaatagcaaggcaagtgacacaatagaagatgagaaccaagcaaacatgctcctaaatccagtgagtccaaatttgaaacaacagcaccacacatgcctcgacgttcttgtgcggcacatggctgttcgaagacgatgcctccatccggtcatacgtgattgtcatcgtttgcatctgccataaattagccacctgctgttcgtggccgcaaaactccgcctcatcctcaacatgatggggagccaccacactctggaccaaaagaactgatttgcccggaaagaggtgttgaaattaagcatccagagaatgaaccagggggcccattgcgcgaggatataaaaagtgcattgcataatcttgggtccagccggagtgcaaagagatggaaggaaaaatgttaaggaatcaccaggaacttccagaaagttaggaagagaagcaaagaaaggcgtgaagatagcaaggcatgtgccaatttccatctgcttcaatgcctatacgaaggcaagggaaaagttttgaacatgtttggaagatttcagtgtaaaaggtggaacaagacaatatggatggaggggttggtggtggagctggagcaacagtggaggaagcagggtaaaacatcgaagcatgggatggggaaggttcgtagagagggatgtggatgagaaggttatggatacagatgattatgctacagggctatatgcaggagatgatgcagatggtgaaaaattagccagaaaggttgggcctgagattatgaatcagttgactgaaggatttgaggagatgactagtagagttttaccatcgccattagaggacgagtttttggatgcactagacatcaattatgcaattgaatttgagccagaatatttggtggagtttgataatccagacattgatgagaaggaaccaatttcactacgggatgcacttgagaaggcaaaaccattcttgatgtcgtatgaggggattcaaagtcaggaagagtgggaggaaataatggaagagacaatggcgcgtgttccattgttgaaaaagattattgatcactacagtggaccagatagggtaactgcaaagaagcaacaagaagaattagaaagagttgctaaaactcttcctggaagtgtaccatcttcagtgaaacaatttactaatcgtgctgttatttctcttcagagcaacccaggctggggatttgacaagaaatgtcatttcatggataagctggtttgggaagtgtctcagcattacaagtgacctactggcctgcttgcattttatttttattttactttgagttttgatgaaacaaactgctactactcttgtaataatgagttgttgtagcgttattgctagcaattgttacaactctcgtatactttgtaataaatgaattatcattttaattagactttcaaaggtgataaactgtgggatgataattgatgattaggaaattaatggttaaaattttgataatttcataatatgtatgtattttttcagagtgttaattgttttgtgaattaatgattattgttgagtgtaaaaa

SEQ ID NO: 29122 - DNA, 388 bp, Glycine max
  unsure (1)..(388): unsure at all n locations
  Clone ID: TF_jC-gmXLIB3563P080cd01a2
acctttgtgggcaggtgggactacctaattgatagtcctctgctgggggactcagccgtgttgggaacaggaggaggaggctctggtgatgcagtggcagcagcaccccctgctgcctcaggcggagcccatgatggtgttgttgacggcggtgtcggtggcggtggcggatctcatccgggggatgatagagttgacgaatgcgagacgagctttggtgggaacaggtggcctatgcnagatactttggctttgttgctgtgcggccggatatggacgtggcttttttagatgcctgtgttttgggtcccttgtggggagaggtttctaggtcgctggctgagcttggcttccactgatatgccttgcactgccctgagcggtttgc

SEQ ID NO: 29123 - DNA, 670 bp, Glycine max
  Clone ID: TF_GmC1630_1
ggatttttgttttgggtttttgctcgctgatgttttcacaaaatcggtttccactgatttcgcattcttcactcttccatgtctaaaatctccgaaatggacgttgctttcaaagacgcaaacgccaaatcccctctctgggaacaagtctcaagattcaaacttttgcatcaagaagatatagagtttcaaagatttggtatgcgtaacaatgttgatcagctttgtgtttttgagtgtggaatcccaggaagtgcttgatgctgaactctcagcttgagtttcacagttgataaatgtaactgacagttgaatacagtcaggaaaggagatgttcccttgcaacagatctcagcttgtttacttacgaataaaggatggtactgtgcctgtctgatttttttcagaagtacctcctgaagaaacttaatattgccagtggagcagaggtggaaataatgtgtcgaggtcagccagtgctcccatctgtacaactgcataatttagtagatttatgaattaaagtgtagttttttcctttgtttttttaatgcagtttttttcttactttttaatgcaggttttgtctttattttgtggtgttcatgattactttatttgtttcttatggttgattattggctatttaagaaatctagaggttgatacg

SEQ ID NO: 29124 - DNA, 770 bp, Glycine max
  unsure (1)..(770): unsure at all n locations
  Clone ID: TF_LIB4164-058-R1-N1-E11
cttgcatgcctgcataatcatgtttaactctgtcatacaacatgatttgttgcaactatatatggactcgttatattattcccaaaggatttcagctgaatgatttgaatggcatctgggtaatcttattactacggaatctaggagtatgattaaataattattatatatctaattatgtatactagaaaatataaattataataaggtacccccgctccctccctagcctcccaaataattcattaaaataaaaaataaaaatccactgacaacaaatgggtttcacaaactgattggtttggaaattgaaaacgaactcataaatcttcatgcatgatcttgaagaagctagcaaaacaaagtgaaaagaaaaagctgaatagaaaaagatggaggagaagctgaggcacacaaacacaaaaaccagaaaataaacatacatgaatagtgaattatatagttatatgtgtgttgtgtaccttgcaacttcttcccaaagtggacccttaagacttgaatctcgaaacacaacatccatatcggaccttatcttcaagagagccaaagtttcttggcggggccatctgtttccaccgcatgagttgttgatcttattgtcaccttcttcttcttctccaccaccctcttctaattttcctttattattatgattattattctcttcttcaccggaattcgcatccatcataatcacctcgccaccgccatgcgccgccacagcctcaccgnacgacgtttccatcact

SEQ ID NO: 29125 - DNA, 1516 bp, Glycine max
  unsure (1)..(1516): unsure at all n locations
  Clone ID: TF_GmC1402_6
gatccttctgcatcatcacccttcgtataataccgtctctccctttttgcatttttctctccatcattgacttctgccaagtctttcaaaaagctagctgatcgaggaataatatagcatgcacgaggtcttcgtggaagaacataccattgacacttgccacatgccaagcgagttggtgaggtgaatgttacttatgatgttaattacactacgtccatctcactcttaatttcttaatccgagtcctttagtcaattgctttttagccccttttgaaattccaatctcattctaactttgcacaaacaattttcttagcggtggaaaattggaaattttgttagatatatagaaatattggtgaagtagtggactttattaggagttgatggaacccaatgcactaggtggtggaatatttcctaacataagtagtggtttgctaggagtagaaaaccctttacaacaacaaccaaaccttcaaaaccagcaaaaccctcaccctttgcaccatccccaaatggtttcctacgccactaaccatgacactgacacacatcatcaacaacaacctcctcagcaaccaatcaaacatggctacaacttttcagccatcaaatccaacaagtcacaaagcacactcagtgacgaagatgaaccagtgttcacagcagaagacaactgctccggggaccccaagagaaaagtgtcaccgtggcatagaatgaagtggactgacaccatggttaagctcctaataatggcggtccattccactggagacgaggctggttcagaatgcactgatccaaccaagaagaaagcctctgggctgcttcaaaagaaagggaaatggaaatcagtgtcgaagggcatgatggagaagggttactatgtgtctcctcagcaatgtgaagacaagttcaatgacttgaacaagaggtacaagagggtcaacgacattctaggtaagggcacagcatgtcgggtggtggagaaccaaaccttgttggacactatggatctgtcgccaaagatgaaggaagaagttcgaaagctcctcaactcaaagcacttgttcttcagggaaatgtgtgcttaccacaacagttgtggccacaacaacaactgtggcagtacttccaacgtgcaacaatcaaccgaggctcaaccaccacatcaacatcaacagcagcagtgtttgcactcatcagagaacggggtggggagtctgagaatgttgaaagaggatgaggatgaggacgatgattcggaggagttttctgatgaggatgaagaggaatcaggagaaggaggatcaaggggtatggaggaggatgaaaatgatgtgattaggaggagagcaaggaataagggagggtnttggtgtttcatcatcacagatgatgcagcaattgagtggtgaagtgagtggtgtgttgcaagacggagggaagagtgcttgngagaaaaaacagtggatgaagaagaggggtgtgcagttggaggagca

SEQ ID NO: 29126 - DNA, 442 bp, Glycine max
  Clone ID: TF_LIB3242-239-Q1-J1-C9
atcttctaactcgggttcatgtgtttctcatgggagacatttctgttcatcatcaattcatgccattttgttacccaaaatttcaattacgtgcaacttttacattttctcccatctctttttcacttacttcttttttcccactgcttgattaattcacctcatatatgttttttattttatgtttatctcatgctcacaatgctttttatcctttgtcctctagctgaatttgatgagataagataaacccaggagaaaactctcctctctctctctctccttattttttttttcattttttgtcttctccttgtgtatcaggaaaatggcagagcttgggtatcacagaagctccaagaagtgcaaagaaaaattcgagaacgtgtacaagtaccacaagagaaccaaagaaggtcgaagtgggaaacaagatggaaaa

SEQ ID NO: 29127 - DNA, 901 bp, Glycine max
  unsure (1)..(901): unsure at all n locations
  Clone ID: TF_GmC429768_1
atatcatcatcctccttcctcacctcttttttttttttaattttcatttctctccactttcttcttctttgttaaccttctcacatggaaatggaggaccatcatcagtatggcatcgctgatctgaggcagctggtgaacggcccacggcccacccatttccccgccatgcctccgcagcccaaggcggagctgttcccaggcggcggcggcggccacccaaacctgcaggcggcgacacaacaacactacgagatgatgatgtttggtcgtcaagtggcggacataatacctcgttgtcttcacgacttcgcccccactgattccgccaccaacatcgccgttgccactcccaccaccaccactagcgcctctactcctccgcttagttgcttagaggccgagaccgcaggatgcatcggtggagacgcctccactggaagatggcccagacaagagactctcactctccttgagatcagatctcgcctcgactctaaattcaaagaggctaatcaaaaaggccccctatgggttgaagtttctaggtaccatttcaaacactactctcttctgttttcaactttaacatctgaaaattataattatttatttggttggttctttgcttgggattgaagaagtaaaacaattcaatgtttgtgtagctaccttcttgacggtttcctactaagatgactgcacttaattggttttaatttggttactagttgtagtgatgctactttctggaaactccagtaattgctggaagtgactgtactataatacacgggtcgtggtctcgctactcaatttttcgattattgatcgtgtacgtgtacttccaagtgctagctntaagttcatataccaatattagtacgtctctaccactgtc

SEQ ID NO: 29128 - DNA, 1331 bp, Glycine max
  Clone ID: TF_GmC1402_2
ggactgacaccatggtgaggctcttgataatggcggtttattacattggtgatgaggctggctctgaagggactgataagaagaagtcatctggtttgatgcagaagaaagggaagtggaaatcggtttcaagggctatgatggagaaggggttctatgtttctcctcagcagtgtgaggacaagttcaatgacttgaacaagaggtacaagagggtgaatgacattcttggcaaaggaacttcctgcagggttgtggagaatcagagtttgttggattcaatggacttgtctccaaagatgaaagaggaggttaagaagttgctcaattccaagcacttgttcttcagggaaatgtgtgcttaccataacagttgtggacatgggaataacaatgctccacagcaaggagagtctgggggtgaagtgtctcagcctcaggctcaacctcatcatcatcagcagcagcaacaacaaccgcaacaacgatgttttcattcatcagaggttgggaatttggggggctcaggtgttgagggtttgaggatgttgaaagtgggaaatggggaagagggtgatgatgactccgaggatgatgatgactcagaggatgattcggacgaggacgaagatgattcgggagaaggtggttcaaggggtcatgtggggcatggacatgaagatattgaggatgagaatgatggaaggtcaatgagaaagagggcaaggaaagtaggaggggtttctatgtcaccacagttgatgcaacaactgagtgctgaggtgagtggtgtgttccaagatgtaggtaagagtgcttgggacaagaagcaatggatgaggagcaggataatgcagttggaggagcagcaaataagctaccatactcaagcttttgagttggagaaacaaagattaaaatgggcaaggtttagcagcaagaaggagagggaaatggagacagccaaacttgaaaatgaacgcaggaggcttgagaatgagagaatggttttgctcattcgccagaaggaatttgaattgatgagtcttcaacaccaacaacagcagcagcatcaacaacaacattcttccacctagatctaggggagatgatttttctgcggttaattgtattgatagatgaaactaaggtatagaaaagatgtagatcgattaggcctaatagaggaaagtggttgttctctttttggggtacttattataagatggttgttattgaagaaaagaaaaatagtaaatttctgtgtctaccatctagatacccttttgtttatttaaacatgctttggttattactattaattttgtttt

SEQ ID NO: 29129 - DNA, 2302 bp, Glycine max
  Clone ID: TF_GmC1516_1
gttttcctgatattctctccctttttggtggggttcttttcagttttctcagcctttcttcaaactctttctctgcgtgatagatgtgtttctcctgatcttcagctctggattctgggcttggttgcaaaaaggtcattttttattggcttatgagggtgcaggttttcagcagataagtagcttagcttccttgttcataagccttgaaggtttttgatgctgtttttctgcactttttgaacctttttacctttgttttgcatctgggtgttgttttggaactatctcactctgttggcatgtgagttttttttacatgtgtggattttagatattggtctaatggtctctcgatctctctgaaatgatatttggtggagagattcctgttagcttgatggcttttttacttgaagatctaaagtgtaatggatgaggttgaaaaagctgttggatgattgagcattaaatggctttgcatgattttattctgtagataaggttatagtaattgaaaggaacgggagtggaactagctgagcctagaaaatgaaagaatgaagcttgaaaatgatcgtgtttgcgtgaagcaatggaagggaatttgccacagggaggtataattcaaggtgggacttcttttggtggctttgatttgccgggatcaattcgggttcagcatcaagcacaacatccccattccatgcatcaacatcaaactcatccgcgacaagggtcttctgtacattccgccgttcatgatggttttccacttacaatgggaaccatgcagaactgtgaccaaaccatttcattggctgactttagtaaaggagacagaagtaaaaactcggcgagtgaggaagacgagccgagctataccgaggatggtgttgattgtcaccatgaaacaactagagggaagaaaggatcaccttggcagcgtgtgaagtggactgataagatggtaaagcttctgataacagctgtttcttatataggtgaggatgtaactgctgatggtggtagcagcggaagaagaaagtttgcggtcttacagaagaaggctcagtggaaatctgtttccaaggtcatggctgaaaggggttatcatgtttcacctcagcaatgtgaggataaatttaatgaccttaataaaaggtataaaaagcttaatgatatgctagggaggggcacttcttgtcaggttgttgaaaatcctgtgctgttggatgtaatagattttctttctgagaaagaaaaggacgacgttcggaaaatattgagttcaaaacacttgttctatgaagagatgtgttcttatcataatggcaacaggttgcatttaccccatgatcctgcattgcaacgttcactgcagttagctctccgaaatagagatgatcatgatgatgatatgagaaggtcccatcatgatgaagatgatcaagatgtggaaattgatgatcatgatgactttgaagagaattgtgcttctcatggtgatagtagaggaatatatgggccattaggtggatctatgaagaaattgaaacaatgccaaggccaagaagatgctaatacttttggtaactctttaaattgtcaggactacaacaaaagttcatatccccatggacagatgatcccatctgatgtgaatcaaggtttacctgaaggcatgaaagcagcttggttacagaagcaatgggttgaatctcgcacacttcagttagaagaacaaaagctacaaattcaggtcgagatgctggaactagagaaacagagattcaagtggcagaggtttagtaagaaaaaggatcgggagttggagaagctgagtctagaaaatgaaagaatgaagcttgaaaatgaacggatttctttagaactgaagcgaaaggaaatgggcactggctttaaataggtcagcgctcttgcaagctttgtggcaattgcattacatgcatggtgctccatttttcttgtttttgctgtctttggtaagatgtggtttgtttagttgaaactatgggtttttttattggggaactttgcaaatctaactctcactcctgcttgtattgtttaaatttaagagtagtgcataattattaggctctactgaagttttgttgcctatgttcaaagactgggtagctgaaacaccgttaatctttttattttgtaatattaattttctaatattacatattgtctgtcctttcatttttttaaagcctgtatatattgttctggttattttttatttccatctatggttagactattgctgctc

SEQ ID NO: 29130 - DNA, 346 bp, Glycine max
  unsure (1)..(346): unsure at all n locations
  Clone ID: TF_LIB3242-558-P1-J1-A8
ggttcgagcaaaatctctttatgtgatgtttttttttgacagtcatttttttacatgggtggtgtgttttccaaatgggttaccaaatcaaattggttcttcaaaagcaacattttcttcctcccttatttcggttacccactcttggttgggaatgaatgaaggaagctggcagagcttggctacaacagaaatgccaagaaatgcaaagagaagggagagaacgtttacaagttccacaagagaaccaaagaaggacgaagtgggaaatcagtaggcaataacttatcgctnccaagaacaaatacaagcccttgaaaacaaccctgcaattcatgggaagcaa

SEQ ID NO: 29131 - DNA, 451 bp, Glycine max
  Clone ID: TF_GmC5795_2
gggaaattggcttgtgttgtggaattttggtgctgctgctactgctattactactactccttcttcattgagttctttatcttcttctaggtggccaaagacagaagttcatgctttgataagactgaggacaagtcttgaaaccaagtaccaagaaaatggaccaaaggctccattgtgggaggatatatcagcaggaatgctgaggctcgggtacaacaggagtgccaagagatgcaaagagaaatgggagaacatcaacaagtacttcaagaaggtcaaggagagcaacaagcaaaggcgcgaggatagaagacatgtccctattttaatgaacttgaagctttatacaaagaaaagagcaagactcagaacccctttggcgcttcgttccacaacatgaaaccacatgagatgatggagccattgatggtgcaacccgagcagcaat

SEQ ID NO: 29132 - DNA, 2267 bp, Glycine max
  Clone ID: TF_GmC517_1
ggacgcgcgcaacagcgacagcgtctttgtcatcccctcctggccagttgcccgtggccttctggtcatttgctgccggtctcccagattgtgcgtggcacccgccactcccctccgacccttcccatgcacacaaccatcttcggccgaccccctctcctgttccgcctcttcatcgcgcccaggccccctcttccgctccacctgtccctcccgctcctccctcatgcctcctcgtcccctcctcctcctaccctcccccccctcccgccctctacccctgctcctcaccctctcgccccatcacccctatcccatcagcccctgctcccccctcctccttccccccccccccaacaccccctaggcccggttccagtgagaattcgaaagatgatattggggattcaaagagatcaaagacaattaccagatcagctaaccgattcctggaccaacgatgaagtgcttgcacttttcagaatcagatctagcatggaaaattggctcccagagctcacatgggaccatgtctcaaggaggctagcagaggttgggtttaagaagagtgctgagaagtgcaaggagaagtttgaagatgagagtagatatttcgacaacatcaataactacggcaagaacaatttccggttccttattagcgagctggaggagctttgtcaaaactctgatcctggtgctcatgatcataatggggttgtagtgaggagtgaaaagactcaccacctaggaggacacgcattggaagaaaattcgagagacattgaaacaactacagcgaccaaacgatgtgatattggaagtgacacagtggtggagaagtcaaattcaaaggtgcgcaagaggaagaggcgtgataggttcgaaatgttcaagggtttttgcgagagtgttgtcaacaagatgatggctcagcaagaagagactcacaacaagctcctcgaggacatggtgaaaagggaccaagagaagttcgccagagaagaagcttggaagaagcaagagttggataggatgaaaaaggagcttgagattatggcacaagagcaagccattgccggggatagacaagccaccataattgaattcttaaagaaatgtgcaacaacaacaataacttcattatcccctccaagccaaaatgccaagtactacatcacaaatgattcaaatcttccaaattgtgcatcgcattcgcaaaaccctaataatccttccaatgaagacaacaatcttgagccaacaccttcttctaaaatgattcaaaatcatggccaaactacgttgggagcagaaaaccctagcacaagtgacacattattacaagttccttcttcctccaactcttccccaacaacccacaaccctagttcttcactcaatagccacaataacattatcccactagagtcaaattcagtttcgacatacaagcccacctcaacaacccctatggccagcagtgagaattcgaaagatgatatggggagaagatggccaagagatgaagtgttagcactgataaacctaaggtgcacaagtctaagcagcaatgaagagaaagaaggaaacaagggtcctctgtgggagagaatctcgcaagggatgtcagcgctgggatacaagagaagtgcaaagaggtgcaaggagaagtgggagaacataaacaagtacttcagaaaaaccaaggataatgttaataagaaaaggtcccttaactctaggacatgtccttatttccatcaactgagttgcttgtatggtcaaggaaaaatcgtgccgcagtcagaaagggaagggaactactgcttgaatccaaccccgaattccggtcaagtgccaccggatgatgatcatcaagtccaagacgatgagtcttctcaagtggggtctgctggtttggttcagtatgcatgttgatcatgcaggtgagaaagctttgaaattaatacccttctttggattgtgattaattagtttcaaattcattaattttgtccatcttatatggcttaataagttccactattttccgttttcttttgattttggtggtgggaggactttcttatatatagcataaattaataattgaatatgtatattttgattttggtgagcatgcaccgacagcttgaggaattgaattagaacaatgtttcctgttttgtggatgattttataatgccagtgcaatttacatatttaaaaaaaaaaaaaaaaaactcgagactagttctcctcgt

SEQ ID NO: 29133 - DNA, 1335 bp, Glycine max
  Clone ID: TF_GmC36_2
cggcttgagcgaacaacaaaacctcggtcaagcgttgaccaacatcaacctcgtacaaccacaaccacaactacaaccacaaccaccggtacaacaacaagtgacaccacctaatatagtaccagctcctatgcaacaaccactgcctgtgattgttacacagcctgtggtgttgccagtggtatcacaagtgaccaatatggagataatgaaagccgataataataacaacaataacaataataacaactgcgaaaatttcttgccaccgagttcttctcggtggccgaaagtggaggttcaggcattgataaagcttcgaacgagcatggatgagaagtatcaagagaatggaccaaagggtcccctctgggaggagatctcagcctcaatgaagaagctggggtacaaccgaaacgcgaaaaggtgcaaggagaaatgggagaacatcaacaagtacttcaagaaagtgaaggaaagcaacatgcggagaccggaagattccatgacgtgcccttatttccaccagctggacgcgctgtacaggcagaagcacaaagccgaagagagcaccgaggcggagaaggccgagagcggggggggaccaatgatggtgctagccggagcagcaatggccacctcagcagcaggatgatagggacatcacaatggaagacatggagaacgaatatgatgaatatgaggaagagagggaaggagaggaagaagaagaagaggatgaacaggaggaagaaggtggtggtgggaactatgagatagtggcaaacaaaacaagtggcggtggtggtgctgctgcttcagtgggggcttcaacggagtagtgtggggtgggtcaaaaaaagtgcaggggttgtcggaggtggccattgtggtggagaaatttaagaaactgaatattcaagtagggtgaagttacacatggcaatggcatgggtaatggtggtatcgacctgtggtggaaagatgaggtttgctttggttggttggtactttgttgtagcatatagtcagtaagattatatgtttcttttttctgttttataaaaaaagttgtttattttttgggagaataaataaaagtccgatcagagagggaatttaagatagagcccaataaagaagaagaggggccttaattaaggttgtattttttttttttttatcttcatcttgttttttatgttcgttcctggtgctgtaaatgggaggagattaattcgggttttgtccttttcttatctctcagttttgacatcttcttacccttccaatgactgtcattgacttctttttcaattcccacatttttttttt

SEQ ID NO: 29134 - DNA, 2931 bp, Glycine max
  Clone ID: TF_GmC36_1
atcttctaactcgggttcatgtgtttctcatgggagacatttctgttcatcatcaattcatgccattttgttacccaaaatttcaattacgtgcaacttttacattgtctcccatctctttttcacttacttcttttttcccactgcttgattaattcacctcatatatgttttttattttatgtttatctcatgctcacaatgctttttatcctttgtcctctagctgaatttgatgagataagataaacccaggagaaaactctcctctctctctctctccttattttttttttcattttttggctaaaaaatttgaaagaatacacaccctttttgctctcgcgacctttttaatttttctcttggtctcaactgctgtaagtaattgctgcggcgctgtttcggaaaagagagagacccaaaagagactatgctcggggactcagctgtgctgggagcaggaggaggaggaggtggtggccgcggaggaggagtagaaagtggtgcctccgccgatgcagtggcggcgacggtgaccgtgacacatgatgtggcgacgacaaccggaggaggcggtggtggatcaaataattcgggggacgatgagaggggtagaatcgaagaaggtgaacgtagcttcggcggtaaccggtggccacgacaagagactttggccttgttaaggatacgctccgatatggacgtggcgtttcgagatgcaagtgtcaagggtcccttgtgggaagaagtatccaggaagatggcagagcttgggtatcacagaagctccaagaagtgcaaagagaaattcgagaacgtgtacaagtaccacaagagaaccaaagaaggccgaagtgggaaacaagatggcaaaacctatcgtttctttgatcaactacaagcccttgagaaccactctccaacaccccattctcccaacccttcaccaaaacccccacaatcagcaccatcaagagtagtagcatcatcggtgtcactaccaattgcaacaacaacaacagtgtcactaccaattccaacaccaacaacagtgccaatgcagcctatattgtccaacaacgctatactcactagtagtgtccccaatatcactgttccatcaacaacaccactccctataaccattcctcaacccattctcacctccccatcaataaacctcacaatcccttcttaccctccaacaaaccctaccaatttcccaccaccaccaaaccctaccctaccatcctctttccccaccgacaccttctccaattccagctcctcctccacctcctccgaggaaacattggaagggagacgcaagaggaagcgcaagtggaaagatttcttcgagagactaatgaaagaagtgagcgaggggcaagaggagctacaaaagaagttcctggaagccatagagaaacgcgaggacgacagaatagcaagagaagaagcatggagagtacaagagatgaaaagaatcaatagggaaagagaaatcttagcacaagaaagatccatagccgcagccaaagacgcagccgttatgtcattccttcaaaaaatagccgaacaacaaaacctcggtcaagtatcgaccaacatcaacctcgtacaacaaccacaacctcaattacaaccgcagccaccactacaacaacaagtgacacaacctagtattgcagcagcacaacctcccgtacaacagccaccgcccgtggttgttacacagcccgtggtgctgccagtggtgtcacaagtgacgaatatggagatagtgaaagccgatataatagtaacaacaataataacggcgagaatttcttggcaccaagttcttctcggtggccaaaagtggaggttcaggcattgataaagcttcggacgagcatggatgagaagtatcaagagaatggaccaaagggtcctctctgggaggagatctcagcctcaatgaagaagctcgggtacaaccgaaacgcgaaaaggtgcaaagagaaatgggagaacatcaacaagtacttcaagaaagtgaaggaaagcaacaagcggagaccggaagattccaagacgtgcccttatttccaccagctggacgcgctgtacaggcagaagcacaggggcgaagagagccccgcggcggtggaggcgaagccggagagcgcggtggcgccgttgatggtgcagccggagcagcaatggccacctcagcagcagcagcaggatagggacatcacaatggaagacatggagaacgaagatgatgaatatgaagaagagagggaaggagaggaagaattagaggatgatgaagatgaagaggatgaagaaggtggtggtggtggtgggaactatgagatagtggcaaacaaaacaagtggtggtggtggtgcttctgctgcttcagtgggggcttcaacggagtagtagtgtgaagaaaccaggtttagcgtgggggtgggtcagagagagtgcaggggttgtcggaggtggccattgtggtggagaaattaagaatttgaatattcacgtacggtgaagttacacatggcaatggttatggtatcgacctgtggtggaaggaggatgatgaggttcttggttggtactttgttgtagcatatagtcagtaagattatatgtttttttttcttttctgttttataaaaaatttgtttattttttgggagaataaataaagtccgatgagagagggaatttaagatacagaccaataaagaagagagggaccttaattaaggttgtattttttttttttttatcttcatcttatttttttttaatgttcgttcttggtgctgtaaatgggaggagagattaattcgggttttgtccttttcttatctctttaagttttgacatcttgttactcttcaaatgactgacattgacttctctttc

SEQ ID NO: 29135 - DNA, 2619 bp, Glycine max
  Clone ID: TF_GmC247_1
cctttttgttttctttctcaagctgctgtaatattgcttacctagctagctaggtagggacatttctctctctttttatctatctatggagattggagacactaccacagtgatggaaacgtcgtccggtgaggctgtggcggagctacggcggtggtgacgggaggatgttggacgagaattcgggtgactatgagactaattctcattattataatggaaaaatagatgagggtagttgagaaggaaaggggtgcccccccagtgaaacttagtctctttcaatgttttgggcttttttggggggatttattcctgattcctgtttctaatgaaagcttggtcaaaatggcggtggcgaggtgattatgatggatgcgaattccggtgaagaagagaataataatcataataataaaggaaaattacaagagggtggtggagagctgtaattgcatagggacacaacatctctatagctatatgcagctaggagactcaagtgtgttggagatctcctcccatacccagcccgagatggcggtggtgttgccaccagaagaagtaccccatgaaggcagcgacaacagtggtggtggtggtggtagtgagatgattgggatggatttggatgcaaattcaggtgaaggaaatgaaggtaacaagatgagctttggagggaaccggtggccccgccaagaaactttggctctcttgaagataaggtcggatatggatgcagtttttcgagattcaagtcttaaaggtccactttgggaagaagtttcaaggaaattggcagaacttggatatcaaagaagcgcaaagaagtgcaaggaaaaatttgagaacgtgtacaagtacaacaagagaaccaaagagaacaaaagtggcaaatcacatggaaaaacctataaattctttgatcaattacaagcccttgagaaccaattcacaagtctcttacccgccaaaaccacaacctacttctactttggcaacaacaaacccattgacattgccaacaaggccaagtgatcatggtaacaaagttatctcttatgtcacaacttttccttccacaaaccctactctcatttcaccttctccacaaaccaacactaccaccaccaccaccacaacaacatccacaaccaaccctagagattcatcacgaccacaaaccaacaacaacaataatagtgtcacacactctttgccaaacatgaacacctctttctctaccaccactgcctccacctcatcctccacagcatcagatgaagacttggaagagaggtataggaggaagagaaagtggaaggactacttcaggaggctcactaggaaggtcttgttgaagcaagaggagatgcaaaagaagttcttggaagccatggaccaaagggagagggaaagggtggcacaacaagacaattggaggatgcaagaaatggcaaggatcaatagggagcatgagattcttgttcaagagagatcaacagcagcagccaaagatgctacagtcattgcattattgcaaaagatgtatggccaacaaaaccccacacaacaagttgaagtagagccaccaccacaacagaagcaaacaattccccaatcgctgcctccaatattaatgccaaacaataatttcgaggtcaagaaaataaataatggtcacagtgttactagtactactactggtactgttgctactgctactactactacttcgccggtgaattcttcttcttctcggtggccgaaggcggaagttcatgctttgataaggataaggacaagtctagaaaccaagtatcaagagaatggaccaaaagctccattgtgggaagatatctcaattgcaatgcaaaggctagggtacaaccggagtgcaaagagatgcaaggaaaaatgggagaacatcaacaagtacttcaagagagtgagggagagtagcaaagaaaggcgtgaagatagcaagacatgtccctatttccacgagcttgaagctctatacaaagaaaagagcaaatcgtccaagaacccctttggcatcttccagaatatgaagcctaatgagatgatgctgatgatgacggagccactgatggtgcaaccggagcaacaatggaggcccccacctcaatcattggaagagggtgtagggatggagaatgcaagtgaagaatatcatgaaaatgaagaaaatggtggtgacgatgatgataacattgaagaagatggagatagtgtggaagatgaaggagcaaacccgtgtgagattgcgacaaataattaaacgtgcttcagtggacaccgttgaagtagacaagataaggaattttctgaatggagaaaaattacgtgtgtggttaaatttacttttacttatttcggaaaaaatagtcctttatttttttttcatttttttagacttcaaattgtgattatttcttaaggaaaacaaatgttgggtatagtatagtcattcaattttctatttttcggatggggttgtaacatgctactgaaaaaaattgtcatagattgttgacattaaagacgaaaaaatttaaaatttcgaactattaaaaagcggcgctctagaggatc

SEQ ID NO: 29136 - DNA, 2133 bp, Glycine max
  Clone ID: TF_GmC1404_2
caaaatttcgatatgtgatgtggttttctgacagtcattttgatacatacatggtgtgttttccaaataagttaccaaatcaaattggttcttcaaaagcaacattttcttcctcccttatttcggttacccactcttggttgggaatgaatgaaggaagctggcagagcttggctacaacagaaatgccaagaaatgcaaagagaagtttgagaacgtttacaagtaccacaagagaaccaaagaaggacgaagtgggaaatcagaaggcaaaacttatcgcttctttgatcaattacaagcccttgaaaacaaccctgcaattcatggaaagcaatctccaacacctccaaagccgccaccacaaacaacagcactatcagcaacaccagtgtcaatagtggtaacaacaactacaactacaccatcatcaataataatgccacttccattgccaccagtgtctaataacaacaacaacaccactgttccatccacaacatcacttcctatgcctcaaagcattctcaacataacaccaccatcaacactgaacatcacaatcccttcttttccaccatcaaaccctacaacatacttcccaacacaaacaccaaaccctactagcaacaacaacaacaaccctccaagcaccatcaccccaccttccttccccaatttccccgccgatctcttgtcgaattcgagttcttcatcgacttcttcggaggaaacaccgacgacggaggccagagggcgcaagaggaagaggaagtggaaggacttctttgagaggctcatgaaggaggtgatagagaagcaggaggagctgcaaaggaggttcttggaggccatagagaagagagaacaagagcgtgtggtgagagaggaagcgtggagaatgcaagagatgcaaaggatcaacagggaaagggagattctagcacaagagaggtccattgccgcagcaaaagatgctgctgttatgacatttttgcaaaagatagccgaacatcagcaacaagaaactatcaatcttgaaccagcattgaataacaacagcatcactgttgttccacagcaaccagtgccacaagcaacaccaacatcaactccaacaccacaacaagcacaaacaacaacagttcctgaggccccacaagtgcagccattggtcccacaactacaacaacaacaacaaatagtggtgagtaatgtggaaatcaacaaagctgataataacggtgagaatttgatgatggaagcaagctcttcaaggtggccaaaagtggaggtacaagcactgataaacctgaggacaagcttggaaacaaagtaccaagaaagtggaccaaaagggccactgtgggaggagatctcagcgttgatgaggaaaatggggtacaaccggaacgccaaaaggtgcaaagagaagtgggagaacatcaacaagtacttcaagaaggtcaaggaaagcaacaagaagaggcctgaagattcaaagacatgtccctattttcaccagttggaggctctatacagggagaagaacaagggagaggggcagatgaagccggagagcatgatggcgccgctcatggtgcagccggagcaacaatggcctcctcaaacaacgcttgtggtaccgccagaagtaaccatgggagacacccagaatgacccccatggaccggcagtaccatgaggagaatgaggatgacgaggacgacaaggaaattggagatgaagacgaggatgaggacgacgaaggaggtgataattatgagatagttgcgagcaaaccagccacagctgatgcttccggagagtgagaggaaaaaatattgaccaaaaagggcatcaattaaagaatgatggatcaatttgaattcacatattgtcggaaaaatggtggtgttgggatgaaatttggtattgatggtggatggtgatgtgattgtattgaagattttgaaaatgcacgtacttcagaatgacacatgggtataggggtagccagtagggtgggggaatctgggttggaagtacttggtacaatagcagcatatagtcagtaagattatatgttttttttgttttgaaagaagaaataattaattattttttgagctc

SEQ ID NO: 29137 - DNA, 1336 bp, Glycine max
  Clone ID: TF_GmC25141_1
cactttttaaaccctaatcccaaactcacttggtctgattgaaacgactttgcggtggctaagaggtcaatgttcggtggcggaggggaggacgcgctggcggcgcggctgggcatgatgccgccgtcgctgctgaatccagcgtcggtgatgtccggcgagatgtctccggcggttccggcggcgagggaggagagggggccggcgcagccgcagtggagccagcaggagacgcgggagttcatagcgatacgcgcggagctggagagagacttcactgcgtcgaagcggaacaagacgctctgggaagtggtgagtgcgaagatgagggagagagggttcaggagaagccccgaacagtgtaaatgcaagtggaagaatctcgttaatcgctacaagggaaaagagacatctgacccagagcatggcaagcaatgtccattttttgaagaattgcatgcggtctttacccaaagggcacataatatgcaacgattacttcttgaatctgaaactcgttcagctcataccaagaaaggggtgaaaagatcaagtggagatcggtcatcagaggaactctcagaagatgacaatgaggttgaatatgatagtgaagaggaaaaaccttccagaagtaatacccgcaaaacgaaagttgacaaagttggagtggagaagtcttcaagggcaagcaatccatcaaattctgccagtaatagtactagtattcaggaaatgctcaaggaatttttccagcaccagttaagtatggagatgcagtggagggagatgattgaaaggcgtgctcatgaaagacagttgtttgaacaggaatttatcaagtcactgaagaagcttgagagggagaggttaatgattgaacaggcatggagggagagggaagaacagaggagaatgagagaagagagtagggcagagagaagggatgctttgttgacgacccttttgaacaaactcattaatgaatctaactaacggaggcaatggcttggattacttgtagctgattactttgttgtttccatttattatatgattctaagtttagcacagaacgaactaatcttcaccgtagcttttgattacagagaatatgggaaaggagaatttggttgatgaaaggagtacttataggggtatatgaacaaaatcttttgaaaattgatacagaaagagtttttactatttagggatacttctgaatgataatatgttctgggacatgtaactaaagacgggtatggtatttaagctgtctgtatgatttttcttatatatgtacatatatattatattattatattgttgggatgcc

SEQ ID NO: 29138 - DNA, 2143 bp, Glycine max
  unsure (1)..(2143): unsure at all n locations
  Clone ID: TF_GmC1404_3
gcaccaccggttgttggtggtggtgctgctgcatcaggaggagcacatgaaggcggtgccaacggcggcggcggatcaaattcaggggatgatagagttgaggaaggtgacaagagctttggtgggaacaggtggccaagacaagagactttggctttgttgaagatacggtcggatatggacgtggcttttagagacgcaagtgtaaagggtcccttgtgggaagaggtttctaggaaactggcagagcttggctaccacagaaatgccaagaagtgcaaagagaagtttgagaacgtttacaagtaccacaagagaaccaaagaaggtcgaagtgggaaatcagaaggcaaaacttatcgcttctttgatcaattacaagcccttgaaaacaacccttcaatccatgctatgcaatccccaacaccaacaccttcaaagccaccacaaacaacagcactacttgcaacaccagtgtcaatagtggtaacaacaactactacaccatcaacattagtgtctaataatgccactgttccatccacaaatacaccccctttgcctcaagccattctcaacataacaccaccatcaacactaaacatcacaaccccttcttttccatcatcaaaccctacaacatacttcccaacacaaacaccaaaccctacaaccaacaacaaccctccaaacaccatcaccccagcttccttccccaacttctccgcagatctcttgtcgaattcgagtttttcatcgacttcgtcggaggaaacaacgacgatggggggagggggaatgaggcgcaagaggaagaggaagtggaaggacttctttgagaggctgatgaaggaggtgatagagaagcaggaggggctgcaaaggaggttcttggaggccattgagaaaagagaacaagagcgtgtggtgagagaggaagcgtggagaatgcaagagatgcaaaggatcaacagggaaagggagattctagcacaggagaggtccattgctgcagcaaaagatgctgctgttatgacatttttgcaaaagatagccgaacatcagcaacaagaaatcaatcttgagccagcattgaataacaacaacaacagcatcactgtcgttccacagcaaccagtgccacaaacaactacaacaccaacaccaacaccacaacaagcacaaacaacaatagttcctgaggccccacaaccacaacaacaaatagtggtgagtaatgttgaaaacaataaagctgacaataacggtgagaatttgacgatgggagcgagctcttcaaggtggccaaaaatggaggtacaggcactgataaacctaagaacaagcctggaaacaaagtaccaggaaaatggaccaaaagggccactgtgggaggagatctcagcgttgatgaggaaaatggggtacaaccggaatgccaaaaggtgcaaaaagaagtgttagaacatcaacaagtacttcaagaaggtcaaggaaagcagcaagaagaggccagaagattccaagacttgtccctattttcaccagttggaggctctatacagggagaagaacaagagagaggggcagatgaagccggatagcatgatggcgccgctcatggtgcagcctgagcaacaatggcctcctcaaacgcacgtggtgccgccagaagtgaccatgggagacgcccagaatgaccccatggaccggcggcacgaggaagttgaggaggacgaagccgacaaggaaattggagatgaagacgaggacgaggacgacgaaggaagtgataattatgagatagtagctagcaaaccagcttctggagagtgagagaaacaaatatcaacgaaaaagtgcattaattagagaatggtgggttaatttgggttcaggattgtcggaaaatggtggtgtgggagtgaaatgtgataggggtggtggtggtggatggtgatggggttgtattgaagattttggaaatgcacttacttcagaattaaaaaaaaaaaaaaagaaaaaaaaaaaaaaaaaaaaaaaaaaattggaagtacttggtacaatagcagcatatagtcagtaagattatatgtttttttgttttgaaaaaaagaaaaataattaattatttttnttagct

SEQ ID NO: 29139 - DNA, 1169 bp, Glycine max
  Clone ID: TF_GmC325_1
ctctctctctctcctccataaccaaaatatcaaacacccttcaaccccttctcttctctgttggatttcaatctctccctctcactctgatttttcctttttcaattttccatggagggtcatcatctccatcaccatcaccggcaacaacaacaacaacaacatcatcatcaacaacaacatcaacaacaacagcatcatcaccaccctcatcacaacatcacaactagtaacgtggatgccacggataggttcccccaatggagcatccaggagacaaaagagttcctcatgatccgtgccgagctggatcagactttcatggatacaaagaggaacaaacagctttgggaagtcatctccacccggatgaaggaaaagggtttccataaaagtgcagaacagtgcaagtgcaagtggaaaaacctcgttacccgctataagatttaaagggatgtgaaacgatggagccagaagcgacgaggcagcaattcccgttttacaacgagcttcaagcgattttcgcggcgagaatgcagagaatgttgtgggcggaagcagaaggagggtccaacaagaagaaggtgcacctttcctccgaggacgaggaagagggcaatgaagagacaagcgagggggatcacaagggtaacatcaccagcaagaaaaagaagaagggcaagatggtaattggtggaggagggagtggtaacaacaacttggagagtttgaaggagatcatggatgagttcatgaggcagcagatgcaaatggaggcacagtggatggaagcctttgaggcaagagagaatgagaggaggctgaaggagatggagtggaggcaaaccatggaggctttggagaatgagaggttaatgatggaccaaagatggagggagagggaagaacaaagaaggattagagaagaagttagggctgataagagagatgctctaatcactgctcttctaaacaagctcagaagagaagagatgtagttgctagtttgtttggctagatagattcatagctacctagctagcttgcttttatgtgtctttcttcttctcatgaagcaaagcttgatttaagaggtttgttctaacttcaaagaactcccccaatttatatatcttggtcaatattaatatatatatacatacatacat

SEQ ID NO: 29140 - DNA, 1010 bp, Glycine max
  Clone ID: TF_GmC325_2
actaacggctgccagaagacgacagaaggggggggtttgtttctgtctctctccaccataaccaaaacatcaaaaacacccttcaataacttctttctcttctctattggatttcaatctctccctctcactctgattttttttttctttttcaattttcatggagggtcatcatctccatcaccggcaacaacaattacaacaacatcaccaccctcatcacaacatcacaactagtaacgtggatgccacggataggttcccccaatggagcatccaagagaccaaagagttcctcgtgatccgtgccgagctggatcagactttcatggagacaaagaggaacaaacagctttgggaagtcatctccaaccggatgaaggaaaagggtttccatagaagtgcagaacagtgcaagtgcaagtggaaaaacctcgttacccgctacaagggatgtgaaacgatggagccggaagcgatgaggcagcaattcccgttctacaacgagcttcaagcgattttcgcggcgagaatgcagagaatgttgtgggcggaagcagaaggagggtccaataataagaagaaggggatgcacctttcttccgacgacgaggaagaaggcaatgaagagatgatgagcgagggggatcacaagggtaacatcatcatcagcaagaagaacaagaagaagggaaagatggtaattggcgtcggagggagtggtaacaacaacaataatagtagtagtagtagtaacaacttggagagggaagaacaaagaaggattagggaagaagttagggctgataagagagatgctctaatcactgctcttcttaacaagctcagaagagaagagatgtagtagtttcttttggctggatagatagctagcttttatgtgtctttcttcttctcatgaagcaaagcttaatttaagaggtttgttctaacttctaagaactctcaatttatataccttggtcaatattaatatatatacatacttt

SEQ ID NO: 29141 - DNA, 487 bp, Glycine max
  Clone ID: TF_LIB3242-060-Q1-J1-B12
aaatttttgtattttctctattatcttatgcttccattgccacctatgccatgaatttgatgagataagataaagccataaagctttttcttttgttttttttactttgtcttcttttggggttattgttatcaggaagctggcagagcttggctacaacagaaatgccaagaaatgcaaagagaagtttgagaacgtttacaagtaccacaagagaaccaaagaaggacgaagtgggaaatcagaaggcaaaacttatcgcttctttgatcaattacaagcccttgaaaacaaccctgcaattcatggaaagcaatctccaacacctccaaagccgccaccacaaacaacagcactatcagcaacaccagtgtcaatagtggtaacaacaactacaactacaccatcatcaataataatgccacttccattgccaccagtgtctaataacaacaacaacaccactgttccatccacaacatcactt

SEQ ID NO: 29142 - DNA, 1701 bp, Glycine max
  Clone ID: TF_GmC247_4
gaagtttcaaggaaattggcagagcttggatatcaaaggagtgcaaagaagtgcaaggaaaaatttgagaacgtgtacaagtacaacaagagaaccaaagagaacaaaagtggcaaatcacatggaaaagcctataaattctttgatcaattacaagccctcgagaaccaattcacagtctcttacccgccaaaaccacaacctacttctactttgactacaacaaacacattgacaagtgatcatggtaacaaagttatctcttatgtcacaccttttccttccacaaaccctactctcattccaccttctccacaaaccaacaccaacaccactaccaccacaacaacaacatccactaccgaccctagagactcatcaccaccacaaaccaacaacaacaacaatagtgtcccacattctttgccaaacatgaacgctcctttcttaaccaccaccacctccacctcttcctccacagcatcagatgaagacttggaagagaggtataggaggaagagaaagtggaaggactacttcaggaggctcactaggaaggtcttgttgaagcaagaggagatgcaaaagaagttcttggaagccatggaccaaagggagagggaaagggtggcacaacaagacaattggaggatgcaagaaatggcaaggatcaatagggaacatgagattcttgttcaagagagatcaacagcatcagccaaagatgctgcagtcattgcattattgcaaaagatgtacggccagcaaaaccccacacaacatgttgaagtagagccaccacagcaacagaagcaaacaatgccacaatcacagcctccaatattaatgccaaacaataattttgaggtcaagaaaatgaataatggtcacagtgctacaagtactactactactactacttctccggtgagttcttcttcttcttctcggtggccaaaggccgaagttcatgatttgataaggttaaggacaagtcttgaaatcaagtatcaagagaatggaccaaaggctccattgtgggaagatatatcaattgcaatgcaaaggcttgggtacaaccggagtgcaaagagatgcaaggaaaaatgggagaacatcaacaagtacttcaagaaagttagggagagtagcaaagaaaggcgtgaagatagcaagacatgtccctatttccacgagcttgaagctctatacaaagaaaagggaaaatctcagaacccctttggcatgtttcagaatatgacgccaaatgagacgatgatgatggagccattgatggtgcaaccggagcaacaatggaggcctccacctcaatcattggaagagggtatagggaaggataatgcaagtgaagaatataatcaagaaaaagaagaagaagtagaagaaaatggtggtgatgatgatgataatattgaagaagatggagatagtgtggaagatgcaggaccaaacccgtgtgagattgcgacaaataattaaacgtgcttcagtggacaccgttgaagtagacaagataaggaattttctgaatggagaaaaatttacgtgtgtgcttaatttacttttacttatttcggaaaaaaatagtcctttattttttttatcattttattaaacttcaaaatgtgattatttcttaaggaaaacaattgttgggtatagtatagtcattcaattttt

SEQ ID NO: 29143 - DNA, 465 bp, Glycine max
  unsure (1)..(465): unsure at all n locations
  Clone ID: TF_LIB3242-366-Q1-J1-B12
cggctcgagcggctcgagcggctcgagcggctcgagaaaaaatttgaaagaattcaccaccctttttgctctgtttatatttttaatttttctcgtgctctcagctgctgtaagtaattgttgcggtgctgttttggcaaagagggagagagagagagacccaaaagagactatgctcggggactcagctctgttgggaggaggaggaggagaaggtggtgcctccgccgatgtagtggcggcgaccgccacgcatgatgcgacaacgacgacgacgaccggaggaggcggtggcggatcaaataattcgggggacgatgagaggggtagaatcgaagaaggtgaacgtagcttcggcggtaaccggtggccgcgacaagagactntggctntgttaaggatacgctccgacatggacgtggcgtttcgagatgcaagtgttaaaagtcccttgtgggaagaagt

SEQ ID NO: 29144 - DNA, 1172 bp, Glycine max
  Clone ID: TF_GmC1796_2
ggctcgagaaacttgtcagtaacaataatggtttggtagaagtagtagtcgcccttgaaacaggacaaacgatacgaactttccccaactcaaaacaacacacagactccagttactgaaattgccctgtttcatttttctcccctaaatttcaccgacgctgtcttttttctcttttgaccttaccctttgagagtttcgtggctgtaatttcgttgtaaccgatgctggaaatctcaactttaccggaaaccgcgacggagaacgcggacggcggttccgcggcggtatccgacgggtcgaaagcggagcacagcgaagacggtgaccggaattccgccgcgaaccggtggccgagagaggagacaatggctttgctcaagataaggtctgaaatggacgttgctttcaaagacgcaaaccccaaagcccctctctgggaacaagtctcaaggtcagtttccttcttttgttttcccctcttttcaactgaaaccccttctatcattccttaattagtaatactaatgttacacttaattcataaatgtattgtatatatatagtctttcattttttggtgtaataatatagtagtgattgaactgaatgaattaattataaattcaggaagttagcagagctaggatataatagaagtgctaagaagtgcaaggagaaattcgagaacgtttacaagtaccataggagaaccaaagaaggtcgttttggaaaatcaaacggtgcaaaaacttatcgatttttcgagcagttggaagccttagacggaaaccactcacttcctcctccgacaacaacaaccgacaacaacaacaacgttgatgatgatgatgttatcctcaacgcggttccgtgttccgttatagctgcggcggcgcacgagcattcgagttcgacgacgtcgtcttcggggaagatgaagagaaagctgacgcggtttctggaggggctgatgagggaagtgatagagaagcaagagacgctgcagagaaagttcatggaagtgttggataagtgtgaaaaagatcgaatggcgagggaggaagcgtggaataaggaggagctcgagaggatcaagaaagaacgcgagcttctcgctcatgaaagatcaattgctgcctgcaaagatgaagctgttcttgtgttcttaa

SEQ ID NO: 29145 - DNA, 1085 bp, Glycine max
  Clone ID: TF_GmC4164_1
attcccggggtcgacccacgcgtccgcaacactgcaagtgggcctgagggttatttatctgaggaagacaacactgcaagtggagccgagggtgatttatctgagtcagaggattcagatgaattttggaaaccattcattacatcattaccagttgagaagtcaatcaatgctgacaatggttatgtttcaccaaaggagcaaaaatccaatttgaagaaagatgagtctgaagacattgatgaagccaagtcagaagaaacatctaattctgaagccaagtcttcaaaatcagttaagagaaataaatggaaaactgaggaagttaagaagctaattggtatgcgtgaggaactaagtgaaagatttcaagttgtgaagggaaggatggccctctgggaagagatttctcaaaaattgttggctgatgggatctgcagaagtcctggacagtgcaaatctctgtggacatctttggtagtcaaatatgaggggatcaagaatgaggataggaagaaaagttggccatacatagaggacatggaaaggataatgtctgataaagaagcccctgcaaaatgattggaaatatggtggacactggacaggataagaaatattttggagaaccatctacattaaaattgttgataagtttgagtgtggtgaccgggaagataatccatgacttgcatgacattgaagatccctagtgttttttagggctgagggatagacagcataaaggggttggctttcatactggcacgggaatgtctgagtttatgggacgatttattctccacctccaatgcctgtccccgtttttttattacatttgtgtcataatttataatatttgttggtggcacatattgggtgccctaagcaaccatggaaatgtctacctcttttccagacattgaacactgaaaagaaagttttcatacttttaaaaacgagtgccaacttaaattcccagtgtgtttgaatgtgcatttggagctccaaattttttagaatgagtcaaatatgatttttgtattgaccaatatgtttggatgtgggcttgaaacacgattctg

SEQ ID NO: 29146 - DNA, 1177 bp, Glycine max
  Clone ID: TF_GmC1059_2
gtaactggaattcagaaccacagtgaaaaccagaatgaagatgggagtgaaatactaaatagcactactgccagaggtgctgaaagctggacagaatctgagattgcaaggcttcaacagttgagagctgagatggagacaaggtatatgcaaagtgggtgttcagaagaggttatgtgggaggaaatagctaccaaaatggcttgttttggttacgaaaggagtgctgtggtcttcaaagagaaatgggagagtataagtaactatgcaaggagtgtcaaggatggaagcaagaagcgcaaggaagactcaagaagttgtttttacttcgataacagtgaccaatcttctctgtataaccaaggaggtgcctattgtgatatcaacgatcaaaggcacaagactgggaggctgcaaacaaatgatggctcttcaccttccaattcaaatgttggaaatacagttgcgcttgataactgctttcccttcttgatgactgagagtggaaatttgtgggagaactatagcttaaaggttaataaagcaagccaaaaccagtgatgagagtgaaattatatggttgacacttgtaagaggcaagaaaatttcgcagccttttatctcagatgatctcacattatgtaagcaagagctaactgatgagggtcgtttatgtatagagactgatgatgataaggtgctcaatcttattatatttatggaatcaaggtgaaaaataatgtgttcaagtcacgtacgtaagtttaatgagggagactacacattggcaaatatcactgaattgttggggtgtgagtatgacactaattcaggtgaatttctccattagctgatttcttttatgcgtgcaaatggaatttgcagttatattacttcacatgtcgcatcttccgataatgttcatatcattcattagttggtcaccgtctttctcctagtttccaccttccacacctatcttgccttttttttaattaatttttttggatatttatactgtgctggccttttgtgtttgtgtactgaaaggtagcaatttactttggtatttatttattggtcaatagttttatgaaccgggagaaagtgatgtattgatggatattgttgaagcatcggacattgttacaagcataaaaaaggccagatttactta

SEQ ID NO: 29147 - DNA, 728 bp, Glycine max
  unsure (1)..(728): unsure at all n locations
  Clone ID: TF_GmC429768_2
tctacctcgcgttcgaagtgagagtgagagagaaggatcaatctaaataatgagaagtgaatatctctcatagtgtcgtacagcatacaccacacgcatacatttgtacacagacatgggaccatttctctgcgtttaaattttgatctttttggtggacgacaggatccgagtctgccgcttccctctccatatcatcatcctcctccttcaccttttcttttcatctctctctctctcattctcttcttcttcttcgttaaccttctcctatggaaatggaggaccatcatcgtcaccatcatcagtatggcatcactgatctgaggcaactcgttaacggccctcggccgactcatttccccaccatgccgccaccgcccaaggcggagctgttccccggcgactccaacctgcaggctgcgacacaacaacactacgagatgatgatgtttggtcgtcaagtagccgacataatgcctcctcgttgtcttcatgacttcgcctccaccgattccgccaccaacatcgccgttgccactcccaccaccacccctagcgccttcactcctncgcttagttgcttagaggccgagaccgcaggatgcattggtggagacgcctccactggaagatggcccagacaagagactctcactctccttgagatcagatctcgcctcgactctaaattcaaagaggctaattcaaaggtcccttatgggatg

SEQ ID NO: 29148 - DNA, 631 bp, Glycine max
  unsure (1)..(631): unsure at all n locations
  Clone ID: TF_LIB4366-014-R1-N1-D5
ggaatagaaatattaatagttctcattcctcaaactagctatagctgtcggggctcgccaaattctaagttctttcaaatatacacaatcaatttatatgctatattaaagatagccagcatcaaccaaaaaacaaaaatacaaaaaagagggggtacacttcttattatgggaatcaatgaattaaaactgatcaaaatccaaagaaggtacctgctgttgctgaacactgaaaccactaccagaccccacctgcgaagaagactcatgagcttgggttgtttgatctggttttacttgctcgggattctgatcaggtggagtattattcaagtggctttcagattgtagaacgagttttccttgattgtagagactgctcaactgatgaaagtagggacaagttcttgagtcaagggacctcttcttagtaatatccttggttttcctgaagtacttgtttatgttctcccacttctctttgcacctctttgcactcctcttgtatctcaactccgacatcccttgtgagattctctcccacagagggaccttgttgttcccttccttctcctcattgnntgtgttgttgttcacactggtgcacctcaggtttatgagtgccaacact

SEQ ID NO: 29149 - DNA, 1942 bp, Glycine max
  Clone ID: TF_GmC1059_1
ctcgagccgaatcggctcgaggagtgggaaaaagtgcagggagaagtttgagaacctgtacaaatattacaagaagacaaaggaaggaaaagctggaagacaagatgggaagcattacaggttctttcgtcaacttgaagccttatatggtgaaaacagtaaccaagcctcggtgccagaaaccaattttggcagtggtagccttcgtttccacacaagcagtcgagccaattagcctcgagaaacaaatcaagaaatgtttcagtctcagaagcattgtgacagcctaagcctcaccaacttcactgatttggacacttcatcatcggatgacaatgatcaaaatagcactggcagggaactcaacaaggacaatgactccatggagaagaggagaaagagggtgagtggaagaagctggaaggtgaagataaaggacttcattgactcacagatgaggaagctggtggagaagcaagaggagtggttggataaactcacaaagacactggaacagaaggaaaaagagagagtgttaagagaagaagagtggaggagacaagaatctgtaaggttggagagggaacacaaattttgggctaaagagagagcatggattgaagcaagggatgctgctttaatggaggctttgcacaaattaacacgaaatgagataatgaagagtactcattctcacgagggtctaatggtaactggaattcagaaccacagtgaaaaccagaatgaagatgggagtgaaatactaaatagcactactgccagaggtgctgaaagctggacagaatctgagattgcaaggcttcaacagttgagagctgagatggagacaaggtatatgcaaagtgggtgttcagaagaggttatgtgggaggaaatagctaccaaaatggcttgttttggttacgaaaggagtgctgtggtcttcaaagagaaatgggagagtataagtaactatgcaaggagtgtcaaggatggaagcaagaagcgcaaggaagactcaagaagttgtttttacttcgataacagtgaccaatcttctctgtataaccaaggaggtgcctattgtgatatcaacgatcaaaggcacaagactgggaggctgcaaacaaatgatggctcttcaccttccaattcaaatgttggaaatgcagttgcgggtgataactgctttcccttcttgatgactgagagtggaaatttgtgggagaactatagcttaaaggttaataaagcatgccaaaaccagtgatgagagtgaaaaaaagtttgacacttgtaagaggcaagaaaatttcacagccttttatcagatgatctcacattatgtaagcaagagctaactgatgagggtcgtttatgtatagagactgatgatgataaggtgatcaatcttattatatttatgggaatcaaggtgaaaaataatgtgttcaagtcacgtacgtaagtttaatgagggagactagacattggcaaaatttcacaggtgagtatgacactaattcaggtgagtttctcttgtagcagatttcttttatgcgtgcaaaatggaatttgcaattttatattacttcacatgttgcatcttcaatgatgtttatatatcattagttgttaaccctcaaaaaaaaaaaaaaaaaaaaaaaaaaaaaaaaaaaaaaaaaaaaaaaaaaaaaaaaaaaaaaaaaaaaaatttctcctagtttccaccttccacacctatctggccttttttttaattaattttttgggatatttatctgtgctggccttttgtgtttgtgtactgaaaggtagcaatttctttggtatttatttattggtcaatagttttatgaaccgggagaaagtgatgtattgatggatattgttgaagcatcggacattgttacaagcataaaaaaggccagattttctttaa

SEQ ID NO: 29150 - DNA, 1925 bp, Glycine max
  Clone ID: TF_GmC5795_1
tcgacgcgctgctccatccgtagcaaccagcccgactaccccgcccccctccggcgcctcctgccacatccccaagccccctgtgctcatcgtgccaaagatcgtcccccccgctcagcaatggaggcctcccactcaagatgaacaaggtgcagccaaggagcacaagaatagtgagtggaaggaaagagaggagggggtagagggagaagatgatgacgagaatgaagagggagacaaagagaaatgggaggacatcgacaataacgtcaaagaggtagtggcgcaacaagaggcttggagggtccaagatatggcaaggatcaatagaaaacacgaacttcttgtccaagaaagatcaactgccgcagccaaaaatgttgcagttattgcttttttgcaacagttatctggtcagcaccaaaattccacggtaacacaagcccagctcaatttccctcaacaaccacctccacaaaaagttacaatagtacaaccaccaccacaacaagctccacaaccacaagctccattggtgttgtcaaatagtgacaacatggagattcagaaaatgaataatggtcacagtgttgttactgctactgttactgctactgctactcctactcctactactactttcgttgctgctgctactgctattactactactccttcttcattgagttctttatcttcttctaggtggccaaagacagaagttcatgctttgataagactgaggacaagtcttgaaaccaagtaccaagaaaatggaccaaaggctccattgtgggaggatatatcagcaggaatgctgaggctcgggtacaacaggagtgccaagagatgcaaagagaaatgggagaacatcatcaagtacttcaagaaggtcaaggagagcaacaagcaaaggcgcgaggatagtaagacatgtccctattttaatgaacttgaagctttatacaaagaggggagcaagactcagaacccctttggcgcttcgttccacaacatgaagccacatgagatgatggaagatcgttaattaacactaagaaacaacagttcacatgggccagcaaagcagaagcatagctatagtgggtgtacatgtttttgcgctcataaatttatgtgtaaagtgtaaattgaagatgagagagagagagagagaaaaaaagaatacgaggtcccatagcagtttaatgaaatgaaataaaataaaaaagtcacatgcatgatgacacttaaactttcttcagtggacaccgttgaatgagacaagataaggaagtttctgattggatggagagttttaattttaattttaattttaattttaattttaatatatatttttttcttcttctgggggatggatttttaattattatgtaagttgattttaatttttccaaaattggggttaggagatgtcactgaaagggcatgatgatggcacaaacaccggcactataaaattcaattctttaataatgaatgacccatctaaaagcatggtggtgcagaagcagaagcagaagcagaagcacaaggtacctatctgacacactttctgatcatgggccagcttaaaagcagatcattggagctgtgggtcacattccggccgccatgaactgggatcagagatcgttaattaacactaagaaacaacagttcacatgggccagcaaagcagaagcatagctatagtgggtgtacatgtttttgcgctcataaatttatgtgtaaagtgtaaattgaagatgagagagagagagagaaaaaaaaagaatacgaggtcccatagcagtttaatgaaatgaaataaaataaaaaagtcacatgcatgatgcaactcttgtaattttcctttactttcattatatatcacggaaccactgtgtggtactgctttc

SEQ ID NO: 29151 - DNA, 3085 bp, Glycine max
  Clone ID: TF_GmC1404_1
ctatatttcaaaaacccataaaagattttaccaccctttttattatcgccatcctttttttttcccccccacaaactattatctttttttcttctcaagcaatgccatcaaggttctgtgcagtgtttgtagagagagagagagaaaaagatgtagaaagctagaaagacaagagaacaagagaaaaaatattataggaagagagggagaaactaatagagagtcctatgctgggggactcagcagtgttgggaacaggaggaggaggctctggtgatgcagtggcagcagcaccacctgctgcatcaggaggagcacatgatggtggtgttgacggcggtgacggtggcggtggcggatcaaattcaggggatgatagagttgaggaaggtgagaggagctttggtgggaacaggtggccgaagcaagagactttggctttgttgaagatacggtcggatatggacgtggcttttagagatgcaagtgtaaagggtcccttgtgggaagaggtttctaggaagctggcagagcttggctacaacagaaatgccaagaaatgcaaagagaagtttgagaacgtttacaagtaccacaagagaaccaaagaaggacgaagtgggaaatcagaaggcaaaacttatcgcttctttgatcaattacaagcccttgaaaacaaccctgcaattcatggaaagcaatctccaacacctccaaagccgccaccacaaacaacagcactatcagcaacaccagtgtcaatagtggtaacaacaactacaactacaccatcatcaataataatgccacttccattgccaccagtgtctaataacaacaacaacaccactgttccatccacaacatcacttcctatgcctcaaagcattctcaacataacaccaccatcaacactgaacatcacaatcccttcttttccaccatcaaaccctacaacatacttcccaacacaaacaccaaaccctactagcaacaacaacaacaaccctccaagcaccatcaccccaccttccttccccaatttccccgccgatctcttgtcgaattcgagttcttcatcgacttcttcggaggaaacaccgacgacggaggccagagggcgcaagaggaagaggaagtggaaggacttctttgagaggctcatgaaggaggtgatagagaagcaggaggagctgcaaaggaggttcttggaggccatagagaagagagaacaagagcgtgtggtgagagaggaagcgtggagaatgcaagagatgcaaaggatcaacagggaaagggagattctagcacaagagaggtccattgccgcagcaaaagatgctgctgttatgacatttttgcaaaagatagccgaacatcagcaacaagaaactatcaatcttgaaccagcattgaataacaacagcatcactgttgttccacagcaaccagtgccacaagcaacaccaacatcaactccaacaccacaacaagcacaaacaacaacagttcctgaggccccacaagtgcagccattggtcccacaactacaacaacaacaacaaatagtggtgagtaatgtggaaatcaacaaagctgataataacggtgagaatttgatgatggaagcaagctcttcaaggtggccaaaagtggaggtacaggcactgataaacctgagaacaagcctggaaacaaagtaccaagaaagtggaccaaaagggccactgtgggaggagatctcagcgttgatgaggaaaatggggtacaaccggaacgccaaaaggtgcaaagagaagtgggagaacatcaacaagtacttcaagaaggtcaaggaaagcaacaagaagaggcctgaagattcaaagacatgtccctattttcaccagttggaggctctatacagggagaagaacaagggagaggggcagatgaagccggagagcatgatggcgccgctcatggtgcagccggagcaacaatggcctcctcaaacaacgcttgtggtaccgccagaagtaaccatgggagacacccagaatgaccccatggaccggcagtaccatgaggagaatgaggatgacgaggacgacaaggaaattggagatgaagacgaggatgaggacgacgaaggaggtgataattatgagatagttgcgagcaaaccagccacagctgatgcttccggagagtgagaggaaaaaatattgaccaaaaagggcatcaattaaagaatgatggatcaatttgaattcacatattgtcggaaaaatggtggtgttgggatgaaatttggtattgatggtggatggtgatgtgattgtattgaagattttgaaaatgcacgtacttcagaatgacacatgggtataggggtagccagtagggtgggggaatctgggttggaagtacttggtacaatagcagcatatagtcagtaagattatatgttttttttgttttgaaagaagaaataattaattattttttgagctcaataaataagttgatgagggagaggggaagggttataagatagagaaaaaacttcagacttgcatgagaggtgaggttcaacataaaatgaataagcaagaaaccttgattaatgttatggtactagctatataggttttttgtactaaattttcatgttcatgttgatgtaaatgcgagaaacgattaattgtggggggggtttgtctttattttgtttctttaatttccttttcaattttgttactcttcaaatgttgtcaatcatttttgtttcttttcctccttcattgtatattatcttgtcttgatgagttaaaaaaaaaaaaaaggggcggcaaggattgccggacaatggtggtatgggagtacaatgtgataagggtggtgctggtggatggtcatcgggttgtattcaagattttggaaatgcccttacttcagaattacacatgggtataagggtagccagtagggtgggggaatctaggttggaagtccttggtacaataccagcatatagtcagtccccccacatgtttttcccccccgaaaaaagacctcaattaattattttttttagttaaat

SEQ ID NO: 29152 - DNA, 2036 bp, Glycine max
  Clone ID: TF_GmC696_1
cggacgcgtgggcacatgaaagaagaggtaaagaagagagaagtggaaacacaaaacacaaacacaaacatgttcgatggagtaccagaccagttccaccaattcataactccaaggacctctctacctcttcacttacctttccctctccatacttcaggaggaacccccaatacgactaccttcccctccaattttgatccctataaccatccccatcaattgccactccaacccaacaatctcttgcacccattacaccacaaagatgaagacaaggaagaaaacaccaccgtcccgatgaacttggaaatccaaagggatcaaaggcaacaacttcccgagctgattgatccctggaataacgatgaagtgcttgcgctcttgaggatcagatctagcatggaaagttggttcccagaactcacttgggaacatgtctcaaggaagctagcagagcttggatataagaggagtgcagagaagtgcaaggagaagtttgaagaagagagtagatatttcaacaacattaattacggcaagaataataataataataataatagtagcaattatcggtttcttagtgagcttgaacagctttatcaccaagggggtagtggtgatcatcatcttgaaaatacgactcagccaccactgcagaaacaagacaagatgggccaccatgcattggagttggaagtagaaggggattctagaaacgttgttgacgcattggtgacaaaacaaaacgagcaaagcgacgaggcactagcagtggaaaagatcacaaaggaccgcaagaggaagaggcctgataggtttgagatgttcaagtgtttttgtgagagcattgtgcacaagataatggctcagcaagaagagatgcacaacaagctccttgaggacatgatgaagagagatgacgagaagttcactagagaggaagcttggaagaagcaagagattgagaagatgaacaaggagcttgagatgatggcacgtgagcaagctattgcaggtgatagacaagccaacattatccaaatccttaacaaattctcagccacttcgtcccctgcaagccacaccctcaagaaggtaaacaatgattcaaacctaaacatccacattacacaaaaccctaatccttcacaaacagaaaaccctaccttaagtgttgcacaagacacattacaagtgattccttctacttcttctacttcaactccagctcttccccagaaccctagttcttattctctaaatatccagaataataataataatattccagtagagacaaattcggttttgaataaagggaatgagaaagacgatgttgggagaaggtggccaaaggatgaagtgttgacactgataaacctgaggtgcaccagtgtgaacaacaacaacaatgaggagaaggaagggaacaacaaggtccctctttgggagagaatctcacaagggatgttggagttgggatacaagaggagtgcaaagaggtgcaaagagaagtgggagaacataaacaagtacttcaggaaaaccaaggatgttaacaagaagaggtcccttgactcgaggacttgtccctactttcaccaattgagcagtctctataatcaaggaaaacccgttctgcaatctgaaagccacttgaatagtccacctaatcagaatcccgagcaagtgacaccagatcaaacaacacaagctcacgagtcttcttctcaggtggggtctggtggtggtttcagtgtgcagcagcagcaggttgatcatggaggtgagaaaaccttgatgcaagtaccttctttggatttcgatcagttttaattcattgatttgtccatgttctgtcacataataagaagtgtagcacttttttttgaatttttgttttctggttaatgctggctttctttaatatagcatataaattgattgtgtatatcttgaaaacttagaatttggcgagcaccgacagctatagctagtttgaggaatgagacccattaatatttctattc

SEQ ID NO: 29153 - DNA, 1657 bp, Glycine max
  Clone ID: TF_GmC1490_1
ggctcgacttcacgctgacacacactacacaaacccctaaccttccttccttccattcactactactccttcactttacttcaaaatttcacccttccaaatccccaacttttacaattttactattagaatttaccatctctctttctcttcctcaatccaatccaatccaatcccctctcaatcgaagcaagaaaaccatgtatttatcggagaagcctcgtcccatcgatttctacaaggaggaaggcgcgcgcgacatgatgatcgaggtcgtctccaacggcgacctccctcctccgccgccgccgccgccgatgattctcggcgagagcagcggcgaggaccccgaggtcgagatcaaggccccgaagaagcgcgccgagacctgggtccaggacgagacgcgctctctcattggccttcgccgcgagatggacgcgctcttcaacacctccaagtccaacaagcacctgtgggagcagatatcggcgaagatgagggagaaaggtttcgatcgttctccaaccatgtgcaccgataagtggcgcaacctcttgaaggagttcaagaaggccaagcaccaggaccgagggagtggttccgccaagatgtcgtattacaaggagattgacgagatcctcagagagaggagcaagaatgtgcagtataaaagccctactcctccgcccaaggttgattcctttatgcagtttgctgataaaggtattgacgataccagtatctcttttgggcctgttgaagctactggaagaccaacactgaatcttgagagaagtttggatcatgatggacatcctcttgccattaccacagctgatgctgttgcagcaagtggagtccctccttggaattggagagagactcctggaaacggtggagaaagtcagtcatgttgtggaagggttatatcagttaaatggggtgattatacaaggcgaataggtattgatggcaccccagaagccattaaagaagcaattagggctgcttttaggttgagaactaaacgtacattttggttggaggatgaagatcagattatcagaagtattgaccgtgaaatgcctttaggaaattacactcttcacattgatgaaggaatggccattaaattacctctctatgatgagcctgaccatatacctgtgcatactgaagataagatattttacactgaagacgatttccgtgattttctgacccgccggggttggatatgtctaagagaatttgacagctacagaaatattgacaacatggatgatcttcgacctggtgccatatatcgtggtgtgagttgaaagcaggtacatggtgtggtcaatgttcagctaccataaaatgtctggagaactgtggtggggactgttcagatctttgatgtatgtgcggcactaacctggaattgtatttgttttaagttttgataatgctgtttatagttttatataggaaaaggaactagtccctttgcacaaattccgttccaatcattggccttaacatgtctgtaaatatgcatttgcagtgagaacatattgtctaattttatagtggatcattttcatcactcttaactctatgtagctaagttggacagatgcatattatgaagcacacacctttcttgttc

SEQ ID NO: 29154 - DNA, 2124 bp, Glycine max
  Clone ID: TF_GmC1796_1
ggctcgagatttcaagatgctctctctctcccccttgttttaaacttgtaaataatggtatggtagaagtagtagtagcccttcaaatttcaaactgaaatagcacaaacaataccaactctcctcataccaaaacacacaactccagttattgaaattgaaattacccttttccttttttcccccaaatttcacccgaggctgtttttttttcttttttttttttttctctcttttgaccttaccctttgagagtttcgtggctgtaatttcgttgtaaccgatgctggaaatctcaactttaccggaaaccgcgacggagaacgcggacggcggttccgcggcggtctccgacgggtcgaaagccgagcacagcgaggacgatgaccggaatcccgccgcgaaccggtggccgagagaggagacaatggctttgctcaatataaggtctgaaatggacgttgctttcaaagacgcaaaccccaaagcccctctctgggaacaagtctcaaggaaattatcggagctaggttataataggagtgcgaagaagtgcaaggagaaattcgagaacatttacaagtaccataggagaactaaagaaggtcgttttggaaaatcaaacggtgcaaaaacttaccgatttttcgagcaattggaagctttagacggaaaccactcacttcttcctccgacaacaaccgttggtgatgatgttgtcctgaacgcggttccgtgttcggttagtgcggcggcgcacgagcattcgagttcgacgacgtcgtgttcggggaagaagaagaggaagctgacgcagtttctggaggggttgatgagggaagtgatagagaagcaagagacgctgcagaggaagtttgtggaagtgttggacaagtgtgaaaaagatcgaatggcgagggaggaagcgtggaagaaggaggaactcgaaaggatcaagaaagaacgcgagcttctggctcaggaaagatcaattgctgctgccaaagacgaagctgttcttgcttttcttagaaagtttgcagaagcagaagacacggtgcagttactcgagaaaattcaggttcaaaacgacaaacagaaaaacatgaaacaaaatggcggtaatgataatgctaatggaggtggtggtgtcacagttgtcactgatatggataaacaagaatgtggaaatactaatgtcgtgttagtgttgggaattttgtgcacatgagtagttctcgttggccgaaggatgaagtggaggctttgataaggttaaggactgagtttgatgtgcaggcacaagggaataataataatagtaataatgggtctaaagggcctctttgggaggagatatctttggctatgaagagcattggtgaagtgcaagtaaaatgggagaacataaacaagtacttcaagaggatagaaatgggagaacataacttctgtctctcgcagccacttcatgaggagacgtgtccttattatcaccaccctgaggctttgtacagtaagaagcctaagaaggtggatcatgggaacgagttgaagcctgaggagctgttgatgcatatcatggtgagtcaaagtcaagaacagcaacagcaacaagagatgcagactcagactcagtcaccatctgaagatgctgagagagatcagaatcagggagataatgaagatcaaagtgagtatcagaatcagatggttgataataatagtccttccattgcaattatgagttaaaaagcttggtttcaagagattctttctttagtatgctaaaattgaacatcttctctgatgacaaccaacgtgggttcctttgactttccaactattcatcaacaagagcaggagaagatttcaatatttcattttgttgctgggtttaggtggtagtaaatacaaatcaatctcaagggtgttgtttttgtatgtattacagtacactgtattttccaattttcaattcttcatcgtttttttttcttttctttagcgaacatggtagatgatacaaggaacacctgcacagagaaagagagagagatttacctctcagtaaaaaacaaagtcactgggcgtgttattttaatattaaaaacttttccctag

SEQ ID NO: 29155 - DNA, 411 bp, Glycine max
  Clone ID: TF_LIB3050-002-Q1-E1-G8
gggagaacataaacaagtacttcaagaggataaaggagaagagcaagaggaagcctcaggattccaagacgtgtccttattatcatcaccttgaggctttgtacagtaagaagcctaagaaggtggatcttgggaacgagttgaagcctgaggagctgttgatgcatatcatggtgagtcaaagtcaagaacagcaacagcaacaagagatgcagactcagactcagtcaccatctgaagatgctgagagagatcagaatcagggagataatgaagatcaaagtgagtatcagaatcagatggttgataataatagtccttccattgcaattatgagttaaaaagcttggtttcaagagattctttctttagtatgctaaaattgaacatcttctctgatgacaaccaacg

SEQ ID NO: 29156 - DNA, 1984 bp, Glycine max
  Clone ID: TF_GmC1764_1
ctccaattgatccatctactctggtgaaagcggaagatattgatgcttatgcgccaaaggatttgcttattgtgacaacgggatctcaagcagaacccgtgctgccttgaacctcgcatcttatggaagtagtcatgctttcaaactagccaaggaagatgttgttttgtattcagctaaggttatccctggtaatgagtctcgtgtaatgaaaatgctaaaccgcatatcggagattggatcaacaattgttatgggaaaaaatgaaggtttgcacacatctggccatgcatatcgtggagaattggaagaaatacttagaatagtgaagccacaacattttcttcccatccatggagaacttttgttcctgaaggaacatgaattacttggaaaatcaactgggattcggcacactgctgttattaagaatggagagatgcttggtgtttcacatttgagaaatagaagagtcctttctaatggtttcatttcccttggaaaagagaatttgcagttgatgtatagtgatggcgatagagcatttggtacatcaagtgatctctttattgatgaaagattgaaaattgcattagatggcatcatagtgattagcatggaaatatttcgccctcaaaatttagacagtccagttgagaacaccttaaaaggaaaaataagaattaccaccagatgcctgtggcttgacaaggggaagctgttggatgctctccataaagctgctcatgctgctcttgcaagctgccctgtaagctgtccactggctcatatggaaaaaattgtgtctgagatgttgagaaaaatggtgaggaagtacagtggcaaacggcctgaagttattgccattgccatagaaaatcctgcagctgttcttgctaatgagataaacacaaagttgtctggaaaattaaatgtggatgggatgtcggcattgagaaaagtggtggatggacatgagaaagagaatcagagaaccgaaatgcaaataagagatcgtattgatgtaggtggtctactacctacaaaagacaatgctatctcaagtggagctgaggatggcttgtctgatgcggaggatccaaatgattattttaaaccatttgttgaatcctctccagttgagaagtcaattaaaactaacaatggttatgttccacgaaaggagaagtcatccccattgaaggatgactgttctgaagacactgaagaatgcaattctgtaaatacatcagattctgaacccaaatcttcaaaatcagcaaagagaaataaatggaaacatgaagaagttaagaagctgattgatatgcgtggggaactgaatgacagatttcaagttgtgaagggaaggatggccctctgggaagaaatatctcagaatttgttggctaatgggatcagcagaagtcctgggcagtgtaaatctctgtggacttctttgttacagaaatatgagcaggaggtgaagaatgaaaagaagaacaagaaaaaatggccgtattttgaggacatggaaaggattctagctgataacaagacactagaaacaaaatgattataaaggtgatgcaccagacaagaaaaatttgcaagagttttctgcattatgattggtaatatgtctgagcatggtcgctgggaaggtaatccatcagttgcattattcttgcatcttgaactccttcattgaatatccatagttttgtgaggagatggacagcgttaaatgcattgacattttacattaacacaagttaatgagggagactatgctggttcaggggatgatttatccccttcctcaaaaggtaactacctacccagtgacagcattttagggtcattttgatgatattgattgacatattgaacaactattttaatgatagtgaagggttaatataatgtaacgagaccaaagtacattttttctgttacttataattaatttcattattttgtt

SEQ ID NO: 29157 - DNA, 622 bp, Glycine max
  Clone ID: TF_GmC1490_2
cctaaccttccttccattcactactcctccttcacttaaaaaatttcagccttccaaatcctcaacttttacaattattacaatttagcatcactctttctcttcctcaatccaatcccctctcgatcgaaccaagaaaatttaagaacccaaaccatgtatttatcggagaagcctcgccccatcgatttctacaaggaggaaggcgcgcgtgacatgatgatcgaggtcgtctccaacggcgacctccctcctccgcctcctccgccgcctccgccgatgatcctcggcgagagcagcggcgaggaccccgaggtcgagataaaggccccgaagaagcgcgccgaaacctgggttcaggacgagacgcgctccctcattggccttcgccgcgagatggactcgctcttcaacacctccaagtccaacaagcacctgtgggagcagatatcggcgaagatgagggagaagggtttcgaccgttctcccaccatgtgcaccgataagtggcgcaatctcttgaaggagttcaagaaggccaagcaccaggaccgagggagtggctccgcgaagatgtcgtattacaaggagattgacgagatcctcagagagaggagcaaga

SEQ ID NO: 29158 - DNA, 1169 bp, Glycine max
  Clone ID: TF_GmC4079_1
attttttcacctctccccaaaaccctcgcgccgcttttttttctctttcattatttttttaccattttttttatggacctcttcaccggcgaccacttccccgtccccgaccacgtcgctccgttccccgattccggcgacctcctcttcgccgccgacctcctctcccaccgccacaacccccagaagttccgccccatcaggtccgtccccaccgcccccattgccaacccttctcctccccctctctcgcacgatccgattccctccgggtcgggtcacgccccatgccacgaatccagcttgtcttttgatgctgaggatgaagatgaggatgatgacaattcatcagcaagtaccaaaggacatggccctagaaagaaaaggagaaagatggtgagaaagctcgaagattttgcgaaggatttggtggtgaaggtgatggaaaagcaagagcagatgcataaacagttattggaaatcatagaaaacaatgaaagggaaagaataaagagagaagcagcttggaagaatgaggagatggagagaatcagaaaagatgaagaggctagagcccaagaaaattctcgaaatttggccctcatatccttcattcagaacctgttgggccatgaaattcaaatcccccaacaacctgcaaaaccatgcagcaaaagagaagaggatgaagttgaggcaagtgctagaaaagaactgaacaatgatccaggtgacaatagatggcctgatgttgaagtgcaatcactcatcactgtgagaacttcattggagcacaagtttcgtctcatgggatcaaaagggacaatatgggaggagatatctgaagcaatgaatggcatggggtacaaccgctctgcaaaaaagtgtaaggagaagtgggaaaacatcaacaagtactataaaaggacaatagggagtggcaagaaaaggcgtcaaaatagtaaaacttgcccttactttgatgagttggacattctgtatagaaagggtctcttaagtattggaaatgccttgagcaatacctgcggtgttccccagattgaagtaaaggagttgaatgaaacttgaataggtagtacttgatagtcgtagatacggcttatgtaaaagctccttcattcagcatttatttagccattcttcctttc

SEQ ID NO: 29159 - DNA, 499 bp, Glycine max
  Clone ID: TF_jC-gmro02910048f02a1
ggctcgagctttgcatagatctgttgcagagcctagaatcattgtgcaaacaacaagtgaagtgaatctcttagatgatggatatcgatggcgcaaatatgggcagaaagttgtcaaaggcaacccatatccaaggtgatattggtttcccccctacactttgattgcttatatttaatgaataattatggatgagcattatcattgtctgctaagtgacaagtttaagtgaaaaaaaggctcaccgtaaataaagtatgaatggacaagttcaacaacgtaagtttaacatgagtttaaaatgagtgaaaaaggctcaccattacaaattgctcccatagtttaaaatgcagtataaaaaggttaatctataatataagttttgtcccgcacatacttatgtatatgaatatttccccacagcataaaatttctggatccgccactacatctaatggtttaaggcatttgagttagatatgatgtgaagttaatttat

SEQ ID NO: 29160 - DNA, 357 bp, Glycine max
  Clone ID: TF_GmC1323_2
caccagcgtgagaggctgcccagcacgcaaacacgtggagcgtgctgtggacgattccaacatgctcgttgtcacctacgaaggagaacataatcactcgcaaatcgcttctgaggtggcaaatgttatccttgaatcatcttagtcaaccttaagactagtgcatgccaatgctttacttcatttatatgatttcttaattctattggtctttgtctttttttctttctttcttgaagtatttattttaaaattcattgaaatattaaattaattagatacaagagtattggttggtctttgtaagacttattattatatagaaaatgtaaagaaattaaacagcataataaaaat

SEQ ID NO: 29161 - DNA, 508 bp, Glycine max
  Clone ID: TF_GmC328634_1
cttcaaagggaaccacgatgtcgaggaggtgagaattgcaaactgagaactatgttggaccaaatcaccaaaaactacaaccagttacaattgttcattgctttgcagaagcagaagcagtgtcagaagatggagacaaatttaaatgggatgatgtttggtcaacatttattggacccacgaggaccattcaccaaattagacgctcaagttgcaccatttgcagatgataaatctggtcaacggggtcatcctgaaactgatcctgtagaagatgttcttgaacaatcaacctcacagagttggggctcatccaagagtcccaagtttgaagagtccaactctagtgagcttcctttaaaaaaaaccagggtttccgtgcgtgcaagatcagaagctcctctgattagcgatggatgtcaatggaggaaatatggacaaaaaatagccaagggtaatcctggtccccgtgcctattatcgttgcactatggccgtaggatgcccgg

SEQ ID NO: 29162 - DNA, 650 bp, Glycine max
  Clone ID: TF_GmC273044_1
gctctaagaaagatatctatgataataaaaagaataatattacaagcacatatatgtaaaagaaatgaacattgtgacattttttctttaaattctttagtctaaaggatcgaaatttcagaacttcaaactaaactgaaatgttttttatatccactataaagcaccaaaactttgaggtaacattaggttccatccatgtcatgctattcaaacatttgagatacacagattacagagttaggctgtatatgtgatcgtttctcaatatatgctcgaagctttcagttgacttctgcacaggatgaatatgcatcccttcgtaggttgttaccacaatctcttcgtctttagtatggcgttggatttgtttcttcacattgcaacctcgataagaacatctgcagtaactatagttaacaaagataagaatactagacactcataacaacattttggatgttctcctgatcttaaaaaaaaactacgatttctacttcctatattaacatatcatgtaattattttgaggcgacaaactgaaaaaatttattgtttaattctacgaaaataaatcgtttcagggcaaagaaatggctttgtaaattttctgaaatatatatatgcttaatccagtatatcaacatgac

SEQ ID NO: 29163 - DNA, 533 bp, Glycine max
  Clone ID: TF_jC-gmst024140b12a1
ggctcgagagttattacatttttcacgaacaccggttgcccctttagaaaacacgtggtgagggcatctcatgatccaaaagctgtgattaccacgtatgaggggaaacacaatcatgatgtaccaactgcaaggaatagttgccatgacatggcaggaccagcaagtgcatgtggacagacaagagttaggcccgaagaaagtgataccatcagccttgaccttgggatgggaattagcccagctgccgaaaacacatcaaacagtcaagggagaatgatgctgactgaatttggggatagtcaaattcacaccagcaattccaatttcaagttcgttcataccacgaccgcgccggggtactttggtgttctaaataacaactctaacccatatggttctaaagaaaatccaagtgatggtccatctgtaaaccattctgcttattcttgccctcagaacatatggagaatactaatgggtcactgaaattgcttgaaaacaaaaaattaaataaaatgaaattctgagtt

SEQ ID NO: 29164 - DNA, 2637 bp, Glycine max
  Clone ID: TF_GmC943_1
ggcgcctaattcgctctcttctaccacaaaccactcaatcctaagaaatccatttgaaatttcaagtctcgttctggctaagtccatgttcattgtttactatacctcaccactccaaggttctcgtaattttcttcagcagaaaacgaaactattgcttccagagaagagcatcatctacgaccattttggcaatattataaaacaagacaaaaatggagagtgacttgagctgggagcggaacacactcatcaatgagctaattcaggggatggaggtagcaaggaagttgaaggctgacttgaagttgccgtattcagttgacacaagagatctgcttctgcagaggatattatcttcttacgaaaaggctctactgattctaagatgcagcaatgcatcaacttccgagttgcagggcatgaatcaagcaacaccaactttgctacccgagtccccattagcctaatttgctcctttagcctcactcctgctctcttctacgtcaaatcctaagaaacccatttgaaaatttaaaatctcgttctggctaattccatgttcattgtttactatacctcaccactccaagggtctcataaatttcttctgcttccaactctgctgcagaaaaagaaactgttggttctagatacaagtgggtttccagagtagccttccgcagcactcagggctgttgggcaacaaagcaagtgcagagatcagatgaagatcccacaatgtttgacataacttacagaggaaatcatacctgttctcagggaaacaatgccgttctgccacccaagtcaccagaaaaacatgagaaaccagcacacagtcataacattgacattcaccatgcacaggcatcacaagaaagccttgcaaagttcagaagtatcttgtctgtcaacacagataatctggacaatggagatatggcatatgctttcactttcccttccacttcatttggatgcatgaaacaagacaaccacagcttgattcctttggccctggagaatgactccttcttaagcgacctataccaaacacacctgttatccccaacaacaccagaatcaaattatttcccatctccaactttccagatgaatgagtttgatgggatctacaacaggtcacattcgaaatccgatatcaatgagatcatttccaccaacacatcagcaaccaattctccaattcctgatttcaatttctcacttgatccggtggaaattgatccaaatttccctttcaataccccaggatttttgtgctgattgcactataaatggaatactataagaatgtagtcttcataaaacgggacaatttcagacagcagtagaattgtagaataaagaatgagcaactgcagcacttatgaacgtccttgtagtcaatatcagaattgcaattttggctccgtgttagcaattagcagtatgcactttcgaataaacttgtctgtcaacacagataatctgaacaatggagatatggcatatcctttcactttcccttcaacttcatttggatgcatgaaacaagacaaccacagcttgattccttgggccctggagaacgagtccttcttaagcgacctataccaaacacaccttttatccacaacaataccagaatcaaactatttcccatctccaactttccagatgaatgtgtttgatgggatctacagcaagccacattcggaatccgatatcaatgagatcatttccaccaacacatcagcaaccaattctccaattcctgatttcaatttctcacttgatccagtggaaattgacccaaatttccctttcaataccccaggacttttctcctgattgcatttcactataaatggaatactataagcacatagtcttcctaaaatgggacaacttcagacagcagtaaaattgtagaataaagaatgagcaactgcagcacttatgaaggtccttgtggcttgtagtcaatatcagaattacaattttggcactgagttagcaattagcagtatgtactttcaaataaaatagtctctccttatttttgttagttaggactgcaaatttcaagtgaacctgtagactgcaagttcctaccgctgtgccctaactctgggccaaagttggagcatctgcagcacctacgtgcggccctgtggctggtcctcgtggcctgtagtccatttctggctctcagtttgcgctctggggtggctatttggtgtgactgttctttctgctagttcctacacctaattccaatgatccttggtatgcaatcaactatttaatcaaaaaattctcctggacaaaagaatttatttcctctaagaaaaagctccacttattctaaaatgcaagcaatcatcaacttccgagttgcaagccatgaatcaagcaacaccaactttgctacccgagtccccattatctgtccatggaagtcctctgcgcgaggacgttgatgggaccatcaaggatcaccaagaagttaaacatgattcaaagaaaagaaaagcaacgcccaaatggatggatcatgtaagagtgagctgtgaaaagtgtcttgaaggaccacatgaagatagctaccaactgagaaaaatatgtcag

SEQ ID NO: 29165 - DNA, 773 bp, Glycine max
  Clone ID: TF_GmC94_3
gataaacttaattcattttactatcttctttttcgagtgtttattgaaaaatttattcttacatgacctaaattttgtgtttatggagcctaaattgatatatatcttgacctttcaattttcaggaactactatagatgcactcacaaatttgaccaaggttgccaagcaacaaaacaggtgcaaagagttcaagaggaaccaatcctatacaagaccacctactatggcctccacacttgcaagaacttggcaaaccctgagatcatacttgaccctatgtccccttcatcctcatccaagttccttagctttgacaactccttcccaaccccatcaaagcaagagtgcccctttctctcatcttctaatttgccatcatcagtgaaaggggagtgcaaggaggaggtccctccctcaacttcctccaatcattatctcatctcttctgacctcacttttgatagctcaccaaggcatcatgtcactctatcatcaacacttgactcagagtacaagagtgtggacatttcggatgtcttgtatgattctgctcagcttgatgatgcctttgaacccttccttgaatttagatgagcatgtccttgtttggtttgtgattttttttatataatttttactttagtgaaggcagtacaaaacaaaattgtctaatatttagtagtacttttcttagataaatgtaatatccgtgcttttattgtaaattttgtcattttcaatgaatgagaaatgatcataatgtttcaatg

SEQ ID NO: 29166 - DNA, 396 bp, Glycine max
  Clone ID: TF_GmC1329_2
aattcggctcgagggagaatgaaaatgatggccattcctattcttctgctgggagtagaactgttaaggaacctagagttgtagttcaaaccacaagtgaaattgacatacttgatgatggatataggtggaggaaatatggacagaaagtagttaaaggaaatccaaacccaaggtatttccatcttttagattttaatagaagagtttaactgtgatgtactattggactagtgtaaaaaaagtcgactgtaaatcaattaaaaatttgtggacttttaagttagttattacaaaaatcaacaaacccaacacgatttgtaattggatgatagtataaaaaagcatttatactattcattcatttcaattaaactcttaatagaatggattagt

SEQ ID NO: 29167 - DNA, 430 bp, Glycine max
  Clone ID: TF_LIB3242-323-Q1-J1-D7
gtcacagttcaaacagtatgtgacctatttcaatacatagactcatttaagctaagcctttgccttttgtcttgttggtttttaacatagcaagttctctttttctaatattttcaatctgattccttgtaacagcaacagccatggagttatcaggagaccacaaagcaggataatttttcttcaggaaagagcatgatgaaaactgaaaaatcttcatccatgcaaagtttttcccctgagattgctagtgtccaaaataatcatagcaatgggtttcaatcggattatggcaattaccccccacaatctcagaccttaagcagaaggtcagatgatgggtacaattggaggaaatatggccaaaacaagtgaagggaaggaaaatccagaagtatttcaaatgcccataccccactgcctacaaaaa

SEQ ID NO: 29168 - DNA, 829 bp, Glycine max
  unsure (1)..(829): unsure at all n locations
  Clone ID: TF_GmC1330_3
gttgtttttagaacgaggatggaggaagctgcttccgctggattaaagagcatggagcatctcattcgactcctttctccaacctcttataattccaattcttcttcttctcctcttctcaataccaatcccaacaacctccactgctcccaaatcaccgacttcaccgtctccaacttcaaacaagtcatcaaccttctcaaccgcaccggccacgcccgcttccgccgctctccaccccaagcccaagcccaagcccaaacccaggcaacccaaacccaaacaagtcttcagcctcaaccagagacccaacaacaagggttcagtttagatttcgtgaagcccaccattctaaactcaaagcccatcaacaaagacgaaactttgactctttcaacaacctcttcttccttcatgtcctccgtcaccaacgacgccagcgtctccgacggcaagatcggacctttcctccctccctccgccgccaaaccccctctctcctccgcccaccggaaaaagtgccgcgacgccgccgcagcactctccgccaaaccctcctgccactgctccaagaaaaggaaatcacgcgtgaaacgaacgattcgggtgccggcgataagctcaaagatcgcagatatcccaccggacgagtattcgtggagaaaatacggtcaaaaaccgatcaagggctcaccttaccctcggtattattctattccttcttctatcttcatgctgaatcggtcaaagtcaaatgcagatctcaaagttctttctttnttcagaanaaanattaactatgattaaggtctatgataaaagatcgaac

SEQ ID NO: 29169 - DNA, 171 bp, Glycine max
  Clone ID: TF_jC-gmXLIB3563P059cb11a1
cgagagaatagggacaaaccatggctaaggggaatccatgccctcgagcatactacagatgcactatggctgttggttgctcagttagcataccagttctacgctgtgctgatgatagaacaattatcggtgacaacatatgacggctcacataatcatccactgccacca

SEQ ID NO: 29170 - DNA, 469 bp, Glycine max
  Clone ID: TF_jC-gmst02400030c12d1
aatcaattgtatatgatattttttggatatttataataattggcaggaattttggtaatataattaaagtttagtttgatgtgaaggtagctgtaaacctagggaaaggactatttttaactgccttctgaccatacttccgccatctgtagccatcctcaagatgatcaacttcactcttggtcataaatgcaaaccgtggctgccgtattcgcttttgccccttgtttttacctttactcggtatctcaggcggtttatcgtcggagacggtggatttctccggtggatcctcgctggagctggaagaaatcgattggttgttcgaccgcgacggcgcggcggcgaccggttcaatcgaatcggtcagagaggactgaaccggcttccacaatccgtcgtcggtgccgatccggttcggctggtccggttcgaggttccacacgaattccctgagtatgctccgctc

SEQ ID NO: 29171 - DNA, 746 bp, Glycine max
  unsure (1)..(746): unsure at all n locations
  Clone ID: TF_GmC737383_1
accaggagagaaaccacctatttcaattttcaccaaacctcttcctctagaaacatcatcaacctctatataaagataattggaagagagaagggagaaggagaaagggaaaagatcataagaagtgatgtcaacaacttcccatcccattgttcaccacagcttattcgatgagcaggaccagatacctacacagatgggtttcttttcctttccaacaaaccttactttccctcctttgggttgccatcaatcctctttgaaagcctttagttccatagcaccttcttcacttgctatatctcaacaagattctgcatcaaatctaacagcagaaaccctattctcaaccactgctcaaaagtcaagagaagacctcacttctagctttggaggaggtcaattcctatccttgcatagatcaagtgtaaatccatgggcattgggagaagtggctgaatgcttcagcagtaaaagaagtggatttgatgatcatcatttccgaatttcagccatgaagatgaagaaaatcaaggcaagaaggaaggtgagagagcctaggttttgcttcaagaccatgagcgatgtggatgtattggacgatggctacaagtggaggaagtacggacagaaagttgtgaagaacacgcagcaccccagctatttccggtcctcacttgatagctgccctcttttggtttcgccggtacgcttgtccttgattaaagaatattaannnnnaaacc

SEQ ID NO: 29172 - DNA, 279 bp, Glycine max
  Clone ID: TF_uC-gmflLIB3260P015f01b1
cccacgcgtccgcctttgaacttgttttgttgctagacacccttgtacatttctctgtgtgcatctgtaatatcctctgcaatgcaaaccactagttgtcaatttttcggtaaaaaaaaaaaaaaaaaaaaaaaaaaaaaaaaaaaaaaaaaaaaaaaaaaaaaaaaaaaaaaaaaaaaaaaaaaaaaagggcggccaatagaaaaaaacaaaaaataaaaaacacgggcatgcgacataaaaaaattttttataaggaaaccctaaattcaatggggg

SEQ ID NO: 29173 - DNA, 940 bp, Glycine max
  Clone ID: TF_GmC1080_1
gcatatttcaagtgctcttttggtccaaactgcccggtccaggggggtgtggatgatcaagctgttctggttgcaacttatgaaggagagcacaatcacacacacccttctcaaatggaggtaaaaacgagggtgcaaagatgcatggatgatcaatctgttctggttgcaacttatgaaggagagcacaatcatactcacccttctcaaatggaggtaacaacaggctccaaccgttgtatgactcttggttcagtaccatgttcagcgtctcttagctcttccccaccaacagctacccttgactggacaaaatccaagtccagcagtgagtctaagaatacaagtcccaaaaccgaatcaccagaagtcccgcaggttttggtagagcagatggctacttccttgaccaaggatcctaatttcagagcagcactagttgctgccatctcaggaaaaatgttgcacaataattaagtagaaaatgagtgaagtgtatttaactcattctataagtggatcttgtttagagcataggatctctatgtaaatacaacataggacattgctacatatatattcctcaatttaatcaaatccttttggtgggaatcgagctccactcaggatcgatagcatgtctagctgattgtgcatttgctaatcatgctcatctcagtcttctctattcttctgcatctggatgattaaaattaggtttacaattaagttctggcgaagtttctatagcatacaaaagcaaagagaaactttgtttcgaaaagtgcaactctattgagtattgagtattgacaatacaatatctccttgtcattttccaactgtcgcaacttctcaggctgtttaaaaaaatatatagaaaaaaaaaaaggaaaaaagaaacccccccaaaacgggaaaaaaaaaaaaaaaaaaaaag

SEQ ID NO: 29174 - DNA, 457 bp, Glycine max
  unsure (1)..(457): unsure at all n locations
  Clone ID: TF_LIB3242-205-Q1-J1-E11
ttctcgagcactcctntaattaaacctatcctcaagccacttttttttatacaaactcttaataanntttagagctntttttatagagagcggtggcgcaantatattcanatatttttttacattcaatcctaaccctattatttattacaaatacaccaacacttgttgcccttttagaaaacattttgataaatcatctcattatccaaaatcttttattaccacatattattggaatcacaatcatcatgttccaactacaaagaatattttccattacatttcaataccatcattttcaaattgacatacaataaatattcccgaataaatttataccatcatcctttaccttttaattgaattaacccaattttttaaaacacaccaaacagtcaaggttaaataattcttttttaaatttttggatattcaaacttaccccaacaatttc

SEQ ID NO: 29175 - DNA, 636 bp, Glycine max
  unsure (1)..(636): unsure at all n locations
  Clone ID: TF_LIB4280-035-Q1-K1-C10
ccacgcgtccggcaaatctttgaagatcatcaaaggtgaaagcatctggtgggaagcattgaaatggaatgtagcagagtggggagatgctggtcgacccaattattttgagcgaattttttcaccaattaacgaggaggctgacatgatgaaccaactagctgcacttcaagagactcaactaaatgaatatcacaatacgacatatcagggaatttcaagttctaaacagtcgatagcaaaaatattagccccagtttcatctgtgggtaggggtagttcaaacagtgaagcccaaaagcggaaagtcgttgctgagccaaaaatatttcaagaggtaacaagaaagctttataaaactatcaatgcggataaacgaagagaagtttggacagcacagatacgtgtcaatgcggaagggtgtgatgatgatggatatagctggagaaaatacgggcaaaaggaaattcttggagctaagtatccaagaattcattntcgggtgccatgccaaagagaanaggaagaggacggccaanagggtcacatgttcagaaggaggttaaagagagtgcggatggtgaattcgtcatttctcctaatattcctttgaatgtgtntgaatctgatcctgac

SEQ ID NO: 29176 - DNA, 683 bp, Glycine max
  Clone ID: TF_GmC1027_3
cgttcgcgtctttcttccctacggcaaagccgcgctatctatcttctttcctccacctaaccagatcaaccctaatcctatatatcatatcgatcttactacttctcatagcttcaatgtgaggcctcacgaatgaataaggatttgggcatttgagagagatcatatggagaatactaagatgatgggggtgaagatacaggactatgcttctaatatggagagtaataattatccattctttgatttctctgaagataagggctctttagggtttatggagctattgggtgcgcaagactatagtcctctccttgatttccctctatcgtcacacgtgtcagggcctcaaacctcttctgttaaggaaccacctgagactaagaaagagtgttccgaggtaactaataacaaccagcaacctgcgactccgaactcttcatccatttcctccgcgtccagtgaggttttctatgatgaacagaataaaactgtagatcaagcacctgaacaccaaaagacaaaggaacagttgaaggctaagaagacaaatcagaagagacagagagaaccgagattcgcgttcatgacgaaaagcgaggtggatcatctggaagatggatacagatggagaaagtacggtcaaaaagctgtgaaaaacagcccctttcccaggagctact

SEQ ID NO: 29177 - DNA, 1864 bp, Glycine max
  Clone ID: TF_GmC6804_1
gagaagacgacagaagggggcccccaccatttatatttgctctcaatcttttttaccacccacgtttttaaaacctcttcatacacacaccttctttttcttccttttctttctatatatagtgacaaagaaaattggtgttgggtttgatttcgatggagaattattccatgttgttctctgtttccaattcctcaagctacccaattggagttggaagctctcaaattggttatagtggtcaaagctccaatgcgtttcttggtctaaggcctagtaatgaattagctagtgatgatcatgagaagagacaaggtggtggtgatggcaacatgttaatgtctcagatcagtggtggtagcattaatgtgagtgatgagttaggtggttcgggaaatagtatcaataagccaaagaaaggagagaaaacaaggagccagcctagatatccttttcaaggttaccgatagagggaagttcttgatgatgggtaccgatgaagaaaatatggccaaaaagctgttaaaaacaacaaatttccaaggttagttgtttcaactttatttcatgttattgcattttttttttgtctaaaaagaggaatcaaacgcagatatcaatagtagagaatttagaataattcattcacactattcaaccagacctccagaatctaccgaactactagacctttcttgattgatttcatgctgtttgttgttgatcttgtttagttttcgcttctgctgcttctgcttcatcttgtttagtttttatcttgtggcaatggcgcctgctaagtttgacttggaaaattgatacgtgtgtaaattgtacaaagaatataacaagaccccaccatggatcttatcggtttgaattttgaattaagaatagaaaaaagcgaggttaattcttgttgagttcatactgggcaataatcaattgaaaacacttttctagctgcgcagtcttgcttcaattgttttttgttagtttaggataaatattttctaaaggggaaagaaagtatttattacttgatcttctttttttgctatttgcagcggctttcttcttcattcctattttctctagctgtcttttcttcggtcaaatcaaaagagaaaaggaatagaacaagaacgaaattaacctgtgtatgcatccctgcgtgctcgagatatatatatatatatatatatatatatatatatatatatatatatatatatatatatatatatatatatatattgtacttatacactatacactgtgcatgtataattttttgtataacaaagagagatagaaaaatcaagtctaaaggaagatgatttatgtgatgaagaaagataaaaaaataacaaaagaaaataatgccataattcatataattctaattaaaagggttcataagagacaattggatatatatgcatatgctatgttcctttaaattttatggaaaccattgttcttctgtaataaataatccagtccaaactcgaagaaactacatggtggatgaaatattcaacaaacccataaactttcgtctacatatgcagaatatctagacgatcgatgataactacttgcagtacttttgttccccctttgatacaaaaataaaactgtgtcaatagaaagtaagatctagtttattgcaaaactcttcttagacaatcttctttttttctttctttccatttgtttttttaaattggaatattattaggttatgtaaattcagctgtcaagttcagtactgctgaaaatatatacaggtgaatatcctttaacttattccttttattgtggtggttattaatacaatgttggaatacaagctagctag

SEQ ID NO: 29178 - DNA, 172 bp, Glycine max
  Clone ID: TF_LIB3093-052-Q1-K1-F6
cccacgcgtccgctaccatgcttccttgcagtacaccctctcatgcttctgcgctttttatagcccctattttaaatatagcccttgactgtcttttttccatacttcctccacgaataatcatcattatttatatttgcatgtttcttgcatatatcattcaccataattt

SEQ ID NO: 29179 - DNA, 1318 bp, Glycine max
  unsure (1)..(1318): unsure at all n locations
  Clone ID: TF_GmC5708_1
cttgccatgctgaaccactcgtccgttctatttgattcacaccttcgcactctctctatcaccaatcccttatatcccccctccacttagctgaacataattcaccacttcaccatcaatttcccctccaatttcccatttatgatccatttggcatttcatcatatttcaccacttgtcctactccacttggatgatttcctaacgtattgttttcacaaatccttgttcttcatcagctaatagtttgagtccaacgaattcagcaacactatagatatatgctatatcttcctttccctatacattttccttccaaagtatctctagttctctacaaatcaacgtggcacattttttagcctaagaaaagctttagctgcaactcaaattcaaagtgtaagcctttcttgtttttattagtttatcttcaccaatggaagagaactttaagtgtgaacaagttggtctcattgatgagctaatgcaagggaaggagctagcaaagcagctctgtgaccatcttctagtctcatcatcatcatcatcatcttctcatgaaacaaatgaagtcctaattgagaaaatactttccacctatgagaaagcacttgccatgctgaattgcaaggctgatgtaggagaaagtaaggccaagaatggcagcatgatggattcccattgtcctctcacaaatggtagccccaaaagtgaggtcttggagcctgaggttaagaacaaaaatgtctttaagaaaggctcgagccatgtcaacgtgcacagaacaagtgaaggtgtgcttgggaacggcgcatgaaggatctctggatgatggctatagttggagaaaatatggacagaaggatattctcggagctaagtttccaaggtaaaaatttgggtttttttgcctcaaatatgcataattgaagtttttttaccataagggaaaatttgcataatttggtatttgaatatgactgaaattaaagaaaggttcatctatatagcctttttgataaactattactggagttactgccaaaggccataggtaggcacccctcaaacaaaaataacaaaaaatcattggccaatggagtctaaagagggaaataaataataataacaaattttggcacgcctagctcatgttccctcgttgtaacttttatcacttttcagccaatggagtgagtgaggacaaaagtgctttttataaaaagacaagtaaaacttatctaaaggacaacgttagctagattgaattcactacaattgcagctttttataaatgcacangtgtcattaattctga

SEQ ID NO: 29180 - DNA, 875 bp, Glycine max
  Clone ID: TF_GmC5713_1
ttgataacttgatcttgttttgtgaagactgaattcaaatgggtgccaattaattcagtcttcacaaaacaagatcaagttatcaaatttttctaatgtatctcatcaccgaatgatcatttgggtgcaaaggagtttagaggaccctacaatacttgttacaacgtatgaaggagagcataaccatggtcatcaaagagctgaaatatcacttgtctcaaaccaaagtgaagcccttcctcctcttaaagggtcaagtcctgtttcctcacctaatacagcgacaattcgaagtgctgtttgccccaccgtaacgcttgatttggtcaagtcaggattggttgaatttgaaagtgcccaaaagtcctctatccagcaatttttggttcaacaaatggctacttctttgacaagggatcccaatttcacaacagaacttgccactgccatttcaggaaaaattctagaggcccaatggtgaattattaacctaggtgtaacttaattcataatatatactgaatttgtgggagatatccccaaaatacaattttagagaaatgtgataaattttaaatgtaattaaatctcggactaagagattatagttgttgttaataaaaaacacacatcattattatgaacaaattatcaattttaaaaaataatctctctcttttttaattatcagaaagattataaaaaaaattattttcttaaaataagttcaatcatgtatatactcactgcactgaggagaagggattgtattagtttgcttgcttctttttagaggggctgaagagacaaatagttggaatgtatatagaaaattaaagtgccaaaagaaaaatcagatttcctcttatgaaaaa

SEQ ID NO: 29181 - DNA, 825 bp, Glycine max
  Clone ID: TF_LIB4164-057-R1-N1-D6
gcatgcctgcagagtgatattatcttcttacgaaaaggctctactgattctaagatgcagcaatgcatcaacttccgagttgcagggcatgaatcaagcaacaccaactttgctacccgagtccccattatctgtccatggaagtcctctgcgcgaggacgttcatggggccatcaaggatcaccataattcaaagaaaaggtgaatattactgaacagacttggtagctgtttcctggcacataaacatcagctatgtctggtaactggttatactatagctcctaacttgtatttgtgtttcttttttaattgctttcagaaagataacgcccaaatggatggatcgtgtaagagtgagctgtgagagtggtcttgaaggaccacatgaagatggttacaactggagaaaatatggtcagaaagacatccttggagccaaatatcccaggtgagagaacttccctcggtcctgctttaaaaagaattacaagttttcttaaggataaaattgccttcaccttggccagcttctaattaacgactcattgtgacaatttgcagaagttactataggtgcaccttccgcagcactcagggctgttgggcaacaaagcaagtgcagagatcagatgaagatcccacaatgtttgacataacttacagaggaaatcatacctgttctcagggaaacaatgccgttctgccacccaagtcaccagaaaaacatgagaaaccagcacacagtcataacattgacattcaccatgcacaggcatcacaagaaagccttgcaaagttcagaagtatcttgtctgtcaacac

SEQ ID NO: 29182 - DNA, 909 bp, Glycine max
  Clone ID: TF_GmC1374_1
caataacatgactctttatttataatgcaggagctattatagatgcacgagtcagaagtgcggtgtaaagaaaagggtggagaggtcattccaggacccaacaattgtgatcacaacatacgaagggcaacacaaccatcactgtccagcaactctgaggggcagtgctgcaagcatgttgtcatcaccttccttttttggttcctcttatatggcgtcaagcttaccccaagattttcttgctcagttggttccaagttatagccaaattaatgatcaccaaagtccaatgtttcaccaaaacctttcccataatctccatccacagcctcaacagcagcaccagttccaactctctcatgaccatggtttgttgcaagacctactaccatcattccctggcaaacacgagccatgaactcactaaaaacctagtgcatgttttgatttatttattttaggaaaaataatggttttatatttcatcactactagaaaaattaaaattagtaacggaataatctatgtaggttttttaaaaaatccgttactaaaatttggtgatctgatctcaaattaattagtgaaggaaaattaattttctatcactaattttgatcaccaatttattgatttttagaagtatttctaggagtttttaaaagaaaaaacaattgctttttcaagataaaccagaatcaaacatgcacttaacccatttctattagcgtatggtggagcttgcagtgtattgcacactgtctatatataagtatgtgtagtaattaagtagtagtagattccctcttggttaattacctcctctctttaagtcacatgtatgtacctagatttgtatggaaatgaaaaacattgattattcttaaatgagtatttagaattacttca

SEQ ID NO: 29183 - DNA, 1586 bp, Glycine max
  unsure (1)..(1586): unsure at all n locations
  Clone ID: TF_GmC38338_1
gtatctctctttcctcgcaaaaccccacccctttccttcttttctctctctaatccaaagccaaaccaaaatttccaagaaaaaaaaatatataacaagttattaacaatcctaacacactacagaaacagatccttacagccaccaagtagagaccgaataacaatgagtattctcttcccaagaagttcctcagcagcaaagaggaaaagggtcattagagaacttgttcagggtcgagactatgctactcagttgaagtttctgcttcagaagcctattggccctgatgggtctgtttctgctaaggaacttgtggccaatgtgctgagatctttcgctgaaactctctctgtgttgacttcttcttccgaggattcaacaagtggtcatgatcatgaacgaggttgctcagaatcttgtaatttccggagaagatgcctcgcaggtggaaagcattgatccgaggtctgagggttcaactgagagtaagaagggatcaaaggatcggagagggtcctataaaagaaggaagactgaacagacatggaccatagttgcccaaactactgatgataatcatgcatggagaaagtacggacaaaaggaaatcctaaattctcaatttcccaggagttacttcaggtgcactaggaagtttgaacaaggttgccgagcaaccaaacaagtgcaacggatacaagagaatcctgatatgtacaccattacgtacattggctttcacacatgcaaagacaccctcaaggctccacaaatggtgacacattctgaaacttgggactcatttcttggtcctgacgcaaatgtgccaaatgaacattattccatcattggatcacaaagccaaattgtaatacaagaatatcccaacgatgagactgatccaagtgatctcacagatgctaacctgtggtctgatttgaaggattttgaactatccaatgacaagcctgcaggtttgaaaatagcacctgaaaatgcagattctgtgtattcatgcactggctcgagaagtttggacatggattttgggatattctctcctcatttctgcagcaccgaggacttccactttgatgaaagccaattgctttagttaccctttcgtaatctttaaccatgtaatgtattttgatcagattgaatatttttagattttgatttttccaagtttcatgtgtacaccatggagtgaataacaatttgatgatcattcacacatgcatgtcaccaagtcaatctaattaatgtaatgtatgttaatgtctgtctgaaatgtgctttgaaaagattgattcgataacatagaccaagtcaactatatgtataggtgctacatataatatatataccatatgtgtgcttatatagcttccttttctttttgtctccttgtaaggcagtgtcatgcatgaacctatgaacccacagtgtgattattataaagggttatgggacatgtactttggttctaattagccaagtaattaagtgtaatatatgttgatttaatcaattaaaataaaagtttggatttgatannnaaaaaaaaaaaaaaaaaaaaa

SEQ ID NO: 29184 - DNA, 758 bp, Glycine max
  unsure (1)..(758): unsure at all n locations
  Clone ID: TF_GmC143554_1
gttacagctggagaaaatatggacaaaaagatatccttagtgcaaaatatcccagaagctattataggtgcaccttccgcaaaacaaaggggtgctttgccacaaagcaagtgcagagatcagaagaagaccacactatctttgacataacttaccgaggaagtcacacatgtaagcgaaacgatgccgttctgccgcctaagtcaccagattatacgcatgccgcaccagtgactgtcaaaacggataacataacggcaccttccgcttcgtttggatgcatggcgcaagataactaccacgacttatttccttctctggccgattcggctcgagcattttttagcaccccttcccaaacatcctcgttatctgcaaacacacctgaatcaaattattttgtgtctccgactttcctcgaacatgaattcgatggggtctgtaacaagccctgccctgattctgaacttgcccggctggtttcagctgatacatcaatcaccagttctccaattttcgactttaatttctcgctcgatgcagtgggaattgattatccaaatttccccttcaatatatgaaaatatggttagcatttgcagaaattgcacttgagaatgaatttcatactattttgtagaaagtatggttagcatttgaagatgatgtataacactccagacagcactaataaatgcccctgtagttcattctgaataaccacgttacttaagggnngtttaatcannttaaataac

SEQ ID NO: 29185 - DNA, 673 bp, Glycine max
  unsure (1)..(673): unsure at all n locations
  Clone ID: TF_GmC80686_2
ctcttcccttgtccttcttcctactatactatattttctctctctaatcaatcatagttctgatcttcatacacttaccccggaaacctccatttctcagatcaagcttgcacgaagacattaaaaaatagaaatacatacatagctatggacaataatacttgtgcctcctcccaacttgagtcagaagaagcatcttttgagcacaaatcagaaactcaaacatcaaagaaaaggaaaatggttgagaaaacagttgtggcagtgaggacaggagagaatgttggcaagctgaagaatgaagggctaccttcggatttttggtcttggaggaaatatggacaaaaaccgatcaaagggtctccatatccaaggggctattacaagtgcagcacatccaaaggttgttccgccaaaaagcaagtagagagatgccgaactgatgcttcaatgctcataatcacatatacctctacacataaccatccatgccccactgccatcaccacaaattcaccccaacaaccaanagaattatccgaatccgaaaccaccccagacctctcagctaccacaaaggaggaagacccaagactatagaactagaagaagagcanaggggataatatagcccagtgatgaagttacaatgaagaaaatntcattacttgca

SEQ ID NO: 29186 - DNA, 1032 bp, Glycine max
  Clone ID: TF_GmC6804_2
cccttatattggccacgttaacattaagcgtcgcccccaccatttatatttgctctcaatcttttttaccacttccatttttcttttccaaaacctcttcatacacacaccttctttttcttttttctttctatatatagtaacaaacaaaattggagtagggtttgatttcgatggagaattattctatgttgttccctatttccaattcctcgagctacccaatttcaacgagtggtgttggaagctctcaaatcggctataatggtcaaagctccaatgcgtttcttggtctaaggcctagtaatgaattattaggtagtgatgatcatgacaacggaggcgaaggtggtggtgatggagatggcaacatgttaatgtctcagataagtggtggtagtaatactaatgtgagtgatgagttaggtggttccggaaatagtaacaataaaaagaaaggagagaagaaggttaaaaagcctagatatgcttttcaaactaggagccaggttgatattcttgatgatggttatcgatggaggaagtatggccaaaaagctgttaaaaacaacaaatttccaaggagctactacaggtgcacgcatcaagggtgcaatgtgaagaagcaagtgcaacggctaaccaaagacgaaggggtagtggtgaccacttatgagggagtgcacacacacccaattgaaaagacaacagataactttgagcacattttgagtcagatgaaaatatacactcccttttaaaccttcttctccacaaacagtgtacctcaattgggaactacttgtagtacttttgttcccccctttgatacaaaaataaaactgtgtcaatagaagtaattaagatctagtttattgcataaactcttcttagacaatcttctttctttctttccatttgttttttttaaaaaaaaattggattattattaggttatgtaaattcagctgtcaagttcagtactgctgagaatatatacaggtgaatatcctttaacttattattcctttt

SEQ ID NO: 29187 - DNA, 734 bp, Glycine max
  unsure (1)..(734): unsure at all n locations
  Clone ID: TF_GmC89194_1
gaaaaatatagacttagcgaggacttatattggtggtgtgtacagtgcagaaatttcgtccataaacgctgcagactacacccactatatagttatgcttcaaaagtttggtgtcactctgggaaaaccaactgagttgtagtaacaagcttaaaggctacataaatggaagataaagctgcgataaaagaattgctggaagacgaggaaaacccatatgataatactggaaacaaacaagatgcggagaaattaccaatgctacacacccggcagtttttgaatatgggcgagtcttcatcaattttagacggcaacacaaaagcatgtgcaatagcagaaaacgctgaaaagaaaatgttaggcaaaaaccttgcatgtgatgataataagtacaatgttgaaggtgaaatcaacagtcaaataacatcgcatgaagcaaaaagcacagaagatcaagtatctgaggttacttgcaggagagctagagtgtccataagagcaagatcagatttttcttcgatgtttgatgggtgtcaatggagaaagtacggacaaaagacagcgaaaggcaacccttgtcctcgagcctactaccgttgtagcatgggaactgcatgtccggttcgtaagcaggtgcaaaggtgtttcaaggatgagactgttctcatcacaacctatgaagggaaccacaaccatccnctcccaccagcagcaagacctttggcaagctc

SEQ ID NO: 29188 - DNA, 2433 bp, Glycine max
  Clone ID: TF_GmC1123_1
ggctcgaggctatcccttatggacaaaggatgggtttcctctcaatctcttcttcctcccacacccgacaatactatgtttcctctcctcggattccccgtcaaactcagccgccccaccatggaactccaccatgataaccgcaaacttgtcgctgaagtcgacttcttctctcatactccgccacccaacatcgtcaagaaggaacttgatcaaacacctcttcacattaatactggtttacaactccttactgctaacaccaggagtgaccaatctaccgtggatgacgggctttcatcggatgcagaagataagcgagccaaaaccaccgagcttgcacagttgcaagtggagcttcaacgcatgaacgctgagaacaagaagctgaaagagatgctcagccatgtcaccggtaactacaccgccttgcagatgcatcttgtgacactaatgcaacagaaccagcagcgaacagaaagcacggaaaatggggttgctcagggaaaggtagaggataaaaacgttggtgttggtggagggaaggtaccaagacagttccttgatataggtcccagtggcacagcagaagtagatgatcaagtttcggattcttcttctgatgaaagaacacgatcgagcacacctcaggacaataacactgaagctggaacaagagatggagcgagaaataacaatggtaataaagcgagttgggtagggaagagagtccagactcagaatcacaaggttggggtcccaataagcttcagaaagtgaacccttccaatcctatggatcaatccactgcagaagccacaatgagaaaagctcgtgtctcagttcgtgcccgctcgaagcaccgcggcacataattaataataattagtatctattcaagtatcaacaatataagcaatatattgctgtggctaaagctcgatattaatttcgtggtattgttaatataggttcaacgttgtgctgatgatagaaccattttggttacaacatatgaaggcacgcataaccatccactgccacctgctgctatggccatggcatcaaccactacagctgctgctagcatgttgctttctggatcaatgtccagtgcagatggaataatgaacccaaatttgctagctagagcaattcttccttgctctacaagcatggcaacactctcagcttcagcaccattccccactgtgactttggaccatcacacacaacccataacccaattgcaatttcaaaaggcctggtgcccccattcccaagtacccttccttcaagcacagcctaagaactttgggtcaggagccgccccaattgcacaagcacaagcactttataatcaatcaaaattctctggtcttcatgttgtctcaggatgtaggatcttctcaattagcaccacaagctcctagaccacccttacaaccaagccaacagccctcacttgctgacacagtcagcgccgccgcctccgccatcaccgccgatccaaacttcaccgccgtgctcgccgccgccatcctcctccatcataggcagtgctcataattcaaacaacaacaacagcaacaacaacacaagccggactaccattagcagcttttcaggaaactgaacattttctttttgggttcaattttttggttaatattgttattattccttaaactttttatttttgtacatgggtactataagggaaaatgaaaccataaatgttcatattctttttagtccatgtcttgggagggatatatatgatatattagatcagaaaaaaatgcttttttgtatcaactttctctttgaataattaataatgttttatatttgatgcagaaaatacaccaaggagtaagtcaacaaatgaagacacacataaccatccactgccacctgctgctatggccatggcatcaaccactgcagctgctgctaccatgttgctgtctggatcaatgtccagtgcagatggagtaatgaaccccaatttgctagccagagcaattcttccttgctctacaagcatggcaacactttcagcttcagcaccattccccactgtgactttggacctcacacacaacccaaacccattgcaatttcaaaggcctggtgccccattccaagtacccttcctccaagcacagcctcagaattttgggtccggagccaccccaattgcacaagcactttataatcaatcaaaattctctggtcttcagttgtctcaggatgtaggatcttctcaattagcaccacaagctcccagaccacccttgcagccaagccaacatccctcactggctgacacggtcagcgccgccgcctctgccatcacttccgatccaaacttcaccgccgtgctcgctgccgccatctcctccatcattgggggagctcacaattcaa

SEQ ID NO: 29189 - DNA, 181 bp, Glycine max
  Clone ID: TF_5761350
tgataatcatgtatggaggaagtatggacaaaagggagttctgaattctgaatttcctaggagttacttcaggtgtggtcataagtatgatcaaggttgccttgcaaaaaaacaggtgcagcgggatcaagagaattcaaatatgtaccgaactacctacattggaattcacacatgcaat

SEQ ID NO: 29190 - DNA, 1898 bp, Glycine max
  unsure (1)..(1898): unsure at all n locations
  Clone ID: TF_GmC943_2
ggctcgagcttaggatttgacgtagaagagagcaggagtgaggctaagaaacccatttgaaatttgaaatctcgttctggctaattccatgttcattgtttactatacctcaccactccaagggtctcataaatttcttctgcttccaactctgctgcagaaaaagaaactgttggttctagatacaagtgggtttccagagtagaagtgaggctattgggcatgagataaacagcaagcaccatcatctacgacccttttgactatattataagcaacacaaaaatggagagtgacttgagctgggagcagaacacgctcataaatgagctaattcaggggatggaggtagcaaggaagttgaaagcagacttgaagatgccgtattcagttgactcaagagatttgcttgtgcagaggatattatcttcttctcgagccgcgctagccgaatcggctcgcactcgcccaatttgctcctttagcctcactcctgctctcttctacgtcaaatcctaagaaacccatttgaaatttgaaatctcgttctggctaattccatgttcattgtttactatacctcaccactccaagggtctcataaatttcttctgcttccaactctgctgcagaaaaagaaactgttggttctagatacaagtgggtttccagagtagaagtgaggctattgggcatgagataaacagcaagcaccatcatctacgacccttttgactatattataagcaacacaaaaatggagagtgacttgagctgggagcagaacacgctcataaatgagctaattcaggggatggaggtagcaaggaagttgaaggcagacttgaggatgccgtattcagttgactcaagagatttgcttgtgcagaggatattatcttcttatgaaaaggctctactgattctaagatgcaatgcatcatcaacttccgagttgcaggccatgagtcaagcaacaccaactttgctacccgagtccccattatctgtccatggaagtcctctgcgcgaggacgttgatgggaccatcaaggatcaccaagaagttaaacatgattcaaagaaaagaaaggcaacgcccaaatggatggatcatgtaagagtgagctgtgaaagtggtcttgaaggaccacatgaagatagctacaactggagaaaatatggtcagaaagacatccttggagccaaatatcccagaagttactataggtgcaccttccgcaacactcagggctgttgggcaacaaagcaagtgcagagatcagatgaagatcccacagtatttgacataacttacagaggcaagcatacctgttctcagggaaacaatgccgttctgccacctaagtcaccagaaaaacaagaaaaaccaacacacagtcataacattgatattcaccgtgcacaggcatctcaagaaagccttacaaagttcagaaacatcttgtctgtcaacacagataatctgaacaatggagatatggcatatcctttcactttcccttcaacttcatttggatgcatgaaacaagacaaccacagcttgattccttgggccctggagaacgagtccttcttaagcgacctataccaaacacaccttttatccacaacaataccagaatcaaactatttcccatctccaactttccagatgaatgtgtttgatgggatctacagcaagccacattcggaatccgatatcaatgagatcatttccaccaacacatcagcaaccaattctccaattcctgatttcaatttctcacttgatccagtggaaattgacccaaatttccctttcaataccccaggacttttctcctgattgcatttcactataaatgggatactantagcacatagtcttcctaaaa

SEQ ID NO: 29191 - DNA, 808 bp, Glycine max
  Clone ID: TF_GmC1687_1
gttggatgatggctacaagtggaggaagtacggacagaaagtggtaaagaacacacagcacccaagaagctactaccgttgcacccaagataactgtcgagtaaagaaacgcgtggagcgcttggcagaggatccaaggatggtgataaccacatatgaagggagacacgtgcactcgccatcaaatgaacttgaagactcgcaaaccccttttgaacttagtaatttcctgtggtagtagcatacaccatcataatgtttacatatatgtatattttaatatatcgtagagactagagatgaagaccgaataagtagagaggaatgagtaaaaattgccagtgtatcaaggaaatggtgcatgcatgctttggttcattgtcaattttcactcgtttccatctaatattcctcccattttcaccctttccaaaagcacaacatatatatgtggttgtgttttttagttttcaagcgtctagatcaacatttcagaagtgtacttaacagtcttggtggtgtttcataaaaactcaacagcaaattaaccagtaatatttgtaagttgcaaactgggttcaagcttttaattatttttttgcgcaccttggaaatgatgcatgcatgctttgtttggttcattgtcaattttcactcgtttccatccattcctcccattttcaccctttccaagagcacaataaatatacatatacagttgtgctttttttgcttctgtctgggtgtacggattaaaactaattaagaaactagtggcatttgtacgttgccctagttttatatattg

SEQ ID NO: 29192 - DNA, 1594 bp, Glycine max
  Clone ID: TF_GmC37350_1
ctcaccctcacccagacaaaaaccctaactttctctctcctctctcattctcactctctcacctcaatctctccgcgttttctcttcaaattctccagaattcgattcaaatttccttcaacacaattaacacagatcgcgttcttgttcgcacttcaaaattcgcgcgcgcacttcatgaatggaagacaaagacagagcagcctcctccgatccaaccgcagatgctgagttcgccggcgacacgagttggacactcgccgccgatgactccgacggcgcatacctgttccccggcgacagagagcggagcatactcagggaattcgtgtggaacctcgaaccggaccagccgaaccggatcggcaccgacgacggattgtggaagccggttcagtcctctctgaccgattcgattgaaccggtcgccgccgtgccgtcgcggtcgaacaaccaatcgatttcttccagctccagcgaggatccaccggagaaatccaccgtctccgacgataaaccgcttgagataccgagtaaacgtaaaaacaaggggcaaaagcgaatacggcagccacggtttgcatttatgaccaagacgtgaagttgatcatcttgaggatggctgcagatggcggaagtatggtcagaaggcagttaaaaatagtcctttccctaggagctactaccggtgcacaaacagcaaatgcacggtgaagaagagggttgaacggtcttccgaggacccaacaattgtgattaccacatatgaagggcaacactgtcatcacacagttggatttcctcgagggggaatcattagtcatgaagctgcatttgcgggccagttggctccaacaatgtcacagttttattatccgattcaattacccagcagagagaatgatgattataataataatactttgagcactatttctcagccatgccaagcacaggatgaaactggagaaggatcaagtgttatgatgccagctgatggatcgtcaccgtcacagccttccacggatgaagggttgcttggagatattgtacccccgggaatgcgcatcagatgagagaattatttgatgctgatgatcatgtggaagtggagcagagaaaatgcatgggcatgcatgcatctttattttctgcatactctgagcgagtaggccacaagtggcagcatttttttttcttttagcagcaagtcccttttagccatctattgtctcgagaagcgaatctagtattcatgcatgggtaccatactacttggtagcaggtaattatctaccttgaccttgagcagttgagctaagtgttatatatatcattcatttagtgatatatagttatatattatgtatgtatgtatgtatatagtttatattattttataagcgatagccaccgtgcataattaatgtatatttaacgcggtttagatttgccaaattctccttaagactgtacaatttgtatcaaacctaaactcctagaacactttcatgcatgttcattatttataatctatgtagaaatacataacttttgttttattttatatccagatttgacaaattttattttc

SEQ ID NO: 29193 - DNA, 1424 bp, Glycine max
  Clone ID: TF_GmC623_1
cccatataggctcgaggttttttaaactttcttaacgcaacaaacacatagccacatcttctctttctcttcccatggcattctgactcatacccaaattattgattgtttgtctatcgaatcagtgagaaaatggcagtggagctgatggggttcccccaaatggacgaacagaaggcaattgaagaagcagccgccgaaggcctcaagggcatggaacacctcctccgtctcctctcccatcaaccttcccacctccgcactcaccacaccgacgccaccgtttccaacttcaaaaaactcatctcccttctcaaccgccgcaccggccatgcccgtttccgccgcgcacccctcccttccacttccaactctctcgccccatcccctccactggctaacccggtcaccttcgccccttcgcagtcacagagtctaaccctcgatttctcaaaacctaacatgttcaacaccaccaacgccaaatccatggacctcgagttctctaaagaaaccttcagcgtctcctccaactcctccttcatgtcctccgctatcaccggcgacggtagcgtctccaatggcaaactaggatcctccctcttcctcactcctccgccagtctccgccggaaaacctcctctctcgtttgctccgatcaagaagaggtgccacgaccaccgcgagcactccgacgacatctccgggaaactctccggctccagcaagtgccactgcaccaagagaaggaagaatcgagtgaagaaaacggtaagagttccggtgatcagttcgaagatcgccgatattccgccggacgagtactcgtggaggaagtacgggcagaagccgatcaagggatcgccgtacccgagggggtattacaagtgcagtagcgttagagggtgtccggcgaggaaacacgtggagcgtgctccggacgatccgacgatgttgattgtgacatatgaaggggagcaccggcactcgatgcaggagaacatttccgggggagtgggtttgggattcgagtcaacgtgagggtggttgcaatgtaaatctgacattattaaaagaaaagattatattacaggggaatcttaatcttctcccaccaaagtcttcttattcaactttttgaaagtagtttggagccaagtgtgaattagaagggtagtttgtttagtgggaatggtaaaaggtcccaatccaagttgatgcctcggaatgggaaaaatggaatgacgtttaaactccattctcttcccttctttgcgatccacttaattgcgcacacaagcgtttcatttcgtcaagttaatatcttgcaaatcaaattttaaaactagtttcagttcttttttggtaaacccgagtagtaagtctaattaaaaatgtctaagggacatggttttttatccatt

SEQ ID NO: 29194 - DNA, 1317 bp, Glycine max
  unsure (1)..(1317): unsure at all n locations
  Clone ID: TF_GmC42427_2
ggccgggcccgggccatcctcaaaaaaaaaacaaaaaaaacaagacaccaaccaaagtttcagtttctctctattctaacgttgttgaatggcagtagatctggcaaatattaggatggaagagaatatggcgattcaagaagcagcttccgctgggttgaagagtatggagcatctgattcgcgtcctttcttctcaaatcccttctgcttcgtcttcttcttctaacgcacaccaccaccgtcttaatctcaaccaccttgactgcgcggaaatcaccgacttcactgtctccaagttcaaacaagtcatcaacttgttgaatcgcaccggccacgctcgctttcgtcgcgcaccttctcatccttctccttcaatttctccctctcaacctcaacctcagccacaaccacaaccacagacgctgactcttgattttgcaaaacctgttatggtaaagtcaaatcccaaccctaacccttcttctaccgatttgtcggtttctcaatattctaagaccaaggacacaaccacctttagtatatcccctcccatgtccaccaccacttcttccttcctgtcatccatcaccgccgacggcagcgtctctgacggcaagatcggccccgncatcctcgccggcggnaagnctcctctcntctcatcccaccggaaaaagtggtacgacgccactctctccgncggggaaagctcttcctccgctcactgccattgctccaagagaaggaaatctcgtgtgaaacgaatgatacgtgtgccggcgataagttcgaagattgccgatatcccagcggacgagtactcgtggagaaagtatggtcaaaaaccaatcaagggatcaccttacccacgagggtattataagtgcagtagcgtgagagggtgtccggcgaggaagcacgtggagcgagcccaggatgaccccaacatgctcatcgttacctacgagggagagcaccgtcatccgcaaccgcgtctgccggaaacttctgccggcgccgccgcggattttgtctctcagcctgtttaagcgagggaggagatcggcaaagcatggcaccgacagagatgagtgattttgcaattaacggggggaaagaaaaagaagggaacttcttgcaagcgagggaaagaaaagaaaaagaagccaagtcaacttttgctttgttgtggaccaaaagagtcgtctactggatggataaggacttttatgtaaatttgacaaaaaattatgaaatactatacttagacatgtttttttgttcttatttaatagacattcattcactctcgacc

SEQ ID NO: 29195 - DNA, 610 bp, Glycine max
  Clone ID: TF_GmC652_3
atccagcccctttgcatagttctgttgcagaggcctagaatcattgtgccaccaccaagtgaagtgaatctcttagatgatggatatcgatggcgcaaatatgggcagaaagttgtcaaaggcaacccatatccaaggagctattacaaatgcacgacccaaggttgcaaagttcggaagcatgttgagagggcttcaatggatcctaaagctgtcataacaacatacgaaggaaaacccaatcatgatgtgcctgcagctaagactaatagccacacacttgccaacaatagtgcatcccagctaaaagcacaaaagtttgccatacccgacgtgaaacatagttccagcagcaggggtgttactggcaatgagcagcgacctgtggcaagtctaagattgaaggaagagcagatcacatagctttcttagttcataactttaggcgtaaatagccaaattcgtctttgaaagtgtgatgggttgacaaattagtccttaaaagatgaaaattttaaatttaattcttgaatgtacaaaaaaaagtgtgataaattaatgcgccaaaaaaaaaaaaaaaaaaaaaaaaaaaagcggccgctctagagga

SEQ ID NO: 29196 - DNA, 846 bp, Glycine max
  Clone ID: TF_GmC581_2
aggattagtagagccccggattgtgatgcaaagttttatggattctgaaatacttggagatggctttcgctggaggaaatatgggcagaaggtggtgaagggcaatccatatcccagaagttactatagatgtactaatatcaaatgtaacgttcgcaaacatgtggagagagccatagatgacccaagatcgtttgtgactacatatgagggaaagcacaatcatgagatgccactcaagaacacaggaactgtagcatctgaaagagattcacaggcttctcttagtaaagataaagcatgattgacacttcaattagttagcaagtatgattcaatttcaatggcattggctgtcatcagaaataattcagaggatccattccttttatatcctaaagtatgctcagaataattgaagttgatcagaaagatcaagacattgacaatttcgaatgcagtacctagctactgagactaggatatttacttctacaacaacttgttgataataacagtattggtgctgataatttgtattatatatggaatcaagggcactggctcagtggcactgcccttcaataactttccatctctgctagctgcctttgtataccaaaccggtatattctattgtctatcatcatatataaattaatctggagtacataatatcatatgctaataatttttgttgtaaatcactggcatcgccagaaagaaccccaaaagacctttataaactattagctatggacataattttgtttcttaatgtaatttaatctgatttagtttgtactttcttgttcaatacgttatgatcagcgagcaacgagccat

SEQ ID NO: 29197 - DNA, 940 bp, Glycine max
  Clone ID: TF_GmC193_1
attactaatttgaggatagtgaagagaaagaaagaatggatgatagaaaggtatcggaggagcttgtgagagggcttgagtttgctaatcaacttcgacaagtgatgattaatggaaaagataatgagtcatcagcaacaacgacaaccccatttgttcaaagtcttgtcaagaacgtgttcagatccttcaccaacacccttttcctcttggacaagtatccctcttacgaggtttctcacactactaaatctgaggactctcaagaaagttgcaagggtttcaccactaggaacaaaagaggctactagtatatatgaagaagaaatacgcaagaatgggaggaggtgtcgaaaactccaaaagtagatggccaccaatggagaaagtatggccaaaaagagatcctgaaagccaaatactcaaggaactactacaggtgcactcacaagtatgatcagaattgtcaagcaacaaaacaagtgcaaagaattcaagaggatcctccattgtataagaccacctatttgagccaccacacatgcaatgacttgctaaactatgaaatcatacctgattccaataataattctccttcggacacttccatattgcttagctttaacaacacctttcctactccaaccaaacaagagtgcccctttttatcatcttttccctcaccaacatcagtgaagaaattagaggaggtgattccggcctcatcttcaaggcataataataatgtcactctgccactgcctgatccctgggatgttatgtctaattctgccatgtgtgattctgttggccttgatgatgtcaacctttttttggattttgatgactaattgggtctgcaaatttaaatttgtttttcaatttgataggagtgctcgatagctagctatttataaaaattttaaattaagtcaattaa

SEQ ID NO: 29198 - DNA, 566 bp, Glycine max
  Clone ID: TF_uC-gmflLIB3275P057f01b1
gccacgcttacgaccgactttttcgcatcagcgtacagatgctaacaagcgctcagaagacaccatgactacaaaggcagagccaaatatacaagggagtgtaaattcaacttatcaagggacaactgcaaactcgatgtctaagatggatccagagtcaagtcaggcaacagctgatcatctatcaggaacaagtgaaagcgaggaagtaggcgatcatgaaaccgaagtggatgagaaaaatgatgagcctgaccccaagacgagagctgttataattctgcacaaaagcagaagtctcgcacacagatccagcttgttcacataggactgtcactgagcctagaatcattgcgcatacaacaagtgaagatgatctcttggatgatgggtatagacggcgcaaatctgggcagacagttgtcaaaggcaacccttatactaggagctattacaagcgttcagccaagggttgcaaggagcggaagcacgtggagagggctcctacagactctagagctgtcataacaacatacgatggaaaacacactgatgaagcgctagca

SEQ ID NO: 29199 - DNA, 637 bp, Glycine max
  Clone ID: TF_GmC6090_3
aagtatggccagaaagtggtgaagggaacccttcatccaaggagttattacaaatgcactagtgctggatgcaacgtgcgtaagcatgttgagagagcttcgacggaccccaaagctgtcataaccacgtatgagggtaaacataatcatgatgtacctgctgctagaaacagcagccccaacacagctagtagcaattcaatgccattaaaaccgcataatgtcgtgccagagaagcatcctttgcttaaagataaggattttggaggtaatgaccaaagacctgtacatttgcgcttaaaagaagagcaaattatagtataaaattctggtgccacgctcacttattccacgtccaagtacagaatgaagagaatgaagttgcctagaagatgaaatggatatgaaggtgtagtcactactcatagttggcaatgtctattgttttctagtttttgtatgtaacaccttttgtacatctaaattatggaattggttgtataagatgttgtttacaggtatgaatatcatttcaactaatgtacgaacattactattatataatttataaaataatccttgtaagttgcaaaaaaaaaaaaaaaaaaaaaaaaaaaaaagcggccgctctagagga

SEQ ID NO: 29200 - DNA, 273 bp, Glycine max
  Clone ID: TF_LIB3242-509-P1-J1-A7
cgaacactgattgcccttttagaaaactttttgagagggcatctcatgatccaagtgctttttttacaagatatgggcgcaaacacaatcatgatgttccaactgcaaggaataattgccattacattgcaacaccagcgtgtgcaagtcaacatacaagaaataggcccgaaaaaagagataccatcagccttaaccttgggattggattcagcccacctactaataacacaccaaacattcaatgtagaactactccttctcaacctgaat

SEQ ID NO: 29201 - DNA, 769 bp, Glycine max
  unsure (1)..(769): unsure at all n locations
  Clone ID: TF_GmC1278_2
gttcaaaccggatggagttttccagaaactgctaaacaggatggttttgcttcaagaataagtatgagcatggtgaaaactgaaaccacttctgccatgcagagtttgacccctgagaataataaccacaggaatggttttcaatcagatcataaaaactaccaaccacaacaagttcagaccttgagcagaagatcagatgatgggtacaattggaggaaatatgggcaaaagcaagtgaaaggaagtgaaaatccaagaagctactacaagtgcacataccccaattgtccaacaaagaaaaaagttgagaaatccttagatggacaaattaccgagatagtttacaaaggcactcataaccatcccaagcctcaagctgccaagaggaactcattgtctgcctcatcatcacttgcaattcctcattcaaatcatggcagcaatgaactaccacatcatcaaatggattcggttgccactcctgaaaattcatcaatttcaatggatgatgatgattttgatcatactaaatcaggaggagatgagtttgataatgatgaacctgatgccaaaagatggagaatagaaggtgaaaatganggtatatcagctgtaggaagtagaacagtgagagacccagagttgtggttcagacaaccagtgacatcgatattctagatgatggatacaggntggaggaaatatggacagaaaagtggtcaggggaaatccaaatccaaggagttactacaagtgcacattccca

SEQ ID NO: 29202 - DNA, 934 bp, Glycine max
  Clone ID: TF_GmC1308_1
aatccccactctctcacgttaataatgttgttatccgttttcgctgttacgaaccacctttactttattataaccctttgactgttgactacatcactcagcgcatgttagcaacagcggcgcatcgtactgttttaaattttattttgttttttcaggaagaatcgtgtgaagaaaacggttagagttccggcgattagttcgaaggtcgccgatattccgccggatgagtactcgtggaggaagtacggacagaagccgatcaagggatcaccgtacccgaggtgagtggtttgtggccgttgatttggtgttggctttggtcaaaggtgtgttaactgacgttgatttgttttgtgttctcagggggtattacaagtgcagtaccgtgagagggtgcccggcgaggaaacacgtggagcgtgcttcggacgatccgacgatgttgattgtaacgtacgagggggagcaccgacactcgattcagaccgcgatgcaggagaacatttccgggggagtgggtttggtattcgagtcaacgtgagtgtggaattaaagaaaggggaactgttggggggctttttttttgtagtaggaaaaaaaaaagaggtgaataggaaaattgaattaaggtggtggttgcaatgtaaatctgaccttattgaaagaaaatattattgtgctgttattatattattacagggtatcttaatcttctcccacaaaagtcttcttacctgattattttattcaagattttgaaagtagtttgggtcattgatgatgaaattttgtgattggagccaagtgtgatatagggtcgcgcaattagaaatggtaggtagtttgttttgtatagtgggaatggtaaagggtccctatccaagttgatgcctcgtaatggaaaaaatgaaatgacgtttcaactcaaaaa

SEQ ID NO: 29203 - DNA, 520 bp, Glycine max
  Clone ID: TF_GmC5674_3
aattcggctcgagacggctgcgagaagacgacagaagggctggtaaatgatgggtatcgctggcgcaaatatgggcagaagctagttaaagggaatacaaacccaagaagttattatcgatgctcgaatcctggatgccctgtcaaaaagcatgtggaaagggcctcttatgattcaaaaactgtaataactacctatgagggacagcatgatcatgaaattccccctggaaggactgtcactcagaatgcagctacaaatactcgcacaacggccactaatggcaaggcaggaaccaaatctgagggtaatactgatgatacaggggagcgaagcggcttgggcttaacaagtagattaacagagcaacaaactggcaagtcgactactaagtcaaaggctggtgatatggttgagtttcgtgtgatcaggctttctaatgagggtcctgaaattaaattaagtgagcaacaacaacaaaaggataactcagctactaaagatgattctgtcagcaatg

SEQ ID NO: 29204 - DNA, 2218 bp, Glycine max
  Clone ID: TF_GmC652_1
ttttgtgtgtgtcagagaggaaaaaaaatgaaaacatagcatttggttgggcaacttaagtcgtggactttttgccagtttttcttcaatcagatccaccaaacccatcacacaaaatcacgtaagattgtacctcccaactcaaaagcttcaaactttttccagtttccaaattaattaagacacagagagaaaaaccacaaaaaagctgcaaaattttcttcttttgtcacttttttttctgttttttcatcacaaaagtttgaaccttttctttccttccattgaatttggatggctggcggcggaggtggggaccggccgccgtggaaggaggcggcgccgccacgacccaccatcactctgccgccgcggtcgggttccatggagtcccttttcaatggaggattcagccctggtcccatgactctgctttctggctttttgggtgatggggatgatggaaagtccttctctcagctcctcgctggagctatgtcttctccggtggccggagctgtcgccgccggcgtgatggactcacctggtctcttttcatcttctcaggtgtcttttggaatgacacaccagcaggccctagcacaggtctcagctcaggcttcacaagccaactccaatatgcatatccaagccgaacattcattgacacaggctcctgcagctgcttccaatacaactcaacagctgatgccacctctaacttctgactcttgggctgcaatgactgaatccattgatcattctcactcagaacaaagattgcaatcatcattgttgaatgttgataagcctgcagatgatggctacaactggaggaagtatgggcagaaacaggtcaagggtagtgagtttcctcgaagttattacaagtgcacgaatccaaactgtcctgtcaagaaaaaggtcgagcgctcgcttgagggtcatgtaactgcaattatttataaaggagaacacaaccatcaatgtcctcatcctaacaagtgctcaaaagacaccatgacttcaaatgaaaattcaaatatgcaagggaatgtagattcaacgtatcaagggacgagtacaaactcaatgtctaagatggatccagagtcaagtcaggcaacagctgatcgtctatcaggaacaagtgacagcgaggaagtagccgatcatgaaactgaagtggatgagaaaaatgttgagcctgagcccaagaggagaaaagcagaagtctccagtcagatccagcttcttcacataggactgtcactgagcctcgaatcattgtgcaaacaacaagtgaagttgatctcttggatgatgggtatagatggcgaaaatatgggcagaaagttgtcaaaggcaacccttatcctaggagctattacaaatgtacaacgcaaggttgcaatgtgcggaagcacgtggagaggacatatgaaggaaaacacaatcatgatgtgccagcagctaagactaacagccacactatggccagcaatactgcatcacagttaaaatcacataacaccaatcccgagaagcataattttggcagcagaggtatgggaggaaatgaacaacagccggtcgcacggcttcagttgaaggaagagcagatcacctagttttctggaagaaacatcttagtgaggaagaatttttctcacctcacaagtcatctttatttagatgctatcgcattcttttttagtcttaggcctaagttttgataggggcctatcagtgcaaaccctaataaacaaatagtttaacactgatgaaagaggtaagggcaaaaggtttaaacaaaagtttgaacaatgaacgcaggttttggatgatgatgtactattagtaccttttgtgtacattgaaagtgtaagttatgttgtctaatatagttgttcatcatgttattccttgctaaaaaaaaaaaaaaaaaactttattaatatacatatattaagtatatgtgccatcaaatgctgcaactgagtggtaaaaaaaaaaaaaaaaaaaaaaaaaaaaaaactcgagactagttctcctcgtgccgaattgttttcaacgaaattttggatcatgaataactttaggcgtaagtagccttcgtctttgaaagtgtgatgggttgacaaattagtccttaaaagatgaagattttaaatttaattccccaatggccaaaaaaaagtgtgataaattaatgcgc

SEQ ID NO: 29205 - DNA, 445 bp, Glycine max
  Clone ID: TF_8282706
ccagtggaggaaatatggacagaagatagcaaaaggaaatccatgtccaagagcatactatcgttgcacacttgctccagcatgcccggttaggaaacaggtgcaaagatgtgctgatgacatgtccatcttaatcaccacatatgaaggaactcacaaccacccaattccagcttcagccacagccatggcttccaccacttctgctgctgtttccatgttgttgtcaggctcttcaacatctcagcctacagatcacagttttgcctatcatgcaaattctcctacactgttcagtggtgtcaatttcagtcttttagaccaaccaagagcaaaccaagtcttgttaccaaccccttcctcacatttactcccaacaatcactctagaccttacttctactccatcctattcattaaatcaagggaattgtttaccatcaaac

SEQ ID NO: 29206 - DNA, 665 bp, Glycine max
  Clone ID: TF_GmC125700_1
actttcatcagctcccggtctaaagatcagttttgagttattcttcactttcttgaaaccaacaggaagtgggtatagtatttccttctatatcattttcaaagtgtgttccacatgcactttttgtaggattataatttgtggttaatattaagtccgcacaactagttgtcacaatttttatgggtttaaccatgatttagcagttctaatcaggttttgaaatgcaacccaaactctcaaattttttaacatagacgaacaatttttagaagtgtcgtgtttctttagcattttaaaaaagcaatgacaattgtatcaataatgcttttgttctgaactggtatattgggtatctgccaatgaccaattcctctggtctaactgcaactcttcttctgctggttacacttgtcaagttgtctcttctcctactggttacactttttttagatgtttatttgctctctctgtccctctatgctgagcttacatggatacagtgttcacaaatgttctaaattaatttgactgcattgtctctccactcttccagaagttattatcgatgctcgaatcctggatgccctgtcaaaaagcatgtggaaagggcctcttatgattcagaaactgtaataactacctatgagggacagcatgatcat

SEQ ID NO: 29207 - DNA, 1678 bp, Glycine max
  Clone ID: TF_GmC1330_1
aaaccgcgcgtttcttttccctcttaacctcttcttcttactctcttacgttaattcttcgttgtctatgatggcattggatatgattgatgttgttcccaggacgaggatggaagaagaaaatatagcaatacaagaagcagcttccgctgggttaaagagcatggagcatctcattcgtctcctttctccttcttcttctcttcacaacaaccttaataatctcaatctcaaccacctcgactgctccgaaatcaccggcttcactgtctccaagttcaaacaagtcatcaaccttctcaaccgcaccggccacgcccgcttccgccgctctccaccccaagcccaagcccaagcccaaactaatcctcaaccacaacctcagatccaacaacaagggttcagtttagatttcgtgaagcccaccattctaaactcaaagcccatcaacaaagacgaaactttgactctttcaacaacctcttcttccttcatgtcctccgtcaccaacgacgccagcgtctccgacggcaagatcggacctttcctccctccctccgccgccaaaccccctctctcctccgcccaccggaaaaagtgccgcgacgccgccgcagcactctccgccaaaccctcctgccactgctccaagaaaaggaaatcacgcgtgaaacgaacgattcgggtgccggcgataagctcaaagatcgcagatatcccaccggacgagtattcgtggagaaaatacggtcaaaaaccgatcaagggctcaccttaccctcgagggtactacaagtgcagcaccgtgagagggtgtccggcgaggaagcacgtggagcgagcgcaggatgaccccaagatgctaatagtgacttacgagggtgagcaccgtcacgtgctgccgttaacttccgctgccggcgttagtttcggccattgagttaatcgacggcgtcttttggaaacttggcgggggacgttaaatgagcgtcggatcgtgaagtaacggcggatgcgaacaaggatcgattcggttcgaggacggaaaaagaaaagtggcaactaaagtcaactttcgcgttgtggaatgattttgttgacgaggacttttgtgtaaatttgaccccaagtaaagtagtgcaggtctcaaagaatgaaaattatagtgatctcatctgtttttctttatttctatttttttttaaaaagagacatttatttatttatttatttgatgttagagttgaattggttgaaggatggggctgcaataattttcttggtagaagaataaaaaaatattaatattgggagatctaagttgaaagattagattctttttgttgaaagaaaggacggtgtttgggggcaaaaagtcaaagtatgagggccccacagagaagcatgtggagttggaataataatgataactttagcattgagtaatggaaagtaggggggaagggaaggaacaggtcaatggttgttatggcgagtgggtcccactgcgtgttgttacttcaaaattcaaatatctctttctctctggtctctaatctctaatctctttgactggggtgcgtgtctccaattaagttacgtaacctaacctaactaacattgatgccaaggttgacgggttgaggccatataatagtagaattaaaattttatgaaa

SEQ ID NO: 29208 - DNA, 2249 bp, Glycine max
  Clone ID: TF_GmC5674_1
cgctttgccttgattttgaatcgtcaaataaataacgagtgttctaggtggactctctcccattgcttccttccacccaaacccacaacaacatatacgacatcttctgcaacacaacaactaaacattgttttgtttactcaactcgcactttcccttctccaatttcgaggtctcaattccggctttgaacagccacaagcacgcattgcttgttcaaggttcaatccatcattcaagacattcatggaagcagttaatgaaactagacctgtttccttctgatatacataaaaagggttcacatggtttcttcagacaaaagtgcggatcaaaatatcccttctgataaattgcagcagagagtgagtcttgatagtgatactacattgtcacaaggtcatgatactaaaaatgatctgtccaaaccagaggaagcaagtattctttctattgtagttaaaaatgaagaagggaaggattctgatgctattgcttgtgccttggaatcagatcaagaaggaagcacatgctctttaccacttgagaaacctttgcagaaccctgatactctttcgcatgagttgcctcgattgcagtccagtcaggaatttccctctataatacgcgaaaaggtatcaaaagatggctataactggcgaaaatatggtcagaaacatgttaaggggaatgaatttataaggagctattacaagtgcacacatccaaactgcctggcaaaaaagcaattgcagcagtcaaataatgggcatatcacagattccatttgtatcggtcagcataatcatcctagacctcaattgaactccacagtatcagttgagtgtgttctgcctgttgttgaacaagcaccacacaaatcctctttagccactgttgaagacaaagcatccgttgagcatggatgtatgcctcaacagatccagcctttacaatcctttccgcctgcaaaagtttccccagttaataagttgaatgcttcacatttatcattgactaaggcaaagaaccaggttcatgacaacgaggaacccgagtcaaagcggctgaagaaagacaatactaatcctgatgtcactagagttgacatgtcaactcgtgaatctcgtgttgttgttcaaacttcaagtgaggttgatttggtaaatgatgggtatcgctggaggaaatatgggcagaagctagttaaagggaatacaaacccaagaagttattatcgatgctcgaatcctggatgccctgtcaaaaagcatgtggaaagggcctctcatgattcaaaagttgtaataactacctatgagggacagcatgatcatgaaatcccccctggaaggaccgtcactcagaatgcagctacaaatgctcgcacaacggccagtaatggcaaggctggaaccaaatctgagggtaatattactgatgatacaggggaacgaagcggcttgggctcagcaagcagattaacagagcaactaaatggcgagtcaattactaagtcaaaggctggtgatatggttgagttttgtgtgatcagcctttctaatgagggtcctgaaattaaattaagtgagcaacaacaacaaaaagataattcagctactaaagacgattctgtcagcaatgatgttataagccattcaagttctggagttctgtgtagatcaaatgaacagctgaaaggtgaggtaaaacctatatcagaaggaagtaaggattgccttaatgtggttgccgtgcatgatactcgtagtacagaaagtgaatttaacaagcaatcaacagctgatgcagaacccgtccaaagctaaatttgcaatatttttcaaaggtgctgctagttacagaagagtataaatatttgacaatgacacaggctttacagatatactgtgtgattataattcctatttctactctaaccgtcactttactcttctagctctctccttgtctttgagcaggttgactaaatatgcaaattacaattaatactacattggatatcataacttgtataccattattatttgagttaaataagatttacattttcgtacacatgtatctaaaattctaatgtattgttgaacatactaagctatttgcatgtaattcttgttttgcctactaatgctttaatcttcctctcttcatgtaaatttagaaaatgcgttgcagaattgcagtaattgagtacagcaaaagttattccataaaaaaaaaaaaga

SEQ ID NO: 29209 - DNA, 3102 bp, Glycine max
  Clone ID: TF_GmC666_1
cccacttcgtccgcccacgcgtccggggggggtggagttgaggagtagtatacatagcagcagcacacacggggagagagaaaggaagacaagagagaatgacagagaaaacgtttaaaatgaaaacccaatgacccaacacagattcacaattcagtttcagagagagagagagagagagagatccactcttacaagtcaaactatgtctcactctctacattcacatttcacacacacacacccttcccctgaaatgacccttttgcccttctctctcggccttcatcttcttcttctcctttgactcaacaaccccccctctctctctttcacacagagagacactttctctctctacaccgcaatggacgccggcgaagccctctccgacgatccgaatcggcccaattccgccgccgacgcagctccggcccccgcgggagcaaggtacaagctcctgtcgccggctaagctcccgatctcccgctccccgtgcgtcacgatttcgccggggctcagtccgacgtcgtttctcgagtcgccggtgctgctctccaacatgaaggtggaaccttcaccgactacagggtcgctttctttgcttcatcaaacagcatatggttccatgacttctgctgcatctgctacatttcctgtaaccactgtgtgcttcaatagcacacgcaatacgtaacgatgatgagaattcggctcgaggaaaacctagcttctttgagtttaaaccacacaatagatcaaatatggttcccgcagactttgacaaccatgcaagtgaaaaatctactcaaatagatggtcaaggaaaagctcaagcttttgattcatcaccattagtaaaaaatgagtcagcatccccttcaaatgaattaagtctatcatcacctgttcaaatggattgctcaggaggtagtgcccgtgttgaaggtgatttggatgaattgaaccctagaagcaacataacaactgggcttcaagcatcacaagttgacaatagaggtagtggactttccgttgcagctgatagagtatctgatgatggatacaactggagaaaatatgggcaaaaacatgttaaaggaagtgaatttccacgcagttattacaaatgtacacatcctaattgtgaagtcaagaaactatttgaacgctctcatgatgggcagatcactgagataatttacaagggaacacatgatcatcctaaacctcaaccaaaccgccgttactctgctggaactattatgtctgtgcaagaagagagatctgataaagtttctttgaccagccgagatggcaatggatcctatatgtgtggccaggggtctcacctggctgagcctgacagtcaaccagagctatcgcctgtagcaacaaatgatggtgatctagatggtttgggggttttgtcaaaccggaataatgatgaggttgatgatgatgatcccttctcaaagcgaagaaaaatggaccttggaattgctgacatcactcctgtagttaagcctatccgggagccacgggttgttgtacaaactctgagtgaggttgatatcttggatgatggctaccgctggcgcaagtatgggcagaaggtggtgagaggcaatcctaaccctaggagttattacaaatgcacgaacactggttgccctgttagaaaacatgtggagagggcatctcatgatccaaaagctgtgattaccacatatgaggggaagcacaatcatgatgttccaactgcaaggaatagttgccatgacatggcaggaccagcaagtgcaagtggacagacaagaattaggcccgaagaaagtgataccatcagccttgaccttgggatgggaattagcccagctgctgaaaacacaccaaacagtcaagggagaatgatgctttctgaatttggggatagtcaaactcacaccagcaattccaatttcaattttgttcatactacgacagtgccggggtactttggtgtgctaaataacaactctaacccatatggttctagagaaaatccaagtgatggtccatctttaaaccattctgcttatccttgccctcagaacatagggagaatactaatgggtccttaaaattgtttgtacaacaaaaaactaaataaaatgaaattctgagttccattttgctttttcttttttggcgggtaaagctttaaaagcatagctcctcattttctctttggaaatgctgatagttcttttatgttcatatccttatatgatgagagctgctctttagcagaattagctgtagctgtgccccttcaggttgactcttaattctaattgctgtttgtataattatatacagattcttctgtacaaatatgaagcttataccaaagttgcttcaacaaaaaatcttgtaaaagtgtttggtggattcaactatttataagtagtttctagcctgttctcaaaatcatgaattttaaccctgagaattgctgtaaattcacggcagccagagttgcacacccctaagtaaaagggatgctttctcaatttggggatagtcaaattcacaccagcaattccaatttcaagttcgttcataccacgaccgcgccggggtactttggtgttctaaataacaactctaacccatatggttctaaagaaaatccaagtgatggtccatctttaaaccattctgcttatccttgccctcagaacatagggagaatactaatgggtccttgaaattgtttgtaaaacaaaaaattaaataaaatgaaattctgagttccattttgcctttttttttggcgggtaaagctttaaaggcatagctcctcattttctcttcggaaatgctgatagttcttttatgttcatatctttatatgataagagctgctctttagcagaattagcagtagctgtgccccttcaggttgactcttaaatctaattgatgtttgtataatttatatacagatttcttctgtacaaatatgaagcttataccaaagttgcttcaacaaaaaaccttgtaaaagtgtttggattcaactatttataagaagtagcttttagcctgttaaaaaaa

SEQ ID NO: 29210 - DNA, 574 bp, Glycine max
  Clone ID: TF_uC-gmroLIB3258097f09a1
gacaattagtaaatttgggtagggtattatagtattaacaatggatagagtctcaatatgttactattatacttgttttcacacacgcatttgaaaaaaacataaagatccctacctatatatagcaacatagttatcaactttaacctggctcctcctacttgacggtatctctatactggtggtacctgtacctgctactgcacttgacttaaatgactcattacagagtcagtgattaacatgatccgcagaaaaacttgttcactgggcagcttggggcatatgaacacttgaagtaagccctaggagaagggttatctctggtgacttttttaccatattttctccactgatatctgtccctcacatacagcaaaaatatccttgctcagattgatgccacaagatgccttgctaattcctcctcgagttatgtgcaaaattttatcaaatacatctggatgaccatagtggaatcgcaccctgtattgcccaagaaggcaagaaccataactgatatataaaaatgggtagcgccaaactggctttggaagatcagagagcaacgtga

SEQ ID NO: 29211 - DNA, 572 bp, Glycine max
  Clone ID: TF_GmC565008_1
gttcaacttcaaagtagctagctagctcccatgatggatcaagaggtagaaacgcttgaagcgaagctgcaacgtgtgaaggaggataatcgtacccttagagagatgctggaaactctgagcagcaaatgcgagaagcttcagtctcatcttcaagagatcaataatgaagaacaagaagtgagcacaaaatcagaccaaagtggatcagtattattagctagagccgagtttcccatagcacaaaagccatcacaaatctttgttaaaacccaccccaaggacaatagtttggtatgccgtatgcctattaattaattacttgtgattaatgctcaaatactgtcaggaacttcatacatttcacacaaattttaattccattgggaatatatatagatggtaaaagatggttatcagtgcaagaagtatggacagaagaaggttaccaaagacaatccctcgcctagagcttattacaagtgctacctggctcctagctgccccgtcaagaaaagggtgcaaagaagcttacaggataagtctttccttgttgcaacttatgaaggaaa

SEQ ID NO: 29212 - DNA, 1912 bp, Glycine max
  Clone ID: TF_GmC3118_2
gaccgtgagaataaaatgatgccaatcaattctatatctgttccactactagcaaactgtttcagacaagttgaaccggtgtactagcaaatacacacgaactgttccactacaaacctacgtgggggaagaaaaacaataacaagaaaggataaacatggggagcaatgaaattacaagagacctgccaattaatttagcaaggcttaatttcaaaacctatgctcagaagtgttcgagctgactccattgctttctcacctccaagctctagcgcttccccggtcagttctccttcggtgtccactgaccattgagtagaaattttcttgttttgtggggagtcaggtttcttcacctgcaaactgttcatggaggcaggtgctgcagcagccacaagaggagcacttggtggcccatgtcgtttcttggggactggcatgtcatggtcatgtacacccttgtatgttatgatgacggcatctgagttatctactgcggtctcaatgtgctttctgacaggacatccagcagaagtgcatctgtagtagttcctgggatgtggatttcctttcaccattttctgcccatacttgcgccatcggtaaccatcagcagatatccccacatctccggctgcatgtacaacaaacttggatttttttccaggttttactggagaatccatgtctgttaagtcacctttcttcattcttttttttggtactggctcatttacatgttcctctttcaaaataactttaccattaccactgatattagatgtgttttgtcgtttcttatcagtgctgcagggtgcttcttgtagagattcttttgaagaaatggatggatcagcatccttcagaactttgataggctgctccggaacactgttttctacaatgggttcactggaagacagaaacttattttccctaatggaattagtcttccgtggaggatcatgactgtgctcacttttatatacaatctctatcacatgacctgaatcatcacagcattcaatcttcttagcacaacaatctgaatgagtacacctgtaatagcttcgagaacctgtaggactcttcacttgcttctgaccatacttccgccagttgtatccgtcagatgctgatgtccttgcaacagaaacagcagataacgttttgcgaccagaaggatttttcctatctacttctggcacatgtgtgttattgacctttggagtagatattttctgtttttgtacggttggactagaaacaattgataaagattgtgtaacagaagttggtgatagatcagacaatggaattgaacacacagacacctgaagccgattttctgtctgagtttggagtggctgcactgctcctctttcaatagtttccttttcaggagattcaactgtctccttactttcggctttgccacccgaattcggagcagtagagctcccttgcaaatcgtcactccgatgctgcacagcaagggtttcaaccgaagaggtaacaccagcgcctagggtttctaaattggagtccgaacaaggtttgtcggagctccgtaactcgcggtgccgcgactcggcgtcggacagcgattccacaactcgttctgtttccttggtgagttgcgtttttgggtgagaatcgtttcctatggtgtctgactctgggagaggttggggtccatggcgctggtccatggcgcagtagcgcagggagagagagggtgaaggtttggagaggctgtgctttttatggtgtccaaaggagaaacgtttgggatttggcgaaacgccagcgtttgtgtgtgagtgtgtgagagtttgctggggaggggtgtgtgtctctgaccagcattgactcaggtgcctcttttcttaaggccctcgagccgaatt

SEQ ID NO: 29213 - DNA, 620 bp, Glycine max
  Clone ID: TF_GmC362_3
ggggtgaagagcactgtgagagtgccggcgattagttcaaaagtcgccgatattccaccggacgagtactcgtggaggaagtacggtcagaaaccgatcaagggttccccatacccaaggtgagtgatatttaattttgaccgttgatttagttgacttttatctcatcaagactcgttccctgacgtcgattttttttatcatcaggggttactacaagtgcagcacgattagagggtgcccagcgaggaagcacgtggagcgcgcaccagacgatcctgcaatgctgatagtgacgtacgagggggagcacaggcacgcggttcaggctgcgatgcaggagaacccagccggggtggtggggttggtgttcgagtcaacgtagagaatgagaaagaaggtccaataaaaaaataataataaatttggaagtggaggacttttttaaaaaatatatatatataatttttggaaagtgtagtgggaagaaccaagaagtaaggacaatggctgccttgtaaatttgttttatttttatctttattattattgttatattttagttgtcatagactcgtagagaggtgaaaaatggaatctcaagttgtttatttatttct

SEQ ID NO: 29214 - DNA, 963 bp, Glycine max
  Clone ID: TF_GmC6782_1
tgtcgagccgattcggctcgagaagaccaaagaaaaaaccaaaatcatcgtgtggtttttcaaggaccaaattcaaatcagtcataaaaagggggggtatggaaggaggagagagaggtgttaatcccaataattatgagctccaagtttcattcgcaaacacccctcaagccatccatgaaatgggttttgttcaatttgaagaaaaccaggttcttagcttcttggcaccctctgctcaatcccaatcttctcagctctctcaatctctaaacgcctgcaacggtggcagcaatactgctgttgctgccgctaccacaaccgccaccgccaccacctccggatccggagcaacaattggtttcagccataatgaccttgtatccagaacttgttggtataataatgaacaggtgcgaacactggatcccaaagctgtcaatgatgaaaattgcaccggaaatactagtgatggtggcaacaactcatggtggagaagtgctggctcagagaagaacacgatgaaagtgaggaggaagctgagggagccacggttttgtttcggaattcggctcgaggtagatgtgcttgatgatggttataaatggaggaagtatggtcagaaagttgtcaagaatagccttcacccaagaagctactaccgctgtacccataacaactgtagggtgaagaaaagagttgaacgactctctgaagattgtcgtatggtaataactacctatgaaggcagacacaaccactctccttgtgatgactcaaattcatcggaacatgaatgtttcacctctttttgaacaatgtcgtttcaataattattatgtattattaataattaattagctgtacgtgacattttcatgaaggatattgcattgtacttatattgttactatttgttattgagctcagtcactctttcatggtataaaaaaaaccaaaccc

SEQ ID NO: 29215 - DNA, 1285 bp, Glycine max
  Clone ID: TF_GmC244_1
aaaataccctgttcagtgtgttacatacactttgacggaaagggttagctagcgtgacagtgcattcacctagtggaccaaacaagccactgcactatcttgtttttatatttattttcttttgcatcatttgaccggggtaataccctatgaccctcctctttattttctttaacacctcctcctctttcttttctcagcaagtatggccgtggaattcatgatggggtacaggaacgacactttcgcggaggataatgcggttcgtgaagctgcgtcggggctagagagcgtcgagaaactcatcaagttgctgtcgcatactcaacaacaataccagacaacctcaaagtcttccatggaaaacatcgacaccgactacacagctgtcgctgacgtcgcggtttctaagttcaagaaggtcatttcgcttctgggccgcaccagaaccggtcacgcgcgttttagaagagcccctgtgcctgtgcctgtgcctgtggcttcacctccaccttcggaaccgagagtctaccgtgctacgccgctgcagcagatcccgccacccacccttcacactcactctgtcactgaccactctctgatccccaaaattgagagaaaggactcttccaagaccattaatttctcctattcaaattcgtttgtctcctccctcaccgctggcgataccgacactaaacaaccgtgctcgtcgtcgccgtcgccggccacggcttttcagatcacgaatctctctcaggtctcctccgccggaaagcctcctctttcgtcctcttcgttgaagaggaagtgtagctctgagaacttgggttctgctaagtgtggcagttcctctagccgatgccattgttcaaagaagagcagaaaaatgaggcagaagagggtggtgagggtaccggcaataagcttgaagatggctgatattccaccagacgattattcttggaggaaatacggacagaaacccattaaaggatccccccatccaagaggttattacaagtgcagcagtgttagagggtgtccagcgcgcaaacacgtagagagggctctggatgatccatctatgttggtagtcacctatgaaggagagcacaatcatacactctctgcagccgaagctactaatctcatcctagaatcctcttaactaattaatcatcgttttcccatcacaaagtatgttctgatcatgtcattcatggcttgtacaattgaaatttttaatcgagcagagctttatctcgaaggagattaattgaaa

SEQ ID NO: 29216 - DNA, 2031 bp, Glycine max
  Clone ID: TF_GmC1123_2
caataggatccattcacccatttttctctctcagatttcatttttcttcttcttcttctctctcttctttgtgcttattgtattttatggacaaaggatggggactcacccttgatacctcttcctctcaatctcttccattattcccttccaacgataataagatgtttcctctcctcggattccccgtcaacctcagccgcgcctccaaggaagacgatgaaaaccgcaaagttgtcggtgaagttgacttcttctctgacagaaacaaacctacacctccaccctctcacgaccacaacgttaaacccaacatcgtcaagaaggaaatcgatgaaacacctcttcacattaatactggtttacaactccttactgctaacaccgggagtgaccaatctaccgtggatgacggggtttcatctgatgcagaaaataagcgagccaaaaccactgagcttgcacagttgcagtggagcttcaacgcatgaactctgagaacaagaagctgaaagagatgctcagccatgtgaccggtaactacaccgccttgcagatgcatcttgtcacattaatgcaacagaaccagcagcgaacagaaagcacggaaaatgaggtggctcgagggaaaagtagaggatagaaagcatggtgttgtaggaatggtgcctcctagacaattcctggatttagttccgagtggtacgaccgaaatagatgatcaagtatcgaattcttctttgggtgaaaggactcgatcaaccacacctcccagctgcaataaaaatgatgataaggataagaaagagactactgatcgtccacactctggcaaattattgaaccatacgacggatccatccactagtccggaagccgctatgagaaaagctcgtgtctcagttcgtgcccgatcagaagcacccatgatcagtgatgggtgccaatggcgaaaatatggacaaaaaatggctaaggggaatccatgccctcgagcatactacagatgcactatggcagttggttgcccagttcgcaaacaagttcaacgttgtgctgatgatagaacaattttggtgacaacatatgaaggcacacataaccatccactgccaccagctgcagtggttgatgccatggccatagcagcaggtggcagtggatggttatggcatcaaccactgcagctgctgctaccatgttgctgtctggatcaatgtccagtgcagatggagtaatgaaccccaatttgctagccagagcaattcttccttgctctacaagcatggcaacactttcagcttcagcaccattccccactgtgactttggacctcacacacaacccaaaaccattgcaatttcaaagggcctggtgccccattccaagtacccttcctccaagcacagcctcagaattttgggtccggagccaccccaattgcacaagcactttataatcaatcaaaattctctggtcttcagttgtctcaggatgtaggatcttctcaattagcaccacaagctcccagaccacccttgcagccaagccaacatccctcactggctgacacggtcagcgccgccgcctctgccatcacttccgatccaaacttcaccgccgtgctcgctgccgccatctcctccatcattgggggagctcacaattcaaacaacaacaacaataacaacagcaacaacaacacgagcaggactactattagcagcttttcaggaaactgaacattttctttttggttccattaactttgtatttttgtacttgggtactataagggaaaatgaaaccataaatgttcatattctttttagtccatgtattgggagggatatatcatatattagatcagaaaaaaaatgtttcatttttttgtatcatcaatttctctttgaataatgttgtatatttgattcaaaaattctcttgggagtaaatagacaagggcaaatgaagaaagaatcgtctatctttattttttcttcctttgtctcgtgtttatctttaattttt

SEQ ID NO: 29217 - DNA, 1033 bp, Glycine max
  Clone ID: TF_GmC1123_3
tggaaaggtaccaaggcaattccttgatataggtcccagtggcacagcagaagtagatgatcaagtatctgattcttcttctgatgaaagaacacgatcgagcacgcctcaggacaataacactgaagctggaacaagagatggagcgagaaataacaatggtaataaaagcgagttgggtagggaagagagtccagactcagaatcacaaggttggggtcccaataagcttcagaaagtgaacccttccaatcctatggatcaatccactgcagaagccacaatgagaaaagctcgtgtctcagttcgtgcccgatcagaagctcccatgattagtgatgggtgccaatggagaaaatatggacaaaaaatggctaaggggaatccatgccctcgagcatactacagatgcactatggcagttggttgcccagttcgcaaacaagttcaacgttgtgctgatgatagaacaattttggtgacaacatatgaaggcacacataaccatccactgccaccagctgcagtggttgatgccatggccatagcagcaggtggcagtggatggttatggcatcaaccactgcagctgctgctaccatgttgctgtctggatcaatgtccagtgcagatggagtaatgaaccccaatttgctagccagagcaattcttccttgctctacaagcatggcaacactttcagcttcagcaccattccccactgtgactttggacctcacacacaacccaaacccattgcaatttcaaaggcctggtgccccattccaagtacccttcctccaagcacagcctcagaattttgggtccggagccaccccaattgcacaagcactttataatcaatcaaaattctctggtcttcagttgtctcaggaatgtaggatcttctcaattagcaccacaagctcccagaccacccttgcagccaagccaacatccctcactggctgacacggtcagcgcccgccgctctgccatcacttccgatccaaactcaccgccgtgctcgctg

SEQ ID NO: 29218 - DNA, 626 bp, Glycine max
  unsure (1)..(626): unsure at all n locations
  Clone ID: TF_LIB4391-036-R1-K1-E2
caaggttggggtcccaatatagcttcagaaagtgaacccttccaatcctatggatcaatccactgcagaagcccaatgagaaaagctcgtgtctcagttcgtgcccgatcagaagctcccatgattagtgatgggtgccaatggagaaaatatggacaaaaaatggctaaggggaatccatgccctcgagcatactacagatgcactatggcagttggttgcccagttcgcaaacaagttcaacgttgtgctgatgatagaacaattttggtgacaacatatgaaggcacacataaccatccactgccacctgctgctatggccatggcatcaaccactgcagctgctgctaccatgttgctgtctggatcaatgtccagtgcagatggagtaatgaaccccaatttgctagccagagcaattcttccttgctctacaagcatggcaacactttcagcttcagcaccattccccactgtgactttggacctcacacacaacccanacccattgcaatttcaaaggcctggtgccccattccaagtacccttcctccaagcacagcctcagaattttgggtccggagccaccccatttgcacagcactttataatcaatcaaaattc

SEQ ID NO: 29219 - DNA, 1511 bp, Glycine max
  Clone ID: TF_GmC94_1
cccacgcgtccgattccacataataatattacgcctcccctcatccgtatagacactaggttcaacttgtgagggggatcaaaacattcctagattgcaaacaacaaggttggttcaacttgtgtgaagggattggaacatggaaaatcttggtggttctagtcgtaggaaagcaattgaggagcttcttagagggcgtgattctgcccaacaacttaagagtgtcatcaatgggacttatgatgatggatcagccaccccatttgctcaacaacttgtgaaagaggtgctcatgtccttcacaaactccctcttgttcttgcacaacaaccccacttctgaatcacatcatgtcttcaatgttcaagtatgggactctcccaagtctgaggactctcaagagagcaattgcaaaagctccaccattaaggaaccaagagggtgctacaagagaagaagaactgaacaaacatgggagaaggaatctgaagctccaattgatgacggccatcactggagaaagtatggccaaaaggagatcctgaatgccaaattccctaggaactactataggtgcactcacaaatttgaccaaggttgccaagcaacaaaacaggtgcaaagagttcaagaggaaccaatcctattcaaaaccacctactatgggcaccatacttgcaagaactcggcaaaccctgatatcatacttgaccccatgtccccttcatcctcttccaagttccttagctttgacaactccttttcaaccccatccaagcaagagtgcccctttctctcatcttccaataatttcccatcatcatcatcagtgaaaagggagtgcaaggaggaggtccctccctcaatttcctccaatgattacctcatctcttctgacctcacttttgatagctcaccaaggcatcatgtcactctatcatcaacacttgactctgagtacaagagtgtggacatttcggatgtcttgtatgattctgcccagcttgattttgtctttgaacccttccttgaaattagatgagcatgtccttgttttggtttgtgatttttttttttaaatttaacctttacttcagcgaaggcagtgcaaaacaaattgtgtaatatttagttgtacttttcttagataaatgttatatccgtgcttttattgtaaattttgtcattttcaatgaatgagaaatgatcataatgtttcaatgaaaaaaaaaaaaaaaaaattttaatattttaaaaaaaaaaaaaaaaaaaaaaaaaaaaaaaaaaaaaaaaaaaatttctgggggccgcaagttttttccttttagggggggtaaatttaacttgggcccgggccgcggtttaaaaacgtcgaaatgggaaaaacccgtgggtaccccaattaattgcctttgggaaaaatcccccttttcccagttgggttatttgcaaaaaggcccgcacgaatcgcccttcccaatctgctaggtaggacacgactgggcgcggcg

SEQ ID NO: 29220 - DNA, 1235 bp, Glycine max
  Clone ID: TF_GmC25797_1
gtcttgacggtcccattttcaccccattgtgcaaattgaaagtagtagggaacccctactatagctactacatcatcacaatgacgtcaccttaacgtctctcgtgttgacacgtagctcagtgaggctatttcgctgcatcctccaagaaggtgtttggaaggatccttcccaccccatgccaaaagcaagcatattaattaaaaaaaatagaaaaaaataaaacacaattttattttattataggatatttattagttatttattggatataagtggcagcatgctttagtcctaagcgtgataaaaagccaaagactcttaggtttttggctctttgcagaatctttgagtgacacatacctagctatcacctcaatggattactattttggaaaccttaatcctaacccttattaccatcactctgccgtagtgaacatggcatctccctcctccgagttcatgttatctgattatctcgtgttggaagatgctcttgttgttgatcatcatcaagagtcttggtcacaaagcactgaaactgaatcgtcggagaaagcaacctccagcgatgcaagtcatgggttcggtgatgcaacctccaccaacaccaacatgcatataaagtgccaaaatagtgggattaagggaaagaatgcagaagtgagtcaaaggatcacgtttagaaccagatcgcaacttgaggttatggatgatggatataaatggaggaaatacgggaagaaaacagtgaagagcagtcccaacccacggaactactacaagtgttcaggtgaaggatgcgatgtgaagaaaagggtggaaagggatagggatgactccaactatgtgttaacaacgtacgacggtgtccacaatcatcagaccccgtctactgcctactacagccaaatgcccttgctgcattctaatcatgattgggccctccacccttctgcaaactcataatatcctccttaatatagtaatatccagagataggagaatcaacttatacttttaggattactttttatctttattatttattttttataagagattttaaaaaataaataatgagaatagagaataattttaaaagaattattgttgatgtaagttaatctctactctgtatatatatatagttattgactcatttagtatattgcctgtcaataaccattattacatgtatattgattattatgcaaattccagtccacgct

SEQ ID NO: 29221 - DNA, 1220 bp, Glycine max
  Clone ID: TF_GmC80686_1
gctttgctatcatcctttgccttgtcctcttcccttgtccttcttcctactatactatattttctctctctaatcaatcatagttctgattttcatacacttaccctgaaacctccattctcagatcaagcttgcaccaaaatacatacatagctatggacaataatactagtgcctgtgcctacccccaacttgagtcagaagaagcatcttcagagcacaaatcagaaactcaaacatcaaagaaaaggaaaatggttgagaaaacagttgtggcagtgagggtaggagagaaggttggcaagctaaagaatgaagggctaccctcagatttttggtcttggaggaaatatggacaaaaaccaatcaaagggtctccatatccaaggggctattacaagtgcagcacatccaaaggttgttcagccaaaaagcaagtagagagatgcagaacggatgcttcaatgctcataatcacatatacctctacacataaccatccatgtcccactcccatcactacaaaatctaccaccacaaaggaggaagaccaagaacatatagaactagaagaagaagaagagcaaagggataataataataataagcccagtgatgaagttactaatgaagaaaattttcattacttgcaatctccaatacgttgctccagccaagatatcattatagaacaagaagatcctttcaaactaaacacggagaaaagccatgatcgaatggatctcctcttagaggaagagcctctttgttttgcacagctcaagaacttgtctgcttccaaaaacgaagaacttgactttttcgatgagcttgaggagttacccatgtcttcatctttgttgcactttacgaggaacattttttccgatgaaaggattcccgttggcccttcttgattctagtgttgttttctcggtgcttgctatgctagtgacagtgtatgtattgttttcatccatgttatatatccattaatttcagctagtttttcaattcggaacttttctttttcttttgtaccctttatttatatgattatatcctatacttttaattaattattggttcacaactaagcatagttcatcactttggcgtgagcagggttagtgtgtagacaaaatcatcagctcttgcaattaaaattaaagaatgatggtttggctcacaatcaatggtatattgttcattctgtattc

SEQ ID NO: 29222 - DNA, 1472 bp, Glycine max
  Clone ID: TF_GmC1027_1
cacgcgtccgctcaaaactacacacaacctttctctctcttttacacacacacccctaagctataaaccagatcaaccctacctctctccacttcttactactgtgaagtttgagtttgtggtgcgcgagagatgagggatttgagcatttaagagatcaacttgttaggtatatggagaagaaagagatggctgtgaaaactgaggatgcgattgggtcctcttctttcccttgttataattcaaacctttatccattctcgaacgcgtttgatttctctgaggttgacaaaagctctttagggtttatggagttactgggtgtgcaggactatagtcctctgcctgagttaccacagctttcaactgtgtccgtgcaacctcatcactctacagttaaggttccgtctgataacgggaaagagtgttctgaggtgttgaatcaccaacctgccactccaaactcttcttccatttcatccgcgtccagtgatgcagtcaatgatgaacagaataagactcttctagaccaagcagaagaagatgatgatgaagaagaaggacaacaaaagactaagaaacagttgaagcctaagaagacaaatcagaagagacagagagaaccaagattcgcattcatgacgaaaagcgaggtcgatcatctggaagatggatacagatggagaaagtacggtcaaaaggccgtgaaaaacagcccctttcccaggagctactatcgttgcaccagtgtttcatgtaatgtgaagaagcgtgtggagcgatctttcactgatccaagcgttgtagtgacaacctatgaaggccaacacacacatccaagcccagttatgcctcgttcaggtgtctccgctggatacgccaacaacttcggttcagttttgccaccgggaaactacttatcccagtatcagcactaccaccaccaacaacaacaacagcatcttgtcaacacattgtcctctttgggttttccttacaatgattcttcatctccaaagaacgctgtttttactcaagagagacggctttgcagtaatcacgggacgaatgcgtttctgagggaccatgggcttcttcaagatgttgttccttcacacatgttgaaagaagagtagagctgatataactccagtaattattagtcatcatgcttctatgtgatttattttttgctgactttttcctatgagacttaggtgagaactctagtactggtacatgtaatttttcttcctgaccggaggtaatattagtgatcatgatcatatatacttgtaaaacccactttatctttttccacatagccccatcatgattatggctgtatagcatgatggattatgatttaatgcagggactacttctagttctagttctaattaaagaacatatggactacttctagttctaaaaaaaaaaaaaaaaaaacccctgccgcctcgctctctctc

SEQ ID NO: 29223 - DNA, 577 bp, Glycine max
  unsure (1)..(577): unsure at all n locations
  Clone ID: TF_GmC98460_1
cctgctcgccgtgcaggactacaacgtgccgttattcgattggctccccgccggtgtcggacaccatccttcgccgtctccggccagctccaacgtccccgactcctccgaggtgctcaacacgccggcgtcgcctaatttttcgtcgatttcctcgtcgtcgaatgaggctacggtcaataacaactccgaacaacagagtgggaaagaattacaagaagaagaaggtggtaatggaggcagaggagataaccaagatcaagacaagactaagaaacagcttaaagcgaagaagaagaagaagaagaaccaaaagaagcaaagagaaccaagattcgcgttcatgacaaagagcgaggttgatcacctagacgatggttataagtggcgcaagtacggccaaaaagctgtgaaaaacagcccttatccaaggagctactaccgttgcaccagcgcgggttgcggcgttaagaagcgcgtggagcggtcctccgaagacccttccatggtggtgacaacctacgagggtcagcacacgcactcgtgccctgcttcngctcggtctagccttggcttc

SEQ ID NO: 29224 - DNA, 2785 bp, Glycine max
  Clone ID: TF_GmC595_1
tctcgcttaagaaacaagacatgtggaaattcaatgaacctacaaaacaaactgatttttcacctgagcggacagcaacaaaatctgaattcccttcaattcagagcttttcctcagagatggcagaaggaaaaccagaaatacaaagtagctcagttcccgggtctggttattttgactacacaagtgcatctcagtctgtaagagaacaaaagagaacagaagatgggttcaactggagaaaatatggacagaaacaagtgaaagggagtgaaaatcctcgtagttattacaagtgcacacatccaaattgctcagtgaagaagaaagcggaaaacttttccactggacatatcactgaaatagtatataagggccaacatagccacccaaaaccgcagtctactagaagaacaaactctcaatcaattcatcaaccttcttcgtcttgcacaaactcagggataactgatcattcagtggtgactctaggaaatccacaaatggatcatttctccatacaagaagattcttcagcttctgttggagaggaagagtttgagcaaacaccgcaaaccagttattccggaggagacggagataatcttggacctgatgccaaaagatggaagggagataacgaaaacgatggctattcagtctcagcaagcagatctgttagagagcctagagttgttgttgaaaccacaagcgaaattgatatacttgatgatggctttaggtggaggaaatatggacagaaagtagtcaaaggaaactcaaatgcaaggagctattacaaatgcaccgcccctggttgttcagtgagaaaacacgttgagcgagccgcacatgacatcaaagctgtgatcacaacttatgaagggaagcacaaccatgatgtgcctgctgcacgtggtagcggaaaatataactcgaacagaaattctcagaacagcaacatatcagcgcctataagaccctcggcagtgaattgttattctaactcatcaagtttcacaaattctctctataataatactaggcttccagcaactggaaatcaagaatcattttcactggacaagttcaagaatcctggaagttttggctattcagatcttaacagaccaatgggttcacataccaatcatgcacaatacacagatgctgcatactcaagggccaaggatgagaggaaggatgattcattccttcagtcatttctctcaaaggacttctaaatttggagtggaccacaactttacatattatcctggatatgtttttgtatagcatgtaggattttagttattcacagcagaatatagacaaaaaaattgcaaatgtttacttatttacctcttttagattagtgactggcactacagccatagtgacagaaaattgctgctatacctgtctgccaagttcttgtccaaattgaaacttcaactttatcataggattgactgatgaattctgttattcttttgttgtatttgtagggaaaaaaggttcttctggaagaatcttacgatatttcattaatcagtagcaagtgtgcttgtgttggctatttctactatgctctttctaattttagtttttatcaaatgatttgtgatgaatatcaggaggtccaggacttccataatttgtaccaatatcaacaccgggatttgataaattttcaattcatagtccttgatgtgaatcatacatagtccttaatgcaatttttgttgataacgatatgttaactgacatctgatttaattagaaaagaaaacacaattcaggaaaatttccacgcctgaaaaatttgtgataaactgtgtctaaaggttgaaagttgaaccctctaggattttaacaagtcaaaattctttttggatgtacattaagtagtcagattgcaaagaaacaaaaaatgaaattcagtttctagtcttctgtcttccattgcttgcgtctcacagtcagattcaaataatgcattcaccacatcatctttttttggtcacattggtcaataaacagtctcaagtacaagaaacatgattaaacattacatgtattcgtatatgaaatcaatatcaaatctcactgtatacatatgcaccgagccagagaggtgaggcctgactccttttctcattaatatacagaaaaaaagtgatttgtatagaagtatgaaactgtagtaggagagttttgcaaagttaagacttcatatataaggttgagttgataatttgtagcctgaaatgagggcagatactgctagacacaagaaggcaaaaattgacatgctaatggctgcagctgaagagtctgtgaatatattgtctgccccttctctcattctatttgtcattggaattgctgaagatgctgatgatatcaaaagatatgcaatgatctgatctccaaaaaagtcaatcatagctgccattcttggctgaagcaattgttttgcagtggagagttcctgaatttgacggaacgcttgggctccagtgtacaaactagacaaaatcgctatagccagcaaatacctgtcatcctccaaaaaccacggctcgagctcgagccgatgcttattgctggccatgataaagaacgaaatcagagagaaaagcagagcgacccctctcagtcccaacgaccctctcttgatcaagtcctccctcttccaccgccgcaggattccgccgattccgccgtggctcgccggcgcgaggtggccctcactcggcgcagaaggcgccaccggcctcgt

SEQ ID NO: 29225 - DNA, 1516 bp, Glycine max
  Clone ID: TF_GmC608_1
gataactctctgtagcgaaaagtcagcgccttcttttgtctctctctctcaaaaaaaaaattccacacactgcagagtttgtctctctatggcggaagattgggatctacatgcggtggttagaggctgctccaccgttacatcatcctcagtgtcttcttcttcatctccttcttcctctggttttgcctcttcttacttccaccctgaagctgcagtttcttcttcttcttcttcctattctggcttcaacatcttcaagggtgaacaaggaataagccaagttttgtcgctctctgcgtacccctttgaggcaaggagctccattgaggaattgcatgagctttgcaaacctttcttctccaaatctcagcctctaacgttgcaagcctcttcacctttgtcctcactctcttcctattcctctgcgccacccaaatctgtttcaacgcaagagaaacaacaacagaggagcaagcaggcacatgctgtcaccaccccacgatctaaaagaagaaagaaccagcttaagaaagtttgtcaagtgccagttgagaatctctcctcagacatatgggcatggaggaaatatggccagaaacccataaaggggtctccatatccaagggggtactatagatgtagcagctcaaaggggtgtttggcaaggaaacaggttgaaagaaacagatcagacccaacaatgtttatagtgacttacactgctgagcacaaccaccctgctcctactcacagaaactctcttgctggctccacacgtcagaagccattggtacctcaaacagccaccaccactgaagaagactctgacaagagcaagagcctcacaaaacccacttcccctgccacctcaggggcagaagaagaggctccaacaccatcacaaggggaaaagtctgagagcagagaagagaaagaggatgtgatggatgatgaggaagaagatgaatttggcttgtctgatatggtgctttcagatgacttctttgaaagtttggatgaactgagccaacttacggctccttctgttgtcactggagactgtttcagtgaccccttttcagcaattgcaatcccttcttgggtggctagtggtgctgctactgctagtgggtgtagatgattctttcgggcaaatcatcacaatgcttttcattgatgacaatagggaccttttctttttggtttttgtttgtagaggaaatggaacattttggaggaatctttactaacaatggtttgtggatgggaggaaaagttttccttagtagagtagtagtgactagtaaggtagatcaagcattaatcttgttaaaaatcaatgattattattaggcattcatagttttattatttatgtcatacctatgttaatgtaaaaacaatatattttagtaagctttttgtatgctccttgagttgtggttgagttcattgtatttgacattggttttgtgatataaattggcagaagcacttttgggttgacttatag

SEQ ID NO: 29226 - DNA, 2405 bp, Glycine max
  Clone ID: TF_GmC86629_1
gcaagagctacaaaatataataataatatatatatatatatatatatatatatatatatatatgtttttttttccttctcttcctgcttaggactttaagtaattatatatataattatatttttatatatattatatatactctaaagttggaagctttttattcttatgtatgatggttgtgttgtgtgagttctcaagggaagcaaagtcctatctttcacacctttcagtctcaaccgtgggaagaagaatctagggtttaacagcaccaccccaagtccatcaaggtctgtgctttggtgcttctttttttttttttgttttgttttgttttttctttctcactgggaaattgggtcgattttttttttttgtcggaaggaggatatgctgcaacttgtgaggtaccctcagtttgttctgattccaaggttgttccttgttgccaaaaaacattgctttttttcttcatgagttggaattttgagactttaacctgaaattctgtttttgtggctccttgtctggtgaaaaaatgggattttttttcatctgggtcgttttatctgccacatagggctgaatgtctgatatgtttgtggataagtggggtgattttttagtattctggtgttttacttgtttggtttagttctgccccttgtttggggacttagttttttttttattaattttttttagaggctaatatggaagaggttgagcaagctaatagagtagctgttgaaagctgtcatagggttctgagtttgttgtctcaaccaagggatcaggttcagcataggaatttaatggtggaaactggggaagctgtggtgaggttcaagaaagttgtttccttgcttcacagtggtatgggtcatgcaagagtgaggaaggttaaaaaccctcaaatccccttttcccaccaaagcatcttcttagacaaccccaattgcaaaaccatcaacaaccatcacttcaaaaatctgcagtttccccaaaccagcttccctgacaattcaattcaggaacttggttcaaccattaagaattcactctctcttggacaaccctctttggaattgagctccaatgggaaaagtcctcttcacctcacacagcaggcttcatcaaatcactatcacttctttcagcagcagcaacaacagcaacagcaaaggctgttgctgcagcagcagcaacaacaacaacaacaaatgaagcatcaagcagaaatgatgttccgaaggaacaacagtggcataaacctgaattttgacagtactagctgcacaccaacaatgtcatccactaggtcttttatctcttccttgagcatagatggaagtgtggctaacttggatggaagtgccttccatttaatcggagctccacactcttctgatcagaattcccagcagcacaagagaaagtgttctgccagaggtgatgagggaagcttgaaatgtgggagcagtgctagatgccattgctctaagaagaggaaacatagagtgaagagggcaattaaggtgcccgctatcagcaacaaacttgcagatatccctcctgatgattattcgtggaggaagtatgggcagaagccaatcaagggctctcctcaccctaggggatattataagtgcagcagcatgagagggtgtcctgcaaggaagcatgttgagaggtgcttggaagagcctaccatgctaattgttacctatgaaggcgaacataaccaccccaagttaccaacacaatctgcaaatgcatgaactatgtggagagcttaaccagatcaagcccatcattcaatttgtcaaaacctctctgtgattggcttgagatgctgctgtacatattttaagtgatgcaaacaagcagggatgatggatattgttggcgcagattttgtcttttggatagtttggctaaccagccgttttatttagagggtgaggatgaggatcactgattaaatgaacaaagtctgtaaaattagctagtttcaattcgtaagaactatttcatctttcttaagcctgttataaacatctcaaggttttctaaatgaatgaaaatgcctttgaaaaatggtaatattcttcgtaaaaaaaaaaaaaaaagggcaaaaaaaagcgaaaaaaaacataaaaaatcgcgaaaaaaaaaaaaaagaaaaaccctgggggggggccccgtacccaaatcccccttatagggattcaattaacgcccgttaactgccctggattttccaaccctttgactggaaaaaccttggcgttcccaaactaaatccctttgaagcaaattcccttttcaccatttgggtaaaaaccgaaaggccccgccccgttctcctttcccaacaattcccaaccctaattgccaattgg

SEQ ID NO: 29227 - DNA, 375 bp, Glycine max
  Clone ID: TF_15203247
ggaattccgcacgaggcaaaaaccaattaagggttctccatatccaaggaattactataggtgcagcagttccaaaggttgtatggctcgaaaacaagtcgaacggagtaacactgaacccgacatgttcgtcgttacgtacaccggagaccactcgcatccccggccaactcaccggaactcgctcgccggaagtacccggagtaagactctggtaaccaatccgccaccgtcacctgggtcactctcctgcttccaagccacccctttttcttcttcttcttcatcgccaccacactctccaacgtcgccggaggaagatccacggaaaccgccgatttagaacccgacccggatatggaaaccgacgggaac

SEQ ID NO: 29228 - DNA, 1213 bp, Glycine max
  Clone ID: TF_GmC121755_1
gcttgagagaatgaaggtggagaatcataggctgaagaacatgcttgatcaggttaacaacaattacaatgccttgcagacgcatttggtgagtttgatgaaggaccagatggacaaggaggatgataaacaacaaccgcatcaagtgtttgatggaaaactagaagagaagcaagctgggaatggtggtggagccttggtgccaagacagtttatggatcttggattggccactaatgctgacaccaatgaaacttcgcattcccattcttcgtccgtgataagaagtcaggattcaccaccaacaaataatacagaggtggcatccaagaagaatgggggtgctagtgatgaaggactagtgtttgatcaagacaagaaggaatttggtaggggaattgagagagaggatagtccctcggatcaaggggtagctgctaataacaatgttccaaagtttagtcctccaagaaatgttgatcaagctgaggccaccatgaggaaggctagagtttctgttagagctcgatcagaggcacctatgataactgatgggtgtcaatggcgaaagtatgggcagaagatggccaaaggaaacccttgtcctcgtgcatattatagatgtaccatggcagcaggttgcccagtgagcaaacaggtgcaaaggtgtgctgaagacagaacaatactgatcacaacatatgaagggaatcacaaccaccctttgcctccagcagctatggcaatggcacaaaccacttcctcggcagcaagaatgctgctttcaggatcaatgtcaagtgctgatggcctaatgaatgcaagcttcctcacaaggacactcctcccttgctcttctagcatggcaactatctcagcctcagctccattcccaactgttacattggacttgactcagtctccaaatccattgcagttcccaaagcaaccaagccaattccaaatccccttccctggtgtccctcagaactttgccaattcacaagcctcattgctgcctcagatatttggtcaggcactttataaccaatccaagttttctggccttcaaatgtctcaagattcagacccttcccaattgagtaatcaatctcaaaggccaccaccacaccttgctgacacagttagtgctgccattgcagctgatccaaacttcactgcagctttggcagcagccatcacttccattatt

SEQ ID NO: 29229 - DNA, 548 bp, Glycine max
  Clone ID: TF_uC-gmflLIB3260P022b08b1
ttttccacgcgttctgtcacgcgtccgtccactcttgcgttgacgcgtgggtgatgccatatgatggaaaattgcatgggataccgaaggtctgtaaaatccatggatgtataacactgagagaaccttatagggtgattgagacttgccctgacattgatattcttgatgatggctattggaggaaataagtcggtcagaaagtaacgaagggcaatcctaatccaaggagttactacgtttgcacacacccaagatgtgcagggaataagcacgtggaaagagcgtctcatgacttaagggctgtgatcacaccttatgagggagctcacacccataatgttcctgcaccccgtttcagtgacggccattttgttaacagagcattgctcaataatgtttcagaccacaccaactctgcatacactctcgtattggtattgccagtgattcaccaatgtgacaattctcttcacatccaaagatcacaagcagcaccaaaagggccttgtcgcttgaccctagacatgctagaaagtccatgaagt

SEQ ID NO: 29230 - DNA, 202 bp, Glycine max
  Clone ID: TF_9204323
aaagaggaacatggtggatgagccagagcctaaaaaaagaatgaataaaggtgacttaacagaaatggattctccagtataacctggaaaaaagcccaagttcgttgtacatgcggcaggggatgtggggatatctggtgatggttaccgatggcgcaagtatgggcagaaagtggtgaagggaaatccacatactagggag

SEQ ID NO: 29231 - DNA, 974 bp, Glycine max
  Clone ID: TF_GmC1119_1
tcagaattctgctcgttgctctacgcaccatagtctttgttttcatttactaccatatttagttatcagcaatggacttctactttggaaactctcctccttatcccaataattatgctcataattctcttaatatggctctatcttcccctgagattgcactatccgattatctcatgctcgatgactatgttgatcatcaagattctcgatcatcacaaagcaccgagtcatctgaaaaagcaaccttcaatgatgccactcacggattcagtactggtgcaacctctaagaataataacataaactgcaaaaatgggattaatgaaaacaaaggtggagtgggtccaaggatcgcgtttagaaccaaatcagagcttgagatcatggatgatggatacaagtggaggaagtacggcaagaagtccgtgaagagcagtcccaatctaaggaactactacaaatgttcaagtggaggatgcagtgtgaagaaaagggtggaaagggatagagatgactacagctacgtgataacaacatatgaaggtgtgcacaatcatgagagcccatttaccacatactacagccccatctccttcgtacattctgatactactttcaaatgacaccaacttcaaacccttttgggcatttacacctccctagcttaattatgtgccaagaaaaagcttggaagattcgatcgagcaggggaagctatgtatcattgcattgtctaatcaatcataatttattttcatgctgtaataggttgaagagagtttctatacctttttttggttccacgtttaatatatctctcaattaaaaatcagcctttgctagttcatgtaacaaggaacatgattctccatgtgtaaagttgttcaaatcttaaaagtaagtatcttgtattaggattagagtatctctcttgtactctgtttaataataaaagttttgcctcctaaaaa

SEQ ID NO: 29232 - DNA, 585 bp, Glycine max
  Clone ID: TF_GmC421_2
tttgtctacatcttttcaaaccttacaatgactttttttggttgaaattctacagtacactaacttgtacctgtttcccttttccttgtccaaaaattccttggtcaaatttggcaactttcgtttttccaatgtgtccatgtgatttagaagaataatagcactcctagatgggcttgtctcgtgctgtgctaaacttgtgacatgtaggagttactacaagtgtacacacccaggatgtccagtgaggaagcatgtggaaagagcttcacatgacctaagggctgtgatcacaacctatgaggggaagcacaaccatgatgttcctgcagctcgtggcagtggcagccattctgttaacagaccaatgccaaacaatgcttcaaaccctaccaacactgcagccactgccataagtcccttgcaagtgatccaacacagtgacaattcccatcagaaccaaagatctcaagcaccaccagaggggcaatcacccttcaccctagagatgctacaaagtccaggaagttttggattctcagggtttgggaatccaatgcaatcttacatgaatcagcagcaaca

SEQ ID NO: 29233 - DNA, 720 bp, Glycine max
  Clone ID: TF_GmC120733_1
aagttggtgaagggaaatccacatttcagaaactactacagatgcacttcttctggatgtcctgtccgaaagcacattgagactgctgtggataattcaaaagctctcatcataacgtacaagggaatgcatgatcatgacatgcctgtgcccaagaaacggcatggcccgccaagtgcttcacttgtggctgcggcagcacctgcttcaacgaacaatgtgcagttaaaaaaaactggattgctacaaaaccaggaaactgaagctcaatgtttagaggacacagaaggagagttaaccggggaagcgttggaccttggtggtgagaaagcaattgagtcggctcgaactcttttgagcataggttttgaaattaaaccttgttgaatacatctttcataaatcatgcagttgcattgcatctatattaattaattggtaggcctcatgtaattttggcggtttcccatgtttaccttctctttcttgatttctttactcatgtatgtagtcttttagtggagcagttatatttgcttgtacacatgttcagcttgtctgaaacagcttgcgtagtcgagcgaatatggaattgacttgtatcttattctcagggagagtgagaacaggtgaggatagtgttatcattcaacttcactcacacattgtttgtttgagtgtaaatagaaaggaatgaaataaaaaggaagtcgataggat

SEQ ID NO: 29234 - DNA, 2059 bp, Glycine max
  Clone ID: TF_GmC6090_1
gagtttgcacgacaccaagtggactttgtgctacgagtgttgaagataacacgaaacaaaaaccatcatttagttgccatccatctcccaccgatgtccactcccaacaccgattccggcacggcgccgccaccgcgccccaccatcacgctccctccgcgcccctccgccgaggccttcttctccgccgccgccggcgccagccccggccccatgaccctcgtctccagcttcttcggctccgacgccgccgccgactgccgctccttctctcagctcctcgctggtgccatggcctccccgatggccttctccgccgctgccgcagccgccgacaactccggcaaggacgacgatgggccccacaaggggttcaagcagagcagacccatgaatttggtcattgctcgttcccctgtcttcactgtgccacccgggttgagcccttctgggtttcttaactcccctggcttcttttcccctcagagcccctttgggatgtcccaccaacaggctttagcgcaggttacagctcaagctgtcctagctcaatcccatatgcacatgcaagctgattatcagatgcctgcggtaacagctccaaccgaaccacctgtacggcagctgtcttttgctctaaatgaagcttcggagcagcaagtggtatcatgtgtatcatctgtatcagaacctagaaatgctcaactcgaagcaccggaactctcacaggctgataagaaatatcaaccatcatcccaggccattgacaaacctgcagatgatggctacaactggcgtaagtatgggcagaagcaggttaagggtagtgagtatccacgaagctattacaagtgcacacatctgaattgtgttgtgaagaaaaaagttgagcgtgcccctgatggtcacataactgaaattatctataaaggccagcataaccatgaaaagcctcaggcaaataggcgtgccaaagataatagtgattcaaatggaaatgtaactgttcagcccaaatctgagtcaaactcacaaggttgggttggacaattaaacaagtttagtgaaaaaattcctgattcttcagttgctaaaagtgaccagacctccaatcaaggggctcctcctaggcaactactacctgggtcaagtgagagtgaggaagtgggtgatgtagataatagggaagaggcagatgatggcgagccaaaccctaagagaaggaatactgatgttggggtttctgaagtacctctgtctcagaagactgtcacagaacccaaaatcatcgtgcaaacaagaagtgaagttgatcttttggatgatggctacaggtggcgaaaatatggtcagaaagtggtaaagggaaaccctcatccaaggagttattacaaatgcactagtgcaggatgcaacgtgcgcaagcatgttgagagagcttcaatggaccccaaagctgtcataaccacgtatgagggtaaacataatcatgatgtgcctgctgctagaaacagcagccacaacacagctagtagcaattcaatgccattaaaaccacataatgtggtgccggagaaacatcctttgctcaaggatatggattttggaagtactgaccaaagacctgtacatttgcgtttgaaagaagagcaaatcatagtataaaagtctggtgccaagctcacttattccacgtcctagtacagaatgaagttgtctagaagatgaaatggataatataatatgaaggtgtagtcactagtcatagttggcaatgtctattgttttctagtttcttttgtatgtaacaccttctttttgtacatctaaattatggaattggttgtataagatgttgtttacaggtatgaatatcatttcaactaatgtacgaacattattatataatataatttataaatactccttgtaagttgtaagggcaattctagattacaaataaaattgaagagctggcatcctacgattgaactccttttgtatgttatggaattttaaagaatgactttggtaatattaatcaattatggatttatct

SEQ ID NO: 29235 - DNA, 1991 bp, Glycine max
  Clone ID: TF_GmC1824_1
gcgaccagcgtagtggttatccccgtggtgggttctccgtatcatcctttgcggccaagcgtgcaacagattcaggctctttttatcatggtgctggaagaaaaatgataaatcctactacacttcctcaacagtcccttcctggtattgaggtttcggctcagtctgaaaattcttttcaatctcaaagtgttgatgctgtcaaagctcaaactgagaacaaaagtggttttcgtcttcaggccgactttgctgaatcacctcctcaaaaagataatggaattaagatgttctcagctgatcaaagggcttttgatgttgttggcggtggcaatgaacattctacaccaattgaagagcaagcagatgaaggagatcaaagaggcaatggagactcaatggctagtggtgttggtggtgcaccatctgaagatggatataactggagaaaatatggccaaaagcaagtgaagggcagcgagtacccacgaagttactacaagtgtacgcatccaaactgtcaagtgaagaagaaagtagaaagatctcatgagggccacataactgagatcatctacaagggaacacacaaccatgcaaaacctcctccaaatcgccggtcaaggtataggttcggttaaccttcatactgacatgcaagtggaccaccctgaacatgttgaaccacacaacggtggtgatggtgacttgggctgggctaatgtacaaaagggaaatatagctggagctgctaattggaagcatgaaaacattgaagccacatcatcagcatctgttggccctgaatactgcaaccagtcccccaatttgcaggctcaaaatggtactcacttagattcaggagaggcggtggatgcctcatctactttttctaatgaagaagacgatcaagtcactcatggtagtgtatcattaggttatgatggggaaggagatgaatctgagtctaagagaaggaaactggaatcatatgcagagttgagtggagctactagagccattcgcgagcctagagttgttgtacagactaccagcgaagtagatatcctcgatgatggttatcggtggcggaaatatgggcaaaaagttgtcaaaggaaatcccaacccaaggagttactacaagtgcacgaatgcagggtgcacggtcaggaagcatgtggagagagcatcacatgaccttaaatctgtaatcacaacatacgagggaaaacataaccatgatgttcctgctgctcgtgccagcagtcacgtcaacgctaatgcttccaatgccgttcctggccaagcttctcttcagactcatgttcatagacccgaaccatctcaagttcacaatggcattggaaggcttgagaggccttctcttggctcattcaacctacccgggaggcagcaactaggaccatcccatggcttctcctttggtatgaaccaatccatgctatcaaatctggtgatgtcagggttaggccacgcgcaagcaaagcttcctgtcatgcctgttcatccgttcttggcagcgcaacaacaacatcaacagcgacaacaacatcaacagcagcagcaacatcaacagcagcagcaacaacatcaacagcaacagcaacatcaacaacaacaatgcgctgcaaatgatttgggtttcatgttgccaaagggagagccaaatgtggaggctattcctgaacatggtggccttaacctgtcaaatggctcatcagtgtaccaagaaatgatgagtcgcatgcctcttggacctcatatgtaaaattttattccctgattctttaaagaaaaaactaatgtttacatctgataacatacatatatagatttatacatatatgtaatgccaaggcatacataggcggacttttcattattagactcattgtaatgtttgacattcttcatcacatgtcaaaggtatatgttattttgctcatttattgcatagatcctagccga

SEQ ID NO: 29236 - DNA, 1793 bp, Glycine max
  Clone ID: TF_GmC42427_1
gggtccacgcacgcgtccgtacggctgcgagaagaaaaaaacaggagaccaaaaaacgagacaccaaagtttcagtttctctctaacgttgttgttaaatgacagtagatctggtaggtgctgccaagatggggatggaggagaatatagcgatacaagaagctgcttccgctgggttgaagagtatggagcatctgattcgtgtgctttcttctcaaatcccttcttctgcttcgtcttcttctaacgcacaccaccaccgtcttaatctcaaccaccttgactgcaccgaaatcaccgacttcactgtctccaagttcaaacaagtcatcaacttgttgaatcgcacgggacacgctcgctttcgtagcgcaccttctcatccttctccttctacttctcttccttctcaacctcaacctcaaccacaaccacaaccatatgcactgactcttgatttcgcaaaacctgttatgcttaagtcaaatcccaaccctaacccttcttctaccgatttgtcggtttctcaatattctaagaccaaggacaccaccacctttagtatatctcctcccgtgtccaccaccacctcctcattcatgtcctccatcaccgccgacggaagtgtctccgacggaaagatcggccccgccatcatcgctgccggcaagcctcctctctcctcatcccaccggaaaaggtgtcacgacgccaccctctctgccggaaaagcctcttcctccgctcactgccattgctccaagagaagaaaatctcgtgtgaaacgaatgatacgtgtgccggcgataagttcgaagattgccgatatcccagtggacgagtactcatggcgaaagtatggtcaaaaaccaatcaaaggttcaccttacccgcgagggtattacaagtgcagtagcgtgagagggtgtccggcgaggaagcacgttgagcgagcccaggatgaccccaacatgctcatcgttacctacgagggagagcaccgtcatccgcaaccgcgtctgccggaaactgctgccggcgccggcgggacttttgccgctcatcctgtttaagcgacggtggatatcgggaaagtatggcaccgacagagatgagtgataaccgccgtttgcaattaacgggggggaagttgtaaccgtatattgtaacagtgggaggaaaagaaaaaaaaaaaaaaagaagggaacttattgcaagcgagggaaagaaaagaaaaagaagcaaagtcaacttttgctatgtttggtttggctgggacctttgtggaccaaaagaatcgtctactagatggatagggaccttttctgtaaatttgacacaaaaaaaaaaaactatgaaatagtagtactatacttactttttttttattcttgtttttccaacttaatttactagacattcatttactctcagcaatcaaaaaataatttaaatttttataaaattggataaatggcatgaaattggttggactttaggccacccacctatttatttgagtgtataggggagatctgatccaagtataggattccatgggcacaacagcaacacaagggttgaaaagaaaggatggggtgaaggaaaagtcaaaggtgaagttcaaaatggagaatctgagtagcttgtcaatggacgtggtgcgagtgggacaggtaccgcgggtcccgcgccagctcattccaatctttgcggttctatcataatcttctgcttttgtacattccaagatattttaatttaggaaaaataaaataaaacatttatcctcc

SEQ ID NO: 29237 - DNA, 958 bp, Glycine max
  unsure (1)..(958): unsure at all n locations
  Clone ID: TF_GmC42742_1
gtagctcggaancggctcgaggagaaaaactcaaagtcatcatcatctaccatggcaaattctgtggcattttccgacgagattcctaacatgagcatgagcttccctttctcccctgctttctctagtagcatctttgacatgatgccaccaccaccaccttcctcatctcacgatcctaaagctcccaactttgctaatagcttcatggacttgctcgctgtccctgctgattattataccccttctttattcgactggtcccaaaacaccgcccccacgtcagcaccaccaccttccaccacccaaatcaaccaccctcttccgtcgccagccagctccaatgtccccgacggctccgaggttctcaacactccggcgtctcccaattcttcgtctatttcatcatcgtccaacgaagcagcagccgccaccaccgccaacaaaacaacgggaaatgataatgaagaggaggaagatgaaacagcaatagatgcaacagcaggcagagaagaagaagatcatcaagaccaagacaagactaagaaacagctcaagccaaaaaagaagaaccaaaaaaagcaaagagagccgagatttgcgttcatgacaaagagtgaagtggatcacctcgacgatggctatagatggcgcaagtacggtcaaaaagccgtcaaaaacagccctcatccaaggagctattatcgttgcaccaccgcgacatgcggcgtgaagaagcgcgtggagcgttcctcggaggatcctacggtggtggtgacaacctacgaggggcaacacactcacccgtgtcctgccacgtcacgggctagcttcgggttcatgcactccgaagcaagtgggttcggacccaccagtggactaggttcggcacactttatgctgcaacaacaacaacagtttcgggaccaagcacaagcacaagcagcaatgttgtata

SEQ ID NO: 29238 - DNA, 953 bp, Glycine max
  Clone ID: TF_GmC182872_1
actgcaaagatcaagatatcttatacacgatattaaagtccatgacatccctacacatggtcatcttatctagctaaaaaataataatctatatattgacaacaaaaaaagcttccaaatatatggacaagataaaatatttttttgtggggtaatgtggttccctccaaataggaaaaatatggagaaagaaatctagggaaatgttttaacaagcatatcgatactgagagttctgaataatgacatgactgagttcatctttgaagcacactgaactctgtggcaaagtacatggcaatctatcaataatatcatagtgccttaattgagttcataattaaatacatgctgatcatcattataagcaaatgacattgaccttactagaaagaggtaaagcattcattctcggatgaatttgagtcgtcgcaaggggagtgattgtgtctaccttcataggtggttatcaccatacgacaatcctctgatagtcgttcaaccctcttcttcaccctacagttgttgtgggtgcaccggtaataacttctgcgatgtcccctcttatgacatcgtcctcgccgtatctcctccgtgtgtatccatcacaaactccaaagatatattttttaatctttaaattgacatcatactagttcattaatttactcaaatggagccaacatatggtgcatgtgctatgtttaacaaataactatgtcgcgcacttaagtatatcgtcaggatttgatccttagattcatttgcatgaaaaaaataatctgttaaagaagattaatttcttaaatgaatttcaatactttgaataattaatttctgatttcggctgcaggaactgggatcaccaaaaaaaatatactagatgggggactataaattgatgtgcatgacagatactgcgtagaagttattttggttatatttcaaaggat

SEQ ID NO: 29239 - DNA, 918 bp, Glycine max
  unsure (1)..(918): unsure at all n locations
  Clone ID: TF_GmC373_2
ccctcttcttcttttttttattttttatcttctcttatcttaaacttattcttctgctacaccaatcccatccttggtccatgtcctgttcaagccatctttggcatgtgccacttggcctctgacacaaaaacttttcttttcggaaccaatcatttttcatcaaacttcaacatttacataactcttaattttaatcacttttgttcgtagctacatcaacatggaccacatgggagacccgaagagcatcatacatgagctgctacaaggtttggagttggcaaggcaactccaagtgtatctccacatgccaacttcgtcccaagaaacacgtgacctattgatccagaagatcatatcaacatttgaaaaagcacttgaaatggtaaattgtaaagggccagtgccagcgggtgagtcatcacatcatcccctaggggctgcattaatccgagtgtcagattcacctttgagcagtagtccccgcagtgaagactctgatagagatttcaaggaccaggaccccaatgctttcaaaaagagaaacactttgccaagatggacaaaacatattcgagttaccccaggaatgggagtggaaggacctcttgatgatggatatagttggagaaaatatggccagaaagatatccttggagccttgtacccgaggggctattacagatgtacccacagaaatgttcaaggctgtatggcaacaaagcaagtgcaaagatccgatgaagaccccaccattttcgaaatcacttaccgaggaaaacacacctgcacagtggccaacaacgtgggttcttcatcaccaattccactagaaaaccaggaaccaagtttgaacaacacanatatttctcagcatcagcatcagcagaatatcctgcaaagccatgaacaaca

SEQ ID NO: 29240 - DNA, 1265 bp, Glycine max
  Clone ID: TF_GmC43050_1
ggctgggactgttgtcctcgcatccctggtggcgcctcctcagcatccgcgcccgccagcagccctgtccatggcgagcgcaacgtcgcctgcactgaattgctgcctgtccggctcaacccccaggtcactcggacgcacgcactcttctgcactgtcgaaccgtccattaaaaatactctccgctcccttcttcccagctgcagcctcatcatctccgaccctccccaaaatcatgagcaacagaacctgaatcaattgggcttgctgcaaattgagttagaggaggtgaagaaggagaatcagaatttaaggtcaatgctaaatgagatctctgaacactacgctgctcttcagaatcagttattgttggcgatgcagcagaagaaactatcttcatcacctcgaaataatgaggacatgcagaaggacagccagcagaataacatggagaaaccagcgttaccctcctgcaggcagttcttaaatactggtaaaatcaataacagggtaatattacaagaagcaaaaatcgtagaagagcaagcatttgaggcttcttgcaagaaagctagagtgtccgtaagagcgcgatcagaatcatctttgatgggtgatgggtgtcaatggagaaaatatggacaaaagatatcaaagggcaatccttgtcctcgggcctattatcgctgcaacatgggaactgcatgtccagttcgcaagcaggttcaaaggtgtgctgaagatgagagtgttgtcatcacaacctatgaggggaatcataatcattcactcccaccagcagccaggtccatggcgtgcacaacatcagcagcactgaaaatgttcctttctggctcaaccactagttcacatggaagcacttattcttattcaaattcagacctcttctctccactatgcacttctacctactatccatctgcagcaccatcatgtccaactataactttggacttaacccaaacctctaagaacaacatgaaattcccaagtgctatttcttcaaaccatttgcaaccttttccactttcattgcatggtcaacctcaacaatctgagggaatattaccttcagagaaaaaccttgccttggtggatgttgtcagtgctgccataaccaacgatccttctcttaaggcagcattagaagcagctgtttcctcaatcattggagactctcagaaatcactgccaactttgtaggagtgataatgacccctcttctaagatgtctgcagtatcac

SEQ ID NO: 29241 - DNA, 433 bp, Glycine max
  Clone ID: TF_LIB3167-037-P1-K1-E7
aatccacaacattactttgaactgttattctataggaactattacagatgcagtagctgcaaaggctgcgtcgcgagaaagcaagtagaacgaagcaccaccgaacccaacacgttcatcgtgacctacaccggcgaccacaaacacgcgaaacctgttcaccggaactccctcgcgggaagcaccagaaccaagccatccacgacccgtttatccgaacccaatgaatccgtgtcttgcccaaaaaaagaaaacgcatgttcttcaaattccgagctttctccaatgttgtcagtttctgacacgctggaaaacgaggaaacggtctcggccagcgaacccgattgccctgacatggaaattgagccctctgataacgacgacgttttgatacctaacacgggtgccatgttcgacgctgttctcttgggct

SEQ ID NO: 29242 - DNA, 1075 bp, Glycine max
  Clone ID: TF_GmC855_2
aattgagtatttgctcgcacgtccacaataaactacactgctgccatctgtcaccatggcggctcttattaaacacctaccccttctcctctctcactctcactctcaccatttttctctcctcaacccattgcccactcatctattcactatttctatcatattatagttatataattaaacatagcaatagcaaattatatatatatatacatcatccaccacccagatttaatttcactccaacccatcatgcatcaccgcagattcagcaaattaatacatgtggctgacccagatgagcccgagtcagggcccgagcccgcctcagaagctgggcctgcttctccttcttccggtgaagacactaaaactgaagcaccgtcacccaagaaaaggagggagatgaagaagagggtggtgacgataccgatcggtgacgtggatggatctaagagcaaaggagagaattatccaccgtctgattcatgggcctggaggaagtacggccaaaagcccatcaaaggctccccttacccaaggggatactaccgatgcagcagttcaaaggggtgtcccgcaaggaagcaagttgagcgaagccgtgtggaccccacaaagctcatagtcacctacgcttatgaacacaaccactcccttccttttccaaaatcaaattcttccgccgcttccgccgccgtaagcgacggcgcagccgtctcgccgatagagtccgccgccaggttcccgccggaggaggagatgacggtgttcgcgacagactccgacctcgaactcgccggcgacgcggcggttctgctcagccaccaccaccaccacttcggctggttcgatgacgtagcgtccaccggcgtcctagagagcccgatctgcggcgaggtggatgacgtggcggtgccgatgagagaagaggacgagtcgctcttcgccgatctcggcgagttgccggagtgctcggcagttttccggcggaggaatattccggcgaccagcgcgatccggtgcggcggcatcacaggataacgcgggtggaccctttttttgtagtcccgcg

SEQ ID NO: 29243 - DNA, 620 bp, Glycine max
  Clone ID: TF_LIB4281-007-R1-K1-B11
ccacgcgtccgaaatttctctttccaaacccgatcaggacctcctgcttcatccacagcaacataccagtcttcaaatgtcacagttcaaacagtatgtgaccaatttcaatgcatagactcattttcattgaagcaaagcctttgtttttctctgtgtgtttttttacatgacaagttctctttttctaaatttttaaaactgacgccttgtattttcaacagccatggagttttcaggaggccacgaaacaggataatttttcctcaggaaagggtatgatgaaaactgaaaactcttcttccatgcagagtttttcccctgagattgctagtgtccaaactaaccatagcaatgggtttcaatccgattatggcaattaccccccacaatctcagactttaagtagaaggtcagatgatgggtacaattggaggaaatatggccaaaaacaagtgaagggaagtgaaaatccaagaagttattacaaatgcacataccccaattgccctacaaagaagaaggttgagaggactttagatggacaaattactgagatagtttataagggtactcataacccatcctaggctgataatactaggagaaacttatcgaac

SEQ ID NO: 29244 - DNA, 1834 bp, Glycine max
  Clone ID: TF_GmC397_2
ctccagttgcaacatactaagtgggttggctggtttagatctgagcaacagcttttaattttctacttgcttgaattttattggaagtttccttcttcaacttgtgctccttctaagtgctactccctccctatatatatatgcttctctcacttcacaaacttaatttgaacctctcatcttgctcatcatctggaatttatttggcagtcatggattattcatcatggattaacacttccttggatctcaacattaatctccatagggttcacgaagaacttcccaaaaagcaggtggaaaacaattttttctcattggatttggaggtgaagaaatcttctgtaaaacaagagtcagcaggtgccttggcggaggaactgaagcgggtgagtgcagaaaacaagaagttaaccgaaatgctcacagagatgtgtgagaactacaacactttgcgaagcaatttgatggaatacatgaggaagaatcctgataaggagctcagctcatcaaggaaaaggaagtctgcaagcagcaacaacaatagtactattccaatgggagtcaacggaacctctgaaagcagctcaaccgatgaggaatcctgcaagaatccaaaggaagacatgaagacaaaaatttcaagagtttatatgaggacagaagcatctgatacaagccttattgttaaagatggataccaatggaggaaatatgggcaaaaggtgaccagagataacccttgtcctagagcatatttcaagtgctcttttgctcctagctgccctgtcaaaaagaaggtaaatatatataatcaaccaagtgctaactagtaactaggaaatggtttggtttggttactcacatgttagtagggaaatggatctcaagctaagtttgttttgtttttggtttggttattcaggtgcaaagaagtgtggatgatcaatctgttctggttgctacttatgaaggggagcacaatcatcctcagttttcttcccagatggaagcaacatcaggttctggccgtagtgtgacccttggttcagtgccctgtaccgcatctctcagcacttcaacaccaacacttgttacccttgacttgacaaaatctcagggaagcaacgattccaagagcacaaagcctaaaggagattcacctaaagtacctcaggttttggtggaacagatggctacttctttgaccacggatcctaattttagagcagcacttgttgctgccatctcaggaagattgttgcacaataattaaatggaattttggtgaagtgttgctaatttagtgtcaattgtttaagtattccataaaatagagatcattctttagagcaaggggtctctctatgtaaatacaacatggaaggctgggacatatttgatcctttaaagtggaaataaagttccactaaggatgacatgttgagctgattaaacaacagaaaatcaagctctgcaccaccctctgcctcatcatgatggtaaagatttagcaagtcttttttggctaatatatctaggatacctcaaattaaatttcatagtaggttgtagcacacattctcggaaagatctttcataaagtgcatctctacggcaatttaatttctcccttttcttctctcactactctctctggcaagccaactctatatctagtcctagttttagaatttcatttcagaaattatattatacattgatcaagtattataagtgatggaatgtaactcaaaacatggaaaaatgaaaaaagggggtccgcatgattacgatttgctaaaataataaagattttgtgccctagggcccc

SEQ ID NO: 29245 - DNA, 717 bp, Glycine max
  Clone ID: TF_LIB4392-029-R1-N1-B6
gagtctcaatatgttactattatacttgttttcacacacgcatttgaaaaaaacataaagatccctacctatatatagcaacatagttatcaactttaacctggctcctcctacttgacggtatctctatactggtggtacctgtacctgtttatctgttcttgacttaaatgactcattacagagtcagtgattaacatgatccgcagaaaaactgaacaaacaaatcaatcgaaattagaggatcatatcatctcacggtcacttcaatttcagatccaattgagacagatagaaaacactaaataaagcagattatccaagccaatcagtatactagaaatcaaactgaagaaagtcaagtcagatctaatattaataatgtttcaacatgatttgaactttagaaatcaattgcaacgctaattcgattggaaaaagaagaaagcatgtgtggctgaccttgttcactgggcagcttggggcatatgaacacttgaagtaagccctaggagaagggttatctctggtgacttttttaccatattttctccactgatatctgtccctcacatacagcaaaaatatccttgctcagattgatgccacaagatgccttgctaattcctcctcgagttatgtgcaaaattctatcaaatacatctggatgaccatagtggaatcgcaccctgtattgcccaagaaggcaagaaccat

SEQ ID NO: 29246 - DNA, 798 bp, Glycine max
  Clone ID: TF_GmC142606_1
gtttaagactcaatggaaagcaaagacccaccaaacccaccaccccaaaacaaccctttcatattcactcctaattcgatgttgcaaaaccctaattgggaccctcaagagcaatcagggctatgtgacattgattggggtaaccttttctctgcccaaaacggcttattgcttaatggggatgctaaagatgaaattgaatgtgcttcttctttttcttttgtggctcaaaataagggagtttgtgaagaggaaaagggaaacaaggagaaaaggaaaggtgggaggatgaagaaaacaacacgagtgccaaggtttgcgtttcaaacgagaagtgcagatgatattttggatgatggttatcgctggaggaaatatggtcagaaagctgtgaagaataacacatatccaagaagctactaccgctgcacgcatcacacgtgcaatgtgaagaaacaagtgcaaaggctatccaaagacacaagcattgtggtgacgacttacgagggaattcacaaccacccgtgcgagaagttgatggaaactctaacccctctcctcaagcaaatacagtttcttgccagcttgtaacgtggaactggtttctctcctacaactacatgcatatcaagcacatttcgtttatgtttaaatatcattagttaatcacgcacatgtagatcaattgctgtaagattattttaacctaacaataggtgttgagttcgagtactgaatctattaattccttggagagtattgaatctattaaatattaaataaaaaaaaaaaaaaaaa

SEQ ID NO: 29247 - DNA, 2118 bp, Glycine max
  Clone ID: TF_GmC1278_1
aaaattttcacctatctcatcaatttccatattcatgaccacttctttctctgaccttctttcttctcccaccacccaccacaacctcggagttttcgaaagacctcatcataagtcctcctcgtcggatcaaacaggttcttcaggcggtgtgccgaaattcaagtccacaccccctccttctctccctcttagccatcatcttccaccaatattttctccttcttcttactttaacttatcatccctcatgggttaagccttgctgaactacttgactccccagttctccttaactcttccaacgttttgccatctccaacaactggatcatttgctggtcaaggcttcaactggaagagcagttatggggaaagccagcagcatgtcaaagaagaagacaagagcttctcaagtttctcctttcaaacacaaacacaccctcctcttccatcttcaaatggatttcaatcttcaaccggcgtagttcaaaccggatggagttttccagaaattgctaaacaagatggttttgcctcaagaatgagtatgagcatggtgaaaactgaaaccacttctgcgatgcagagtttcaactctgagaataataaccacaggaatggttttcaatcagatcataaaaattaccaaccacaacaagttcagaccttaagcagaagatcagatgatgggtacaattggaggaaatatgggcaaaagcaagtgaaaggaagtgaaaatccaagaagctactacaagtgcacataccccatcaaatggattcagttgccttagatggacaaattactgagatagtttacaaaggcactcataaccatcccaagcctcaagctgcgaagaggaactcattgtctgcctcatcacttgcaattcctcattcaaatcatggcggcattaatgaactaccacatcaaatggattcggttgccactcctgaaaactcatcaatatcaatggaagatgatgattttgatcatactaaatcaggaggagatgagtttgataatgatgaacctgatgccaaaagatggagaatagaaggtgaaaatgagggtatgccagctatagaaagtagaacagtgagagaacccagagttgtgtttcagacaaccagtgacatcgatattctagatgatggatacaggtggaggaaatacgggcagaaagtggtcaagggaaatccaaatccaaggagttactacaagtgcacattccctggatgtccagtgaggaaccacgtagagagagcctcacaagacctaagggcagtgatcacaacctatgagggaaaacacaaccatgacgtgcctgcagcacgtggaagtggcaacaactctatgaatagatcattgccaataaccaataccacaaacaacactagtgcagcaacttctctatacactaataacaattctcttcagagtcttagaccaccagcagcaccagaaaggacatcatcacatttcaaccccaacatgcagcagagttcatcaggaagttttggattctcagggtttggaaatccattaatggggtcttacacgaatcaacaatctgacaatgttttcatcactagagccaaaaaggagcctggagatgactcgtttcttgactctttcctatgctaaaagaatattttcttatgcatagttttggatggttggaattcttggaaggggttggtttaggattttacttgactaataagatacccggttcattccatttatttataacttaggtattttaatttctgtttgtaagttttagtacttaattgacgttgtttatttatgtaacaaaaatttgcattagaattcaacatgagttattaaggtgaaactctaattataacagaagaataacactaaaaatactttaaaaaattacatttaagtttcatccactttttttaattttgtattgttattgtaaaaattgcatgcaagtttttggtatatggtaattttgtattattattgtttgttgtaacaaacacacagattggtatgctattttctatatattttttagtaatcgtgtgacttcagttgggagctagaaactctttttatcattattttagtaatcatgtgg

SEQ ID NO: 29248 - DNA, 1073 bp, Glycine max
  Clone ID: TF_GmC351_3
aaatttagagtcgtaaaaatctaaatatcgaatttttaaagattacatgtaattaattttgattttgcttgtaacatgttctttttaaaaataaataaaggtgatttattttagcaattttgttctctgatatctatatatattttcgcgtgactctgtaggaaaatgaggttgaagagggtagtgagggtaccagctataagcttgaagatggctgatattccaccagatgattattcttggaggaaatatggacagaaaccaattaaaggatcgcctcatccaaggtacatcaaatactatgttactactatataactaatttaatttaaattatttttctttttgcaaagtttattcgtcttggactatcgttagtttatttggtataattggtaattgctagtttgtttatatagataaatattaaatttattagtagagtggatcgaatcccgtaacattttttttctttaaaatcatccaatttaccttatatgtctctcacttgatttcaaaatttaaagtggacccaattaatttgtttcttttatgctgtttctgagtacctattgaatctgaggagtggtcatgggtgttaattttttggttttgggaatgataattgcaggggttactacaagtgcagtagtgtgagagggtgtccagcgcgaaaacatgtggaaagagctttggatgatccagctatgctggtggtaacatacgagggagagcacaatcacactgtctctgctgccgatgctactaatctcattctagaatcgtcttgaaattcgtagccaaaatcatcttttttccgtgacaaggtttagaaacgcaagccatcatttaatcaacgttacaagttttcaacggggtgcaattatggcgtgttgaattgaattgcaactttactactctagtcagtcaggggggcattaaaatctccaaagaaattagtagtgggtgttgttccctttccctgtacactattggattcttttttatctttatttttttttttctcgttctcttcaaggctaaatggaacattgtgaatccgttgcatcatt

SEQ ID NO: 29249 - DNA, 463 bp, Glycine max
  Clone ID: TF_jC-gmro02910003h07a1
tgagctcggaattcggctcgagctacaaagctgtctgatttttcatctgagaggactgcttcttagtctgtatacccgtcaatccagaacttgtcctcagaaatggctgccggtaaaaccagatttacaatgtgagccaggtccagggtcttggtattccgactatactagtgcatctgtgtctgttccagatcaaaagatagcagaacatgggttcaactgtagaaattatggacagaatctcgtgaaagggagtgaaaatcctcataggtattacaagtgcactcatgctaattgctcagtgaacaagacagtggagaagactttggaaggacaaatgactgaagtagtatataagggccatcataaccaccctaaactgcagtctactagaagaacaaactctcaatcaatgaataaaccttcttcatcgtgcacaaattcatggatatctgatcaatca

SEQ ID NO: 29250 - DNA, 500 bp, Glycine max
  Clone ID: TF_jC-gmst024160g10a1
ggctcgagggcctctgtgttttcttgtaccactgcctgcttcgataccaatactgttgatgacagaaaatcaagtttctttgagttcaaaccactcagcagatctaatatggttcctgcagacttcaacaaccatgtaagtaaacaatctactcaagtagaaggtccaggaaaaactcaatcatttgcttcctcaccattagtggaaagtgagatagcagttccttctaatgaattaagcctatcatcacctgtacaaaaggttagttctagtgctagtgctcctgttgatgttgacttggatgacattaaccacataggcaacacagctactgggcttcaagcatcacatgttgaggttagaggcaagtggactttcagttgcagctgagaaaacatctgatgatggatacaattggcgaaaatacgggcaaaagcttgctaaggaagttgattttcttgcagttatacaaatgtacacatcccactgtgagtgaaaaa

SEQ ID NO: 29251 - DNA, 2066 bp, Glycine max
  unsure (1)..(2066): unsure at all n locations
  Clone ID: TF_GmC581_1
aagctgaagcgtttttttttttttttgttggtttcttttgttggatctagagaacccactcgtgcttgtgagtcccaggagatcgaggttaaactcagtttttatatatacagctgggaaatgaaaattcactgaagccactttttagcatgttgccacttctcagatttctgaatcacatgtaaagtgagcagcacactttacaaaacagacatattgaagatgcatatcaaggaagcagaaagggtggtcattgccaaaccagttgcatcaaggccaacttgttctactttcaaatctttctcagagctcctagcaggtgcaatcaatgcttctcccgctattccatcttctcaaacaacagtttctgccattagaccaaagacagtgaggttcaagccagcaatgaatcaacccccttctgggtttgttttttctcaggctgatacttttggagctgcacttgataattcctctgagatgagtcctaaacttgacaccaaacagtccctcatatacaagccaacggcaaaactcgtatcaaagacaactgtgtctcttttggcaaatatgggaaattgcagtactagtcggcaacaaacacagcaaccaatggaggccaattttcaacattccatccatgaaaaatttagaacccaaccgagctcaaatcttgatcagagtattaccccgcaaacagaaataaattatcagagcagtgaacctagtaagatggtgcagcagaacatagaggaggaccaaaaagttttaacatcctcagtcaattgtgatcgaccttcttatgatggatacaattggaggaaatatggtcagaagcaagtgaaagggagcgagtacccgcgaagttattacaagtgcacacatcctaattgtccagtgaaaaagaaggttgaaagatcatttgatgggaatattgcagaaattgtttataaaggtgaacacaaccattcgaagccacagcttcataagcgaaactcagcagcagggacacaaggatcaggggttatgtctgatggaatggttcaagatatgtggagtaatagtcacagtgagaggaacgaaggcaatgaagttagaattgagaacacaggattgtctatgcattcagattattatgtcaaagttccacagcctaatgattcttcattaaatattggtgcaactaatgctggtggaggaagcatggaaaactcttgtggtctaagtggggaatatgaggaaggaagcaagggatttgaggcacaggaagatgaacacagaagtaaaagaaggaaaaatgagaatcaatccaatgaagcagcattatcagaggaaggtttagtagagccgcggattgtgatgcaaagttttacggattctgaagttcttggagatggctttcgctggaggaaatatgggcagaaggtggtgaaaggcaatccataccccagaagttactttagatgtactaatatcatgtgtaacgttcgcaaacacgtggagagagcaatagatgacccgagatcatttgtgactacatatgagggaaagcacaatcatgagatgccactcaagaacacaggaactgtagcatctgaaagagattcacaggcttctcttagtaaagataaaccatgattgacacttcaattagttaacaagtatgattcaatagcattggcagacatctgaaataattcagaggatgcattccttttatatcctatagtatgctcagaataattgaagttgatcagaaagatcaagacattgacaatttcaaatgcagtacctacttagactaggatatttgttgataataaccgtattggtgctgataaattgtattatatatggaatcaagggcactggcttagaggactgcccttcaataactttccatctctgctagctgcctttgtataccaaaccggtatattctattctctatcatcatatataaattaatctggagtactatatatcatatgctaaaaaaaaaaaaaaaaaaaaaaaaaaaacgccacaagcccccccattagccccggctaccgggaatnnnnatg

SEQ ID NO: 29252 - DNA, 2251 bp, Glycine max
  Clone ID: TF_GmC4714_1
ggaatgaatgagttgtgtaagaaagagatccatccaatgttgcaagtcaactgagtagtcctgctatgctctgctctgctctcccaaacatctctgacacaacacacaccaaaatgcataattgaaatgacccttttgcccttccttccttccctacttctcctttgactctccgcaacgccaccgcccacaatggacggcaccaccaactccggcgaaccccgctccagttcggtgctccaaaatactggggcatccgaggatccgaatcgaagcgggtcgggtcagaattcgatggcgaggtacaagctgatgtcaccggcgaagcttccgatctcgaggtcgccgtgcatcacgattcctccggggctcagtccgacgtcgtttctggaatccccggttcttctttccaacatgaaggtggaggcttcaccaactacagggtccctccgcaagctccaacaaacagtgcatggttctatggcttctgctgcctctgctacatttccagtaaccactgcctgcttcgataccaatactgttgatgccagaaaatcaagtttctttgagttcaaaccactcagcagatcgaataaggttcctgcagaaactcatactagcatatccaacttcaagtttgttcataaaagctcagcaccagtataatttggtgcttcaaataacagctttgaaagtgagatatcagttccttctagggatgaaggtccatctttaaacctatcatcatatccatgcagtcagagcatgggaagaatactaatgggtcatgaaagttgattacaccacaacacagaaatagagaattaagcgtcacattttgctttcttttttcttatttttggcgggtatagcttcaaaggtgtaacatctcattttctgtaagaaaatgcagatagttcttttatgtttatatcactattccatagttgctgtttagtaaagttggtagcagctccagtgaggtgaaaaaactttttgaacgctctcatgatggtcaaatcactgagatagtttacaagggaacacatgatcatcctaaacctcaatcaagctgccgatactctactggtactgttatgtatattcaaggagagagatctgataaggcttctttggctggccgagatgacaaagcatccactatgtatggtcaggtgtctcatgctgctgagcccaacagtactccagagtcatcacctgtagccacaaatgatgatggtttagagggtgctgggtttgtgtcaaacaggaataatgaagaggttgatgatgacgatcccttctcaaagcgaagaaaaatggaacttggaaatgttgacatcactccagtagttaagcctatccgggaaccacgtgttgttgtacaaactttgagtgaggttgacatattggatgatgggtaccgctggcgtaagtatggccaaaaggtggtgagaggcaatcctaacccaaggagctattacaaatgcacaaatgctggttgaccctgtccgaaaacatgtggagagagcatctcatgatccgaaagcagtgataaccacatacgagggtaaacacaatcatgatgtacctgctgcaaggaatagcagccatgacatggcagtaccagcagctacagcaggtggacagacaagaattaagttagaagaaagtgataccattagccttgaccttggaatgggaattagctcagctgctgaacatagatcaaatgggcaagggaaaatgctgcattcagagttgggggagacacaaactcacgccagcaattccaacttcaagtttgttcatactacctcagctccagtatactttggtgttctaaataacagctcaaatccctatggttctagagacaataggagtgatggtccatctttaaaccattcctcatatccatgcccacagagcatgggaagaatactattgggtccatgaagttgattacacaacagatattaaaataaaaactgagtaacaatttgcttttttcttcttatttttggcgggtatagcttcaaaggcgtaacatctcattttctgtaagaaaatgcagatagttcttttatgcttatagcactattcgagagctgctgtttagtagaattggtagcagctccatcttgacttttaaatctaattgccgtttgtaattgtataattatatccaaattcttctgtataaatatgaagccgatatcaaagttacctccacaaaaccttagtcctc

SEQ ID NO: 29253 - DNA, 1135 bp, Glycine max
  Clone ID: TF_GmC373_1
aactcggcttcttcaggaatgggagtggaaggacctcttgatgatggatatagttggagaaaatatggccagaaagatatccttggagccttgtacccgaggtaattaaaaccaaatttaaccctcacaaactattatgtttacattctaatttctaagtctcatggattgaactagatttatataattatatactttgtctgtatgcaggggctattacagatgtacccacagaaatgttcaaggctgtatggcaacaaagcaagtgcaaagatccgatgaagaccccaccattttcgaaatcacttaccgaggaaaacacacctgcacagtggccaacaacgtgggttcttcatcaccaattccactagaaaaccaggaaccaagtttgaacaacacaaatattcctcagcatcagcatcagcagaatatcctgcaaagccatgaacaacaacaaaacgaactacttctgagcctgcggaaagggttgagagtccaaacagaaaacctagattcccccgaacaaccattagttccattccgtttccctttgtccacaaacataaaaaacgaaagccatgtttttccttcccctgtgcttgaaaacttcacttctccttcttatgtttcccctgctgcatcaggaataggccacttttctgtgtctccaagtggagtagtgaacagctttgaagggaacccaaatttggcaaattctgagtctcagatcaatgatatgatccctgccactactacaacttcagcagctccaaactcatcaaccgttggcttagagtttccctttgaccagtttgaatttgatggccagaacttcacattcgataacccacggtttttctcttgaatatgctcaattcagagaagaagccaaataaatcataaaaactaattaattttttttaaaaatgaactagaagcatatggtgaaagtttgtggtaacattctagaataatatgaccctttagaaaaagaggcaaaaacatttcaatgtatgtcttagtcagctacttgtgtcgtaggaagaatgtgcaattctaaaattgcttagtcaataagaattttcctttatcattaaaaacatgtcaagttaatatctggtaggtttttctttta

SEQ ID NO: 29254 - DNA, 317 bp, Glycine max
  Clone ID: TF_LIB3050-015-Q1-E1-F6
aagcgatacgacaacagaaagggggcaaaaaccgctcaatggatccccgtactcgagggggtattacacatgcaatagcgtcaaaaggtctccgacgcggacacacatggaccgtactccggacgatccggcaatgtcgactgtgacatatgaatgagagcaccgtcactcgattccagagaacatttccggtcgagtgtgtttgagattcaatcacagtcaaggtagctgcaagcttaatctgacattagtacatcagtagattaaatcacaagggaaacatagtcggctctcaccaagatcatcgtaatcaacat

SEQ ID NO: 29255 - DNA, 650 bp, Glycine max
  Clone ID: TF_700874291_FLI
attaattaatactgtagtaccatctcttcaatgtgaataaaatcaatttaattaactatgttgactcttgataaagatttatatatgcatcaaggctcaagaccgccaagttaactttaattgatttctattttgtaaataatcaagaccatatatattttaattaatgattaggtgcaaagaagtgtagaagatccaagtgtgttggtaacaacttacgaaggggagcacaaccatgggcaacaacatcaaactgcagaaatatcaattaattcatcaagcaaaagtgaaacacctaggcctgcagtttcaccctcagccatgaatattcggagtagtgcagcagcaggtccaattgtaacacttgacttggtcaagtcaaaagttgttgacattaatgcgcaaaagtcatctctccagcagtttttagttcaccaaatggctacttctttgacaagagatcctaatttcacagccgcacttgcttctgccatctctggaagaattctagatgatacttctgtgggaaaacgttgaattattaagagatatatatgtattaatttcactgatgaacatatatgaattttgtcacttttcttcgttttaatatttaataacagctagtcacgaggagtagtgttctatgc

SEQ ID NO: 29256 - DNA, 726 bp, Glycine max
  Clone ID: TF_GmC26844_1
ggtctatttcacacgcaccttcacttccacatttgtagcttatatctcctcacttaagcaccctcttatttggcacatcagtagctcactttggcttgttgagagcaattcagcaaccaaaggccttagctacaactaaaactaggagagcaattccattgccgttgctgttattagttcattttcacaaaatggaagagagcaccaagaggaaacacactaatctgatccatgaactaatccaaggaaaggaactaacaaagcagctcagtgaccatctggtttcatcttctccaacgtcccatgaaaccaatgaattgttggttgagaaaatacttttgtcctatgagaaagcactcaccatgctgaactgggggtctattatgggagaggccaaaaccaccagtggcaacatcatggattcccattgttcttttacaaatggtgaaagccccagaagtgaggtcgtggaccgtgaatttgagcacaaagctgtcttcaagaaaagaaagaccatgcccagatggaccgagcaattgtgaagatttgctcaagaacaggacttgaagggtctttggatgatggatatagctggagaaaatatggccaaaaggatattctcggagctacatttccaagaagatattacagatgcacacagagaaatgtacaacggtgtctagcatcataacaagctcaaaggtcagatgaagacactacaacaat

SEQ ID NO: 29257 - DNA, 415 bp, Glycine max
  Clone ID: TF_uC-gmroLIB3259P236f07a1
tcgcgatctagaactgagactctgaaacacgtttgcgagaactatgttgctttgcagaaacatttaaatgaattcagccaactgaggaacgcaaattttgataaagaagcaggaacagtaccgtcactgaagagaaaggccgagagtgtgaatctgtttggtattaacaactatactgagtgcagcaccatcactgaggaagaaacattcaaaaggcccaagcatagcaccgagccaaaggtttccaaagttcttacacgaacagatgcatctgataccggcttatatgtgagggacggatatcagtggagaaaatatggtcaaaaagtcaccagagataacccttctcctagggcttacttcaagtgttcatatgccccaagctgcccagtgaagaagaaggtgcaaagaagtg

SEQ ID NO: 29258 - DNA, 900 bp, Glycine max
  unsure (1)..(900): unsure at all n locations
  Clone ID: TF_GmC94_2
atagttcagttgagtgggtgtggtgagtaaaaaagaacatgaaaccttgtgaccacaaggttcaacttgtgagggggatcaaaacattcctagattggaatatggcaaaacttggttgttctagtcgtaggaaagcaattgaggagctccttagagggcgtgattgtgccaaacaacttaggagtgtcatcaatgggagttgtgaagatggatcatcaacaaccccatcatttgctgaacaacttgtgaaggaggtgctcatgtccttcaccaactccctctcgttcttgaagaacaaccccacttctgaatcccatgatgtttccaatgttcaagtttgtgaatctcccaagtctgaggactcccaagagagcaattgcaagagctccatcattaaggaacgtagagggtgctacaagagaagaagaactgaacaaacatgggagaaggaatctgaagctccaattgatgacggccatcagtggagaaagtatggccaaaaggagatcctgagtgccaaattcccaaggaactactatagatgcactcacaaatttgaccaaggttgccaagcaacaaaacaggtgcaaagagttcaagaggaaccaatcctatacaagaccacctactatggcctccacacttgcaagaacttggcaaaccctgagatcatacttgaccctatgtccccttcatcctcatccaagttccttagctttgacaactccttcccaaccccatcaaagcaagagtgcccctttctctcatcttctaatttgccatcatcagtgaaagggggagtgcagggaggaggtcccctccctcaacttncctcccatcatatctcatctcttctgacctcacttttgatagtcaccaggcatcatgtactctatcatc

SEQ ID NO: 29259 - DNA, 224 bp, Glycine max
  Clone ID: TF_700832484H1
atcatcgcgtgatacagtaggtacatgacgctgcagagggtagtgacggtaccgcatataatcttggagatggctgatattccaccagatgattactcttggagaaagtattgacataaacccattaaaggagcacctcatccaatgggtcactacgagtgcagtcgtgtgacagggtgtccagcgcgcaaacatgtggaacgagctttgggtgatcccgctat

SEQ ID NO: 29260 - DNA, 269 bp, Glycine max
  Clone ID: TF_701123986H1
gtgttgtcccctatttcatcttcatcatctacttctccatctgactttaaacttggtgatcacaattctaatgctcatgtcaaataggcaggtttattaaaaactcaaaggccaagcctgaaaggtggcaaagaaatcaagcagcacagatatgcatttcaaacaaggagtcatgttgatatactggatgatgggtaccggtggagaaagtatggggagaagtccgtgaaaaacaataaatttcctaggtttgtcttacttcattaatt

SEQ ID NO: 29261 - DNA, 440 bp, Glycine max
  Clone ID: TF_8283852
acgagtatcgttcaaacaacgcggaggcttgtcctgatgctgcagaagatgttcttgaccggtcctcttcacagagttggggatcatccaagttagaggaacaacccaaaactgcagaacaacttcctgcagaacagattcctctcagaaaagccagggtttccgtccgtgctagatcagaagctcccatgataagcgatggatgtcagtggaggaaatatggacaaaaaatggccaagggtaacccttgccctcgtgcttactatcgctgcactatggctgtaggatgcccggtccgaaaacaggttcaaagatgtgcagatgacaaagcagtgttgattaccacctacgaagggcattacaaccaccctttggcggccggccgcaccggcatggcgaatactacgtcaacagccgcaaccatgctgctttcaggttcg

SEQ ID NO: 29262 - DNA, 1507 bp, Glycine max
  Clone ID: TF_GmC667_1
tcgaggcggccgggccggaatttgctctcacgtcccctaataaacaaagacatagccaatctgtcaacacaggaagctctagaaaggggcaccccaccttctctctcctcctccccctttaatttccttttccttaattgtcttaatttccttgtattctggtataatctagctaaccctttttttccattagccatggtcatcaccatcgccaccttctaggtgggatccagggctcaatatataatatcacactcaacacagttaccagctccaaatctcaacaaatggatagcaagttcagaaaaaagaaccgcaacgttaactcatataccagtgaacaagatcaagacactgatatagctcaagaaaaccttgccgagtcccctccttcttccactgtgttcaacatcgatggcttagtcccctcccccacttcctcatcaaagagaaggagggcaatacagaaaagggtggtgcaaatcccaatgaaggagacagaagggtgtaggctaaaaggagagagcaacaccccaccctcggattcatgggcatggagaaagtacggccagaaacccatcaagggttccccttatcccagagggtactacaggtgtagcagttcgaaggggtgtccggcacggaaacaagtggaaaggagctgcgtggaccccacgatgctagtcgtcacttactcctccgaccacaaccatccctggccaccttctagaaaccacgccaggcccaccaaaaaacctgaaccggttccggacccggtcgaaccggaggagaagttcgcggacgagtccatgataacaaccgcggaagaattggggtggctgggggagatggaagcgacgtcgtccacggttctcgaaagcccgtttatggctacgacgtaccatgctgacgtggcgctgattccgatgagggaggaggacgagtcgctcttcgccgacctcggagagctgccggagtgctcggtagtgttccggcaggggctgctggcggagcggcggcggtacacggcgccgtggtgtgggaccacaagttgagggcaaaaaagtcaacacgaaaagaaaaaaagtagaaaaactagaggtgcctgttagacgcgttcttcgtgcgccacaagagaaaaagataccagcatttttttcctttttagtattgagatattttttattttttttgttttaccgttgttaagacattaattaaaaattaaaagttattgtaaaaattataaaaatattcaaaagaagttataaacaatattattttatgtattttaataaaaaaaatatttttttaatttttttgactaatatcctaaatagcggtagactttacctatattttactttattgagagtagaaaatggaaaagaaaaaaaggaaaataggagaagtagggttgaagaataaaagggcagttagggaagtggttgtaattagcgtaactttccgcgtccatttcaacaacttgcattgcacaatgtttgac

SEQ ID NO: 29263 - DNA, 1510 bp, Glycine max
  Clone ID: TF_GmC351_2
atttactcaatatgcacaccttctttctttgtttaattctcctctctctctctctttctctcttacacccttccattttctccttctcttcctcccatggtgtaattgctccaactatggccgtggacctcatgacgacgggttgcagccgaaacgacaacatcaatagtttcacaaccaaagccgaggaaaatgccgtccaagaagctgcttccggcttagagagcatcgagaagctcatcagactcctctcgcaaacccaaacccaaacccgccatcaaatcaacaacaatagctctaatgaaatcgccatcgccatggactgcaaggtcgtcgctgacgtggcagtctccaagttcaagaaggtcatatccctcctcggccgaacccgtaccggccacgccaggttccgacgcgcccctctccccaaccaaaaccaacacactcaacctccctccgaaccacccgtgttccacgctacgccgctgcaccagatcccaccaccctcccttcaccaaattcccaaaactgaaaggaaccttaacgattcctcctcttctaaaaccattcatttctcatacccctccgccgctacctccttcatctcctccctcaccggcgacggcgccgccgacaacaaacaaccttcctcgtcgccgcccgcggcggcggcgacgacgacgccctttcagatcacgagcctctcgcacgtgtcgtccgcggggaagcctccgctttcgacttcctctttcaagagaaagtgcagctctgagaatttaggctctggaaaatgcggtagctcctccagccgctgtcattgttccaaaaagagtaggaaaatgaggttgaagagggtagtgagggtaccggctataagcttgaagatggctgatattccaccagatgattattcttggagaaagtatggacagaaaccaattaaaggatcacctcatccaaggggttactacaagtgcagtagtgtgagagggtgtccagcgcgaaaacatgtggaacgagctttggatgatccagctatgctggtggtaacctacgagggagagcacaatcacactctctctgctgctgatgctactaatctcattctagaatcgtcttgaaagtcgtaaccaaatcatcttttttccgtgacaaggttttaattaagtagtagaagaaacgcaaaccattattaatcaacgttacaagttttcaacgggagcaattatggcgtgttgaattgaattgcaactttactctagtcagtcaggggcattaatcttgaaagatattattagtgggtgctgttccctttccctgtacaatattggattctttttcttctttttttaaatcttttatttcctatttctcgttctcttcaaggctgaatgaaacattgtgaatccgttgcatcattagaaaaaaaattgtcaagggtggtggttgatttggtaacggatttgaatctcggaattaaaaaaaaaaaaagcaagtgggttttggtttt

SEQ ID NO: 29264 - DNA, 219 bp, Glycine max
  Clone ID: TF_jC-gmXLIB3563P059ch12a1
gaaatatggacagaagatggctatggggaatccatgccctactgcatactacagatgcactatgggcgtaggttgtcctattggtaaaccagatcaaccgggtgctgatgatagaacaatcttggtgacaacatatgaaggcgcacataaccatccactgccgccagctggagtggtagatgccgtggacatcccatcaagagggtgcggttggatatg

SEQ ID NO: 29265 - DNA, 1841 bp, Glycine max
  unsure (1)..(1841): unsure at all n locations
  Clone ID: TF_GmC3118_4
aacccaaatccattcatccaagttccaagatgaagatgattcactttcttttcctctttgctcttgtctcgttcacttcccatgcttctgtcaatgatttctgtgtagcagacctaaaaggtccagatagcccttcaggctatcagtgcaagccacctaacacagtcacagtggatgactttgtgttctctggctttgtagctggaaacaccacaaacactttcaatgctgcattaacctccgcatttgttactgattttccaggtgtgaatggtcttggtgtatctgcggcacggttagacatagccaaaggtggatcaatcccaatgcacacacaccctgctgccactgaacttctaataatggtggaaggtcaaatcactgctggttttatgaccccaactgcactttataccaagacactgaaacctggagatattatggtttttccacaaggacagttgcattttcaggttaattctggaaacggaaaagccactgcttttctggcattcagtagtgcaaaccctggagcacaactacttgaccttctgttatttggcaacaccttgccttctgacttggttgcacaaactaccttccttgatgttgcacaagtcaagaaacttaaggctcgtttcggtggcagaggctaggaatattattgctcatgaatttattcctatctaatgtttgttgctatttatagtccataataatgcctgtgtatgcccttgccttttccatttcgatgtttggatcattcccttaaaaatgattcctctattgatttatctcattttcaagaaacttttgtttcttgccatgttttactgctgaatccaaatcaccattgttcaatcttctttttggctctcggtcattgacatgcttttccttcaaaataattttaccattctcaacattagatgagttttctagattcttatcaccattgcagggtgcttcttgcaaaggttctttcggagaagatgatggatcagaattattcagaactttggtagactgctttggaacactgctttcttctttaggttcactggaaggcaggagcttactttccttggtggtatcaattttatgcggaggatcatgattatgttgacttttataaacaatctctatcacatgtcctgaatggtcacaaatttaattcttcttagcacaacnatttgaatgggtacacttgtaatagcttcgagaacccataggattcttcacttgcttctggccgtacttccgccagttgtatccatcagatgcagatgcccttacagcagaaacagaagataaggttgtaccatcagaaggtgttcctttgtctcctttcgacacttgtacactattagccttgggaggagatggtctctgttgtgatacagtgggactaagggcagatgataaagaatgtgaaacagaagttggtgatagttcagataatgaagttgaacaaacagactgaagttgattttctgtctgtttttgaggtgcctcaactgcatctttttcaatagtttcctcatcaggaggctgagctgacaccttactctcagcttttccacctttatgtgcggtagagctgccctgcatatgagtggcaaggtcatgcggaagcgaggagcggtgaactagggtttccgagttgggtggcgctccatcagaaggagtggaagtgcgtgactcggtggagagggacgagtcagtgactcgttgctgcgtctcttcatcctcttccatgacagtgcactgcacaacgacaacttttctcttcagtctatgattattccaccacgaattttcattttctcgctggctttttg

SEQ ID NO: 29266 - DNA, 1340 bp, Glycine max
  Clone ID: TF_GmC667_2
tcggtcccctaataaacaaagaccaagccaaccctttttatttgaaagcttgtaaaggggcacacccctttctctctcctccttccccctttaatttccttttccttcttaattgtcttaatttcccttgtattctggtaatctagctaaccctttttatttccattagccacgatatcatcaccatcgccaccttctaggtgggatccagggtcaacaatatcacactcagcacagttaccaactccaaatctcaagaaatggatagtaagttcagaaaaaacaaccgcaactcatataccagtgaacaagatcaagacactgatcatgatgtagctcaagaaaacattgccgagtcccctccttcttccactgtgttcaacatcgatggcttagtcccatcccccactccttcatcaaagagaaggagggcaatacagaaaagggtggtgcaaatcccaatgaaggagacagaagggtgtaggctaaaaggagagagcaacaccccaccctcggattcatgggcttggagaaagtatggacagaaacccatcaagggttccccttatcccagagggtactacaggtgtagcagtaccaagggctgtccggcacggaaacaagtggaaaggagctgcgtggaccccacaatgctagtcgtcacttactcctccgaccacaaccatccatggccaccttctagaaaccacgccaggcccaccaagaagcctgaaccggttccggacccggtccaacccgaaccggaggagaagttcgcggacctgggcggggacgactccatgataaccaccgcggaggaattgggctggctgggggagatggaaacgacgtcatccacggtgctcgaaagccccattatggccacgggctaccacgctgacgtggcgctgattccgatgagggaggaggacgagtcgctcttcgccgacctcggggagctgccggagtgctcggtggtattccggcaggggctgctgacggagcggcggcggtacaccgcgccgtggtgtgggaccacaagttgagggcaaaaaagtcaacaaaaaaaaaaagaaagaagaaaaactagaggtgcctgtttgacacgttcttcgtgcggcacaagagaaaaagatagcagcattattttttaaaattaaaaatattaatttatgttattttagtttgttgagagtagaaaatggaaaagagaaaataggaaaagtagggttggggatgaagaagaataaatggaagtttggggggaggagtgagagaatatgtgtatgttgagaagtggttgtaattagcgtaactttgaacagcttgcccaacaagat

SEQ ID NO: 29267 - DNA, 625 bp, Glycine max
  Clone ID: TF_GmC1123_4
cactctggcaaattattgaaccatacgacggatccatccactagtccggaagccgctatgagaaaagctcgtgtctcagttcgtgcccgatcagaagcacccatgatcagtgatgggtgccaatggcgaaaatatggacaaaagatggctaagggaaacccttgtcctcgagcatactacagatgcaccatggcagttggttgcccagttcgcaaacaagttcaacgttgtgcggaggacagaacaattttgacaacaacgtacgaggggacccataaccatccactgccaccagctgcaatggctatggcatcgaccactgcagctgctgctagcatgttgttgtctgggtcaatgaccagtgctgacggaataatgaaccccaatttgctaactagagctattcttccatgttctagcatggcaacactttcagcttcagcaccattccccacagtgacattggacctcacacacaaccaaaacgcgtttcagaattaccaaagacctcaaaccccattgttcccatcacagccccaggactttatcgctggatccacgccaccacaactgccgcaactgattgcacaagcgctctatatcaatccaaattctcaggccttca

SEQ ID NO: 29268 - DNA, 3006 bp, Glycine max
  Clone ID: TF_GmC652_2
tcgacccacgcgtccgcccacgtgttcgtacggctgcgagaagacgacgagggggaaattaaggatgactgaaaaacagaatatgaaaggataagtgatgcagcaaatcacagccaaggttttttgtcaagataacactataactttgaagtgttttcttttcttattctcttcacaatatgaattataaagcatgtaatgtagggccaatttggaataacacaccagcagatgctagcacagatctcatctcaagctgtgcaaacccactctgaacatccattctctatatcagccgtatctgctacctcatcatgtgctgcacaacagctgattccaccctcaatgccagattctaaggtgaaagaatcccttgattattctcactctgaacaaaaattgcagtcttctgtgaatgttgataataagcctaataatgatggttacaactggaggaagtatgggcaaaaacatgtgaaaggtagtgacttctcaagaagttattataagtgcacacgtccaaattgtcctgtgaagaaaaaacttgagcgttctcttgagggtcatgtgactgcaattatttataaaggagaacacaatcatcaacgtcctcatcgcagtaagattgtgaaagaaacacaaacttcaaatgaaaattcagtgtctaagatggatctagggtctagtcaggccacaggtgaacatggatcaggaacacgtgatagtgaggaagtacatgaccatgaaactgaagcagttggaaagttttatgattctgcagaaacacagaagtcaggctccaggatccagcctctttacatagaactgtagcagagactagaatcattgtgcaaacaacaagtgaagtggatctcttagatgatggatatcgatggcgcaaatatgggcagaaagttgtcaaaggcaacccatatccaaggtgatattggttttctccctacactttgattgcttatatttaagtaataattatggatgagcaatatcattgctaaaagtaacaagtatgagagaagaagacacgattgagtacgaataaacaagttgaacaacatacaagtgagatgacctcatactttaatgttttaaggcattaagttagatatgatgaaagttcatttaaattgttagattgtgaatcgttaatgaaggtatctcccacctttttaatcagcttgtatttcctaacattgtccataacagctttcaagaaatttgattcccataatgcttaattattcaccatactcagattatgatactccatatattatggtgtacatttccacgaattttcccactattctgcttttttattgtttgacttgtctaggaaaagaaggtgatgcatgtttttatgatatgtaggagctattacaaatgtgcaacccaaggttgcaatgttcggaagcatgttgagagggcttcaatggatcctaaagctgtcctaacaacatacgaaggaaaacacaatcatgatgtgccggtagctaagactaatagccacacacttgccaacaatagtgcatcacagctaaaagcacaaaatattgccatacccgacgacaagcatagtttcagcagtaggggtgttcgggggaatgaacagcgacctttgggaagtctaagattgaaggaagagcagataacatagttttcttagttcatagtctaatctatctttttctcataattcgacatatatacaataggcaagattgtaaaattggtcccccactttatctccaattacggatttggtccccctataatttaattcacaaatttggtctctcaattttataaatttctgcaaaattggtcctggaagtccgatttggacattgaccgttaatctcagacgttgactgtcacatgtcaatgccacgtgtcaacgtctaagtggtttccggtaaaggtttcattttttgtaggtaaaattacatttttggtccctcagttttactccaattttaattttggtcctctttaatttaattcacacatttggtccccccaattttataaatccctttataaattgttcctacaaaattggtcttttgaatggtttagccactggtactagagacatgatagaccttgataaattttgcactccttttttatcgcaagtttttcactcacttggaacccagagaaaaatcactctttatctctctcccaatttcggggttattcaacttgagaaagtggcgtatgaatcccagcctaggtccgaaattttcaaatctcttgctttaacaggttttgtaataaccccccccccccctttttttttcgttttttgctcccccatgtggtattatgtgtatacgacttaagtggtctatgtatgacaatgatatttttgtttgaaatttgaaatacgacttctccagtaatgaaatttggttgaatttataaaggaatttacaaaactgagggaccaaatgtgtgaattaaattataaggggatcaaaatcgaaattgtagcaaaactgggggaccaaaagtacaattttacctacaaaaaatgaagcatttacagagaaccactcagacgttgacacgtggcagtcaacgtctgaggttaacagtcaacgtttaaatcgggcttctaggaccaattgtacagggatttataagactgggaaaccaaatttgtgaattaaattataggaagaccaaatccaaaattagagataaactaggggaccaaaagtgaaattttgcctatacaatattatgttcaactcaccgcattactatacaacacaacaaacttgttctatacaactcagaaatttgatgtcaaagtaacaaaatgaaatgaagcacaaaacgaattgaatggtaaatagccaaattcgtctttgaaagtgtgatgggttgacaaattagtccttaaaagatgaaaattttaaatttaatttttgaatgtacaaaaaaaagtgtgctaaattaatgggccaatttaatgat

SEQ ID NO: 29269 - DNA, 521 bp, Glycine max
  Clone ID: TF_GmC1323_1
attgaggttgaagagggtgatcagagtgccggctattagttccaagaatgctgatatcccacccgatgagtattcgtggagaaaatatggacagaaacctatcaaaggctctccacaccctagaggttattacaagtgcaccagcgtgagaggctgccctgcacgtaaacacgtggagcgtgctgtggacgattccaacatgctcgttgtcacctacgaaggagaacataatcactcgcaaatcacttctgaggtggcaaatgttatccttgaatcttcttagcctaccttaattaagactagcgccaatgcttttagttcattcatatataggattttttaattgttatggtctttgtctcttaaaaaaataaatccccctcctctttccttgaagtagttactttaaaattcgttgaaatactttattaaaaacaggagtactattggttggtctttgtaagacttattatatagaaaatgtaaagaaattaaacagcactaaagtgttgagttgaaaa

SEQ ID NO: 29270 - DNA, 733 bp, Glycine max
  Clone ID: TF_GmC127755_2
cggtcgcgtgggcggacgcgtgggctctgtgtctctttctctttctctttctctctcttggaattcatggttagaggtggtggactccaatccatggattcagatccaattgggagcttcttcctccacaagccaattgttctcaactctttcccagctgaagacacaaacaacaagtggaaaaaacttagtctccaccacaacatggatgccacagctagcaataccaaagataacaccatcccctttcaagtcagccttagatgttctccaaacaatcatggtgatgggatattagttccaaggcagtttatggatcttgggttggctgctaataatggtactagcactggtattgaaccctcttcttcatcaggaggaagaagccaagatcgatcaagatcacccaacgtagaagtggcttccaaggaattagggacaaatgatgaagaagagaagaaagagtatggtagagggatagagagagaggatgatagtccctcagggcatgctcataaagttccaaggttcagtcctccaaaggataataatagtgttgaggctgaggctactatgaggaaggcaagagtttctgttagagctcgatcagagacacccatgattgctgatgggtgtcaatggagaaagtatgggcagaaaatggccaaaggaaacccatgtcctagagcttattataggtgtagcatggcatcggcttgcccagttagaaaac

SEQ ID NO: 29271 - DNA, 365 bp, Glycine max
  Clone ID: TF_LIB3051-037-Q1-K1-F6
gactgaacaagtgatcaaagcatcagaagagaaagtagctctacaaggattgaaagtcacgcgcagcacctaaatgtaaaaaaagcaagaagagccagaacaagagtgtggtgaagcaggtgacaacagcagaaggtcttgatgatgcatgggcatggcgaaaatatggacagaaaccaataaagggttcaccctatcctcgaagctattatagatgcagcagttccaaagggtgtttggcgaggaaacaggttgaaaggagccacttagatcctgcggtttttctggtaacctacactgctgaacacagccatccccacccaactcgaagaaactctcttgctgggaccactaggaagaacaat

SEQ ID NO: 29272 - DNA, 613 bp, Glycine max
  Clone ID: TF_GmC1330_4
ttcctccgcccaccggaaaaagtgccgcgacgctgcgccggcactctccaccaaaccctcctgccactgctccaagaaaaggaaatcacgcgtgaaacgaacgattcgtgtgccggcggtaagctccaagatcgccgatatcccatcggacgagtactcgtggagaaaatacggtcaaaaaccgatcaagggttcaccttaccctcgagggtactacaagtgcagcaccgtgagagggtgtccggcgaggaagcacgtggagcgagcgcaagataaccccaagatgctaatagtgacttacgagggtgagcaccgtcacgttcttccgttaactgccgctgccggcgttagtttcggccattaatagagttgagtaatcgacgtcgtcgtttcggaaacctgacgggggacgttagatgaccgtcggatcgtgacggtaacggcggatgcgaacgaggttcggttcgtggacggaaaaaagagggaatgaaactatgaaagccaacatttgcgttgtggtctttgacggagtctcttatgttgacgaggacttttgtgtaaatttgacccaaagtaaagttagtacaggtctcgaaaaaatgaaattatagtg

SEQ ID NO: 29273 - DNA, 685 bp, Glycine max
  unsure (1)..(685): unsure at all n locations
  Clone ID: TF_LIB4390-038-R1-K1-B9
ggctgatgaggacattatagacttgggatgattgaaattgtccttgaattttcatgtgatgtctgcaacaatctcaacatcttctagcacaaatcttgcatccacagttctatgtagtactttgctgtagattaactacaaaaaaaatttcgtggctcttctattttctgtcctggaagcatgtttgagaaattattcttgcatttcgtagtcttggcatatactccttcctgataactcatataactgtaaggttcatgctcttctattatttgcaccttattggtaatcaggtgaaaggtgaaggtgaaacacatgttttatgtttgagaaaaccgaccataattccccctttttattttcaggggatattataagtgcagcagcatgagagggtgtcctgcaaggaagcatgttgagaggtgcttggaagagcctaccatgctaattgttacctatgaaggcgaacataaccaccccaagttaccaacacaatctgcaaatgcatgaactatgtggagagcttaaccagatcaagcccatcattcaatttgtcaaaacctctctgtgattggcttgagatgctgctgtacatattntaagtgatgcaaacaagcagggatgatggatattgttggcgcagattttgtcttttggatagtttggctaaccagccgttttattt

SEQ ID NO: 29274 - DNA, 1338 bp, Glycine max
  Clone ID: TF_GmC855_1
ctcactctcaccatttttctctcctcaacccattgcccactcacctattcactatttctatcatattatagttatagttatagttataacatagcaatagcaaattatatatatacatcgaccacccagatttaatttcactccaacccatcatgcatcaccgtagattcagcaaattaatacatgtggctgacccagatgagcctgagtcggggcccgagcccgcctccgaagctgggcctgcttctccttctgcccgtgaagacacaaaaactgaagcaccgttacccaagaaccggtgattattcaaattttcaattttagtttgcctagatgagaatggggaagttaaagagtgagggggtgaatctgtgttcatgaaaccatacgtaggagggagatgaagaagagggtggtgacgataccgatcggtgacgtggatggatctaagagcaaaggagaaaattatccaccgtcggattcatgggcctggaggaagtacggccaaaagcccatcaaaggctccccttacccaaggggatattaccgatgcagcagttcaaaggggtgtcccgcaaggaagcaagttgagcgaagccgtgtggaccccacaaagctaatagtcacctacgcatatgaacacaaccactccctccctctcccaaaatcaaattcctccgcggcttccgccgctgtaagcgacggcgccacctcctcctcaccggcagattccgccgccaggtacccgccggaggaggagatgaaggtgttcgcgacggactcagacctcgaactcgccggcgacgcggcggttctgctcagccaccaccaccaccaccacttcgggtggttcgatgacgtgacgtccaccggcgtcctcgaaagcccgatctgcggcgaggtggatgacgtggcggtgccgatgagggaggaggacgagtcgctcttcgccgatctcggcgagttgccggagtgctcggcggttttccggcggaggaatattccggcgaccagcgcgatccggtgcggcggcatcacaggataacgcgggtggacccgtttttcttttgtgtcgcgttgttgcgtagtgatttatattatattagccgcctgaaagtcgtgcgctattaaaaaaaaagttggaaaagtaaagaaataattaattaaataaattaatttataattcatggatttttttttctttttcttgcgttgtacatttgaataaacaattgattacagcaagctaccttcttttgcagaaaaatttttaacaaacaaaaaaaaaaaaaaaaaaaaaaaaaaaaaaaaaaagaaaaaaaaaaaaaaaaaaaaaaa

SEQ ID NO: 29275 - DNA, 1178 bp, Glycine max
  Clone ID: TF_GmC1329_1
tctcaatcaattcggcgaacgtcttcgcccgccaccccctcgcggctgccgggtctagctctgggaggggaccttctggtgcagtcctcaccgcctgggtattcggcaggcggggtggtggaccttggtggcggggccatgggctcgaacggggtgactggcaatcctggcccttcctattcccctcctgggggttgtactggtagggttcctctgggtggggctcttgccccaggtgaaattgacatacttgatgatggatataggtggaggaaatatggacagaaagtagttaaaggaaacccaaacccaaggagttactacaaatgcgtagccccgggttgtccagtgagaaaacatgttgagagagcttcacatgacatgaaagctgtgattacgacttatgaagggaaacatatccatgatgtaccattaggacgaggaaactcaagctatagcatgaacagaaattctctaaacaacacctccaacaacaccaacaccagcaatgtaacagctcctgctcctataaggccctcagcactgactaactattctaactcagcaagtttcacaaactcacttcatgacacaaagcaaccaacatctgcaggtcaagaaccttttccaatggacttgctgctgagccctggaagcatcggattttcggctaatgactcattccttcagtcttttttgtcaaagaacttttaaatttggaagcagaagaacactagaacgttacacataaaaatatcactgatatgtttatgtatagcataggggaatagaataagaaaatcatgagcatctactaattttagtgcactaagattagagactagaactacagcattctaaagcttgacaagagttagtccttgtttcaactttcaatttagaacaccagaacgttacaataaaaatatcactgatatgtttatgtatagcatataggaatagaataagaaaatcatgagcatctactaattttagtgtactaagattagagactagaactacagcattctaaagcttcacaagagttgggcattgtttcaactttcaatttagtaataggagagacagaaaacatgttgaccttgaattctattattcttttgttgcttttgttcaattgttttctaagatttatactagttgttgccaatgtctac

SEQ ID NO: 29276 - DNA, 469 bp, Glycine max
  Clone ID: TF_uC-gmroLIB3259P207a09a1
aacagaatgcttttttttttttcattgttcctaacagaaagcactaattgggattcatttgtaaatggctgacatggtcttttggataagtttacaaattgcaaatcattttaaaacactggggggactatccccattaaaacaggcaaagcgaacgcatcgtacatgcatatttatttcccttattaaccatcattagctaattggccagtggttgttcatttagcatatacctaaggccactggaacaaactaaactatgttctcatgcttctaatcaaatgctaattaaacttgtttaatttattacaagaaaaagtttaatgggaaaagagcttcaatctaaccttggaaacttagctatgagaatattcttttggccatattttgtccaggtatatacatcatccaatgacccttcaaggcctcttcttgagcaaatatttacttgctcggctcatttgggcat

SEQ ID NO: 29277 - DNA, 1423 bp, Glycine max
  Clone ID: TF_GmC362_1
ccagtgaagccgcacacacaaatatacatcttggctcaatttgagagttcaagttttctttttccccaaacccaaagattttaggttacagaaaatggcatcttgtcctcctttcctttcttatcttcccatgacactttgagagttcaagtttccttttctttcctacaaatccaaaataatagttttagtttacaaaatggctgtggaactcatggggttcccaaaactagacgaacaaaaggccattcaagaagccgcatcagaaggcctcaagggcatgaaacacctgatccgaaccctttccaaccaaccctctcacttaaacaccgaacttaccgacgttaccgtttcaaagttcaagaaacttatttcactcttaaatcgaaccggccacgcccggttcagacgcgccccggttcagtactcatctccacacgcacccgttcacaacactaacgcttccacctcatcaattcaactccctcctccgccgcaaaaccctaatattcccgcgctggcgcagtttcctactccggcgccggtggccgtgcaccacacgccggtgacgctcgatttcacgaagccgcacaacgcgcttctgagctccaacgccaaatccgtcgagctcgagttctcgaaggaaaccttcagcgtttcctctaactcctctttcatgtcctccgcgatcaccggcgacggcagcgtctccaatgggaagattttcctcgcgccaccggcgacctccgccggaaaacgtccggcgttcaagaagcggtgccacgaacaccgcgaacactccgacgatgtctccggcaacagcaagtgccactgcgttaagcgaaggaaaaatagggtgaagagcactgtgagagtgccggcgattagttcaaaagtcgccgatattccaccggacgagtactcgtggaggaagtacggtcagaaaccgatcaagggttccccatacccaaggggttactacaagtgcagcacgattagagggtgcccagcgaggaagcacgtggagcgcgcaccagacgatcctgcaatgctgatagtgacgtacgagggggagcacaggcacgcggttcaggctgcgatgcaggagaacgcagccggggtggtggggttggtgttcgagtcaacgtagagaatgagaaagaaggtccaataaaaaaataataataaatttggaagtggaggacttttttaaaaaatatatatatataatttttggaaagtgtagtgggaagaaccaagaagtaaggacaatggctgccttgtaaatttgttttatttttatctttattattattgttatattttagttgtcatagactcgtagagaggtgaaaaatggaatctcaagttgtttatttatttctatctcctttgcctcaaaaaaaaaaaaaaaaaaaaaaaa

SEQ ID NO: 29278 - DNA, 2657 bp, Glycine max
  Clone ID: TF_GmC421_1
tttggctcttacttttgtccaactttttgaaagtttttatactttgaagttccattaagaaatatgtaaattgagaatcccattaaggaattcctcactctcttgctaataataatataaagtgtttaatgtaaaaagcatgttaaagagttttccattctcgatcaatcagaatttataataggtaagaattgtaaggtactagtagttcttattcttataggaagttaacaacttaccatatatgacaattgtaaatgcatatactattttctctaatgtaaatgtggtaaaaacattatagctgcatgatggcttctatttctttgtctacatcttttcaaaccttacaatgactttttttttttgttgaaattctacagtacactaaacttgtacctgtttcccttttccttgtctaaaaattccttggtcaaatttggcaactttcgtttttccaatgtgtccatgtgatttagaagaataatagcactcctagatgggcttgtctgatactgtgctaaactttgacatgtgatctctccacacccctctcatggcatcttcttctggtagtttagacacctctgcaagtgcaaactccttcaccaacttcaccttctccacacaccctttcatgaccacttctttctctgaccttcttgcttctcccacagacaacaacaaaccaccacatggtggtggtggtggtttgtctgagagaactggctctggtgtccccaaattcaagtccacaccaccaccttctctgcctctctctccccctcccatttctccttcttcctacttttctattcctcctggtttgagccctgctgagcttcttgactcacctgttctccttaactcttccaacattctgccatctccaacaactggagcatttgttgctcggagcttcaattggaagagcagttccggggggaaccagcgaattgtcaaagaagaagacaaaggcttctcaaatttctcttttcaaacccaataaggacctcctgcttcatccacagcaacatatcagtcttcaaatgtcacagttcaaacacaacagccatggagttatcaggagaccacaaagcaggataatttttcttcaggaaagagcatgatgaaaactgaaaaatcttcatccatgcaaagtttttcccctgagattgctagtgtccaaaataatcatagcaatgggtttcaatcggattatggcaattaccccccacaatctcagaccttaagcagaaggtcagatgatgggtacaattggaggaaatatggccaaaaacaagtgaagggaagtgaaaatccaagaagttattacaaatgcacataccccaaatgccctacaaagaagaaggtggagatctttagatggacaacatactgctatcgtttgtaaggttactcataaccatcctaaacctcaaaatactaggaaaaactcatcaaattcctcttctcttgcaatccctcaatcaaatcccattatagctgaaatccctgctcatccctaggccacacacaagtgcacacaaatggattctgccagcgagccagcaaactcatcaatatcaataggagatgatgattttgagcagagttctcaaaagtgtaaatcaggaggggatgaatatgatgaagatgaacctgatgccaaaagatggaaaattgaaggtgaaaatgagggtatgtctgcccctggaagtagaacagtaagagaacctagagttgtagttcagacaaccagtgacattgatatcctagatgatgggtataggtggagaaaatacgggcagaaagtagtgaagggcaatccaaatccaaggagttactacaagtgtacacacccaggatgtccagtgaggaagcatgtggaaagagcttcacatgacctaagggctgtgatcacaacctatgaggggaagcacaaccatgatgttcctgcagctcgtggcagtggcagccattctgttaacagaccaatgccaaacaatgcttcaaaccctaccaacactgcagccactgccataagtcccttgcaagtgatccaacacagtgacaattcccatcagaaccaaagatctcaagcaccaccagaggggcaatcacccttcaccctagagatgctacaaagtccaggaagttttggattctcagggtttgggaatccaatgcaatcttacatgaatcagcagcaacaacaactatctgacaatgttttctcttccagagccaaggaggagcctagagatgacatgttccttgagtctctactatgctgaaggaatttctttttggtagctatggaaggttggaaattttggaagggggggactaggatttattggacaaataaggttcattccatttattgcattttttggtttgtttttgttgtaaattttatacagccacacaggattggtatagtatatatttcataactgttgtatgtttttacacatggtgttggtgaaattttttgattactttggggtttctcttttagttgggaggagaaccttatgttaatcttttgtaagattctgttaattttttcctgtcttcacaattgttcactatcaaaatagtaaagtttcacaagaaatgtgaattatttttgctaaaaatgataaaaaaaa

SEQ ID NO: 29279 - DNA, 384 bp, Glycine max
  Clone ID: TF_GmC362_5
aagtgcagcccggtgagagggtgcccagcgaggaagcacgtggagcgcgcaccagacgatccggcgatgctgatagtgacgtacgagggggagcacaggcaccccgttcaggccccgatgcaggagaacccagccggggtggtggggttggtgttcgagtcaacgtagagagaaaaagagagagggtccaataaaaaaattggaagtggaggactttttctaaaaatatattataatttttggagagtgtagtgggaacaaaagcaatagctgctttgtaaatttgttttttattttttattgttatattttagttgtcatatgactcccagagaggtgaaaaatggaatctcaagttgtttatttctatttatctcctttgcc

SEQ ID NO: 29280 - DNA, 1760 bp, Glycine max
  Clone ID: TF_GmC351_1
aaagtaaaaaaataaaattatattcggacataaggaggaacttactgataaaaaaattaaaaaagccttcttgattaaaatttgtttgccttaataggaataatcgttttttctatggcctgagagcgtgtgagcattcacatttgacggaaacagggtagcgtgagagtcgagtcacctgccgaaatcctatagcaccattttgaccaaggcgatatagctaacagctattcgcccccccatactttctttaattttctccttctcccatggtgtaattgctccaactatggccgtggacctcatgacgaccggttacacccgaaacgacaacatcagtagtttcacaaccaaagccgaggaaaatgccgtccaagaagccgcttctggtctagagagcgtcgagaagctcatcagactcctctcccaaacccaagcccaagcccaagcccaccatcaattcaacaacaacaatagctctagtaatgaaatcgccatcgccatggactgcaaagccgtcgctgacgtggcagtctccaagttccagaaggtcatttccctcctcggccgaacccgtaccggccacgccaggttccgacgcgcccctctccccaaccaacaccaacacacccaacctccctccgaaccgcccgttctccacgctaccccgctgcaccagatcccacctccctcccttcaccaaatccccaaaaccgagaaacacctcaacgattcatcgtctaagacgcttcatttctcatacccctccgccgttacttccttcgtctcctccctcaccggcgacgccgccgacaacaaacaaccatccccggcggccacgaccacgacctcccactttcagatcacgagcctctctcacgtgtcgtccgcggggaagcctccgctttcgtcttcctctttcaagagaaagtgcagctctgagaatttaggttctggaaagtgcggtagctcctctagccgctgtcattgttccaaaaagaggaaaatgaggttgaagagggtagtgagggtaccagctataagcttgaagatggctgatattccaccagatgattattcttggaggaaatatggacagaaaccaattaaaggatcgcctcatccaaggggttactacaagtgcagtagtgtgagagggtgtccagcgcgaaaacatgtggaaagagctttggatgatccagctatgctggtggtaacatacgagggagagcacaatcacactgtctctgctgccgatgctactaatctcattctagaatcgtcttgaaattcgtagccaaaatcatcttttttccgtgacaaggtttagaaacgcaagccatcatttaatcaacgttacaagttttcaacggggtgcaattatggcgtgttgaattgaattgcaactttactactctagtcagtcaggggggcattaaaatctccaaagaaattagtagtgggtgttgttccctttccctgtacactattggattcttttttatctttattttttttttctcgttctcttcaaggctaaatggaacattgtgaatccgttgcatcattaaaaaaaatattgtcaaggatgattgtgatggtggatttggtaagggatttgaatctcgatttttttttattttttttttataaaaaaagcaagtgggtgttggttttaaaaaatcccaaacctctgaacacacctcagcgaatctcaacttcaagcacaccatcgccccctttgtaaccgtcacaacctc

SEQ ID NO: 29281 - DNA, 702 bp, Glycine max
  unsure (1)..(702): unsure at all n locations
  Clone ID: TF_LIB4390-010-R1-K1-C1
cgacccatncgtccgctaaatttagagtcgtaaaaatctaaatatcgactttttaaagattacatgtaattaattttgattttgcttgtaacatgttctttttaaaaataaataaaggtgatttattttagcaattttgttctcttgatatctatatatattttcgcgtgactctgtaggaaaatgaggttgaagagggtagtgagggtaccagctattatcttgaagatggctgatattccaccagatgattattcttggaggaaatatggacagaaaccaattaaaggatcgcctcatccaaggggttactacaagtgcagtagtgtgagagggtgtccagcgcgaaaacatgtggaaagagctttggatgatccagctatgctggtggtaacatacgagggagagcacaatcacactgtctctgctgccgatgctactaatctcattctagaatcgtcttgaaattcgtagccaaaatcatcttttttccgtgacaaggtttagaaacgcaagccatcatttaatcaacgttacaagttttcaacggggtgcaattatggcgtgttgaattgaattgcaactttactactctagtcagtcaggggggcattaaaatctccaaagaaattagtagtggggtgttggttcccttttcctgtacactattggatncttttttaatcttattttttttttctc

SEQ ID NO: 29282 - DNA, 443 bp, Glycine max
  Clone ID: TF_jC-gmXLIB3563P026cd04a1
aggacatgtgatagagattgtttataaaagtcaacataatcatgatcctccgcataaaattgataccaccaaggaaagtaagctcctgccttccagtgaacctaaagaagaaagcagtgttccaaagcagtctaccaaagttctgaataattctgatccatcatcttctccgaaagaacctttgcaagaagcaccctgcaatggtgataagaatctagaaaactcatctaatgttgagaatggtaaaattattttgaaggaaaagcatgtcaatgaccgagagccaaaaagaagattgaacaatggtgatttggattcagcagtaaaacatggcaagaaaccaaagtttgttgtacatgcgacagaggatgtggggatatcaggtgatggataccggtggcgcaagtatggacaaaagttggtgaagggaaatccacatttca

SEQ ID NO: 29283 - DNA, 1492 bp, Glycine max
  Clone ID: TF_GmC5708_2
ttctatttgattcacaccttcacactgtctctatcaccaatcccttatatcccccctccacttagcataccataattcaccgtcaatttccccattgatgatccatttggcatttcatcatatttcaccacttgtcctactccacttggataatttcctaacgtatagttttcaaaaatccttgttcttcatgagcttatagtttatgagtcctacgatttttggcaattcagcaacactatagatatattattgcagaggatattacagatgcacatatagaaatgtacaaggatgtctggccacaaagcaggtgcaaaagtcagatgaagacccaatgatatgtgaaataacctacaaaggaagacacacatgcacccaagcaagtcacttaaacaaaacagtgatacccccatcaaagacaaaggtgaacttgttgggagaaaataagcaccaaacccatcaaattaagaatcaaccacggcaagagaaaatagaacaacaaccaccagagacatttttcacatttggatcatcatcaggtcttgaagttaaaatagaggacatcgaccacaaggagggcatattcccatcattttgcttttcttctccatcaatagtagggtcagaaaatggggacgacaacaacagcagcatattctcatacaccatgattgagaacaacttaatggaaagcttctctcctgccttcatatctccaacaacttcagatatagaatcaaacactttctgccactgggggagcactggactaggccaaagtgtgcaaagctcagggtctgatatcactgatatagtttcagcaccaacttcagtcaccaattcaccaataatggaccttgatttctttttcgataagatcgatttcgacacagatttccctttgagcaccatggaactttgcacttaataaattgtccccacttctaagtttacagcatatgtgatttctatgcggattaactgtgagttttgtagatcctgactagcaccataaccgagggaaggaagtctataataatcaccatagatcatgtccataaatgaagacaatgaaaaacttccctcttgtgctaattaagagagttttcatgtacctaggctgcaatgtgaaaataatttgtaggttgtagcttaatttggtgcatgtttggtttgcaatggaaattgttgtaatgcgcgttccaatgtagatcttatggataaaagtaaaatgaaatcaaaagagttctaatcttttagcataatggagaacaacttaatggaaaacttctctcctacattcatatctccaacaagttcagatatagaatcaaacattttctaccactgggggagcactggaataggccaaagtgtgcaaagctcagagtctgatatcactgatatagtttcagcaccaacttcagtcaccaattctccaataatggaccttgatttcttcgataagatcgatttcgacacagatttc

SEQ ID NO: 29284 - DNA, 464 bp, Glycine max
  unsure (1)..(464): unsure at all n locations
  Clone ID: TF_GmC652_6
ctaggagctattacaaatgtacaacccaaggttgcaatgtgcggaagcacgtggagagggcttcaacagatcctaaagctgtcataacaacatatgaaggaaaacacaatcatgatgtgccagcagctaagaataacagccacactatggccagcaatactgcatcacagttaaaatcgcataataccaatcctgagaagcataattttggcagcagaggtatgggaggaaatgaacaacagccggttgcacggcttcggttgaaggaagagcagatcacctagttttctggaagaaacatccagtgaggaagaatttttctcacctcacttgtcatctttattttgatgttatcgtattcttttttagtctaaggcctaagttttgatcagggcctatcagtgcanatcctaataaacaaaatagtcaacactgatgcaagagggcaggggcaaaggttaaac

SEQ ID NO: 29285 - DNA, 1446 bp, Glycine max
  Clone ID: TF_GmC1067_1
atccaaatagtatttaataaaatttcgcgcctaactcaaggaggaattaacaaggcttcttttgacatcaatttaagcaagaaaatttttcctgtattcgttttggcctcaaccaacaataattctagtttctctcattccttctgtcccttaattgcgaagcaaatctttcttcttcccatggaaatggaaccgacgtgcgtcgacacttccctcaaccttaacgttattccttccccacacatcgaccacctcgcgggagaagttttgtttgaagagttgcggcgtctaagcagtgagaacaagaggctaactgagacgctgaaccacttgtgcgagagctatgttgccttgcagaaacatttgagtgaattcagccaacttaggaacgcaaattttgataaagaaggaacttgtgcagttccgtcgctaaagagaaagcccgagagtgagaattgtgtgaatctgtttggtactgagtgcaacaccatcacagaggaagaaacattcaaaaggcccaagcatagcaccgagccaaaggtttccaaagttcttacacggacagatgcatctgatactggcttatatgtgagggacggatatcagtggagaaaatacggtcagaaagtcactagagataacccttctcctagggcttacttcaagtgttcatatgcccctagctgtccagtaaaaaagaaggtgcaaagaagtgtagaagatccaagtgtgttggtaacaacttacgaaggggagcacaaccatgggcaacaacatcaaactgcagaaatatcaattaattcatcaagcaaaagtgaaacacctaggcctgcagtttcaccctcagccatgaatattcggagtagtgcagcagcaggtccaattgtaacacttgacttggtcaagtcaaaagttgttgacattaatgcgcaaaagtcatctctccagcagtttttagttcaccaaatggctacttctttgacaagagatcctaatttcacagccgcacttgcttctgccatctctggaagaattctagatgatacttctgtgggaaaacgttgaattattaagagatatatatgtattaatttcactgatgaacatatatgaattttgtcacttttcttcgttttaatatttaataacagctagtcacgaggagtagtgttctatgcaagtttttctgcggatcatgttaatcactgactctgtaatgagtcatttaagtcaagtgcagtagcaggtacaggtaccaccagtatagagataccgtcaagtaggaggagccaggttaaagttgataactatgttgctatatataggtagggatctttatgtttttttcaaatgcgtgtgtgaaaacaagtataatagtaacatattgagactctatccattgttaatactataataccctacccaaatttactcattgtcattcct

SEQ ID NO: 29286 - DNA, 727 bp, Glycine max
  Clone ID: TF_LIB4204-001-Q1-K1-F2
cccacgcgtccgtacggctgcgaggaagacgacagaagggtacggctgcgagaagacgacagaaggggatgttttgtttgctctctcctctcccttaacagtaactcaacaatcaagaggatcagatccataggaagttttatctgtccatcaccaaaaccgcgactgatcagtcaatcccatcaatcaaatcaaatcaaatcatcagaaagaaaagaaaagaaaagaaaagaaaaaaggaaatcaacaaaaagaggaacaacatgtcctcctcatccacttccttttcaccggaccaacacctctctccctccgaccagctctgctatgtccattgcaacttctgtgacactgtcctcgcggtgagtgttccttgcaccagcttgttcaagactgtcactgtgagatgtggtcattgcaccaatcttctctcagtcaatatgcgtggactgcttctccctagtgccaatcagcttcaccttggccacagcttcttcactcctcaaaatcttctggaggagattcgtaatgcaccttcaacaaacatgatgatgaatcaactgccgaaccctaatgatttggtcatgagcaccatgagaggcggacctgaagaaacccctaagcctccatcagctaatagacctccagagaagagacagcgagttccatctgcttacaaccgcttcatcaaggatgagatccaacgtatcaaagctgggaatcctga

SEQ ID NO: 29287 - DNA, 446 bp, Glycine max
  Clone ID: TF_10847320
gctccactctccagccaaaagaaagtagttcagaacaagatgctaacaagactttgaagagacataatgcatccatgatgacctattctgattgtgaggaagaggatgccattccaatgagtaatgttgtcaataaacccccagagaagagacagagaacaccatcagcttataactgcttcatcaaagaagagattaaaaggctaaaggctgagaaccctgacatggcccacagggaagcttttagtacagcagcaaaaaactgggccaatttccccccaactcagtgcaaagaagatgaagagagctgtagcagccagacagatcaacatgtggatcttgactcccaagtggaccctaatgctgtggtcaatgaagaagaaggtcaagggttacgtggaagaaaggtcccaaagaaatccatattggaaaggacaccgtttgaa

SEQ ID NO: 29288 - DNA, 735 bp, Glycine max
  Clone ID: TF_jC-gmXLIB3563P040dh04d2
ccacgcgtccgcggctgcgagaagacgacagaaggatacggctgcgagaagacgacagaaggatacggctgcgagaagacgacagaaggggaaacttatttactttatctcttaattagtatcatgtttttacttcttcttcttcttcttcttgttttaatttcgaacatttaggtgagtgttccttgcaccagcttgttcaagactgtcactgtgagatgtggtcattgcaccaatcttctctcagtcaatatgcgtggactgcttctccctagtgccaatcagcttcaccttggccacagcttcttcactcctcaaaatcttctggaggagattcgtaatgcaccttcaacaaacatgatgatgaatcaactgccgaaccctaatgatttggtcatgagcaccatgagagggggacctgaagaaacccctaagcctccatcagctaatagacctccagagaagagacagcgagttccatctgcttacaaccgcttcatcaaggatgagatccaacgtatcaaagctgggaatcctgatataagccacagagaggcctttagtgcagctgcaaagaattgggcccattttcccacattcatttcggacttatgcctgataatcaacccgtgaagaaagctaatgttcgtcaggagcagaggacgtgcctatgaaaggatgggtgtttcgcaccggctaatggaggcgtctctccctactagaggtgttttaata

SEQ ID NO: 29289 - DNA, 1332 bp, Glycine max
  Clone ID: TF_GmC4246_1
gtcttataggcttcggggtcttctgtaaatccttgatctagcttgtttcactttgcttcagtcaagaaactctcctctctataaatctactacgcaaacacaagggacagtcacaattatatttttttttatatgtctaaccacgcatccgaaaaaaaataaaaaagaaaaccaaaaaataatgtcaatggaaatgatggcaacggaacgtgtttgttatgttcactgcaacttctgcaacaccattctagcggttagtgttccatacagcagtttgctaaccatagtgacggttagatgtggacattgtgccaatttgttatcagttaacatgggagcttcacttcaagcatttccccctcaagaccctcagtcacagaaacagcacctaagctttcaagaaccaagcagcaaggaactgggatcatcttcaaaatgtagcaaaatagcgccatttgaggcagtagagcatgaactacctaggattcctcccattcgtcctacagagaagagacatcgtgttccttctgcttataatcgcttcattaaggaggaaattcaaaggattaaggctagtaatccagatatcagccacagggaggctttcagctcagcagccaaaaactgggcacatttccctcacattcactttgggttaaagaacttaaagctggatggcaacaagcaagaaaagttggaccagggggaaggagctgaaaagtctaatggattctactgataatggaagcctgtgagtatgaacttgtttttttcatgcttgacctaaatcagtgaaaaaatgaggttgatcaaatttcccaatatatcgtacaactggatgggagactcctgcaaattaacctcagcctctcacaccaatgtttaatagtactacatatatgtattgcccttttctatatatcgttgttatgaaatgattgctattcttgtgattgaatttattgtgttgaatttcttaagtatatattattattattttatgtatgcatgtgttgcgcgccctattttagatgttataaaatgattgctattcttgtgattgcattaaattactatgttgaacttagtttcttaagtaattaaacattattgtaagtttccttctctttataaaaatgtgtctttctatttagtaacgttgagagtccttcaagttaacctcagccttttacaccaatgtttaatagtactacatatatatgtattgcccttttctatatatcgttgttatgaaatgattgctattcttgtgattgcatttattgtgttgaatttgagcacttaagtaaacaacacgttcctctatatatc

SEQ ID NO: 29290 - DNA, 1638 bp, Glycine max
  Clone ID: TF_GmC47784_1
ccacgcgtccggtgtattcgatcctctaatacttaagtggcatatctcttccccctggtacggctgcgagaagacgacagaaggggctcttttccctttctttcattgtttgttttgtttgcactctcctctccccttaacagtaactcaacaatcaagaggatcagatccataggagaagttttatctgtccatcaccaaaaccgcgactactgatcagtcaatcccatcaatcaaatcaaatcatcagaaagaaaagaaaggaaagaaaagaagaaaaaaaaaagggaatcaacaaaaagaggaacaacagcaatatcaaacatgtcctcctcatccacttccttttcaccggaccaacaacacctctctccctccgaccagctctgctatgtccattgcaacttctgtgacactgtcctcgcggtgagtgttccttgcaccagcttgttcaagaatgtcactgtgagatgtggtcattgcaccaaccttctctcagtcaacatgcgtggactgcttcttcctagtgccaatcagcttcaccttggccacactttcttcactcctcaaaatcttatggaggagattcgtaatgcaccttcaacaaacatgatgatgaatcagctgccgaaccctaatgatttggtcatgagcaccatgagaggagggcctgaagaaacccctaagcctccatcagctaatagacctccagagaagagacagcgagttccgtctgcttacaaccgcttcatcaaggatgagatccaacgtatcaaagctgggaatcctgatataagccacagagaggcctttagtgcagctgcaaagaattgggcccattttccacacattcatttcggactcatgcctgataatcaacccgtgaagaaagctaatgttcgtcaggaagcagaggacgtgcttatgaaagatgggtttttcgcaccggctaatgtaggcgtctctccctactagaggtgtttttaatattgtagggctttgatgagtgttgttacccatgcatgtctctaatattaagtaattgtgtactaggactttgtcttatgcatattaatgttgtgcacttgtattagtacttgttagtgttaaaagttgttagtatatgtttaaaatcaatggtggaagggagttctgacgaagctagattagttcttctgaaaatgaagatggcttattttctcttgaactggtcccggaatgaatgaatgaatggtttcggaatgtagaaagctcaagttacaatatttaagctgaaaaaaaaaaaaaaaaaaaaaaaaaaaagcggccgctctagaggatcgctcgtgagaattttctctaattttcttaacctaatcactgttgaataagccgcaatatatttcatataaagcatttttcttctacttttttttcttctttgcataaaaacctaaaaaatcaaacctccccctgattttcatgtttgtttttcatttctttttctcgactatcctttttctacttcttgggggtggtgatcagagatccttctgatacccccaaagaaaagctagaggaaaagaaaaggggaactcttttgataccattcagtccatttcccttttctttttagctgatagtggagtgtcccttacc

SEQ ID NO: 29291 - DNA, 1161 bp, Glycine max
  unsure (1)..(1161): unsure at all n locations
  Clone ID: TF_GmC4246_3
ccggccggaatccggtcgaccacgcgtccgacggctgcgagaagacgacagaaggggaatgaaacaaaatattactacttcccttacctttctctctctctcaaaacctcatttgtcgtcctcttcatcaacctctttcttctgcctcaccaaccaatttgttttctttttgcaatgctggtgcttggaagcatctctccattgaatgtgatagcttcaattctccaacatttgtataaatactttaacatcgacaagtgtgaagctctgatattaatttggtcatggcgatggtccagacagttatgttagtgttccatgcagcagtttgctcaccatagttacggttagatgtggacactgtgccaatttgctgacagttaacatgggagcatcacttcaaacttttccttctcaagacactactcagttacagagacagcatctaagtgttcaagaagcatgcagcaaggaactaggatcatcatcaaagtgcaaatcatttgagactgtagaccatgagcagcaacctaggattcctcccattcgtcctcctgagaagagacaacgtgttccttctgcttataaccggttcattaaggaagaaatacaaagaattaaggctagtaatccagatatcagccacagggaagcatttagcacagcagccaaaaactgggcacatttccctcacattcactttgggttaaagctagacggcaataagcaagcaaagttggaccagggtgatggtactcaaaagtctaacggattttactgattacatatatataaacggaagtttatcattatcaactggttttttctgtgcttgacctaaatcagtgaaaaatgaggttgatcaaatttcctaatcataccaactggatgggaagactctcctgaaaattgacctcagcatctcacccatctttaatatatattattattattatatgtatgcatgtgttgcgcgccctattctagatgttatgaaatgattgctattcttgtgattgcattaaattactatgttgaacttagtctcttaagtaattaaacattattgtaagtttccttctctttataataatgtgtctttctatttagtaacgaaaaaaaaaaaaaaaaaaaaaaaaaaaaaagcggccgcntagagga

SEQ ID NO: 29292 - DNA, 226 bp, Glycine max
  unsure (1)..(226): unsure at all n locations
  Clone ID: TF_LIB3107-069-Q1-K1-E1
gaagcacgcagcaaggaacnaggancancancaaagngcaaaacagncgagaccgaacaccacgagcagcaaccaaggagaccncccaaacgaccaccggagaagagacaacgngnnccnncngcnnanaaccggancaacaaggaggaaacacaaagaagaaaggcnagnaanccagagancagccacagggaagcagnnagcacagcagccaaaaaccgggcac

SEQ ID NO: 29293 - DNA, 1035 bp, Glycine max
  unsure (1)..(1035): unsure at all n locations
  Clone ID: TF_GmC39846_1
acgagggttttaagagagagagagaataattaaaaggcccttgccttcacctttggtgtccaagatattgctagagagaagaactagttgttcaattagcttcatccatctttctacctccttaattctctttcccttcttcttcttccacccttcttgtgtttgagtacagaagcttgagatcagacatgtcgagctgcagcatcgatgttgcgcctgagcaactctgctacatcccctgcaacttttgcaatattgttcttgcggtgagtgttccatgcagtagcctgtttgacattgtgaccgttcgatgtgggcactgcaccaatctatggtccgtgaacatggccgccgcgtttcagtcactgtcatggcaagatgttcagggacctgggcagtgcaatccagagtacaggattgacactggctccacgtcgaaatgcaacaataggattgcaatgcgtgcacccaccactcatgtaactgaggaaagggttgtgaacaggcctcccgagaagaggcagcgcgtaccttctgcttataaccaggttataaaggaggagattcagaagatcactgctatcagtcctggtgtcgctttcagtacagctgcaaagacctgggcacattttccccatattcatttcgggctgatgttggagagcaacaaccaagttaagatggagaatgtttctgagaagcatttaatgtcaagggctgcgctattgaataaatgaatgctatcttcatcatatcacaggacttgggtttcatttgaatctgtcaagtaaacaatgtcctgacctaaaaggagttttaaggacaatcatctctttttcttcgttagtgtacttgtcactacttactacttgttcaatggatgcttttcacttaatttgaagcaagaatgctagttttcccttgtcatctttcaataagttctatcttctagctgattcagatgaaagatgaaatatgtatgctactgttttaagctcgatggcgagaacnnntatcatcatatttttnngnnat

SEQ ID NO: 29294 - DNA, 673 bp, Glycine max
  unsure (1)..(673): unsure at all n locations
  Clone ID: TF_LIB4280-022-R1-K1-E5
ccacgcgtccgtaaaaaataaatattgcaactgaaagtcaaaggaaatgattttgatatatgactggttgccattgtccagctcctgagaagagacagagagtcccctcagcgtacaatcgctttatcaaggacgagatccaacgcatcaagtctgtcaatcccgatataactcacagggaagccttcagtgcagctgcaaagaattgggcccacttcccacacatccactttggtctcatgcctgatcagactgtgaagaagacaaatgtgtgccagcaggatggagaagaggttctcatgaaagatgggttttatgcttcggctaatgtntggtgtctcaccctactaattcaccccagtctgttttctctttcgaagaaattatgcaaagaggaaaaattttccaagttccaccaacctatgaagctcaggaactctgattccttaacttataaatgcatctatttgtggctcaagagcgattatgttgatataactaaggactactactacactaggactagctttgggggggtgtgcattgcatgcatgtagttctcttcttatgagtagactntaattattaacttttcatggttcttcaattcccccagtactactgcagctgattgcttatctaatcaataattaattagccatacctttcagtt

SEQ ID NO: 29295 - DNA, 783 bp, Glycine max
  Clone ID: TF_GmC47784_4
gtgctgaatccattgggagagtgattgttaaagataatgatgaggtaatgatagaatagagagagagagagagagagagaaggggagagagagagagtgatttaggcaaaaggctcagcgaagttatttaatgttcctgtctgtttgcctgtgcaatgtccgtgtgttgtatgtccagctccagagaagagacagcgagttccgtctgcttacaaccgcttcatcaaggatgagatccaacgtatcaaagctgggaatcctgatataagccacagagaggcctttagtgcagctgcaaagaattgggcccattttccacacattcatttcggactcatgcctgataatcaacccgtgaagaaagctaatgttcgtcaggaagcagaggacgtgcttatgaaagatgggtttttcgcaccggctaatgtaggcgtctctccctactagaggtgtttaagaattttagggctttgagtattgttacccatgcatgtctctcattaagtaattgtgtactaggagtttgtcttatgcatatgaatgttgtgcacttgtattagtacttgttggtgttaaaagttgttagtttatgtttacaatcaatggtggaagggaattctgacgaagctagattagttcttctgaaaatgaagatggtttattttctgttgaactggtcctggaatgtagaaagctcaagttacgatatttaatttgaagtttttctttattcctaaaaaaaaaaaaaaaaaaaaaaaaaaagcggccgctctacaggatcca

SEQ ID NO: 29296 - DNA, 1307 bp, Glycine max
  unsure (1)..(1307): unsure at all n locations
  Clone ID: TF_GmC51271_1
ccacgcgtccgcccacgcgtccgtacggctgcgagaagacgacagaaggggagatcagcctctttctttctttctctctctctctctctctctgcacctttctttcacaactcaatcaaaaaaagcatatccaaggtgtggtggttaagctgtccatctatcaatcaatccaatcaatcaagagaccaatcatcaaccgaatataagagaacgaaaaaagggggctacccacaacgtcatcctctttcaccacattatcactggagttgtattctctggttatttctccgtcgccacctccctccttccgaacagctatgttatgttcactgcaacatttgtgacaccgtcctcgctgtaagtgttccttgcacaagcttgttcaagaccgtcacagtccgatgcggccattgcactaacctcctcccagtgaacatgcgagggttgcttatgccatctcccactcaatttcatttgggtcactctttcttctccccatctcataaccttctggaggagataccaaatccctctccaaattttctgatgaaccaaacaaatttaagtgcatcaaatgagttctctatgcctgctaggattgcagctgatgagcttccacggccaccgatcatgaatagacctcctgagaagagacagagagtcccctcagcgtacaatcgctttatcaaggacgagatccaacgcatcaagtctgtcaatcccgatataactcacagggaagccttcagtgcagctgcaaagaattgggctcacttcccacacatccactttggtctcatgcctgatcagactgtgaagaagacaaatgtgtgccagcaggatggagaagaggttctcatgaaagatgggttttatgcttcggctaatgttggtgtctcaccctactaattcaccccagtctattttctctttcgaagaaattatgcaaagaggaaaaattttccaagttccaccaacctatgaagctcaggaacgatctgattccttaatacttataaatgcatctatttgtggctcaagagcgattatgttgatataactaaggactactactactactacactatgatgattagctcttggggttgtgcatgcatgcatgtagttctcttcttatgattagactttaattattaactttcatgttcttcaattcccccagtactactgcagctgattgcttatctaatcaataattaattagccatactttcagtttaaaaaaaaaaaaaaaagggggggaggnngagaggggaaaagaaaaaaaaaaaaaaaaaaaaaaaaaa

SEQ ID NO: 29297 - DNA, 495 bp, Glycine max
  Clone ID: TF_GmC4246_5
acggctgcgagaagacgacagaaggggacaatttttttttttgtttaaaaaaatgtcaatggacatgatggcaaccgaacgtgtttgttatgttcactgcaacttctgcaacaccactctagcggttagtgttccatgcagcagtttgctcaccatagttacggttagatgtggacattgtgccaatttgctgacagttaacatgggagcatcacttcaaacttttccttctcaagacactactcagcgattttctaccgttggtaagttacagagacagcatctcagtgttcaagaagcatgcagcaaggaactaggatcatcatcaaagtgcaaaacatttgagaccgtagaccatgatcagcaacctacgattcctcctattcgtccttctgagaagagacaacgtgttccttctgcttataaccggttcattaaggaggaaatacaaagaattaaggctagtaatccagatatcagccacagggaagcatt

SEQ ID NO: 29298 - DNA, 1316 bp, Glycine max
  Clone ID: TF_GmC211_1
acggctgcgagaagacaacagaaggggacctcgtgttttcttctctctctcacactttctctcagcgttgaaacttgaaattcttcttctccgaaacctctttgaaccgggtcaagaaataaacctcgctgggaaccgttgattgggtttgtacgaataatttgaaatgaagattcagtgcaacgtgtgcgaggccgcggaggccaaggttctgtgctgcgcggacgaggcagcactgtgctgggaatgcgacgagaaggttcacgcagcaaacaagctcgccagcaagcaccagagggtccctctctctctctccgcctctcacatgcccaagtgtgacatatgccaggaaatggttggttatttcttctgtttagaggatcgagctttgctatgtaggaattgtgatgtatctatacatacagcaaatgcctgtgtctctgatcatcaaaggtttttgcttactggtgtgagagtaggccttgaagctactgagcgcggtgcttcctcgtcttctgtgaagtcacagtctggggagaaaatgtctgatgctaaatcttcatccatctccagaaatgtttcctcactgccccagccatcaaatgccaatgaagtgttacccctccaaatgcaaggagttgaggagtttccaccaagcaatttctcaggttatacttctggaaacgtctcacaatggcccattgaagaatttctcggattaaatgaactcagtcagtattataattacatggatggatcatctaaggctgacagtggtaaacttggggattctgattcttctgttttgaggtctggtgaagaggatatggatgatgacggcttcttgggacgtgttccagattcatcctggacagttcctcagatcccttcccctcctacagcttcgggtttatattggccgaaagtccctcaatatacatctgacagtgccatgtctgttcctgacatatgcttttctcatgtgcgacagccccaccatgcccagcataattctaatgtttccaaaaggcgtaggcaactataatttgttctctgatcactagctcaatatgttaaaaagattgttttttatctgttagagatggagcgaacttttgaagttctacccttctttagatcatttgaagttcagtttgctacatgtttcttctattcacggcagtcttcatttctttttgggagcaaatcccttaactctccatttgttattgggaatttgacaaagaaaatagctggaacaacaatgtaataggcttctcatttcaatttgatcttgtgcattttaacttaaaaaa

SEQ ID NO: 29299 - DNA, 1106 bp, Glycine max
  Clone ID: TF_700980420_FLI
ctttcttttccctctctcaattccaaacagtagatttagacacccttttggaaaaggaagtgttttttgagggaaaggagggaattttttgtgtgggagggtggaacccggaattcggtttggttggggtagagaggatgaagattcagtgtaacgtgtgtgaggctgcggaggccaaggttctttgttgtgctgatgaggctgggctgtgttgggagtgtgatgagaaggttcatgcggctaacaagcttgccagcaagcaccagagagtgcctctttctacctcttcctctcatatgcctaaatgtgacatttgtcaggaagcattaggctattttttctgtctagaagatcgggctctgctctgcagaaaatgtgatgtggcaatacacactgcaaatgcttatgtctctggtcatcagaggtttcttctaactggtgtaagagtaggccttgaagctacagaccctggtgcttcctcaacttctttgaagtcagattctggggagaaagtttcagattcttctgtctctagaaaggtttccacagcgccccagccatcaaattataatgaagtgttacccgctgaagttggaggagttggggagtttccatcagccaaggtgtcctttggtggtggttccacagctggaaatatctcacagtggactattgatgaatttattggcttaaacgagttcagtcagaattatgattacatggaaggatcatcaaggtattgcagagttcagattcatcttttgtcatagattgtgtatactagtgccccttcagacacactaacacacgcgcgcgcgtgcagggagtaaaaggacagggatggggctgatccggtcttctgagggaatatgccctgttaacatggtcacatgactaaacaactggccaatgtagtataagttttataaatatgttgaatatttgtggtcagaaaaggtgtgagtagacttcaaacagtggaatctgacagattggttggttgaagtgcttgtgcttggtttcattctttcccttatttgtaagcccgttttaaatttggaaaacttgaccttttagaagtgcaatactcagttggctttcacctg

SEQ ID NO: 29300 - DNA, 2413 bp, Glycine max
  Clone ID: TF_GmC1848_2
ctttcttttccctctctcaattccaagtgggttttatcttcttctttttttctttctccaaaagtgttaaaattttaactttgttttgccttaatttgattgttttatgcagagtagacagtagatttagacacccttttggaaaaggaagtgttttttgagggaaaggagggaattttttgtgtgggagggtggaacccggaattcggtttggttggggtagagaggatgaagattcagtgtaacgtgtgtgaggctgcggaggccaaggttctttgttgtgctgatgaggctgggctgtgttgggagtgtgatgagaaggttcatgcggctaacaagcttgccagcaagcaccagagagtgcctctttctacctcttcctctcatatgcctaaatgtgacatttgtcaggaagcattaggctattttttctgtctagaagatcgggctctgctctgcagaaaatgtgatgtggcaatacacactgcaaatgcttatgtctctggtcatcagaggtttcttctaactggtgtaagagtaggccttgaagctacagaccctggtgcttcctcaacttctttgaagtcagattctggggagaaagtttcagattcttctgtctctagaaaggtttccacagcgccccagccatcaaattataatgaagtgttacccgctgaagttggaggagttggggagtttccatcagccaaggtgtcctttggtggtggttccacagctggaaatatctcacagtggactattgatgaatttattggcttaaacgagttcagtcagaattatgattacatggaaggatcatcaagggtatgttcatagttgttgaaatataccctcttagcctagtatcccctgatcattggttttgtagagtttctatcatttaatgctttgtttttttgactgggttagtattgcagagttcagattcatcttttgtcatagattgtgtatactagtgccccttcagacacactaacacacgcgcgcgcgtgcagggagtaaaaggacagggatggggctgatccggtcttctgagggaatatgccctgttaacatggtcacatgactaaacaactggccaatgtagtataagttttataaatatgttgaatatttgtggtcagaaaaggtgtgagtagacttcaaacagtggaatctgacagattggttggttgaagtgcttgtgcttggtttcattctttcccttatttgtaagcccgttttaaatttggaaaacttgaccttttagaagtgcaatactcagttggctttcacctgaaactaattgctttctgaattaaatattgccaatcgtgaagataaaaaattataatcttaatgatgatgagccgggaatgatcatcctcaatggtgatccataatctagataccctagtcctcttgcatttgagtgcttaaaaacatgatattatttggatgagaatgtggattggaattattgtgcataatttactgatagacacatgtaagacaaattttcgacattcaaattacttcaatcaaacaaagatttgaattatatctatattcgtattttgagaaaatcaagagaatcaaatagaataggaaattgattaatgactttttttttcctttgtgactattctcattcaattgattattttcacatttattgtgtatttgtgtgcttaccatgtacagatagttaggcaaaataccatagatgtcttgtctgtatggttgtatggttctgtaactttttttttcacccttcctttcctgatgagtctgtgcaggctgacggtggtaagcttggggattctgattctcctgttttaagatctggtgaagaggaaatggaggaggaggatgactatttggaacgcgttccagattcgtcgtggacagtcccgcagatcccttccccacctacttcttctgggttatgctggccaaaagaccatactaatctgtatggttcatctgatagtgttctgtttgttcctgacataagcttctctctcattcaacaatctcagattagtagtatttgtttgagacgctggaggcagctttaatttgtttactctttgctaataacttagaggcattgattattccttttatttttggtatgattataagttctctcatgttgcagtggaagtttcatttgattagttacattttctattcttggctgtctcagtttcttctagggagtaatcaaactctctacatgtcattggaaattttcctagcaaagcagcaacaaataatgggagtttagaaggcttttactattaagtttggttttgtaacattatcatttccgctctaggatcctatgtagatgcatcatctattggattataatagtgatatgattcatattggtttgtttgtg

SEQ ID NO: 29301 - DNA, 857 bp, Glycine max
  Clone ID: TF_GmC1581_1
agggagtgtgagcaaaagcaaaagatgaagatccagtgtgatgtgtgtgacaaagtggaagcctccgtcttctgtcctgcagatgaagctgctctttgccatagctgtgatcgcaccattcaccgcgccaacaagcttgcaaccaaacacgcccgtttctctctccactaccccacctccaaagacttccctctttgtgatatatgccaagagaggcgtgcatatctattttgccaagaagacagggcgttgttatgcagggaatgcgacgttcctatccacagagccaatgagcatacccaaaagcataacaggtttcttctcacgggtgtgaagctctctggtacttgtttagatcctgcttcgtcctccaccaattacaccaataataatagagtcactggctctgaaggaagaaacgacgctcgatctagaatgaacagacccagatcatcagtttccaatgaagaaaatgcaagtaattcttcttgcaaggttgaagacaacgtggctagtgacactggttcgatttcaactagcagcatttctgagtacttgattgaaacaatacccggttactgttttgaagacctccttgatgcttcgtttgcacctaatggtttctgtaagaagcagaactttgatcatccctgggcgtttcaggaccaaaagcgaacaagtggagacactatggccgtgccgttcctgaaactagtcatccattgatcaaaatatctaaaccctcgcggtcataaactgtttgtaaaaatctgttggaaaatatcttctttatttttgttatttgtaaaaatctgaaactttatgattttattttttattctctattcccaaccaca

SEQ ID NO: 29302 - DNA, 923 bp, Glycine max
  Clone ID: TF_GmC59541_1
ctcggaattcggctcgtgctcgagccgaatcggctcgaggtttttttttccccttcttatttctctctccctctgccaaattttccacctaagagcgagaaagcaaaaatctgtgatgaaagacaaagcaagagagaatttcaataacttgcaacttgcctacaccatatttttttttgttcacaatttaatatatggtatctagcctgtggtgtggccataacaagaagggagagaaaacaaaataatttaaggttgagatgaggaagtgtgagctctgtaacagtcccgcgaagttgttctgcgaatcagatcaagccagcctctgttggaaatgcgatgctaaggttcacagtgcaaacttcctcgtcaccaaacatcccaggattcttctctgccatgtttgtcaatcactaacagcgtggcacggcacaggacccaagtttgtacccaccatgtcagtttgcaacacttgtgtcaacaacaatagtactgagacctgcagccaacagaatcatgaagacgatgatgatgatggtacgggagaggatcatgcagaaaacgacgatggtggtgtggctgaagatgatgatgatgatgatgatgaagaaaatcaagtggttccatggacatctacaccaccacccccagcttccacttcttcaaatagtgttacaactagttctaccaggttctctgatgttgaagaaggtggctccgattaataattccaatatcgtgatggataaaacttcgatacagttttttaggtgttgttcctgctgttttctaatcagaattagagttttatttcgagaatttatgtaataaaagtttgccttaaagaattatataaaacttaaattctcgactaagaacagtgtaaacaacacataggaaataatatataagttctattgtac

SEQ ID NO: 29303 - DNA, 1083 bp, Glycine max
  Clone ID: TF_GmC763_2
ttcaaatcctcctttctattaatctgaaacaagttattagtcatgaagatccagtgcgacgtgtgtaacaaacagcaggcatcgttgttctgcaccgccgacgaagccgccctatgcgacggctgcgaccaccgcgtccaccacgccaacaagctcgcctccaaacaccaacgcttctccctcagccacccctctgcaaaacattttcctctctgcgatgtttgccaggagagaagagcctttgtgttttgtcagcaagatagagcgattctgtgcaaagagtgtgacgtgcccgttcattctgccaacgacctcaccaagaaccataacaggtttcttctcactgggattaagttttctgccctcgattctccttcaacacctcctaagcctgcaggtggaaactccctaacaaatcaacaaccacaacaacaaactggtttcacaggtagcagcatatcagaatacttgataaacactatcccaggcatggagttcgaagatttcctcgattcacattctcttccctttgcttgctccaagaatagtgatgacatgatgttgtcgatgtttggtgagggaaacatggtttcgttctcagccggagggatctgggttcctcaagcaccatcttcagtacaaatggatcagcagagtgggtacaaagacacatgggaaactagcattagatcaagttttggggatgatagtttattagttccacagatgactcctcccagcaatgtgtttaataataagagatccaggcttctatggtaaaacagttacagctagctatcaagctaaccaccttatgtggcttttaatttcactctattcttaatttggttttctttgtttttttgtccctctcctccttcctgagtactacactactcttctagctacttaattccctcttgcgttctcgataagttgatgtatctcttccaaattgtaaatgtctatgttttaagagctctctgggttcagattaattgtttctgctacatgttaaaagatgactcaagtcttaattaacattgcataaatgaaccggaagaagacttaggcgatatcttc

SEQ ID NO: 29304 - DNA, 696 bp, Glycine max
  Clone ID: TF_LIB4167-008-Q1-K1-H10
ggtccggattcccgcgtcgacccacgcgtccgccaaaacaaaagaaaaattcatagctatgagtggtgctgaagcgcgaccttgtgactactgtggcaactccacagcacttctctattgcagagccgattcagcaaaactctgtttctcgtgcgatcgcgaagttcactccaccaaccagctcttctccaagcacacgcgcacgctgctctgcgacgcatgcgatgattcccctgcgaccatactctgttcaaccgacacctctgttctgtgccagaactgcgactgggagaaccacaaccctgcgctctccgattcccttcacgagcgaaggcccctcgaaggcttcactgggtgcccttccgtctccgaactcttgtccatcgtggggttttcggatatcagcaaaaaatctctgcttttttcgcctcagggaagtgtcgctgatgggttcttcggcgccagcgagattgaagggctttcggatatgttcgtgtgggatgcgccttcttttgttacgcttgatgatttgatttcttcctctccttcttctcatagctttcaggccatgaaggttcctcctctgcccaagaatcgaaaggctgcttgtgggcaacacaaagaagagattcttagtcagcttcgggaattgccaagtctgagcctttggaccttgaaccatatgtgcaatcgggt

SEQ ID NO: 29305 - DNA, 1292 bp, Glycine max
  Clone ID: TF_GmC763_1
ggacactgcgagtgggtagtttatctggggcggatgcctcctaaagagtaacggctgcgagaagacgacagaaggggaatctttttgtaagaacgtgaaacatgacaccctaactcgcgttgcttgcttgagtgatttgactcgtgtcgagtgtattgtatttagtttaagcgtggctgatcgagtgagtatcagaatcaattcaattttgagctagtcatgaagatccactgcgacgtgtgtaacaagcaccaggcctctttcttctgcaccgccgacgaagctgccctatgcgacggctgcgaccaccgcgtccaccacgccaacaagctcgcctccaaacaccaacgcttctccctcacccacccctctgcgaaacattttcccctctgcgatgtttgccaggagagaagagccttcgtgttttgtcagcaagatagagcgattctgtgcaaagagtgtgacgtgcccattcattctgccaacgacctcaccaagaaccatagcaggtttcttctcactgggattaagttctctgcttctgccacgccttatgattattcatcaccaccaccaccaccaccaccaccacccaagagaaaccctgttctcgattctccttcaacaccgtcaccgcctaagcctgggggaaactcgctaacaaacgaagaagaacctggtttcacaggtagcagcatttcagagtacttgataaactctatcccaggcatgaagttcgaagatttcctcgattcacattctcttccctttgcttgctccaagaatagtgatgacatgttgtcgctgtttggtgagggaaacatggtttctttctcacccggtgggttctgggttcctcaagcaccaccatcttcagtacaaatggatcggcagagtgggtacagagagacaagggaaggtagcattagatcaagttttggagatgataatttcatagttccacagatgagtcctcccagcaatgtgtctaataagagatccaggcttctctggtaaaacagatatagctagttacaactagctaaccaccttatgtggctttgtgtgacttaaatttcactctcccctcttattttgtattttttatgtggtattgttttaatttttgtttgttcgtttgtttttggtccctctcccttcctgaactacactactcttctagctactttctctcttgataagttggtgtatctcttccaaattgtaaatatgaacgttttaagagctctctgggttgagataaaaaaaaaaaaaaaaaaaaaagcggccaa

SEQ ID NO: 29306 - DNA, 1474 bp, Glycine max
  Clone ID: TF_GmC830_1
caaatgcccttgacaattcttctctaaactcggaagcaaaacaaaaagccatagctatgagtggtgaagcgcgatcctgtgactactgtggccactccacagcacttctttactgcagagccgattcagcaaaactctgtttctcgtgcgatcgcgaggttcactccaccaaccagctcttctcgaaacacacgcgcacgctgctctgcgacgcatgcgatcattcccctgccaccatactctgttccaccgacacctctgttctgtgccagaactgcgactgggagaagcacaaccctgcgctctccgattcccttcacgaacgaaggcccctcgaaggcttcactgggtgcccttccgtctccgaactcttatccatcgtggggttttcggatatcagcaaaaaatctcttcttttttcgcctcagggaagtgtcgctgatgggttcttcggtggcgaaattgaagggctttcggatttgttcgtgtgggatgcgccttctttcgttacgcttgatgatttgatttcttcttctccttcttctcatagctttcaggccatggaggttcctcctctgcccaagaatcggaaggctgcttgtgggcaacacaaagaagagattcttagtcagcttcgggaattggccaagtctgagccattggaccttgaaccatatgtgtcatcggggaacttgtcctcgggttttgaacgtgaaccagaggctgatatctttccttctcatgagtggcatagagaaagcagcgagcctatgtatcaggttgttcctcctgacccattaatgagaacttatacagaagaaattccatttaaacattctacttctgctgttggggaaactcaaacctacggtgacaatggaggaaaaccatccatttctcttaaatctgaaaccctatcaactactcccaaagctgcagcatgtgagttaacaagccaagaaagagattctgcattattacggtacaagcagaagaagaaaactaggagatttgacaaacacataaggtatgaatcacgaaaagttcgggcagaaagcagggtaagagtcaagggtcgatttgccaagatggaacatgaacattgaaatcatggtaggctgctatgacatcataactataattcccagctcaaatcacatgcactatgtagcatatcccttgtatagtgaacttaacaaaattttccaagtgatgtattctaggattcagagctaggatataaggcagacatattcttgcagtacagtagtgtttttatcatcctttttgcttcataattgactgcacctgaggtagacaaatatgtgcagtattctgtaaatcagaatcaaatttactggggtctttggccttggattgtgtttggagagtatcttgtggacgactgagaattttttcttcttgattatcaaataataataataataattaaaaaaaaaactcaacttgagat

SEQ ID NO: 29307 - DNA, 725 bp, Glycine max
  Clone ID: TF_GmC1095_2
cgggcggaaaactaggaatttcttcttctttataaatttcgccgacgattaaacgttctttttttctctgcttttcctttctttcctcagtgagtagtactcatcaacggagagagaaaataaaaattaaaagtaaaatcccagagtgagagagaaaagaaaagaagagaataaaacaccaaacaagcttcgaaacgatcgtgagtgagatgaagaagtgcgaactgtgtaaagttccggcgaggatcttctgcgagtcggaccaggctagcttatgctgggactgcgacgctaaggttcacagcgccaacttcttggtcgcgaggcacgtgcgaaccctactctgccgcacgtgtcgttctcccacgccctggaaggcctccggcgcctcactcgcccacgccgcctccgtctgcgaccgctgcgccgccgcggaagagacggaagagagcgaagccggcaatgacgacgaaccagacaccgaggacgacgacgatgtcgacaaccaggtcgtgccgtggtcctccacgccgccgccgccgccgccgtcgagctcctccggcagcgaatgctcggagtgcaaaaacaacgttgcttctttttccgcctcggaacaggaaacgacaacatcctcgttgaaacgacagcgcgaggacgacgacgatgcttcttccgatcctgatccccaggtgttgagaagggttgggcgtctcacggaagttgcg

SEQ ID NO: 29308 - DNA, 1032 bp, Glycine max
  Clone ID: TF_GmC998_2
gtcaagggaagaataacgcaatacaacacaacgcactcactctacctctgatcccagacagaagagggtggagtttttgtcatactccctcaatttttagcaagtcaaaacatcagaagaatcattttctttttttaatttttgaaattaacgttcaggcgaagatgaagggtaagacttgcgagctttgtgatcaacaagcttctctctattgtccctccgattccgcatttctctgctccgactgcgacgccgccgtgcacgccgccaactttctcgtagctcgtcacctccgtcgcctcctctgctccaaatgcaaccgtttcgccggatttcacatctcctccggcgctatatcccgccacctctcgtccacctgcagctcttgctccccggagaatccttccgctgactactccgattctctcccttcctcttctacctgcgtctccagttccgagtcttgctccacgaagcagattaaggcggagaagaagaggagttggtcgggttcctccgtgaccgacgacgcatctccggcggcgaagaagcggcagaggagtggaggatcggaggaggtgtttgagaaatggagcagagagatagggttagggttagggttaggggtaaacggaaatcgcgtggcgtcgaacgctctgagtgtgtgcctgggaaagtggaggtggcttccgttcagggtggctgctgcgacgtcgttttggttggggctgagattttgtggggacagagggctggcctcgtgtcagaatctggcgaggttggaggcaatatccggagtgccagttaagctgattctggccgcacatggcgacctggcacgtgtcttcacgcaccgccgcgaattgcaggaaggatggggcgagtcctagctagctccaatgtgtaatcgtctcattagccaaaccaaatgcctggatttcaaattttacttttgtttcctttgcttttcgcttctaccaatccttgttcattaatgtgtttaccaattggatcaacatattcgaataaaaa

SEQ ID NO: 29309 - DNA, 2371 bp, Glycine max
  Clone ID: TF_GmC1833_1
cccacgcgtccgcccacgcgtccagcattgcgtccggccacgtacggctgcgagaagacgttctttcggcacaccccattctcccaaactaacaaacaaatcccagggagccaccaaccatggcttccaagctctgcgactcatgcaaatcagccactgctaccttgtactgccgccccgacgcggccttcctctgcggcgcctgtgactctaaggttcatgccgccaacaagctcgcatcgcgccacccgcgcgtcgtgctctgcgaggtgtgcgagcaggcgcccgcgcatgtgacctgtaaagccgacgccgccgcgctctgccttgcctgcgatcgcgatatccactccgccaaccccctcgccagccgccacgagcgcatccccgtcacgccgttcttcgagtccgtacattcagtcaaggcctcctcgccgatcaacttccaccaccgcttcttctccgacgccgacgctgatgctgacgtcagcaccgaggaggccgaggccgcgtcatggctgctacctaatccaaagacagatctaaattcgtctcagtacttgttctccgaaaccgaaccggttccttacatagatctggattacgcggccatggatccgaagacggagcagaaaagttccgccaccgccgacggcgtcgttccggtgcagagcaacttcgagccgttcacctacggttacaagtacaacactactctctcacagtcacagtctcatatgagccagagtgtatcttctccgtcgtcgatggaagttggagttgtgccggacgggaacacgatgtcggagatatcgaactgcagctacagcaaagtggcaccggtgacggtgacggcgcagttctcggcggcggatagggaggctagagtgttgaggtacagggagaagaggaagaaccgaaagttcgagaagaccattcgttacgcatcgagaaaagcgtatgccgaaacgaggccaagaatcaaaggaaggttcgcgaaacgcactgatgcggaccctctggctggatacggcgtcgttccgtcgtgttgatgattatcatatatatcatatatgaatatgaatgcttacttttttgttttcttatgtttgcttttgctgctgtatatatggactacgccttcttttgtttgaattatgcaatgtaaagttgcataaaagctcgtgttgtggatcgattttgtagtttgttgattgtttttggatgaattttgacagctttttggtaaaggaggattctttggtggttttggtggaagtggaggctcaacctttggtggttttggtggatgtggaggcttaacctttggtgggcttggtggtttctttggtggttgtggtggatgaggaggcttaacctttggtggttttggtggatgaggaggctcaacctttggtgggcatggtggcttaactggtggttttggtggaggcttaaccggtggtggttttggtggaggcacaacctttggagggcatggtggaggtttctcaggtacaggtggagggggtttcttctcaggtacaggtggaggagtataaacaggtacaggtggaggagtatagacaggaggaggtggtttatggaaaatcagtggtggaagtggtggaaatgttataggagggatggtgataggtggatgagggggaaagagagggtgcttccagaagaaggctgaagcacatgtttgtgatgaaaacttgagtttcccagcaggaccaagggtgtgtttctcattattagtttttgactttatcactattttgtggctcaatgggccatcatgggtaggacaaggtgcagctgatgcactaagtagctgagcatagcattcttctatcagtttatcgtcttttacagtgtcatgaggaagggaaactttgaagtttccatattcatcaagctcaccgacccctctcctttcaaagtttccacttgctgccttgcagtctactgtcacacgtaaacctgagaaagcctggctagtttgaatgtttttctccttgcaatctgcgcattctcccaaccctactacctcgactgtactatggtcaccatagcaaaagtctactaccacaaaaagcacagacaaccagaagcacaaaaatgctccttggcgccgcgttaaaatctgcattaggaactgcaatcacagttcctaatgagtagtatatatatatataagcaaatactatatatataacgggagagaaaagaataaaagcagacttagcttagaactcagaagctgtggacgcgacggcgggggacgggagggcctgcgatcgcgatatacactccggcaaccccctcgtcaggcgccacgagcgcatacccgtcacgccgtttt

SEQ ID NO: 29310 - DNA, 1054 bp, Glycine max
  Clone ID: TF_GmC1095_1
acgaggagtttggtagaaaagcagcagaggggcagtttggggctccgacgggaaactaggaatttcttctttataaatttcgccgacaattaaacgctctttctcctttcttttccttttcaatgctcagagaagagagaaaagaaaaagaaaaatcccagtgagagagagaaaagaaaagaacgaaaaaccaagaagcttcgaaacgatcgtgtgagatgaacaagtgcgaactgtgcaaagttccggcgaggatcttctgcgagtcggaccaggcgagcttatgctgggactgcgacgctaaggttcacagcgccaacttcttggtcgcgagacacgcgcgaaccttactctgccgcacgtgccgctctcccacgccgtggaaggcctccggcgcctcactcgccagcgccgtctccgtctgcgaccgctgcgccgcctccgaagaaccggaagagagtgaagccggcaatgacgacgaaccagacacggaggacgacgacaacgacgacgaggacggcgacaatcaggtcgtgccgtggtcctcctccccgccgccgcctccgccgtcgagctcctccggcagcgaatggtcggagtgcaaaaacgacgacgcttctatttccgcctcggaacaggaaacgacaacatgctcgttgaaacgacagcgcgaggacgatgatgatgcttcttccgatcgtgatcccagggtgttgagaagggttgggcgtctcaacggaggttgcgtgtgacggagaatcgtcgttgaaaggaaggagggagtggtctggcacacgacgtcgtttcctgattggggaaagtaagattttcacagccgtacgatcgaccaagatattttttaagctctttcatcattaacttctaatctaaccgcttagaagttacaatggtttttgacatataggtttagtgttgtgtattaactattaatgtggaattttctgttttcctttatcggttttttaagataaacattgcgatgtcatcttgatgtaacctttttttttatatataaaagaatctctattttttt

SEQ ID NO: 29311 - DNA, 2921 bp, Glycine max
  Clone ID: TF_GmC115_1
gagacatagtgaagaattgtactcccacaccgcattgtagtataaatgcttcctttgtacatgatcaagtactaaattctatatctagaaaagatccaccaaggaagaggctagttcttttaatttaataattagcaggtaggttagtttctatgcagtacattctggctcttgattctggtttgtgtgactttcaatgtttatagacaatattttgtatcgtatttgcaccatattttgttgagggccatggtaaggagatttttatccttgaacttgtgaattgttaaccagtcacttaattatgatgttcctcatgtgccatattaaaatgtctggaactgtttcttttcttcatcttcagaagcaatccctggaatttggagaacttgaatggctagcagatgcaggccttttcagtgaacagtttcctcatgaagctttagtcgcagctgaagttcctcagcttccagtgccacacactagcagtgttgcctcacataaagcccccaaatccttggtgtcttacaaaaagcctaggattgaagtcctggatgaagatgatgatgaacactgcactgtcccggatctcggataaagtacattctcatgtaaacatttgcctgaatcaaattatgtgtcagattttgagctgtatatgcatactgggccctaggcaattgtaacctcaaaatacgcacatgtgtaatccattccagctctccagtctgcgtagatcctcgtcaaaaccatccctcagacacttccttttctgtgttcaacagtcttcccacattaaataccaactgtgtagtatagtactacttcaatgttaactatgttcttctttttttgttctcatctccacaccatgtcctaatctttctgcaccatcgttctccatttttggctttacaaaaccactgtgtctgattaagggttctttaatatttccaatatttcttgtagtgaaaaagttgttagctaaaagaagaccaagtttttggtgttgtagaaggaagagaagaattaacatgaaaattcagtgtgacgtgtgtgagagagctccagcaacagtgatttgttgcgcggatgaggctgctttgtgtgccaaatgtgacgttgaagttcatgctgcaaacaagcttgcaagcaagcaccaaagacttcttcttcaatgtctatcaagcaagcttcccacatgtgacatttgccaagacaagccagcattcatattttgtgttgaagacagagcactcttctgtcaggattgtgatgaaccaattcattcagccggaagcctttctgcgaaccaccagcgcttccttgctactggtatccggagtggcctcgagttctaattgcaccaaagacaatgaaaaaagtcacttggagcctcctaataggagtgcacaacaagtttctgcgaaaattcctcctcagcaagtgcctagcttcacatcctcttgggctgttgatgacttattggaactaacacggctttgaatcaccctgagaaaaaggaatctctgtagtttgcaagaggtggaatggcttacaggatgtgggtatttttggctgaacgaattttgctcactgaagccttggctgcagctgaagtacctcagcttcccgaaactcataacagtagcagtgttgcttcatacaaaacttccaaatcctacatgtcccacaaaaagcctaggattgaagtcctaaatgatgatgatgatgattagtattttactgtgcccgatctcggctaagtacgtggcttgccatatgggatggtgcatgcatgattggaaaagattaattatgggaaaataattgtttttttttaagctatattagtaaattgtcaaaaaagaatattattttcccaaaaaaatctattccattcagacatgttgatatgttgtatattcaattattatgagaacaataattttcacaagttgtgtggagttgattaagtattgtacttaaggtgtttttttgctggatagcatagaatccatgcctttggggaataaattttcccttgtccttatgctacactagcagtgttgcctcacataaagcccccaaatccttgttgtcttacaaaaagcctaggattgaagtcctggatgaagatgatgatgaacacttcactgtaccagatctcggataaagcacatggtcatgtaaacaattgcctgaatcagtaggttgacgagttgtatatgcatactaggtgcagatgttaatgaactcttcaatgtgcctggtctagctgaagctcaggaccatgaggactattgcatgaatctgtagattgatgagctgtatatgcatacttcttaggacagtaagtaatgaagtatgttaactagcttgtggagttgataaatatctcattttaggagctatgaatggtttgatttttagaatatagcataaattaaaccttaggggattaaattttccttgctctttgtgatcatcactgtttacatcctataggtgctcacaccacacaacaatccacgtgaacttgaatggttaattatgtatgcttgtgttgaagatcattttggcctaatagctacgatgaagacatgcggcatactacttgtagttattatgtaatttcagaacctaacagcaattcctttgggccagcggaagtcatgcattgccagcagattaatccctctgatcctgagttggaaaacacccatgatttgttatctatgacaaagaaatagaacctaacagcaattaacttcacgaacaatcaattctcgtgttccattcccgaggaacatggatcaaaagcaatgagatattgattattccccagtttccttttggctttgatattaatattatgctacaaaaagctggaaaaaaaatcatcaccaaggtttctcaat

SEQ ID NO: 29312 - DNA, 1602 bp, Glycine max
  unsure (1)..(1602): unsure at all n locations
  Clone ID: TF_GmC115_2
tcgagccccgaaancctcatcaacagcccaagtagtgattgtgaagctaggcaccttngtctgaggaggagagttttcgctagaaacccttgttgtgcactttcctattaggaggctttccgagtgacttttttcattgtcttcgattaccagtcacttccttttccatggcccaaacactttctccctccatttattacctaccactgtcactatgaatgctctcttttgtttttcaccttcttttttttttttgtgtgttcatcttcaacttcatcctaaccttttacacatcatattttcggcttagaacaaccaaaagcaagttcacattgtcttgtcttttcgggtagtggctgtagaggaaacactcctgttttgtgcgcatattgatattggaatagtctttctctgaaccccatttttgcaaaaaggaagaaagagaaagagagagagagagagagagaagagatatacactgccaagaagaagaacatgaaaattcagtgcgatgtgtgtgagaaagccccggcaaccgtgatttgctgcgcagatgaggcagctttgtgtgccaaatgtgacgttgaagttcatgctgcaaacaagcttgcaagcaagcaccagaggcttctccttcaatctttatctaacaagcttcccagatgtgacatatgtcaagataagccagctttcatattttgtgttgaggacagagcactcttctgtaaagactgtgatgaacctattcatttagccagtagcctttctgcaaaccaccagcgcttccttgctactggtatccgggtggctttgggttctaattgcaccaaaggcaatgaaaaaggtcacgtggaaccatctaaaccaaaagcacaagaagttcctgcgaaaattccttctcagcaagtgcctagcttcacatcctcttgggcagttgatgacttgttggaattaacagactttgaatcaccagacaaagttcagaagcaatcccttgagtttggagaacttgaatggctagcagatgtaggcctttttggtgaacagtttcctcatgaagctttagcggcggctgaagttcctcagcttccaatgactagcagtgttggctcacacaaagcccccaaatccttgttgtcttacaaaaagcctaggattgaagtcctagatgaagatgatgatgagcacttcaccgtaccagatctcggataaagcacatggtcatgtaaacaattgcctgaatcagtaggcagtaggttgacgagttgtatatgcatactaggtgcagatgttaatgaactcttcaatgtgcctggtctagctgaagctcaggaccatgaggactattgcatgaatctgtagattgatgagctgtatatgcatacttctcttaggacagtaagtaatgaagtatgttaactagcttgtggagttgataaatatctcattttaggagctatgaatggtttgatttttagaatatagcataaattaaaccttaggggattaaattttccttgctctttgtgatcatcactgtgaacatcctactagtgctcacaccacacaacaatccacgtgaacttgaatggttaattatgt

SEQ ID NO: 29313 - DNA, 1778 bp, Glycine max
  Clone ID: TF_GmC115_3
atctcacaccatgtcctaatctttctacaccacatcgttcttatttttggctttacaaaactaccgtgtctggtaaagggttcgttaacatttccagtgaaaaaagttgttagctaaaagaagaccaagtttttagtgttgtagaaggaagagaagagttaacatgaaaattcagtgtggtgggtgtgagagagctccggcaacagtgatttgttgtgcggatgaggcagctttgtgtgccatatgatacgctgtagattttgcttatctgctggttgcgctgttggccttctgcttgactacgttttgacactagactcgtggtgggactagggactattataggtatggtgcatggacgcaactgcacccctcctccagtcacttccttttccatggcccaaacactttctccctgcatttattacctaccactgtcactatgaatgctgtcttttgtttttcatcttcaacttcatctaaacctttcacacatatcttcggcttagaacaaccaacaacaagttcacattgtaggaacctttgtcttgtcgtgtcgggtagtggctcatattgatattggtatggtctttctttgaaccccatttgcaaaaaggaagaagaagaacatgaagattcagtgtgatgtgtgtgagaaagcccctgcaaccgtgatttgttgcgcagatgaggcagctttgtgtgccaaatgtgacgttgaagttcatgctgcaaacaagcttgcaagcaagcaccagaggcttctccttcaatgtctatcaaacaagcttcccagatgtgacatatgccaagataagccagctttcatattttgtgttgaggacagagcactcttctgtaaagactgtgatgagccaattcatttagccagtagcctttctgcaaaccaccagcgcttcctcgctactggtatcagggtggctttgggttctaattgcaccaaaggccatgaaaaaggtaacatggaaccatctaatccaaatgcacaagaagttcctgtgaaaactccttctcagcaagtgcctagcttcacatcctcttgggcagttgatgacttgttggaattaacagactttgaatcgccagacaaaaagcaatccctggaatttggagaacttgaatggctagcagatgcaggccttttcagtgaacagtttcctcatgaagctttagtcgcagctgaagttcctcagcttccagtgccacacactagcagtgttgcctcacataaagcccccaaatccttggtgtcttacaaaaagcctaggattgaagtcctggatgaagatgatgatgaacactgcactgtcccggatctcggataaagtacattctcatgtaaacaattgcctgaatcagtaggttgatgagttgtatatgcatactaggtgcagatgttaatgaactcttcagtgtgcctgatctagctgaagctcaggaccatgaggactattgcatgaacctgtagattgatgagttgtatatgcatacttcttaggacagtaagtaatgaagtatgttaactagctgtgtggagttgataaatatctcattttaggagagctttgaatggtttgatttttagaaaatagcataaattaaaactttaggggatttaattttccttgatgctctttttgatcattgtttacactctagatgggtaatttcatatgtatgcttgtgttggagaccaaaacaaaaaagcaagtaaaaaaggttaataaaaaacaaaaaggaaatgataaaaaagaaac

SEQ ID NO: 29314 - DNA, 1228 bp, Glycine max
  Clone ID: TF_GmC1732_1
aaattcggctcgaggtgtctatgcaaagttctggaatcaacccctaaggtccccccactccttcaaaaatcctctcttttatcctacaacactctaatcatcgtcatcaaccacctcctccatcctcccccagtaacaacacaacataacattcagagaaaaacaaaactatcatacccacatggatttgcaatgaaagtgagagagtccaattatgcgaacgctttgtgatgcttgtgagagcgccgcggctatagttttctgcgccgctgatgaggctgcactttgtcgtgcctgtgatgagaaggttcacatgtgcaacaagctagctagtaggcatgtgagggttggtcttgctagtccaagtgatgtaccacggtgtgacatatgtgagaatgcacctgctttcttctattgcgagacagatggaagttccctttgtttgcagtgtgatatgattgttcatgttggaggtaaaagaacgcatggaagatatcttctgttcaggcaaagagttgagtttccaggagataaatctagtcatgctgaaaatccggcttcacaaccattggaaccaggtgaggctaaaagaggacaaaatccacttcccaaactaaaaatgggagagaagcaacaaaatcacaagatgcctatggttccaacgccaggacctgatgctgatgggcatgccaagatggaaagtaaaatgattgatttgaacatgaagcctaatagaatacatgaacaagcatcaaataatcagaaacacccataaatggcgcaactaggcaatgcagttctgacaggatcctaaaccaaaaatctaccaatggcaaaagcttcgttttgttctcgtgcatgctagtcacaaggatgacatactctattaatatcctatatattctggcaaatgaggcaccagaatcctttgaggagtttgttcgcctacgtaggaacttaatttggtagttcaacacatcatattctgttctgcaaagcattgttaactgtatatctatgacccctttcaatgaattgtgtgttgacttttatttctggtttcagttttgtatgccattacgtcccctagaaaattctgggggaaaataggtttttgatttcttaaaaataaaatgcgacaattagcgagccaaaaaaaaaaaaaaaaccagttaagatattgttgttgaacaatcagcatttgggtatggtggttcagtgggaggaa

SEQ ID NO: 29315 - DNA, 1071 bp, Glycine max
  Clone ID: TF_GmC272_1
cgaatcaggcccgagccaagaaactaccaagtagcaagcttgattattattatcatcacatagagcttctgaaaatgtgcaaaggtgcagaaggagaaaagcaacatggtttctgcagcagctttctacataaagagagtgcaaccagaagtgctatatgttgtgagctatgtgggttacaggcttcattgtattgccaagctgatgatgcctaatttgttcaagaaactaccaagtagcaagcttgattattattattattattatcattatcccattgagcttctaaaaatgtgcaaaggtgcagaaggagaaaagcaacatggtttctgcagcagctatctacataaagaatgtgcaaccagaagtgctacatgttgtgagctatgtgggttacaggcttcattgtattgtcaagctgatgatgcatacttgtgtagaaaatgtgataaaagggttcatgaagctaattttttggcccttaggcacattaggtgctttctgtgcaacacatgtcaaaaccttacgcgaagatatctcattggagcatcaatagaggtggttcttccagccaacattaactggaccattggaaatctccctagcaacagaggaatccacagaaagtgctcaagaatgcataacaacctttccctcttgttataacttccatctttctttttttctccttagaatatcttttgtaatagaaaaggttagtgagtaccatctcaggtacatagggaagtgctaaatgtttttattgtcatgatttttaaaaaaaaatggttggtaatagaaccgtgttcaatagaaggagggaatgtccaatgttttttttttctttaatttctggtagatgtagttaattgaaatttgacttctatggttatttttattttaagccaattccaaagcaggagaacgaatttctggcagaagttatactatgttagcagatatacaatatgtcttacaagtgtatgtcatggtaattcctggcatctcatattataacctatatcaataacaattataatggctgatacttactttttgtctccaaaaacc

SEQ ID NO: 29316 - DNA, 1322 bp, Glycine max
  Clone ID: TF_GmC1358_1
ggatggctcatttatcatagtagtgcttcctcctttaccatttgaccatatttatccatctcaatcacttcccactttttatgagcattggccaacccccacgcttcctttattctccctctcaagcttcaagctactcacaccaatgaagatccagtgcgacgtttgcaacaaacacgaggcctccgtcttctgcaccgccgatgaagccgccctctgcgacggctgcgaccaccgtgtccaccatgccaacaaactcgcctccaaacaccaacgcttctctcttctccgcccttctcctaaacaacaccctctctgcgatatttgccaggagagaagagcctttacattctgtcagcaagacagagcgattctctgcaaagagtgtgacgtgtcaattcactctgccaacgaacacacccttaagcacgataggttccttctcaccggtgttaaactttctgcttctgctatgcttcgttcgtcagaaactacctctgattcaaactcaaacccttctcttcttaacttttcacaccaaacaacattactacctccatcttccaccaccaccaccaccaccagcaacaacaacaacaacaaggttgctgttgaaggaactggttcaactagtgctagcagcatatcggagtatttgatagagactcttcctgggtggcaagttgaagactttcttgattcatattctgttccctttggtttctgtaagaatgatgaagtgttgccacggtttgatggtgaaatggaggggcatctgagttctttctcaaccgagaacatggggatctgggttcctcaagcgccaccaactcttatgtgttcttcacaaatggatcgggtgatagttcacggtgagaccaatatcaaaggtagcagcagatcaaggttgaaggatgataatttcactgttccacagattagtcctccttccaattccaagagagccagatttctgtggtagaaacaaataaacaaacaaacaagcctcagtttccattctcttgaggcagaattaacaaccctctttgttttgttttgtcccttttctctttttcttaccctggcttgtagtttactctgcccatgttttcaatttggttcagtttgacttttttttttccctttttcttgtttctcctccctctttccctactgggctgtgttttgataaatttgtgcacctttctactagtgattgtaaatataaaccttttcaaatgcatgttgttttttgacacatgtttagaagagaaacaacagagtatgagcttaatagatatgttgagtaaaattcccccccc

SEQ ID NO: 29317 - DNA, 1146 bp, Glycine max
  Clone ID: TF_GmC1358_2
ccttcctttattctctcctcttaaacctttcacttcaagcttcaagttttcaagctacccacccactgctcatactcacacccaatgaagatccagtgcgacgtgtgcaacaaacacgaggcctccgtcttctgcacagccgacgaagccgccctctgcgacggctgcgaccaccgtgtccaccatgccaacaaactcgcctccaaacaccaacgcttctctcttctccgcccttctcataaacaacaccctctctgcgatatttgccaggagagaagagccttcacgttctgtcagcaagacagagcgattctctgcaaagagtgtgacgtgtcaattcactctgccaacgaacacacccttaagcacgataggttccttctcactggtgttaaactcgcagcttctgccatgcttcgttcatcacaaactacctctgattcaaactcaaccccttctcttcttaacgtttcacatcaaactactccacttcatcttcaccaccaccaccaccaccaacaacaacaacaacaaggttgctgttgaaggaactggttcaacgagtgctagcagcatatcagagtatttgatagagactcttcctgggtggcaagttgaggactttctcgattcatattttgttccctttggtttctgtaagaatgatgaagtgttgccacggttggatgctgacgtggaggggcatatgggttcgttttcaaccgagaacatggggatctgggttcctcaagcgccaccacctcttgtgtgttcttcacaaatggatcgggtgatagttcaaagtgagaccaacatcaaaggtagcagcatatcgaggttgaaggatgatactttcactgttccacagattagtcctccctccaattccaagagagccagatttctatggtagaaacaatcctctttgttttgttttgttttgtgccttctctctttttgttaccctggtttgtagcttactcttgcccttgttttcgatttggttctgtttgactttttttcttcttctttttcttggttctcctccctctttccctaccgggctgtgctttgaagtattgataaatttgtgcacctactagtgattgtaaatataaaccttttcaaatacatgttttttttgac

SEQ ID NO: 29318 - DNA, 1306 bp, Glycine max
  Clone ID: TF_GmC1848_3
cttttggaagaggaggtggcttttgagggaaaggagggaacttttagtgtgggagggtggaaactggaattgggtttggttgggggtaaagagaatgaagattcagtgtaacgtgtgtgaggctgcggaggccaaggttctgtgttgtgctgacgaggctgcgctgtgttgggagtgtgatgagaaggttcatgcggctaacaagcttgccagcaagcaccagagagtgcctctttctacctcttcctctcatatgcccaaatgtgacatttgtcaggaagcattaggctattttttctgtctagaagatcgggctctgctctgcagaaaatgtgatgtggcaatacacactgcaaatgcttatgtctctggtcatcagaggtttcttctcactggtgtaagagtaggccttgaagctatagaccctggtgcttccttaacttctttgaagtcagattctggggagaaagtttcagatacaaagtcttcttctgtctctagaaaggtttccacagtgccccagccatcaaattacaatgaagtgctacccattgaagttggaggagttggggagtttccaccagccaaggtgtcttttggtggtggttctacagatggaaatatctcacagtggactattgatgaatttattggcttaaacgagttcagtcagcattatgattacatggaaggatcatcaagggccgatggtggtaagcttggggattctgattctcctgttttaaagtctggtgaagaggatatggaggaggaggatgactatttggaacgtgttccagattcgtcgtggacagttcctcagatcccttccccacctactgcttctgggttatgctggccaaaagaccctcaatattcatctgatagtgttctgtttgttcctgacataagcttctctctcattcaacaatctcagattagtagtatttgtttgagacgctggaggcagctttaatttgtttactctttgctaataacttagaggcattgattattccttttatttttggtatgattataagttctctcatgttgcagtggaagtttcatttgattagttacattttctattcttggctgtctcagtttcttctagggagtaatcaaactctctacatgtcattggaaattttcctagcaaagcagcaacaaataatgggagtttagaaggcttttactattaagtttggttttgtaacattatcatttccgctctaggatcctatgtagatgcatcatctattggattataatagtgatatgattcaatattggattgtttgtg

SEQ ID NO: 29319 - DNA, 1238 bp, Glycine max
  Clone ID: TF_GmC127847_1
tatatctcttgtgtctataataacctaatcctttctacgcgatcatatatccccttccttccttttcccaccctctcatcatgacccattcctacagctccaatgactttaatgcttggtttgacctcaattctccatgccttttttccacttcttcatcaccttgctccaataacccaccattttactttcctactagtaatactaattaccttaataactgcacaaatagacatatcttttagcagcatactcaatcttcttccaaccctctcctcctcaaagaaaagcacttcccctccttaatctaagacatgcaggagatgaagatcttgaatcttcattcagtgccatgaaagtcaacaaagagaaagagaaagaactaagctcgtcatctaataataactctttggatgatgaaactgctgtgactgtggctttacacttagggcttccaagcacgactattgcatcttctgaatcagctgatttagcttcaagcctatactcagacaaagaagaagaagaagaaaaagtagcactgatgcttcggggcattcttctgtcaaatagaattaacagaggacaatattggatccctacttcttctcagattctgattggtccaacacagttcccatgccccctttgtttcaagacgttcaacagatacaacaacatgcagatgcatatgtgggggcatggatctcaatataggaaggggccagagtctctaaggggaacacaacccacggcaatgcttagactcccttgctattgctgtgcaccgggatgcaagaacaacatcgaccatccaagagcaaagccactcaaagactttaggaccctccaaacccattacaagagaaagcatggaatcaagcctttcatgtgtagaaaatgttgcaaagcatttgctgtgaggggtgattggaggactcacgagaagaactgtgggaagctatggtattgctcttgtgggtccgattttaagcacaaaagatctctcaaagatcatatcaaggcatttgggaatggacataaagcttatggaatcgactcgtgtcttgatcaagatgatgaagcgggctctgaaattgagcaggaaaataatgaatctttttaatttccagtcgtagttgatgtgtttaatttcaactatgaagacaagacaattgaggattctcttgttttgaactaattaaattgttgactatgactaccatctctaattaacg

SEQ ID NO: 29320 - DNA, 1813 bp, Glycine max
  Clone ID: TF_GmC4128_1
ctgcgaaatatgcaacaaagggttccagagagaccagaaccttcagcttcaccgaaggggtcacaaccttccgtggaagctaaggcaaaggtccaacaaagaggtaaggaagaaggtttatatctgccccgaacaaacctgcgtccaccacgaccctgcaagagcactcggcgacctcactggcatcaaaaagcacttcagcagaaagcacggtgagaagaagtggaagtgtgaaaagtgctccaagaaatacgcagtccaatcagattggaaagcccacaccaaaacctgtggcactagagaatacaaatgcgactgtggcaccctcttctccaggaaagacagcttcattactcatagagcattctgcgatgcattggctgaagagagtgctaggctcacatcagttacaacaacaaatctaaatttcaagagtgaagagggtggtaataatgtgatgaactcgcagcagcatggtttgggaggacatggactaattggagcacaaagtcttcaaaatgtttctggcattccacaatttggttcacatggttttcgtttggatttcaatggaatggaacaacaaattaggccaagtttgtcactatggttgaaccaggggaatcaccagatgaatagtaataataataacattaatagcaacaacaatagtgcttccgatgcgggacccaattacatgtcatcatcaggtttgcctgagattgtgcaaatggctcatgctaatgctttgatgggttgttcttcatcgatggtgtctaattttggaggagttcatgcgggttctaattcgagcagtgcaaatctttcactagggaaaagaggggaagcatgtggaagtactgtagtggacttggcttctatttataataactctgagggtcaaaacaagaattcaaagcctgcttcacccatgtcagcaactgcgcttcttcagaaagcagcgcaaatgggttccaccagaagcaccaacccttctattttcagtggtagttttggagtgattaactcaccttcctcacaaactaccagtctcaacaacaacaacaacggaggtgcagccatgatgctggcaagtaacacttctactgctgctgcaaatgcaaatgactttagctcattgaggcattcatcaaacagttttgaccagcttgtgatgcaaaccaatgcgcagttgcaaagtgagcctgtgaagttgaagcttcattcaaatggtgtggagaacaatttgacaagggattttcttggtgtcagcggtggaggaggaggtggtggtggacctcagtttcttccccaagaacttgcaaagtttgcttccatgggctcaccaatggggttgagccaattcacaagtaaccaatgaacgaactcgttttgtttatgagcttctaagataacctcaaacttcaaaggtttgatggaaggagaatgaatgagttggagtgtaccactgtgagagattgctcgatcatgattatgttgtgagtgggggacccacacttgttgaacgaaaagagaatatcgaacaccacgagtcgtgcatgttctcccaatattgttattgttgtttttttcttctgtctttattaaaccatgttatcgttttttgcttctcgatcttttccttgagagaaatgaagggaggcataaaataatgaaaggaattcttagtgaatcgctgaaaactactagttgcgtactactgttgttgaccgtcaaattacggttactcgtgtaccatggatatatcgttaattacaaaataatataatataaaaatttagatattacaagt

SEQ ID NO: 29321 - DNA, 957 bp, Glycine max
  Clone ID: TF_GM433K20.C25.o1.fg
atgccaaacgccactgaacaattctcaaacatcaacagcatcgagtccctccatgtttcccttcgcaacctctcccaactcagcacccgaatggattccgtccaaagcttcgtctcccaatcgatccaatcccacactctcctcactcaccaccaaatgaacatagtctccaacgagatcctaaccgccattcgccacgtcatcaccaacggcgtcgcccttgtcgccgcctcggaaaacgcgctccctctctcggagactccaacgttggactccccgaacaacaacgacgacgacaacgtggtggagctcgatgccatggagctgctggccaagcaccttcacttctgcgaggtgtgtgggaaaggcttcacgcgcgacgccaacctgagaatgcacatgcgcgcgcacggggacgagttcaagaccccggaagcgttggcgaataaagcccgtggagaaacgcgcttgaaggcgacgcggttttcgtgccccttggagggatgcaaccgtaacaagacgcacaagaaattcagggcgttgaagtcagtgttctgtctgaggaaccacttcaagaggagccactgtcccaagacgctgttgtgcgagcggtgtcggaagaagagcttcgcggtgctgtcggacttgaggagccacgtcaagcagtgtcggggagaggccacgtggaagtgctcgtgcgggaccacgttttcgaggaaggacaagctgctcggacacgtggcgctgttcgaggggcattcgccgatgcttggagaggagagagatacggtggtggcggcggccgcggaagggttacctgaagggttctttgatggattggatgaatttggatttggatccattcaaaacaactcttcacaggaggaacacttggccttggggcttcccacaaataatttagatgcatgggaattttctttttctaatttaatctaa

SEQ ID NO: 29322 - DNA, 1250 bp, Glycine max
  Clone ID: TF_GmC48528_2
cccacgcgtccgtacggcttcccatgtccaattcaaactgcaatccgacccgaatacttcactctcagtcccaggatccgaatactaccaccgcggatcctcatgttctgcttcagaacctttccctggttcggaccagaatggattctctacaacacttcctatctcaatccatcaacaccaacactcccctcgccgtcgatcaaatcgccatggtctccagccagatcgtctcctccatccatcaattgatcgtcaacggctcagctctcgtctcttactctcaaaattccaccgccgcctccggagcaccggatccaccgttgtatccgaagaagccggagccggaaccttcagtcgccgataaagcgaagcaaatactcgattccaaatttgggcctctcgaagacgacgacgacgacgacggcggcgccgaagacttcgacgacggtagcggaatcgtggagctcgacgccatagaaatcctcgccgagcacatgcacttctgcgagatctgcgcgaaaggcttccggcgcgactcgaacctccgcatgcacatgcgcgcgcacggagaacagttcaagacggtggaggcgctggcgaagccttcggagaccactgcgcagcggggcgcgacgcggttttcgtgtccgttcgaaggctgcaaccggaacagctccaccggcggtttcggccgctgaaatcggtgatttgcgtgaagaacacttcaagcggaccactgcccgaagatgacacgtgcgagcggggcgcaaaaagcacttctcggtgctctcggatttgaggaaccactcgaagcactgcggaggagaggccaggtgaaagtgcacgtgcgggaccacgttctcaagtaaagacaagttgtttggccacattgcgatgtttgagggccacgcgcttgcgctcgtgtgtgacaaagagggtaaaggaaaacaaatggtggaggacgacaaagatccaatgttgatgagtgaaagtggatttgaattgaatgattgttttttggatcaagagtttcccgaaggcttctttgatgattttgggtccattgatgactactgttaaggtaagtgttttagggtttcctagtaatagactttgattatgtatgtgtatttagggaatattcatattcaattgctagatttgtatttatgtccctatggtattgaaggattaaaattaaacagtgtttataacacaggatggaaatgtacgattaattttatttt

SEQ ID NO: 29323 - DNA, 456 bp, Glycine max
  Clone ID: TF_GmC73788_1
tgagaggaaagggagggcctcagaactccaaatccctactcccactaaagggagcaaatagttaagaacaaacacatagaggagttcagttcacgatagcaagtttcattgaataaaccatgacggaacctcagaatccttcaccattgacacattctccagcgttagaaatcacacctcaaccactgctacctcccaaaaggaaacgaagcctccctggaatgccagatccagatgctgaagtgattgctttgtcaccgaagacgctgttggcgacgaaccgtttcgtgtgcgagatctgcaacaaaagcttccagcgcgaccagaacctacaacttcaccggcgtggccacaacttgtcgtggaagctgacgcagcgagggagtacagagccgcggaagaaagcttacgtgtgtcccgaaccttgctgcgttcaccacaaccccgcaagggcgc

SEQ ID NO: 29324 - DNA, 457 bp, Glycine max
  Clone ID: TF_GmC2530_12
tattattattattattctgtcttgatgacaccaaatgattgagaaataacaagaggggaggagtaggagctaaattttatgcataagaaaacaatagctggccacaagataaacaagatagcagggaaaaaatcaaacatatacttcagcaattagttccagatttgcacaacaattatggcggcagcttcctcatccactccatttttgggaatcagagaagaaagccctcagattacaacacaccatcaaccctccacagtttctccaaccacagcgcctcaaaagaaacggaggaatcaacctggaacaccatatccagatgcagaggtgataaaactatctcccaagaccctaatggcaacaaacaggtttatatgtgaggtgtgcaataaagggttccaaagggagcaaaacctacagcttcacagaagaggacacaacctgccttggaagc

SEQ ID NO: 29325 - DNA, 834 bp, Glycine max
  Clone ID: TF_GmC2530_6
tacggctgcgacgacagaaggggattgtaaaaaatttcatttatggcaagagagaagggagcaaaatctggaaaagcttttgaagaggaaaaaaaggctgagaattataaataaaaagtaaagaaaagaaggaaggaaatggtgtgtgtatatgtgttggtgcatctgcatgacaccaaatcagtgaagaaactgagtaatattactgccagctcaaatttctcatttataacaagccagcctcaggaggaaaatcacatcaaggagtactcatggaggaggggttgagtatttgctgttgctattaatttcttcttcttcttcttcaatatctctgtctgttctatctccctctagatttttcttttgctagaattctcttgcttatgagtttttttctttctgagattggggatgtgaattaaagaggactcaaattgcatgtgggttttccagaattctgatacagttttggggttcaaggagaaaaagaacactctctcaggtgaagcagaagaaggttaattgttatatataggacttgctataagagatatggcggcatcatcttcctcagcgtcgctctttggatttagagaagaggatcagaatcagatgaagcaacaacattccctgacaccatcttcatcaacaacaccagctgcaccccccccccagaagaaaaagagaaaccaacctggaacaccatatccagatgcggaggtgatagcactatctcccaagaccctaatggcaacaaacaggtttatatgtgaggtgtgcaacaaaggtttccaaagagagcaaaacctacagctacacagaagaggacac

SEQ ID NO: 29326 - DNA, 482 bp, Glycine max
  Clone ID: TF_GmC150983_1
gaaggaagaatgttttaaggaaatggcataatgatcaagccctcaaataatgatacaattacactgtcattgtgaacaaatctaacatcatcttcaaattagtattcacattctttcgatataaaacaggacaaaatgatgcttatatcatatgaataaaaagaaaatccatttaattagaatgcaatttcctatgctctagaaccacctccatgatccctctcaacatgctccacaagggacacaggatcaagaaatcccctactacacttaggacatgcatcaatcttcttaacccctaatcggtttccatttctttcatgaaccttttgcacatgatccaccaaagcagtcacagaggaaaactttgatccacactgagggcattgctccacttggtgatcatttctatttccactgccactgctctgccccaccccgtctcttgtagtagctgcctgccaaacttggttaatttcatc

SEQ ID NO: 29327 - DNA, 753 bp, Glycine max
  unsure (1)..(753): unsure at all n locations
  Clone ID: TF_GmC2530_11
gtaaaattgtgtgtgcatatgtgttggtgtatctgcatgacaccaaatcagtggaagatactcacaaaacctctacctcgaactttctcatttacggacgcgtgggcttgggagaaaaattcatatcaagtggccatgatgggggttgatttaattttccttttttcttcctctctcttcatctcctatatctctcttctctgcttcaaaaaaattttcaagaaaaaaatttccctttattagtttctcttctctacttctctgttaggttcaagagaatccaaattcccttgcctttgagttttgagattggggataagaattgagaaggactcaaactgcacgtgggtttttcagaattctgatttaggtgtaaggtttcaaatacaagaaggaaaagaaacactttgagaagaaggttaattatacatagaggttttttttttataagatatggcagcacctttttctgcagcatcgctctttgcaatcagagaagaggatcagaatcagatgaagcagcagcattcctcaacaccatcatcatcaaccactccagctgcaccaccaccccagaagaaaagaagaaaccaaccaggaacaccatatccagatgctgaggtgatagcactatctcccagactctaatggcaacaaacaggtttatatgtgaagtgtgcaataaagggttccaaagagagcanaacctacagctacacagaagaggacacaacttgccttggaagctaaagc

SEQ ID NO: 29328 - DNA, 638 bp, Glycine max
  unsure (1)..(638): unsure at all n locations
  Clone ID: TF_LIB4281-040-R1-K1-G1
ccacgcgtccgggagtttctcccagaaaacactaatcagagaatagttggaatctccaattcttgtctttatctcttcatcagaaaaaatgtgcgaagccgtagaattgaagaaaggcccaaatacaaagatatcagacgctattactgcgagtactgcggtatctgcagatccaaaaaaacccttatcacctcccacatcaatttgcaccacaaggaagagtatgaaaaagcaagagctaaaagagatcccgaagcagaggcttcgaaatcgaacacttgcgaggaatgtggtgccactttcaaaaaacacgcctatttgttgcagcacatgcaaagtcattcacttgaggaaagtaatctataagtttctaaaatcattggaaaanttatgggttaatagtgtgaagcatntggatccncagagaaagatctccaaaatgcgcgaggcangcatatatggacttgatgggattaagtatcaggtagggggtgaccctcctggtgaagctccatcaaggatgccctcggtcacggctctgttcaaaattgagaggcattttggtgtgtgctggncgatgatttgcagggcaagttaccagaagaaaggaccacctgactcagcaccttctacagcat

SEQ ID NO: 29329 - DNA, 1444 bp, Glycine max
  Clone ID: TF_GmC168_4
cttgcttgcaccatgacccatgtcatgccttgggtgaccttgttggaattaagaagcatttcaggaggaagcacagcaatcataagcaatgggtctgtgaaagatgctccaaaggctatgcagtgcagtctgattacaaagcacatctcaaaacgtgtggcacccggggccactcttgtgattgtggccgcgttttctcaagggttgagagtttcattgagcaccaagatgcttgcaacatggggaggctcaggcctgagtctcaacctcttcaaccatctgcatgcctttctagaacagcctcaagcccgagtccttcaagtgaaaccaatttcagcacagctccatggccaacaaggatgataataccaaagccatcagaaccaccaacaatcttcatgaataaccctattactgctatcaccactgctgaaacctcatccaagagcaacaacaaactactccaccccaacttggatcttcaactctccacccccaccaccaccaacaacacatcaaatgttgcaaaccgtattgatgctgcaatatcacctaagagggatcatcatcatcatcatgagaaccattcaacccatttgcaactctcaattgggtcatcagatatgagtgagaagaacgaatcaaacaggaactcatcagagaagagcagcaacagcaacattaatgatcagaataataataataagcagtccaacaacatggccttgttgagggttcaagagcaagcaagggagcacttgaggatagccatggcagagaaagcatatgctgaggaagcaaggaaacaagcaaagagacagattgagctggcggagcaagagttcacaaacgccaagaggataagacaacaagcacaagcggaactcgacaaagcctactccttgaaagaacatgcaatgaagcaaatcaactccaccatgctccaaatcacttgccatggttgcaaacaacagttccaagctcgaaatgcagcaaccacccccgatgagaattccttggtgttgagctacgtgtcttctgctattaccacggaaggaggaggagaagtagaaaatgataataatgcaaaagatcatggcaaagacaacaactaactccactacttagagagagataatcatcatcatcaccgtcatcatcatctttctctctaaagtttataattctgtattttattttcctatgtcctcctctatgggttaatacttactagtaatacccttttttccatttcaaggctaatatctttgtgcattggtataccaagtgaagtgaaggtgagtgatcgatgttgattatatgtaagtgggatattataatagcgctcgggatggagaaattaaagagtgtaattcttcgtgtatcttgcagtttattgttgtgccatgtaatttgttaattaaatttggtataaatgcagact

SEQ ID NO: 29330 - DNA, 522 bp, Glycine max
  Clone ID: TF_GmC320119_1
cattgaatgccacagaatgaatggagggaatcaccatatacaagttgaaacgaaaaaaattataaaaataaaagtaaggtaaataattaacactgaatacaaattggttcttggggatgaggttaacttatagagaaacacagactccaacttcagtaatgacaatccaccaaagaagactgcttagagaagacaataacgtttttttctctttgctgaaacgaaaacttggattctctatgatcatcctctggtagtgctggaagattcaagtccaacttcaagggtttcttggcttcttgaaattcattgttaccaccaacaccaacaacatttccaccactcatagaagttgctaaagaagcattcacaagagttctgtggcgcctcatgtggccccccaaagcttgccctgatgagaattcagcaccacagatagaacactcgtgaaccttagcctttgttgttgttgttgttgtgctacacatattatttttaaccccatttggtattttcaaggag

SEQ ID NO: 29331 - DNA, 450 bp, Glycine max
  unsure (1)..(450): unsure at all n locations
  Clone ID: TF_GmC331407_1
cgatcgcataccggaacgagtactagagattgtcagtattgcggaaggacattttcgcgtaacgatgtacttcaaagacatctaaagacgcatgtggggcatcaagttggggatggtagaccgagagcgtcacctagtccatctatcgctcctgaggttccggattcaaggtcaattatccatcaaacacctcagatccaacaagaccagatctatcctcaggaccctctctctgcaaataccaatctgacggttcaggctggaccatcgactggcgattcagctataactggaccggtgtatacgactcaacaggatgaagcttggagaatccttcatgggctggtacaagctactcaacctgtttctgccccttcatactctctcaaacaagatgtaatcaacccattccccgatatgttcagcaatcaagccgcangttcatgggac

SEQ ID NO: 29332 - DNA, 761 bp, Glycine max
  unsure (1)..(761): unsure at all n locations
  Clone ID: TF_GmC1674_1
ccccgagcgaacacgcgcaggccacgcgttcgcccactcgtgcgcccacgcgtccgtacgactgctagaagacgacagaaggggactaatgaaatgtacaatggttgttctgatgattctgcttatgggagtgatgagaacagcactgacactgattcttatcctgctccaaaggctcacagcaacaggaacaacctcagtgtccagaaggggaagaagaagaagaaattgaagtcaaagaaaagcaaggcacatgagtgtccaatttgcaacaagattttcaggtcaggccaagccttggggggtcacaaaaggtcccattttgttgggggttctgaggaaaacacacttgtgataaggccaagtgctcctcctgctgctgttccttgcctcattgatctcaatctaccagcaccggttgatgaatagggagaaagaaatgttggtgccaaaatcctggttttttttttttttgcatcattttgaagcatcttctgttgaggtagctgaatgtctctggagttctgaaaatgtcttgtctttatccccatatgatgaaagcaatgacaatgtacagacaagtgggtaattggtttttgttcctaaggccttagatccattatttggtaggggtagtctttctttttcatgtttatgggatataagaacttactagtttctccactgaatattttctttacttcctttatcaagtacaactatatattcctggaantatgttcttttcatgcagatgtaac

SEQ ID NO: 29333 - DNA, 2797 bp, Glycine max
  unsure (1)..(2797): unsure at all n locations
  Clone ID: TF_GmC135_1
ataacattgttgtatttatcacatcttatgaagtggaagcccggaattgggggtgaggcctggcacgctctgtgtacttggtcacttgtccatccttttttttgcctacactcatcgacacttttattgcaaagcttaaagggacttcaatagaggccaaaatatgtaattcttgtgattggtgccatgaagaaaataaacgatagaagagaaataaagcaaagacattatgatggaggcactgaataggggtctagagactgtgtgggcatcgcccgaggaaaagacagaaagagcaacgtcagagagtttgccgtagggttctccttggtttgtggtttccggtattgttttgcactgcttcagatacagagagaagggaatccttcttctctctctctctctttctcttttcctgagtttgaacttggagtaactgagtctatatttttgttcatactagtgtggtcatcactggattttcttggtatatataaaaaaaaaacaaaatattgtctcttgggttggttccaaacaagtagaggaaactatcaattaagtttatagtattttgcttcacagatgtacagaactctctccacttttcattttttttattcccgcagattattttttctttgttggggtttcaaagagtaaatattgttaagtagttaagttgtatatcaattttgcctctttgttctgttcttttctcactagtccagttccagctttttcctttttctgttttaggtgaggattgtcctcagatcccagaagctatccagacttgttacatacgaaaaactcagatctatgtctcatgacaattcacaaaactccaaatatgagaaaagatgaagggtttgaatatttgatgttccaaaaaccatgtctaatttgacttctgcatccggtgaagctagtgcatcttcaggcaacagaaccgaaattggcactgattactcacaacaatactttgctccaccactaagtcaagcacagcctcctccactaaagaaaaagagaaaccttcctggcaacccagacccggaagctgaagttgtcgccttgtctccaaagactctcttggcaactaataggttcatttgtgagatctgcaacaagggatttcaaagagaccagaatctccaacttcacagaagagggcacaatttaccatggaagctgaagcagagatcaagcaacgagattataaggaagaaggtgtatgtgtgcccagaagccagttgcgtgcaccacgacccttcaagggctcttggggacctcactggcatcaagaagcacttctgcaaaaagcacggcgagaaagaagtggaaatgtgacaaatgctccaagaagtatgctgttcaatcagattggaaagctcactccaagacctgtggcactagagagtacagatgtgactgtggaaccctcttctcaaggagggacagtttcataacacacagagccttctgcgatgcattagcagaggagagttcaagatcagtgacaggcataggcatagtagccaactcaacttcaactcaaccaactgcagcagcagcctctcatcaacaagacatcatccatggtaatagtaacaatttctcattgaagaaagagcaacaagcaggtttcagaccaccttggattggacaaccatcaccctcttctgcttcatcattcttggtctctcatcaagaaaaccctaaccctagaggtggtggtcctattcccactcttcttcctccttaccaaacagctcctcacatgtcagccacagcgttgctgcagaaagcatcccacatgggtgcgacgatgagcaaaaccggctccatgattgggacccaccaacaacaggctcacgtgtctgccaatgccgctttgaatttgtcctcacgtgaccaccagatgacccccactctccatggcttggtacctttcgggaataaagctgttcctgctgttggtaatggtgtttctccttcactccttcaccatatcatcgactctttctcttcaccctttgaagggacttcttttgaggacacttttggtggtgctggtggcgatgccatgacgaaaacaaccaccgccgatgacggtgccagaggaaacaataatgaagccctgacaagagatttcttgggtcttagacctctctctcacactgatatcctcaacattgctggtatgggaagttgcatcaactcctcccaacataaccaaaccccaaacccttggcaaggttagctccatatgtcttatacatatttggtttttctttttctttatttcattggtatatatatacatttattttagcctactttttaattttgcttttgtttatgaattatgatatatattgtcaatcttcccaaagtgaaaaacctttcggagtccaaatattttatatgtgtggaggagcgatctttcaatttaaaaggaaagggggggtatgttgcaatttggaattagaacaagatggggttgttagtggtccctttaaaagttgaaagagttggccgattcaatcccagtggtactgtcaatcccttttcccctttggcaaaaaacaatgtccccttttttcttttttattacatggatggcaggatggaagacttccagtagatatcacttgtgtnattagtaaccatcatgggaggctcaaacacccatgtgatacgtcctcttgaaaggcatggcattccttattatttggttatgcacatctaatgaaaataaaagagaaggggagatattgcatttgattaaaatact

SEQ ID NO: 29334 - DNA, 2003 bp, Glycine max
  Clone ID: TF_GmC135_2
agccaagcaagaagtgtgtatttgaacaaaagtttaatttttttttagccaaaacactttttaactcttattttgaagcaaaagaaacacacaataaagagagaaatattgcagtgatatttttctgggggttgagaaagagaacagaagaaaagacagaaagctcaacgtcagagttagccgtataaggttcgcttattgtgtgtttgtggttttggactagctgaagtttgtcctttggatcccagaaacctttccagcatttgaaaaaccaagatctatggcctataccacaaccttaggtttctaaaacttgcaagttgcaagtatatatatggagatgaagggttttatgttctaccaacaacagcaacagcaacaaatagtggaggagaacatgtcaaatttgacttctgcatctggtgaagctagtgcttcctcaggtaacagaactgaaattggaaccagctacatggctccaccaccaactcagattcaaccaccaaagaaaaaaagaaacctccctggcaatccagaccctgatgctgaggttatagccttgtcccccaagagtcttcttgccacaaacaggttcatttgtgagatctgcaacaaaggatttcaaagagaccagaaccttcagcttcacagaagagggcacaatttgccatggaagctgaagcagagaacaagcaaagaggtgaggaagaaggtgtatgtgtgtccagagccaagttgtgtgcatcatgacccatcaagggccctgggggacctaactgggatcaagagcacttctgcagaaagcacggtgagaaagagtggaatgtgacagtgctcaagagtatgcagttcaatcagattggaaagctcactccaaaacctgtggcactagggagtacagatgtgactgtggaaccctcttctcaaggagggacagtttcataacccacagagctttctgtgatgcattggcagaggagagtgcaagagccatcgcaaacccacttcttcccccacaacaacaacaatcttcttcctctcacatgagtactctccaaacccaattcaaccctcaaaacctccatgccttcccattgaaaaaagaaatgcccccttggcttggcccaccagcaacagtagttgttgatcatcatctgtcttcatcctcatccataatgttctctcctccacaccaagaaaacgataaccctccctagtcttggtcccactcttgctgcctaccaaacagtccctaatccacacatgtcagccactgcattgctgcagaaagcagctcagatgggtgcaaccatgagcagaagtggttccacaccagccatgactgggccccaccatcatgctcacgtgtctcattttggcttgaacttgtcctcacgtgaagacaccaccaccaccaccccttcaacaacaactactaatgctaacactgctacagtgttcagccatggcttattatcatcatcaccattggggaataaagctgctgctgctgctgctgtgtcttcttccgcaccatcccttcttcacgatgttatcaactctttctcttctccttctgcctttgaaggaaccccttttgaggatgcattcattcagagctcaaagaaactagatgatgatcataacttgtatttgcatgacacattctcaaaaacaagtggtgcagctgggaataatattaatgaagggttgaccagagatttcttgggtcttaggcccctctctcatgctgatattctcaccatcgctggcattggaaattgcatccatgatcagcagaaccagtctcaaaagccatggcaaggttagctatagctatgtagctccatatatatatgtggatcttctttttcatcctttaattaatcatctatatatataaattttttcccttttaaattagtgtaacttttgtttatgatcttttcgatcttcccaaagggaaggacctttctgaatcgatcccaatgtttttattcctt

SEQ ID NO: 29335 - DNA, 879 bp, Glycine max
  Clone ID: TF_GmC23433_3
ggctcgagctcgagccgaatcggctcgagggttcttgtattcttgtgccagcaaacaccctcgtctccacaccataaaaggaggagagtttcctggcttttgtcttcctctagttgcacaaatcccatcttttctgtctcaattacctctcctttaatttttttttccttagtttttttctgaacaaaattcatcttgctgcagctatctagcagcttcaacaagctgagtgaaacaaaacaaacaaacacttgtttgtaaaattgaataaagggaatattttcaacagattcttcccttttctttggctaccttcaatgtcaaacatcacaagttgtgatagtgggagcttctctacagagaataccagagaagatgcagcagttaaacaacagcaatctgagatgcttggtcagttccacagtccacattctcacacttcaactacaacaacaaataatagcaatggttccaacacaaattcacaaccacctgcacctgttaagaagaaaaggagcctaccaggaaatccagatccaagtgctgaagttattgctctatcaccgaccacactaatggccacaaacaggttcatatgtgaaatctgcaacaaagggtttcaaagagaccagaaccttcagttgcaccggcgaggccacaacttgccgtggaagctgaagcagagaacaagcacggaaattcgaaagatgatttatcgtgtgtccagatccttccgtgcgtccaccacaacccagcaagagcactcgggagatctcactggcatcaaaaagcacttctgcagaaagcacggcgagaagaattggatatgtgataagtgctcaaagaatacgctgttcaatctgactggaaagcccactc

SEQ ID NO: 29336 - DNA, 449 bp, Glycine max
  Clone ID: TF_GmC124792_1
taagtatattagtttctgagagagagagagtcttaattgattaatcctgctatgaattcagagaagcctgtgagtcctgagatttcaagtgaagaaaatgatcatgatcaagaagatgacactggtggaaccaaacgctcttatgagtgcacattctgcaaaagaggcttcacaaacgctcaggctttaggcggccatatgaacatccataggagagacagggccaaggccaagcaattcacacttgatgcttcaccttcagttaacaaattcaatagtaacaacaatgattccatggcccttccctttgtctcagaaattatgaaccaacccacaaggcctaattactcccctttggagtctcagatgaactttcatccaccacatgccttttattatgagttttgtaactcaaggtctcagccttttagtttgaacaaccaagagct

SEQ ID NO: 29337 - DNA, 636 bp, Glycine max
  unsure (1)..(636): unsure at all n locations
  Clone ID: TF_6847267
ataaaagaaatgaataaaagtgtgaatcacatatttacatccccactaattgaatcaatttgaattgatgaattgtgtaccataatatgaatggaaagaatcaacaattgtgtacatacaaggctaaaaacaataaagaaggtcaatactaaaaacagatgaatgagaagttctcggtgaggctaatttatagagaaaggacaaacttcaactttagtaatggcaatccaccaaagaagaagttgctgagaagacaataactttttctttggcctgaaaaggaaacaacttggattctctgtgatgatcatcctcaggtgccggaagattcaagtccaagttcaaaacatctttgttgtgtttcttggattctctatttgcattaattgccccacacgtaggtgcactcccaaaatttctatgccttctcatgtgtccccccaanncttgcccagatgaaaattctgccccacatatggaacactcatgaactttacacttagcattaatagtactcatcctantgttgctgctgctattattattattatacaaaanngttgatnnnngtnnnnngaanntggtgcttgtggtgtcacaataatnnnnatcatgattatgaanannattatnatc

SEQ ID NO: 29338 - DNA, 318 bp, Glycine max
  Clone ID: TF_5770686
cttccttcttttagtgaaatttatgtcttattggaatttccccttcactttgcaaagaaagatggagttcaattcccaaaaccctaaccaatctgagataagatggagctcagatgatcaggctggtcctggacaagtaaaatattcttgttccttttgccaaagagggttctcaaatgcacaggccctaggaggccacatgaatatccatagaagagatagggctaaactcaaacaatctgctgaggaaaagttgctttctttggacatctcaatcaaaaccactggcgatccaaatgacccttctgatttggaaga

SEQ ID NO: 29339 - DNA, 557 bp, Glycine max
  Clone ID: TF_GmC77129_1
ctcgagccgctcgagccgttcagccactaatacttcttcccttactgaactctttgtgtgagtttcttattgaaatttgagtcaagcgagcgagacacagttttgaagatgctaagaaacatggatgaaggagaaatcatgacaaatattgctttccctcagaacttaactgcttccgctgcatccagtgatcacaacaatcctcctccttctttgaagaggaaaagaaacctcccaggaaacccagatcctgaagcacaagtcatagccttatcaccaaagaccctgatggctacaaacaggttcttgtgtgaaacttgtgggaagggtttccagagggatcaaaatctccaacttcatagacgtggacacaaccttccatggaagcttaagcagaggacgggaaaggaagcaagaaaaagggtttatgtgtgccctgagaagagttgtgtccaccatgacccttcaagggctcttggagacttaactgggataaagaaacacttttgcagaaagcacggtgagaagaagtggaagtgcgagaagtgctcgaagcg

SEQ ID NO: 29340 - DNA, 246 bp, Glycine max
  Clone ID: TF_700743676H1
aacgtatcagaataaacaaagaaagtcctctctctaatggagcggtacaaatgcaagctctgctccaggacattctccaatggcatagccctcggtggccacatgaaggctcacttagccaccctccctcttcccccccaaaaccaacaaccaccactttctccctctgctgctgcttccttctcttctaattcctcgtcagaacaagatcaagccacacacggtgaaaagtcgctgatttatggg

SEQ ID NO: 29341 - DNA, 565 bp, Glycine max
  unsure (1)..(565): unsure at all n locations
  Clone ID: TF_jC-gmro02910037d11a1
ggctcgagcacttaatatacttccttcccaccttagtcagatttacaactgttttccaaactgagtcaaacttaggattgaaaaaaacacctaagctctaagatgctggaaaagatggatgatggagaaatctcaaatgctttccctcaccagaacccttcaactgctgcatctaacaatcagcctcctactttgaagaggaagagaaacctccctggaaatccagatcccgaagctgaagtcatagtcctatcaccgaagactctaatggccacaaacagattcgtgtgtgaaatctgtctcaagggtttccaaagggaccaaaaccttcaactccatcgcagagggcacaaccttccttggaagctgaagcaaagaacaaccaaagaagtaaggaagcgagtttatgntgtgtccagagaagacatgtgtccatcaccacccttcaagggccctgggagacctaactgggataaagaagcacttctgcagaaaacacgtgagaagaagtggaagtgcgagaagtgctcaagcgttatgctgttcagtcagattggaagcacac

SEQ ID NO: 29342 - DNA, 1607 bp, Glycine max
  Clone ID: TF_GmC38653_4
aattgtctgccgataattattcggctcgagctcgagccgatcaagatgagatgcagattgttgctgtgaacatggctgtgtctggtttgtctgctgctaatgagcgagtgaaggaggttgccttgttggggattgaaaatcttgcggatgtgcagattcatgacctgttggaatgtcgcaagtgcaacatgagcttcaatgagaaggatttgtacttgcagcacctgttgtcctttcaccagaggacgacaaggcggtaccggcttggttcgtctgttggagatggagttataattaaggatggcaagtttgagtgccagttctgtcataaggtgtttcttgaaaggcgtcgctacaatggtcatgtggggatccatgttaggaattatgtgaggaaagttgaagattccccgggtcagccaaatgtccaggggacagacgacgagactcttgtgagatggtaaggccctctgaagaaaatgtggtacactcttgggattttaactcctctatatccacagaacaatctttgggttgtttacctgcattcaactctgatgagggaggaaaacagttttgcagtgttgatcatgaacatgataatgtcaaggggttccaggaattgagatttgatgaaatagatattgttgagtatgattttttcctgatgtaccaactgaattgagaaataacacagtggtggaagggacgtatgcatccccagttcagtttgaatcacaagaagttatgctaaatattggtggcagaaatcagcttacaactgtgtgtgtatggtgtggaatagagtttgaccatgatgctgttaattctgaaatacaaccagattctgttggattcatgtgtccagcttctaaggcaaaaatctctggtcaagtcaatgtgttggactgtggatccccgaatgctggctgtctatagactgttactcaagaaccaagtgatgagcaaaaaagcagtcatactgcatagaccaatatatatatatatatatatattaaaaagacaaaacaaaaaaattgaagttactaaaggtgggaaatgcgaggggagagattccaatatgatttaccctttccagaagaatctattaccaatatgatttacacttgttatcgtttgtacttgtcacaactgcagagattttagctttggcagctgaatgatattccaaagatagtaaaaacagatgatctagaagaaaaaagccaggatttggaggttgatggaatactcaattatagattgtatcgtgttattttttattaatttcacctcgtatgttgtattgtcgatttgtcgtacattgccccgttcattcgtatagaaaccgatattcagtactgtattgttttcttttatccacaacactgctgtaatagtgtgcctggggctttcatcttgaactaggtactaaactaacgagtgtattccccaattacaccaaatgaaatatgaacatcaacatatgtatacgctggctgtcgtttacttaggatacaaatgattctcactctataaacatgttcacaaatgacaatttctatttatgttatttaaatcgaaggttaactttgtgacgagtttcg

SEQ ID NO: 29343 - DNA, 1275 bp, Glycine max
  Clone ID: TF_GmC71690_1
catttttctctcagataaataatcattgcaacactgttgttcagaggaagtgactgacatttgggactccgaagtccccattaaattccaaattgaaaaccgaaggaaaactcagcgtgtgattgaaatttgaagagtgtgaagatggcgatggaagtggagcagaatcagaatcatcaattagggtttcccttctggaaaccgctccgtcgcaggttcggacccgaatctcctttcttcgctcatggcaacctcgaacgggaacttctcgccaaacagcttgctttggaattaacagaagagaaacaacagcttgagaaatggatgcaagaggaagaaggaagggaagtcttttgtcccattgtgggttgtggtgcacgcttgacctcaatggaggactttgaaaatcactataatgcaaggcatactgcatcctgttctgtgtgctccagagtttacccgacatcttggttgctcagcatacatgtatctgaagtgcatgattctttctttcaggcaaaagttgcacgtggctatgatatgtacgaatgcttggtggaaaggtgtggattgaaattcaaaagctacaatagtaggcagcagcatctggttgacaagcataaattccccacctcatttgagtttttcaagaaggctaagccttcaaagaaacataggttgaagtcccaacgcaaacaagctgtttgtaaggaggattcttcaggaatgatggaagtggaaaatgcatccatggatgaccttgtttcagcagtctctaaattgaacacttctgactccaccccttcatcaatcagttttggtcgccgccacaaaggcttgtcatttgtccctcgagctgttcagcgtggaggtggatcaaactcaacagcatctgtgacaaagaaataagcttggactcaacaaatctgcattcttaattgctgaataatcaacattcagatgcagctcccttataaaatccgtgtggacgtcttgcattctaagtttgaagaagccaattaagttgaagatggaaaattagaatcatgctggaggatgtaataacagcatttgtcagtattatctttttttgctcccacttggggctgtaagtttgcccaacacaggcaatatgagcatgcgaatatgcctggcttgtataatgtggagattttgagcttctttttctatgatattgttctgttaacatctaaaaactttactgaatagccacattgtaattagagttgaacccaatcactcttaaagcttgtc

SEQ ID NO: 29344 - DNA, 549 bp, Glycine max
  Clone ID: TF_10846993
ggatcaaacaaggaagttcggaagaaggtatatatctgtccagagaaaacctgtgtccaccacgacgcggcaagggctctcggtgatctcaccggaataaagaagcattacagcagaaaacacggtgagaagaagtggaagtgtgaaaagtgctccaaaaaatacgcagttcaatctgattggaaggctcacaccaaaacctgtggcaccagagagtataagtgcgactgtggcaacctcttctccaggaaggacagttttattactcacagggccttctgcgatgccttagctgacgagagttcgagactcacctcagttgcttcaacaagcctaaattttaagagcgaagatgcaactatgatcaacacacaagctagtttgtcgacacgtggattaatcactgaccatggaatgcaaaatgtttcacaatttggtccacatgggtttcgtttaatgaacatgggcacagaccagcaaagaccaaacttgtcactatggttgaaccaaggagatcaccacattaacaatccacttgatgtggcatta

SEQ ID NO: 29345 - DNA, 1276 bp, Glycine max
  Clone ID: TF_GmC910_2
ggctcgagataaagcaagtagctaatgagatcccgaagcagaggcttcgagagcgaacacttgcgaggaatgtggtgccactttcaaaaaacacgccggctcgaggcagcacatgcaaagtcattcacttgaggaaagtaatctataagtttctaaaatcattggaaaattatgggttaatagtgtgaagcattggatcccagagaaagatctccaaaatgcgcgaggcagcatatatggacttgatggattagtatcaggtagggtgacctcctgtgaagctccatcaaggatgcctcggtcacgctctgtccaaaattgagggcttgttcatttgtgttttgttcttgtcagagcatcatgatacttttatgtgtgtgttttttgggttttagtttcttgctttaacagtatttggtccagaggccatttgtgtgtgctgtcgatgattgtcaggcaagttacagaagaaaggaccacctgactcggcaccttctacagcatgaagggaagatttttaagtgccctgttgagaattgcaacagtgagttctcatttggaaagcaatatgaaaagacatactgaggagattcatgatgacagttctaccactaccagtagtgacaaaacaaaaactttcgtttaatttgttcatggttttgtgtcaacagaaatctaatctagacaagcataagaaggctgtgcacttaaatgtaaagccttttgcttgtgggtttcctgattgtggcatgagatttgcttacaaacatgtgcgagataatcatgaaaaaactgctaaacatgtttttacccttgtaagttcttttccctttctattccctttgtgcaaaaggctatcataagtgatattgtcatagtcacacggctttgcattgactttggttcagggggattttgaagaagctgatgaagagttcaggtcaaggccaaggggaggaaggaagagaacatgtcccactgttgaagtgttaattaggaagagggttaccccacctagtcaattggagcattggttatttatgcaggatagtgagtagagtgcatttagcactctgtgctcctattacaagtaggcaaaatgtaaatttaacatgttgacaggagtatataacattttggattattgttaacagatatatagaatttaggacaacgtgtaataatgattgatgcttatgagttatgacagattccatagtgtagcgaatctattaacctttgtaccaatttgcaatttaaacaactgcttttgttt

SEQ ID NO: 29346 - DNA, 429 bp, Glycine max
  Clone ID: TF_GmC1644_3
aaaaaaagtcatagtttttttttggggttgtgtgtgtcttttggtggaggaatgcttgtcacctactcctttaaagttctcccaaaaacacttttgtgagtgagtgagtgagagaaagaagagaaggagttgaagtggttgttgtattgtagtagtgtgtaaagtcttggtgatggatagacacaaatgcaagctttgttcaaggtctttcagcaatggcagagcccttggtgggcacatgaaggctcaccttgcttctctccctctccctctccctccaaagcttcactcttgtttctcttcctctgactcagaacaagaacaatctttaagggagaatcctaagaaaaccttgaggattctggatcctgaagacagagagagcgagacagagtctaataagaacccgactcgttaacgatccaagcg

SEQ ID NO: 29347 - DNA, 1516 bp, Glycine max
  Clone ID: TF_GmC58470_1
ctgataccgcaatctctttcgcattctctctctctctctctccaccgtccactcccttcagccatcttgtactctctctatctctctataaaagcaaacgcaactagccataaactgttcccactctctcctcaacacctttctttttcctttccacccatggctgacccctactccaatttcttctcttcctcttcacccttgttccgtttcaaccacaaccaatatttcccttcttcaaacccttctccacaacaccacaaccacaacttcatcaaccacacaaaaaccaacgacaccaccaccaccaccgcctttttccactaccaccaacaccaaactactactgctttttcttcttttccaccctcacctcctttgagagaagaactacccctcttgaagctgagtccaacaaagcaagatgaggaggaagtagaggacttggtgtctaattgcactggtggagccatggacgtggaagagaggatccaccttaaagaggaattagaagatgatgaagatggaagtactagtgtcactgttgcactccacatagggttgccaagccctagtgctgctgagatggcttctgtcctctcttcttcctctcatgagatcactgacaaagaccaacatggagatcatggtgctgctgaggattcttcttctgctggcttcagactcaacaagggccagtactggatccctaccccttcccagattctcattggccctacccagttctcttgccctgtttgctgcaaaactttcaacagatacaacaacatgcagatgcacatgtgggggcatggatcacagtacagaaaaggacctgaatctctgaggggaacccaaccaacaggaatgtgaggcttccttgctattgttgtgccccagggtgcagaaacaacattgaccacccaagagcgaagcctctcaaagactttagaacactccaaacgcattacaagaggaagcatgggatcaagcccttcatgtgcaggaaatgtggcaaggcttttgctgtgaggggagattggagaactcatgagaagaactgtggcaagctttggtactgtatttgtggctccgatttcaagcacaagaggtcccttaaagaccatattaaagcattcgggagtggccatgcagcttatggcatcgatggattcgaagaagaagatgagcctgcatctgaagtagagcaagataatgatgattccacccagtgattaatgagaattaatgcatgggtttaatatatgtgaattatcctagttattttgtgaaatgattggggatgaatatatataaagcttaatttggcttcctagctatttcagcactatatataagcaccaagtttaaatggaaagccaatctttttttttaaaaaaaaaattatctttcttctgttggcaatgttagctaggactaggagagactggatactgaacacatagctggtaaagctagatatatatatccaacttctttgcatttgttctcgtgt

SEQ ID NO: 29348 - DNA, 734 bp, Glycine max
  Clone ID: TF_LIB4164-053-R1-K1-F8
ccacgcgtccgatttcttggatgctactttctttatgcagtgcctatgtcacggattcgtctgtctgcttcaaagcttttgtactttcggaatttgcaaggtatagcttgttaatttaggacagttttcaattctcttcggttccaaacatgatgtctcaagaagcaatacctgctccttccaacaataacaacctcagagactccacggttcaacttcatgaaccaaactcaaaccctaatcctaaccctaattcggttaagagaaaaagaagcctacccggaacaccatatccgaatgcagaagtgattgctctgtcgccaaagtcgctgatggctaccaaccgattcatctgcgaagtatgccacacgggtttccagagggaccagaacctgcaactgcaccggcgagggcacaacttgccgtggaagctgcggcagagaaacagggaagacgtggcgaataagaaggtgtacgtatgtcctgagaagacttgtgtgcaccacgacccttgcagagccctgtgggacctcaccgggataaaagagcacttcatgtagaagcacggtgcgaagaagtggtagtgcgaaaagtgctccaagaaacacgctgttcaatctgactggatagcccatagcaagatgtgtcggactacacagtacagatgtgactgtggtacaatattcttcatgaaggacagctttgcaacgcatatggcctttgtgtgacgccat

SEQ ID NO: 29349 - DNA, 780 bp, Glycine max
  Clone ID: TF_GM169K08.C11.o2.fg
atggaggagtctcagtacttgctgtggatcaagagaaaacaaatcttgaagtcacacattcaacaaccatttggaaccagcaacaacaacaactcatcatcatgggaggaaagggcttttgcagaagatgctgctaggatacttggtgggtgcatatggcctccaaggtcttactcatgcaatttctgtaaaagagagtttaggtctgctcaggctctagggggacacatgaatgtgcacaggagggacagggctagactcaaacaaagccttagtcaccataatgaagcccttcaacatcatcaaaaaaatgattgtacagttgcaacaagcaaagtctcatcttctagggcctcaactatatctacccaagaaatttgttctcatcagcctaccatgtccctttattcttccttaattgggtggggacatcatcaccacatggagtctcctgattcagaaccaaaagggcaagtgaatgcaagggaagaatttttaaaaggtttgggttgtaatgattatgttgaaacaagtttgtctgtgggacaaagtgcagtgtttggccaaaaattaccaacaactgaatcatgtggggacgaaagcatcagttataaaagatcaaagacttctatgcctcctttgcctggagttttcctcaagccatgttcaaatgatagaaacctaacttttcagtctgcagaatttgtacttggactcaagcctggaatggaagacttagatcttgaactcaggctggggaagccacagaaagttatttag

SEQ ID NO: 29350 - DNA, 378 bp, Glycine max
  Clone ID: TF_GM169K08rgnG6.C1.o1.ma
atggaggagtctcagtacttgctgtggatcaagagaaaacaaatcttgaagtcacacattcaacaaccatttggaaccagcaacaacaacaactcatcatcatgggaggaaagggcttttgcagaagatgctgctaggatacttggtgggtgcatatggcctccaaggtcttactcatgcaatttctgtaaaagagagtttaggtctgctcaggctctagggggacacatgaatgtgcacaggagggacagggctagactcaaacaaagccttagtcaccataatgaagcccttcaacatcatcaaaaaaatgattgtaagtcatcaagtgctcaattttctgaagagaatttcaatttctttctctcatctagatag

SEQ ID NO: 29351 - DNA, 1269 bp, Glycine max
  Clone ID: TF_GmC5902_1
agcaggtagaagatgatgatgactcttgggaggtcagagcttttgcagaagacacaaggaacatcatgggcaccacatggcctcctaggtcctacacctgcaccttctgcagaagggagtttcgctccgcccaagccctcggcggccacatgaacgtccaccgccgcgaccgcgctcgcctccaccaagctccagtaccctcctcctcctccaaccccatgacctcttctcttcccacttcacccttcatcaatatccctcctcaagaccttgttgcaaatgctggcttgtgcctcctctaccacttgcccaaaagccctagtagtactgcaccacccttcccaccttcccccactactccttctccttccactcttctctctatctcttcttatcctacaaccaactttctgatgcaaacttcctttaattttcccggtgcacccgcaactgggatcaatactactactactactactgtttcctctttgtgctataactctagcaaagtggaacaatccgcaacttcctcctctattgatcataatggccacctcgaagagcttgatctagagctccgcctaggccacaaaccaacaccaacctcataaagcttgcctgaggagctcatcagaaatatatcaaatatatattatatagtgtgaaccatatatatatatatatatatatatatatagtactgctggtagtagcttctgagaaaaattaaagtccgacaatattattgttttgctctctttttaactgcagcgatgtgtggaagacaggaagagatatggagagtgttgttatttgtagatgtttgttataccattaccatgtccaccttttggtatagctgataggcttgtgggttttgttttgggtttaattttgttatttttcttggtggattgatttttatctgtgtgaatgttttgtgactgaaggtgcacatggagatggagggaggagcaagcagggggtggggataggaaagaaggagagaggtaccacatgtaaatttttcaaacaaaaagaaaaatcaattgtaagttggtattaatttttggagaaatatattatcagtaattatggggggagattagggtttggatttagacactgaaaaaggttgcagtgaagtgtcattttctattttagagttgtctaagtacatacatgtctgtctgggcatacatttccgtggggattattttcctcccttcactaagtaaacctagtaatatattattatcttcaccgttc

SEQ ID NO: 29352 - DNA, 1316 bp, Glycine max
  Clone ID: TF_GmC166371_1
attttactaatgtcttattgactggtggtggaaaccaaacacaaaataccaaacaataaaaaaaagactatgctctgagacattgaaggtagagagtaccaaccacttcaccttccacaccacactctcctctaagccatatatctcatgcttaattttttcatagtagactcatgtagctttcaattcctctccacaatccaacaattcccatctctaattcctttccttttcctgaattaagttgaacataatggaggaggatcaatgttggatcaagagtaggagaaagtactcaatgagctctaatcttgactcatctactaattacccctcctcctatgatgaccactcatcatgggaagaacaagccttcgcaaaagatgcagctaggtctggttgcacatggccacctcgatcatattcttgtagcttttgcagaagggaatttaggtcagcacaggctttaggcggccatatgaatgttcatagaagagatagggcaagactcaagcagccatatagccctcagaatgaaatcctaagtgttgatcttgagaaaattaccacgcaacccctgaattcagttcagatttcttttacttctttgggttacttatacccatcttctcttggtgtattgacccataataacactaaccctaattctgatccttattctcatgctcctccttcaccttccaaggttttagtctcatcaatcaataagagaggaagagagaaaccccagattccgctttacaaaggatgtcatgagtcttctcctgatcttccttctaaatccatgtcaaatttaactgaagacttcagattttgttcacgtaggctcgatcctgaagctggtgttgagaaaaaattgaagggattggattctaggtgtgggagtactgagggagatgatgataaaacggacgtggctgtgagcttgaacttgtttatgaatctagctcgcccaactgtgcagtttgagactaaggagaaagatacaagtttcaagaagaggaaagaagatgcttcatccattccattcttccccaaatcatgctctgttgataggcttcatatgcagtcaaagatgtttgaattgagccctagttccatagaagagctagatctggagctaaggcttggttataggtccatggtatagtaagtagtaacagatatgaagcaccaatattgtttataaatgtaattttactcttctggttttcctcttgttccttgtttatttctttgataccatgtaaggaagattttcacgtttaatatattggatttgtgataataacaat

SEQ ID NO: 29353 - DNA, 1003 bp, Glycine max
  Clone ID: TF_GmC736359_1
gcacgaggaacctgtgagtcctattattcattctggtgtctccctctttgactctcttagaaaaccaaacacaatacaacacaccaacaaaaaggttagagtacccatcacttcatatcttccacacaaaaaactccctcaagcaatccctatctaacaagatcccaagatagtagactcatgtggctctcaattccttgcttaaatatgggatcacttgcataaccctcttcatccagacatatccaccttttttctctttctctttattgttatttacccgaagggtttttgttttgggtgatattttgtgatttgtgttccaatggaacagggtcaatgctggacaaagaggaagaagtactctttgagctctagtactggttcaccaacaaacccttcctatggtgactcatgggaagaacaagcctttgcagaagatgctgctaattctcttggtggctgcatatggcctccaagatcctactcttgtagcttttgcagaagagagttcaggtcagcacaggctctaggtggccacatgaacgttcatagaagggatagagcaagactaaagcaacaacccactagcccccacaatgaaattctatgccatgaccttgaaactcagcggcacaagccagttcaaagtccttttgcttctctaggtggttatctatatccttctcctctttgtggattggcttgtaaaaaaactaaccctaattgtgatcctgattttgttgcttcaccttcttcatcaccctcgccttccaaggccttattggctccatcagctaatattggtaccttcagagaggaaaccatgattccactttatgattcctctattctccacaagatttctcctgccagtaattcttctgaatcatggccaaattcagctgaagatcatagattatattcatgtaagttccaccctcaagctgatactacgaaaccctccaagggaataatggatttcagatgtaggggtaataag

SEQ ID NO: 29354 - DNA, 1783 bp, Glycine max
  Clone ID: TF_GmC1203_1
ccacgcgtccgcgaacaacataaatttaattgggccccgattggagctttctttccgcttctgactccgtgccctagcttcttcttcctcctcctcctctgccattgcagcaaggcacacacctcaggctccaacccatttcacgagggatcggattcgctcgccatcatggggaagaagaagaagagagtttcctcgaaggtgtggtgttattactgcgatcgcgaattcgacgacgagaagatcttggtgcagcatcagaaagccaagcactttaagtgccatgtctgccacaagaagctctctaccgctggcggcatggccatccacgtcctccaggtccacaaggaatccgtcaccaaggtacccaacgcaaaacctggcagagagagtacggatattgaaatatatggaatgcaagggattccaccagatatcttggctgctcattacggtgaagaagaggatgatgttccgtcaaaggcagccaaggtggatattccaccaactcagcttgtaggtggaatgattccacctcctttgggtacaggatatcctccgcgaccaaccttgcccacaatgccaccaatgtataatcctgctgtacctgtgcctccaaatgcttggatggttccacctcgacctcagccatggttttcacagcctccagctgtttcagttcctcctgctgccccatacacacagcagccattatttcctgtgcagaacgtgaggcctccactgccagctactgctcctgcgctccaaactcagattactcctcctggactgcctacatctgcacctgtcccagtttcacaacctttatttcctgttgttggtaataacgatacaactactctaagttaatcattttctgctctttctcatcattaccgttgaacttctcttacttcagtggtttctgcacatgcgcttgtcgtgacatatttgatcagatattcaactgatgcatatatttttttcggttgatgcaaatctgaggggctacctatcatttacaagtatttatcatctgatcggggttccagttggagtagctagtaactcacattcttatgcttctggtccaaatactggtggtccttcaattgggcctcccccagtaattgcaaacaaagctcctgctcctcagcctgccaccaacgaagtctacttggtttgggatgatgaggcaatgtccatggaggaaagaagaatgtctttgccaaaatatcaggtgcatgatgaaagtagccagatgagctccattgatgcagccatagataagaggatacttgagagcaggctggctggtcgtatggcattttagatcaatctcatccacacattcttgtgaaatttcttcagtgatatgggctcaaaatggcattttaataaggctttgacagcgtgtggtcaagattcctttatttaaggtccagaaagtaacattgttattggtgcaattctttgccaaaatgggcaatgggccctacggtcatagtggaatcgaagaaaaaatattgaaatggttctgatttcttcttaggaagttgcaaaactttgtttatttctcaatttcataccttttctccctttaatgtttgtagtcaacctttaggacatgatacttgaaagagtactatatattatttggtgtaatctagattattacatgttttgggtggaaaattgatggcaattctcggttggtttaaaaaaaaaagaaaagaaaaaaggggaggagaaaaaaaagaaaaaggaaaagaaagagggggga

SEQ ID NO: 29355 - DNA, 1078 bp, Glycine max
  Clone ID: TF_GmC1203_4
tgatctttctttccgcttctgaatccgtgccctagcttcttcctcctccgccattgcagcagggcacacaaccttcgtcacaaacccaattcgcgagggatcggattcgccatcatggggaagaagaagaagagagtttcctcgaaggtgtggtgttattactgcgatcgcgaattcgacgacgagaagatcttggtgcagcatcagaaagccaagcacttcaagtgccatgtctgccacaagaagctctccaccgccggcggcatggccatccacgtcctccaggttcacaaggaatccgtcactaaggtgcccaatgcaaagcctggtagagagagtacggatattgaaatatatggaatgcaagggattccaccagatatcctggctgctcattatggtgaagaagaggatgatgttccatcaaaggcagccaaagtggatattccaccaactcagcttgtaggtggaatgattccacctcctttgggtacaggatatccttcgcgaccagccttgcccacgatgccaccagtttataatccagctgtacctgtgcctccaaatgcttgggtggttccacctcgacctcagccatggttttcacagcctccagttgtttcagttcctcctgctgccccatacacacagcagccattattccctgtgcagaacgtgaggcctccactgccagcaactgctcctgccctccaaactcagattactcctcctggattgcctacatctgcacctgtcccagtttcgcaacctttatttcctgttgttggaaataaccatacaactactcaaagttctgcattttctgctccacccctgccctcaagtgttccatcagttactccagtgatgtctacaaatgttcctgttgatacacatttgagcagcaactcttcagtaacaagtagttatcaggctataggggttccaggtggagcagctagtaactcacattcttatgcttctggtccaatactgggtgggtctttcattgggcctcccccagtaattgcaaacaaagctcctgcttctcagcctgccacaaacgaagtctactttg

SEQ ID NO: 29356 - DNA, 817 bp, Glycine max
  Clone ID: TF_GmC285225_1
aaatcacaatagaggcgtagcttctgtagttttccaatttgattataaattttgtctcagccaatctgttgttgaccacagtttcataacccactttcttcattcttggtgaattttatgtcttattgcaatttccccttcgctttgcaaacaaagatggagttcaattcccaaaaccctaaaaaatctgagataagatggagcccagataatcaaggtggtcctggacaagggaagtcttattcttgttacttttgcaagagagggttctcaaatgcacaggccctgggaggccacatgaatatccatagaaaagatagggcggcaaagctcaagcaatcttctgaggaaaacttgctttcattggatatctcaatcaaggccacaagtgatcatcctaatgacccttctgatttcgaagagaaaattttgtttcggttgggtgctggtgaagagaagcatcctagaaaccataaatatccattcaattttttttcctcgcaaagatgatcatcatgatcatgcaccacaaattccccatcttccttcttttgttttggggcagatggttgaggagaagaaagctgaattagaccttgagcttaggttagggcttcatcctcgggagtcagcaacattgaacactagatcgttcttttgatgagtagcgtttccaagtggaagatcagcgaaaagtggcttttatttcatacctagctcctcttccaccttatctacaatatatataaaggtaatatttgattatgtttaagaatttaattttgatgcagtatgaatattgttttcactcacagta

SEQ ID NO: 29357 - DNA, 482 bp, Glycine max
  unsure (1)..(482): unsure at all n locations
  Clone ID: TF_uC-gmflminsoy034g08b1
atacgcgtccgcgctcactcactcactccttgggttgttcttttctcccttggcttcctcatccatcatcgctatcattagcaaattaacaaagacatggggtttctcttcttcttcttctccttatttttcttctctccaaccactttcaagatgtgatgctgatctggggtgttgctggttttcccttgtgatcgatttctcttgtgttggtggtgatcaagaaagtgtggttaattttgctttctttgctgatccgtgcgtgtgtgtgatcttgaaaaatcaatccaatggaagaagatcaagaagtgaaacacatgtgcaagttctgcagcaagagctttccttgtggaagatccttgggtggccacatgaggtcacatgtcaccgncaatgtttcaaccgaggcagagaagctttcatctttcaacaacaatggttgaggatgagattctgcatcaggagggactaacactggagga

SEQ ID NO: 29358 - DNA, 161 bp, Glycine max
  Clone ID: TF_701129039H1
gcgaggtctgcggtgttcgattcaccaggaacgacaagctgaagatccacatgcggaagcacacgggagagcgcccctactcatgcccgcactgcccagcccgcttcctgcacagctacgaccacaagaaccacatgcacctgcacacaggggtccggccc

SEQ ID NO: 29359 - DNA, 742 bp, Glycine max
  unsure (1)..(742): unsure at all n locations
  Clone ID: TF_LIB4390-021-R1-K1-C11
ccaccctctcatcatgactcatccctactgctccaatgacttcaatgcttggtttgacctcaattctccatgccttttttccacttcttcatcaccttgctccaataacccaccattttactttcctactagtaatactaattaccttcataactgcacaaataatgacatctcttttacgcagcgtattcaatcttctcccagctcctttccccttccaaaagaagaacttcctctccttaacctaagccctgcaagaggtgaagatcttgaatcttccttcagtgccatgaaagtcaacaaagagaaggagaaagaactaagcatgtcagctaataataactctttggatgatgaaactgctgtgacggtggctttgcacttagggcttccaagcactactactactactacttcatcagctgatttaacttcaaacgtgtactctgacaaagaagataaaaaagacacggttgcttctgagtattctcctaccagaattaacaagggtcagtattggatccctacccctgctcaaattctgatcggtcctacacagttctcatgccccctttgtttcaagacgttcaacagatacaacaacatgcagatgcatatgtgggggcacggatctcaatatagaaaggggccagagtctctaaggggaactcaaccaacagcaatgcttaagctcccttgctattgctgcgcaccgngatgcaagaacaccattgatcatcca

SEQ ID NO: 29360 - DNA, 1136 bp, Glycine max
  Clone ID: TF_GmC1688_1
gcgcccacgcgtccgctgcgagagacgacagaaggggactgcatttcccacctcaatattaatatatttctttccccacaagagagatcatggaaaaggatatcattcatctttctccaacatgggatggtgacaatggcaattccactgagaaaaggctcaggctatttggttttgagctaaacccttctaaagatggttatgccaaagaatctggtgaaggagatgaaagtgtgaactcctctaactcagtttcttctggaggagacaaaactgtgcaagagaaaccctctgccaaagactctgatgagagaaagtttgagtgccaatattgttacaaggaatttgcaaactcacaagccctaggaggccaccaaaatgctcacaagaaagagagaatgaagaagaagaggttgcagcttcaatccataaaccgctacctacaacaccctttccaatccaagcatggctttgctcacccttctgatactccttggttctatgacccctctacctataataactctgagttcacccttagtgaagaacctcagattagcttcaattcaaatgttttagatgccaacttttcttgtgaccagaaatctagttggtattctcttgcatctcacccttctaattcccaacaagatacttgcatgtttactttctccaatgcaagtaataatagtcctttcatcttcaagccttgccacttccctgcttcaaatcagagccataaaagtaaagccctagatcttcaactaggcctcaacttgcagtcaaatacaagaagttccttaagaaggatgtaatttaagtatatataggacacataagttaaattaacagtttccttgaattattttaatgcatcaattctcaaacatctggaaaaaggaaatgagaaaaggtaaaaaaaaaataattacaattcattagagttagttggccttggccactgcagagccaagaagagtctgacaatgaccacctttcagaattcagacagcatatagaattcatacgatgtatttattatagcatgttgtagccctttgatatatattacatacacttctttacattctcagtacatacatgcttagagaacaacgttctctttcatttcagtt

SEQ ID NO: 29361 - DNA, 1323 bp, Glycine max
  Clone ID: TF_GmC1730_1
gcggcgcctcccacccgacgtccaaaccggccctcatctcctgcttccacaatcctatcgcacatctttctcagttctacgatggagttttggggcttccagcgtcatatcgcatatctttctcagttctattcctacgatggagttttggggtgccgaggttaaggttggtgagtctgttaaggtagatccagccgaattcgaggcatgcatacacctttctcaggctgctcttggtgaggcaaagaaagacaaaccaaatgaaccggttgttctctacatgaaagttggtcaacagaaatttgtcttgggaaccctttccagggagaaaattcctcaaatatctctggaattggttttggaaaaggagtttgagctttcccacaattcaaagaatgccagtgttcatttctgtggatacaaggcattttatgatgctggcgatgatagcgaggaggatgaatttactgatagcgaagaggatgttccattgcttaaagcagagaatggaaaacctgaaacaaaagctgaagagttgaaggtacctgaatctaaaaaagctgttgccaaggctagtgcatcagcaaaacaagtcaagattgttgaaccgaaaaaagataatgaggaggactctgatgatgattctgatgaagtgatgattttggatcttctgatgaagagatggaggatgctgatagtgacagtgatgatgagagtgatgataaagaagatgatgatgaagaaacccatcctaagaataagaaggcagatctaggaaagaagagacccaatgaatctgcatcaaaaactccagtttcctccaagaaagccaaaaatgctactcctgaaaagactgatggtaagaaaggtggacatacagcaactcctcaccctgcaaagaaaggcggaaagactcccaacagcgaagccaaagccaagactcccaacagtgaagccaaagccaagactcctaagtctggtggactctcttgcaaaacctgcagcaagtctttcaccaatgaaagtggtctgcaacaacataacaaggcaaagcatggtggtcagtgatatttttgctgttggttatgactcattcatgtattatttttggcttatgtaatagagtgagtttcctaaggacgttaggcatctgtccttgtttttcggcccagtaaaccgtggtattgtggtagtgttgaaggtgaatgcatgtttgataagtttttgtttgaaattttaatgggaacttcaattattgtctataattattgcgtttagatttgctgctaaaaaaaaaaaccataaaaactaactctataaggg

SEQ ID NO: 29362 - DNA, 611 bp, Glycine max
  Clone ID: TF_GmC1730_3
cggctcgagctatcagcatcctccatctcttcatcagaagatccaaaatcatcatcatcagaatcatcatcagagtggtgatgaagatgatgatgaagagacccctcccaagaaggtggatctgggaaagaagagacccaatgagtctgcatcaaaaactccagtttcttccaagaaagccaaaaatgctactcctgaaaagactgatggtaagaaaggtggacatacagcaactcctcaccctgcaaagaaaggcggaaagactcccaacagcgaagccaaagccaagactcccaacagtgaagccaaagccaagactcctaagtctggtggactctcttgcaaaacctgcagcaagtctttcaccaatgaaagtggtctgcaacaacataacaaggcaaagcatggtggtcagtgatatttttgctgttggttatgactcattcatgtattatttttggcttatgtaatagagtgagtttcctaaggacgttaggcatctgtccttgtttttcggcccagtaaaccgtggtattgtggtagtgttgaaggtgaatgcatgtttgataagtttttgtttgaaattttaatgggaacttcaattattgtct

SEQ ID NO: 29363 - DNA, 713 bp, Glycine max
  Clone ID: TF_GmC908_2
cattcacaacacaacacaaccaaatccaacatggtagccattctgaagagacaaagagaaaccgaagccgaggagagcatcataagactggcagaaagtctcatgcaactgtcgcgagtccaacaaaaaagcaagcctcttctcaaaaccttttctccaacggagttcgagtgcaaaacctgtaaccgcaagtttccatcttttcaagcccttggtggtcacagggcgagccacaagaagcccaagttcgaaggtgaagaactcaaagaggaggccaagaagggtctgagtttggggaacaaacccaaaatgcacgagtgttccatttgcggcatggaattctctctgggtcaggcactggggggtcacatgagaaaacacaggggtgccaccagtgagaataataacgaagcgttttcttcttctataaagcaagcaatttcaaaagttccagttttgaaacgatcgaatagcaagagggtcatgtgcttggagatggacctgaatttaacgcctttggaaaatgacttgaagttgttgttcggaaacaaggctcctagagtcgatctttctttgtagaggattattaattaattcctgtattctttggattcattactattgtttaaaaaattgtcattgacttctttcagttcttcgtgtagatcgattagttttggaattgatttcgttgtatagttgattgattgatt

SEQ ID NO: 29364 - DNA, 1913 bp, Glycine max
  Clone ID: TF_GmC168_2
ggggtcaatgaaacaacaaagcaagaaagctcgtggcaaagaaaaagctagccccaaaaaaaagccttaaagaaagctgattacataaagcaataccttttctctctctctctttttctatctttctttctttctttcccccgtcagtgcccacgcgtccgttcctcctcatcatcatctttccatacgagtaaagctgaaaaacccgctattccaacctctcaccacttgtactagttttgagaatttgatcgtgtgctaacatatagtcctcaaattaaagcacaaatatttttccacccatgttagacaacaacaattgcagtgcttctaattctggtgcaccatcttcttctgatgccgcctttgcattatctgaaaatggggtggctaacaacaaaaggaaaagaagacccgcaggcacacccgatccagatgctgaggttgtgtctctctcaccaaccaccttgctggaatctgacagatacgtgtgtgagatctgcaaccaagggttccagagggaccagaatcttcaaatgcacaggaggaggcacaaggtgccatggaagctgctaaagagggaaacagcacaaggggggcatcagaagaagagggtgtttgtgtgccctgagccaacttgtttgcaccatgacccttgccatgcccttggggaccttgtgggaatcaagaagcacttcagaaggaagcacagcaatcacaagcagtgggtctgtgacaagtgttccaaagggtatgctgttcaatctgattacaaggctcacatcaaaacctgtggcaccaggggccattcctgtgactgtggccgtgtcttttccagggtggagagtttcatagaacaccaagatgcatgcactgtccggcagcaccggccagagttacaagcacttcaaccagcatgctcttcaagaacagcttcaagcgcaagtccctctagtgaggcaaattttagcatagccccaccattgcaaggacttccagtactgccaaaaccagctgaacaacaacaacaaccagcaacaacaacagtcttattaacttcagagatacacggtaacaagtccactacctcgcataacttagaacttcagctcttaccctcctcaacaaactctcaagcaaaacgaaatacaaaggaaaactatggcttgaaactttcaataggctcatgtagtaacgacaaagggaatagtagtgaaccaccagagagagcatgttcagaagcacataggagcccacctgaaaggaataataataataataataacaatgtgagtgactattccacgttggaagtggcaaggttgcaggagtttgcaggagaggaactcaagttggccattgcagaaaaggcttatgcagaagaggctagaagagaggccaaacgtcaaattgagatagctgaacttgagtttgagaatgccaaaaggataaggaaacaagcacaagctgaactttcaagggctgaagagctgagaaagcaagccatcaagaagataggttccactgttatggaaatagcatgtcatacttgcaagcaacagtttcagtcttcaactgttggggtgccatcatcagaagaaacctccattgtgatgagttacatgtcctcagccaccacagaaggagaagcagaatgaatgacatatactgtgaccagaacacattgtgctaagaaaagaaagaaaagacaagctttattctgcctaagggaaagatatgatatgatgtgatgatgatattgcaggagtttacatgaagttatattgttcttttttcttattcatttttttctttaatgttttcttctctcttagactaggtgaaatttgttttattttaaagaaagttcatattctttattataatatttttatcgagatgcagtgtttatg

SEQ ID NO: 29365 - DNA, 1898 bp, Glycine max
  Clone ID: TF_GmC910_1
ccccaacctcagctttcgactcgttaggagtttcacaacgcagctgcgcacagcacagtcctgaccctcccagaaaaccctaatcagcgtatcgaatagttggaatctccaattcttgtctttatctcttgaccagaaaaaatgtgcgaagccgtagaaattgaagaaaggcccaaatacaaagatatcagacgctattactgcgagtactgcggtatctgcagatccaaaaaaacccttatcacctcccacatcaatttgcaccacaaggaagagtatgaaaaagcaagagctgaaagagatcccgaagcagaggcttcgaaatcgaacacttgcgaggaatgtggtgccactttcaaaaaacacgcctatttgttgcagcacatgcaaagtcattcacttgaggtatttgaactcttgattaattattatttaagaaaaataagttggatacagtcaaactctaaaagcacataagaaaactgtatttaaaagctatgtcttatagaccgttgtgttccttgagaaacatttgatttgcggaagacaggctttgggttgtgacttgattgtgctagttgttttatagactgaagatacatattttgcaggaaagtaatctataagtttctaaaatcattggaaaattatgggttaatagtgtgaagcattggatcccagagaaagatctccaaaatgcgcgaggcagcatatatggacttgatggattagtatcaggtagggtgacctcctgtgaagctccatcaaggatgcctcggtcacgctctgtccaaaattgagaggccatttgtgtgtgctgtcgatgattgtcaggcaagttacagaagaaaggaccacctgactcggcaccttctacagcatgaagggaagatttttaagtgccctgttgagaattgcaacagtgagttctctttgcaaagcaatatgaaaagacatactgaggagattcatgatgacagttctaccactaccagtagtgacaaaagtcacaaacagcatatgtgtccagagattggctgtggaaaggtttttagatatgcatcacagctacaaaaacatgaagattctcatgttaatttggaatcagtagatatggtgtgcttagagcctggttgcttgaaacatttcactaatgtccagtgccttcaagcccatgtgaagtcctcccatcagtatatgacctgtgacatttgcgggacaaagcaactgaagaagaatattaagcgccatcttcgatcacatgaagctgaaggcagttcatcagagacctttcaatgcgagtttaagggttgcagctgcacattctcaagaaaatctaatctagacaagcataagaaggctgtgcactttaatgtaaagccttttgcgtgtgggtttactgattgtggcatgagatttgcttacaaacatgtgcgagataatcatgaaaaaactgctaaacatgtttttacccttggggattttgaagaagctgatgaagagttcaggtcaaggccgaggggaggaaggaagagaacatgtcccactgttgaaatgttaattaggaagagggttaccccacctagtcaattggaacattggttatttatgcaggatagtgagtagagtgcatttagcactctgtgctcctattactagtaggtaaaatgtaaatttaacatgttgacaggagtatataatatggtttggattattgttaacagatatatagaatttaggacaacaacgtgtaataatgattgatgcttatgagttatgacagattccatagtgtagcgaatctattaacctttgtaccaatttgcaatttaaacaactgcttttgtttacaaaaaggtttggaaggtgatatgtaagcactcatcggcatttgcttt

SEQ ID NO: 29366 - DNA, 3251 bp, Glycine max
  Clone ID: TF_uC-gmronoir015a12_FLI
gccgtccgttctccgcccgccactctctccggctctgacctccaccaccaatcccagcagaatgtgccctcctccgtcccctcctcgtcgtttgcttgtgcacagtgtgccaaacactttcccagccaatccgccctcttccaacaccaattgatcgctcacatcggcggcaccgatgcgccccagcagcagcaacagtcgaccgccagcaacgacactcagtcgactgttaacgcattggcaatgttagcagctgcgggaattaacgggggaagtgggacgacgcaacagcaacagcagcaattatttggacagttgctcggctccaaccctttctcacaaggcacaacgccttcgctgatgttcaacaattcgtccgcttttggcggaattaatccgacagagtttgacggtgccgcaatgttggcgaaactgagcgcagagttcgccgcggttgcccaggcacaacacggtcaaagcggcgctatttcagccacaacggtacaatcgacgggagggccgtcgacgcagcaaaacggagcaatgggcaggggacatacgccggcgccgtccaacaaaccgccgcctcagaaacgacaatattcctccaccagcaaaaacttttgcgacttgtgcaacaaagaggtgtgcaacaagtacttcctgaggacgcacatgctgaaaatgcacaacataatcatagacgagaacaaacagctgatagcgaacattgacacggtggacaaagaacggaagggcgaggtgaagttcaggtgtgacatttgccataccagcatgaacacgcgagaggagctgaagttgcacaagagggagtcgcatggaatgcacgcgggtggcggcgggtcgcagtcggccccactcggcggagcccgcggagtgccaaaagcgacgtcgtcgtccgcctcgcaaccgacggcagtgtccatggataccgcagagacaaaccagcaacaacagcagaaaagggtcgctctgccgtcgttcgcgccggcggcttcgaatttcaatgccattgaacaccaaacgcagcagcaacagcaacaatcgacgcagcggagaacgacgagcgaagggacggaggcaaatgatgagaataatcagcccctgggggtacactcgccgcagcagcagcagacgagggaagcggcgggggcccagcagccgtcgctggcgggggccaacccaatgaaacagctgctctctatcatcggaggggacgaggcgctgccgccgtcgctcgtcgggggcgcgcgtctgctcagaacgacgggggaaaggaacgacttcaaaaaggacactgaagaagaacatttgggccacagaatcgccgacgccaataataacgcgacaaactgtcgattttgcggtctttgtctggaggaagaaggccaactgcaactgcaccaactgatggaacaccccaacgagtacatggcggaactgcagccaacgatggacttaccgcactcggcgagtaccgaggacaaactgatcaatcaggtggccctgcaaatggcagaggctaacagtcacaaccaccaccatcatcatcatcaacacacatcagcaccaacggcaatttccgcaactacggaagacttcggtcgcgtcctccggcgcttcgtcctcttcggccgcctctttcggcgaagtcggcacggcccatccgcctcagcaacagaaaacgaagaaaggcactctgtcgcgaggcgaaaatgccgacggagacgacgaaaacggaggaggagggggaaggcaccaatgcccacagtgcaaaagaatttacaaaagtgcgcaaagattggaggggcaccagcgcatggtgcaccacaattttgtcgccaaaatgtcaccggcgaagcgatcgatcatttcgccgaaaaagattgccaaactgatgagttcgttttcatgtcacaaatgcaggcgacggttcgcaagtcgcggagaatgcgacgaacacgtcctttcgcacatccgctcggggagattgaagcaagaggaagcggaagacgaacaaccgcaggaagaggaggaggaaggaggggagagagcaccgcaagtgaagaggccgaagatggaggaggagggcgaagaggacgaagtggcggaacaacaccatcgggaagacggagtcagagaagtgggggaaaagacgaacatcgccggaggagtggaggaagaagtaagacagcagcgtgcacagagacgaacaaagggcggcacggggggaggcgaaaagcacagccatacgagcggttcgactagccccgtgtcggttcaggccggaagttctggcggtgtactgcccgagggctttgcccaccctttgttggaccacacgaagcctttcgtcctccaatccttcactctgcggcccgtttctcctcattcgaactgtcaacttcccgatgaactcgtcgcttatttgcctgtccgttccacgcttggccaacccatccgagtgaccttcgagctcaatccgactcctcacgtggaccagcaggtgcaacacctttgatgcagccgaggaaccgaccgccatttgcctctcaattcttcgtttccattggcatcgtcgggcagtgccataaaaatacggatgccgttgtgtttgatagtccttaaattggccgtctgttttatcagtctcctttcccccatttattatggtaattgttgttgttgttttgctctgttgggacttcgttccgttcatttttgccccttttattcatttgttcattcttttgactctcttctgatgagtttcattctctcgctttcttcgacagttctttcatgctctgatttgtttcaattccaccttttttatcctttggtttcctttgcctcttaaaattattttttattattatacataaatattattatatttttctccatatccttccatcgattcctccccctccccctaatattgcacattcgtcgcgcaatctcaaggtggtcaccgaccgtctttttgacggttctttgccgcccttcccctcggatttctttcattaaatttcgtcaatttgccatttccctcccccaattttctccatgcgtattatttccatttttttcgttgttcgttctcatttaatcaatttgtgaggccgatttacccgcacttttcattcacaatttaaagttgaaagaatatttttgttcattctctgttcaaaatttaattcaaatgttgcattaaggacaataaactg

SEQ ID NO: 29367 - DNA, 984 bp, Glycine max
  unsure (1)..(984): unsure at all n locations
  Clone ID: TF_GmC21_2
cccacgcgtcccaacccaacccaaaactcaagctaaattctcactctcacaacttcaatctctttctctctctctctctctctctctctctaccaaaaaaatggctttggaaactctcaactcaccaacaacaaccgccccatctttccccttcgacgacccaactattccatgggccaaaagaaaacgttcaaagcgttgttcacgcgaccacccttcggaggaagagtacctcgctctctgcctcatcatgctcgctcgcggcggcaccacccgccgcgtcagcactccaccgccgcaaccgactccagatccttccaccaagctcagttacaaatgctccgtttgcaacaaaagcttcccctcttaccaagcgctcggtggacacaaggccagtcaccggaaactcgctgcctccggcggcgaagaccaacccaccaccacctcctccgccgccagctccgccaacaccgcctccggaggtaggacccacgagtgctccatctgccacaagtccttccccaccggacaggccctcggcggacacaaacgttgtcactacgaaggtaacagtaatggaaataacaacaacagtaacagctctgtcaccgccgcctcggaaggcgtggggtccacccacaccgtgagtcacggccaccaccgagacttcgatctcaacatcccggcttttccggatttttcgaccaaggtcggagaagacgaggttgagagccctcaccctgtcatgaagaagcctcgccccttcgtcattcccaagatcgaaatccctcaatatcaatgaactctatgaattttttatttttatttttttcgattattttggagaattttgagatttactataatttgattttgtacatagtcctacctggaagttttgttgaaccgtacgtaccggacccagttctctgatttaggttgtactttcacagtgncagatttgcaattcaattcaatttcttt

SEQ ID NO: 29368 - DNA, 1225 bp, Glycine max
  unsure (1)..(1225): unsure at all n locations
  Clone ID: TF_GmC2530_9
cggacgcgtgtgcggacgcgtgggttcctatctctcttctctgcttcaaaagtttcttttttttttcttgaaaaaattttccctttagattttcttctctagttctctgtagggtccaagagaattgaaattcccttgcctttgagttttgagattggggataagaattgaaggactcaaactgcatgtgggttttccagaattctaatttaggtgtaaggtttcaaatccaagaaggaaaagaaacactttgagaagaaggtcaattagagggtttttttataagatatggcagcacctttttctgcagcatctctttttgcaatcagagaagaggatcagaatcagatgaagcagcagcagcattcctcaacaccatcatcatcaaccactccagctgcaccaccccagaagaaaagaagaaaccaaccaggaacaccatatccagatgcggaggtgatagcactatctcccaagaccctaatggcaacaaacaggtttttatgtgaagtgtgcaataaagggttccaaagagagcaaaacctacagctgcacagaagaggacacaacttgccttggaagctaaagcaanagaccaacaaagagccaaagagaaaggtttatctgtgtcccgagcccacatgtgttcaccatgaccctttcagagctttgggagacctcactgggattaagaaacactactatcgcaaacacggtgaaaagaaggggaagtgtgaaaagtgctcaaagaaatatgctgttcaatctgattggaaagcacattcaaagacttgtggcactagagaatacagatgtgactgtggcactctcttctctaggcgtgacagtttcatcactcatagggcgttttgtgatgcgctagcacaagagagtgcaagattccccggtggcttaaaccctttggggactcatttgtttggcacaaaccacactactagtttaagcctatcccaagtgggtaaccaactttcccaagttcaaaagcagaaccaaaccgccactaattataacagcattttgcgccttggcaacaataatgttggtgcagcagcaacaaagtttgagcacttgattccacctctaaaccattcttcatttggacactcaccacaatcaatgccttcctcagctttcttcatgaatgacaacacaaatcaagcattatttgaagaacaccaatcacaactacaaggcctaatgcaac

SEQ ID NO: 29369 - DNA, 816 bp, Glycine max
  Clone ID: TF_GmC149295_1
ggctcgagcacaactatttctcaaatattcattttgtcaccaatcacatctcatttttctaaattcttgtttacacactctcattaatttattacattccatattgtaattaattcttcgtacgtatccatgaagagacagagagatttcaaggggtttgagagcatagatttggcaaattgtctaatgatgctctctcatccccaacaaaatgagaaactacttcaaaaaaaaattgaggctgtggaatttgagtgcaagacatgcaaccgcaaattctcttcctttcaagcattgggtggccatagggctagccacaaaaggtcgaaacttgagggagatcatgaactcaaagcacatgctatatctctaagtttggcaaacaaacccaaaatgcacgagtgttccatttgtggacaagaattctcattgggacaagcacttgggggtcacatgagaaggcacagaacaaccatccacgaagatttttcttcaataaaacaggttattacacaaatgcctgttttgaaaagatcgaatagcacgagggtggttacgtgcttggacttgaacctaacaccgcttgagaacgacttgaagttgttgtttggaaagatggcaccgaatgctggtgcctttgcctgattctttattgttatcagttttgtgatcaacgctgatttgtatttagttttttttttttctttttcggggtgagaatttgtatttagttagtagtcctgtttttgaagtcttgtagtgtattctttaattttttttaacgtgagaattggtttttattttcttcacaatcaa

SEQ ID NO: 29370 - DNA, 777 bp, Glycine max
  Clone ID: TF_GmC475_1
ggagaagacgaaactagcgagggcacttctccaatctcaacaactttcgtgtagtgcactgttttgctatagtaacccattaattaaaccgacctacgtagtagccatgaagagaggcagagaagagagtaagttagacatggctaattgcttgatgctattgacgaaagttggagagagtgaaaccaattacccaatatcaaagggtagtgatattggtgatttcaagtgcaagacttgcaatagaaggttctcttcttttcaagcccttggtggccatagagcaagccacaaaaaaccaaagctcatggtcacagatctttcgtgccatcaagagttaccgaacccaaccatgaaacaacaacctaggatgcacccgtgtccgatttgtgggcttgagtttgctattggacaagctttgggagggcacatgagaaagcatagaactgctattaatgatggcttgttgtgtggtaaaccttcttcttcgttgtccatcttgaaggaatcatcgaaagatggtgatcaaaagttgaatttgcgcttggacttgaacttgacgccattggaggaggatgatcttaagctcaacctaaggacgcccgtgctcaattgtttcatttgattggaaattaattttgtactaaaccagattctttttttcttattaatatagttaatgtgtatttttcgtaatttattattatacgtacgacctataggtagctcattttgtagtcatattgtgttcataatacgaaacttcttagttcttat

SEQ ID NO: 29371 - DNA, 2663 bp, Glycine max
  Clone ID: TF_GmC4501_1
ccacgcgtccgccaagaagaggctgaggcaaaaatggtggcagaagatttgggtattgattacatgtggaagaatattgaatacagtcatgcttccaaggaggatgaggagaagatccagtcagctctggatagtgaggaagctattcctgggaatggtgactgggctgtaaagctaggaatcaatctcttttatagcgcaaatcttagccgttctcctctttatagtaagcagatgccttacaattctgttatatactctgcatttggttgtagctctccagcaagctcacctgtagagccaaaggtataccaaagaagggtcaacaggcagaaaaagattgttgctgggaaatggtgtggtaaagtttggatgtccaatcaggtccatccccttttagcaaaaagagattttgaagatgttgaggatgagaaactcttaattgggtggatattacctgatgagaaattggaaagatcagaaattaccctcaaaagtgaagctactagcagaaaatcaggtaagaaaaggaaaatgacagcagagaatggacggttcaagaaaggaagttatgctaacgaaaaatgtactttcagataattccactgaagataaacacaacttgccaccaaggagcattcttagaaataagaaagtcaggtatgttgagagagaccgtgctgctttgaaagggggttattgtcctccatatcatcgaaaaccttcaaacaaccaaacaaacttctctgaaagtgatgcagtttctgatgattcgcttgatgatgatgatcacatgcagcaaaggaggaatgttattattgaaaaggctaaatttatggacaatgatgtggtttcaaatgatcgatggactatgattctgattggcagcagagggaagaacttagcagcaagcaagttgaagatacggagagagatgcaatttcagaagattctttggatgttggttctcttcagttgcttaggaagaattccagagccaagcatgccaaaaacataagtcaagaagatataatttctgatgaccaaatggagagtcctttgcaaaagcggcaaaggagaattcctaaaagcaggcagggcaaataccttactggaaaagatataatatctgatgaccaactagagcataaaaagaagaagcagcaacggaagaatcctaaaagcaggcaagccaaatacctcaatgaagaggatattgcatcagatgaccaattggagggccattatcgtagatatcagagaaagaattctagaggaagacatgccaaatgtgtagcaggggaagatggcatgcctgatgaccaattggaggatcattgtcagaagcagcaaacaaatttctctaggaaaaggcaaaacaaaggcattgttagagaggttaaaaacgaaatgtgtgatgaccaattggaggaccattttctgaagcagcatagaagatttcctaagagcaggcaaaataaacacactgagaaagaagtcatggatgacttagctgagaataattctcatctgctgcatagaactcctaaaaggaagcaagctaaatgcatggaagaagatgatatgaattcagatgatgaaatggaagatgatcagccgctgaggagagcacttcgaagtaaacaagctaaaccaaagacacttctgaaacaagctaattccttccaagcgaaaaagcaggcatctcggcccataaaacagggctctcggttgcttgtgaaatcaaaggctcctcagcaaataaaacagcctgctcatttgcggaataagcaatctaataacacccaggaatttagtttatatatggaagaggaggaagatggtggacctagcacacgccttaggaagagagccacaaaagctcaggaatctgagggaaaattgaaagacaagcaaacaaaaaggatgaaggtgaagaatgctgcagctgcaaaggtttcggttggccatgccaaaatgaaggatggggaagcagaatatcagtgtgatattgatgggtgcactatgagttttgggtcaaaacaggagctgatgcatcataagagaaacatctgccctgtaaaagggtgtgggaagaagtttttttcacacaagtatctggtgcagcatcgtcgagttcatgaggatgagcgcccgttgaagtgcccttggaagggatgcaagatgactttcaagtgggcatgggctcgtacagagcacattcgagtccacactggtgcacgaccttatgtatgtgctgagccagattgtggacaaacattcagatttgtttctgatttcagtcgtcataagcgaaagactggtcattcagcaaagaagaattgtcaatagcaagtggaatagatgtttaattgttatttaacatgacattttatgtatttatgaatccattgctcaattgacccggctaggactagggtttagtaacagtttaggatgtccctgcaattaccatttgtagttaactgttaattctgtttgcctttcgggtcttcaacccatttgtttattacaattaaagcaattgcttggatctagaaacacgattctaatccagttcatacctgattctcatcgagttcatatcgcttgcaattgttgttccaacctttatgtctcttgaatcgtgattattttattgc

SEQ ID NO: 29372 - DNA, 1409 bp, Glycine max
  Clone ID: TF_GmC724_3
tggctgtggaaagacattcatagatgctggtgcgttgaggaaacattcccacatccatcgtagtgacaaacatattgcctctctccatggatgtgagaatggcaatatgtttgtcactacgatggatgtggaaagaaatttctggatagctcaaagttgaaaagacattttctcattcatacaggggagagggattttgtgtgtcctcatgaaggctgtggtaaggccttctccctggatttcaacttaaggtctcacatgaaaacacattctcaagagaactatcatatctgcccatatccagattgtggaaagagatatgctcatgaatacaagctaaagaatcacattgcatctcatcatgaaaaggttgggtagtgtttcctatttgtgtagctggtacactttccttatttttttaccactcagtctattaattaatgatgcatgttatcatgtaaagcatctctgttcttttaatccatccatttggtgtttctgcaatagtttcatttggtttgttagtatatctcagtacaaatatgtattatttttctcatgtatattgtgaatttctttataaagatgtctctaattcgaaactgatgaattactccagtggatgtgattcacaaatttttgaaactgttaacatttcttgaataaccgtttgatttggaatttcaaccttatctagcagaatgcacccttggatgtggcaaagtacactactccacctccagagaagcaaacaaaaacttctaaaccatctggaggggcatacggttctgcatcatctgaccgtccctatgcatgtccctatgatgggtgtgaaaaggcatacatccatgaatacaagcttagactccatttgaagagggagcacccggggcttatggctgatgaaaatgcagagcatgctcaggctaatgttggcaatgaaatggatgaagcaagtgaccatgatgcctatgttgcgaaacggtcaaatggtaaaattcagaagcagagtaagccaaaaccaaacctcaagttgcctccttccaaaattgcaaaacgcaaagtctccactcccactttaactgtaaataaaaattcttggcccgtgaaagatgaacctttcgatgaagaagatagtgaagaaacagaagaggatcgtgacaatgttgaagatggttggagatatgcaggaggaaacaatgaagatgatgatgaagaaacagaatatgaagactgaatcagttatggcatcctctatggaacttacctttttcaagaagtatatttctcttctacaattgttttttgggttgtcgcttttttatttggctttggaaatgacatcttgtcaaactgtgtgttggctgttacaagcattaggaagaatttatataaataaaatgcgattt

SEQ ID NO: 29373 - DNA, 1664 bp, Glycine max
  Clone ID: TF_GmC431_1
gcccttttctgaggaggagagaatttcaccaaatcaaggggaaactctctgaagaatatgggtttaatggagtgcaatgtggaggacaataagaatctataccttcatgctcctactttcattgagtggcttaaaccatgttcttctcctaattattcatatctaaattccaacacaatatcatactcatcttcttcttctccttcttcatcttctttttctcttactcagaatgagtttgttcaggaaactatccaattcttgccaattttaagtgagaaggcctcaaaagatgaagatcaaagttttgaggtgaaagaggaaaaggttgaacaagtaactgtggctttgcacattggattgcctgacagtaataaagggcatgctgatgaggttgatgagaagatgattttccatgttaaggaagaagaagagtcatcaaagagaagcttccatggttgctcctttaacaaccaagagagaaggttttggattccaactcctgcacagatccttgttggacctatgcagtttgcttgctccatttgtagcaagaccttcaataggtataacaacatgcagatgcatatgtgggggcatggatcagaatttaggaaaggaccagactcactcaaaggaacacaaccagctgcaatgttaaggttaccatgctattgctgtgctcaaggatgcaagaacaacatcaatcatccaagggccaagccattgaaggacttcagaaccctccaaacccattacaaaagaaaacatgggacaaagccattcatgtgcagaaaatgtgggaaaacatttgcagtcaaaggggattggaggactcatgagaagaactgtggcaagttgtggtattgcacttgtggctcagacttcaagcacaagagatccctaaaggatcatattaggtcttttggaaagggacataaccctcatcctccctttgaagcttttgaggatgagaaggaatgcattactggctctgatgaagatgaagttaatgctcatcatacatgatctaacaacattctatagcttatttcctttattatgaagatatggtagtagcaaggttttaaattgcgatcgcagttacaatttcgtcgtgatttttggtgttaccggaaattacagacaaatgcggttgatgcaattaataccttgagtagaagtggtaattaatgtactagagggtttggtcactacgcttgtgctcagtaacaaaaaattctcaacaactgctgaggcatgaagactcagggaaaggtttgctaccgagcacttgcagggtggtgataaacttagttatatcaatagaggtttggagtagtttgcttttggtttaattaataagatggttgcctcaagtgatgaagcagatgaattttcttctcatagcaacagagattagtgttatgtcaagtttagtttttttgtaacctcttcaatatggaggaaatttatccgcttcattactaaatggtaaccctcactcattctaggactttattgtatgtaaggtcttgttaaaatatctttgtgacgctttgatgtgaattaatttgctgctataaatggatagccaatgtgtgtgtttttttcaagattaaaaaaaaaaaaatcttttactatatattgaatccaagctgacg

SEQ ID NO: 29374 - DNA, 643 bp, Glycine max
  Clone ID: TF_GmC222431_1
agttcacaaattaactgagatttaattaagaataagataataattcacatgcagacattatatatataattaaaataaaaccagttcagttccattttcgatccttcagtcattatcttgttctacttcagatgcaggctcttcttcttcttcaaatccatcaatcccgtaagctgcatggccacttccaaaggctttgatgtgatccttaagggacctcttgtgcttgaaatcagatccacagatgcaataccaaagcttgccacagttcttctcatgtgttctccaatcacccctcacagcaaaggccttgccacattttctgcacatgaagggcttaatcccatgcttcctcttgtagtgtgtttggagggttctgaagtctttgaggggctttgctcttgggtgatcaatgttgttcctgcaacctggggaacagcaatagcatggaagccttagcatacctgttggttgggtacccctcagagattcaggcccttttctgtactgtgatccatgcccccacatatgcatctgcatgttgttggatctgttgaaaggtttgcaacaaacgggacaagggaactgagttgggaccatgaggatcttgagaaggggtagggaacccaggactggccctttg

SEQ ID NO: 29375 - DNA, 745 bp, Glycine max
  Clone ID: TF_GmC908_1
ccacgcgtctcattcacaacacaaacacattcaacaacatggtagcaattctcaagagacagggagaaaacgaatccgaagaaaccatcataggcttggcaaaaagtctcatgcaactctcgcgtgtccaacaacaaagcaataagcctcttctcaaaaccttttctccaacggagttcgagtgcaaaacctgtaaccgcaagttttcatcttttcaagctcttggtggccacagggctagccacaagaagcccaagttcgaagctgaagaactcaaagaagaagccaagaagactaaacccaaaatgcacgagtgttcaatttgtggcatggaattctctctgggccaggcactggggggtcacatgagaaaacacagaggtgccattagtgagaacgacaataataatgaagcgttgtcttctataaagcaagcaattgcaaaagctccggttttgaaacgatcgaatagcaagagggtcatgtgcttggagatggacctgaatttgacgcctttggagaatgacttgaagttgttgttcggaaacaaggctcctagagtcgatctttctttgtagaggattaattaattattcctgtatctttcgattcattatattgtttaaaaaattagtcattgacttctttcagttcttcgtgtagatcgattaattttggaattgatttcgttgtatagttgattgattgattaaataggaatattgatggttgatcggagtttcgt

SEQ ID NO: 29376 - DNA, 1807 bp, Glycine max
  Clone ID: TF_GmC47148_1
gaccgagacattagaatatcgtatctttgcttttccttctctttctcttttttcctccaacttggagtttttctctcttcaaaggcaatgttccctgcagttatgtccaattccaattcctggtccgaagaggccactgtctcctgtggtacaagaatcactggactcaatcacgttgtcacaacaaccatttctccacaacaacctcaaaagatcaagaaaaagagaaacctccctggaaaccctgacccagatgctgaagtgattgctttgtcaccgaagactcttctagctaccaatagatttgtgtgtgagatctgcaacaagggtttccagagagatcagaaccttcagcttcataggagagggcataacctcccatggaagctgaagcaaaggagcaacaaagacgtgaaaaagaaggcatatgtttgccctgagccttcatgcgttcaccacaacccttcaagggctttgggggacctcacaggaattaagaaacactattgcagaaaacatggagagaagaagtggaaatgtgaaaagtgctcaaagatctatgctgttcagtcagattggaaagctcactccaaaacctgtggtactagagaatatagatgtgattgtggaacacttttttccaggaaggacagtttcataactcacagagcattctgtgatgcattggctgaagaaagtgcaagactatcagcaaataatttagccgctgcagccggcgccaccgtcaccaccacaacaacaaacccattccaatctctatatcttttccaaacccaacaacagaacttccaaaaccaccaaatgaccagtttcaaccaatgggactcatctcaagaaaaccctaaccctagcaacaacattgccaccacttccctccacatcgagccagagtctcaaagcttccacaaccccaccctctcttcatttctccaacagcaacaacaagggcaacagcccaacaacaacaacaggggcatgatagcctcaccatttgggaacctccacgtggcagcagcagcacctgccacgtcatcatacatgtcagccactgcgctgctttcagaaggctgcaaccgttggagccgctgccataacaggcccagtacctgttgggccacaacagcgcgtgaggggtcacgtggctcaccacctcggcgcaggcgagttcggaatcggtacagtgagtcaactcgacccggtggtgttggtgccagataacaacaactacacgagaacaatgttcaagagtagtgaccgtctcacaagggactttctgggtctcacggcagatgctaacggcggcgcggttgacgttagcaccaacgtcaaggatatgctagcgttcactggggccgtagagtaccaccaagtccaaccgcaccgtcaacatcatcaccaccacgcgcttctgaagccccaacaaggcttcggtttccttgggacaaccactgcccccgagacgtggtggaattgttagacacagacaggagaataattccaagtcacgagggtaaaataggcaacacaactttgccattacactgacccttgactcttgaatcgtcaatcatcaaatctgttttggttttaacacctcgttatagatttttttttttcaatccactttagacttcacatcttagttttgattgttgttctctcaatttaaatcaagtacaatgctttagttcagtttttttttatttgactgaatattaatatatttggtgctttgttgtcaaaaaaaaaagaaagcccctctctctatatatgatctgttatcatt

SEQ ID NO: 29377 - DNA, 1263 bp, Glycine max
  Clone ID: TF_GmC444_5
aatcatcaaagtttgaaatggtcttttattttcgtaaaagaaaaattcaaaaaattagaatcgtggaccaccaacagtaaaaacggttacacgccgaaacagaaaagaaacacgcgcaagtggcctcaactgaactaaaacaaacttgccgcaccgttcacgcggttctgctggttcatgatgtctattccattccggggcatattctagatcaatcacactactacgctatgatgataaagcaaactgagagaaatcaattacattcttacaaatataaataaatgaattgaattgaattgaattgccactgtcaaaagtacaatgactacaatctaaaagctaaaactagcgaataaggtccaagtactatatatgtacaagaacaaattaatctcaaataactttaaaaaagaaagaagaaaaaaacactgaatattttttggatctatggatcatcagtattgagggatttcaatcttgggtatggtcaaattgagacgggatttcttggatggatgaggactggtaacctcgtcatcaacgaagaaccttgttgaaaagtccggaaaagccgggaggttcagatcgaaatcgcggtggcttcctgtgtgagtggaccccactccctcagaggcggttacggcgctgttaccgccttcgtagtgacaacgtttgtgtcctcccaaggcctgtcctgttgggaacgtcttttggcagatggagcactcgtgggtcctagcaccgccgttcgacgccgaactcgttgtcacggcggaggaggtcgagtggtgctcgccgccgagcttccggtggctggccttgtgtccaccgagtgcttggtaagaggagaaggctttgttgcagaccgaacatttgtagctcagtttggcggcgggtagcggcgcggaattgttgtcggagacagcaggcttggcggcggggacaccgccggcgccgccgtgagcgagcatgatgagacagagagcgaggtactcttcctcggtgcatgaagagtgttgcagttgctgctccatgcggctacgcttagaacgctttcctttggtccacggtgtctccaagtaactgaggttggtttcttcaaagggactaaacgatggagtggcagttctgggtgattgaagagcttccagagccatttgaagtgtctgcgcttgtgaatctgtaatagggtgtgataggaaataagagaagtgcttgttgtggttgcttttggtgaacttgagtttgagcctggggtgt

SEQ ID NO: 29378 - DNA, 908 bp, Glycine max
  Clone ID: TF_GmC719_1
tgccgcatccgtagctctgcttccccattagagaacattttaccaattgagcactttcaaacaacgttgttgttttttgtacacaaccatcagagataaggagagtgaggtgggcatggctagttgtttaatgttactaaccaaagttagtgataccgaaaccccatcaagaaagagggttctaagtggtggtgattttaagtgcaagacttgtaacaggaaattccaatcgtttcaagcacttggggggcaccgagccagccacaagaagctaaagctcatggcttcaaacctttcgtgttcgaccgtgacacaaaagatgcaccagtgccccatttgtggaattgaatttgcgattggacaagcactgggagggcacatgagaaaacatagagcttccttaaacgatggtttgataactcatgatcatgttgtgccaacatctagtggtactaaaaggcttcgtttgtgcttggacttgaacttggcaccgtacgagaatgatctcaacctcaatttaaggacacctactttaaatttgttcgtttgatcgatttgagtgtttttagggcgaattcttgttggaaattgttttatttttattttttgtttcttactttgccgtgctttttagtttatgacgtacgcgtgattctatagggttctatgtatattcatggtgctaacttgaaagtacagggaaaattttgctgactaccgttaagcaaagcatattaagcatactatcatggctcttttcaggaacatgttttgaaaagtcactttcaatatgaaggattcagttactgttagttgagggtagtaattattggttggatctgttatgatagataccattaactgtgagattaaaaacaaaatagaattgcccacacttatctttgtct

SEQ ID NO: 29379 - DNA, 1938 bp, Glycine max
  Clone ID: TF_GmC2175_1
ccacgcgtccgtgaaaaccctggtcttctttctcatgcctcttttattgtggtttttttttctttcttttctctctctctctctctgtgaaatggagccgtttgcttagagctgcttcttctgatctttgaatcttgatctagatatctagatacagaattggaaatggattcaaatgggagcctacgtgctaacacctgggcaaggtcgtcgtccttgacctctcctgcaagtggtttatcctcagatcctctttctttcccaggttttggtttgcagcataatcaacaaaaatgggatgttccctcaaattcagattttgggatcagggctgaagcacctttcaaagaattcaatcagccctctcaaacccagtctccgcttccttgcaactcaaacaatgagattgaaatccctggtcaagaaaactgtcatctgagtgaatcatcacaaaccaatacactccaagattgggaccccagtgtgatgttgaataacctatctttcttggaagaaaagattcatcagctccaggatctagtgcatttgattgctcgtcaaaaaggcattggacaacctaatgaacttgtaactcaggaacagcagctcgttacaactgatctcacatcaatcattattcaattgatctctaccgcaggtagtctcctcccttctgctaggcataaccttgtaaacactagttcattggttggacagattgaccagcttcgtgggacgaccattcctcctgggaccggtgcaagtaacggctgtattcaaccacagaataatggtggaaaaatattgtctgatcagtccatgcagactgatctacctaatagtggtgaaatggagcaaaagtacaatatggtagaacatgacttgaaagatgaagaagatgtagaggatggagaaaaccttgcccctggttcatatgagattctacaattagaaaaagaagaaatccttgctcctcatacccatttctgtacaatttgtgggaaggggttcaagagagatgcaaatcttcgaatgcacatgcgaggccatggtgacgagtacaaaaccccagcagcgcttgccaaaccgcacaaagaatctgcatcaccaaagcctatcaagaggtattcctgcccctatcctggctgcaagcgcaacaaggatcacaagaagttccagcctctgaagacgatcttatgtgtcaaaaaccattacaaaaggacgcattgtgacaagagttacacttgcagtaggtgcaacaccaagaagttctcagtcatggctgatctaaaaactcatgaaaaacactgtggtaaggataaatggctctgttcgtgtggcacaacattttctaggaaagacaagctttttgggcacattgctcttttccaagggcatgcaccagccattcctttggatgacactaaaggggcaggggtagctgaggcacccattcatgatagcaaagagaacaacagtaaggtgcagagcatgaacttcacttttggatcaaatccttcaaatgcaaatgaagttccaaatgccatggatgcaaaaggcgatagcgatgatcctatcaattatttctcatcattgaactttgaagccaactttggtgagtttaatgaattcaccagacctctatttgatgacccagaaggttcgttctcttttgtcatgcctggatctttcaaatctggaggagaatctagttctgacaatcttttataacaatggtactaccattggttctgtaataacttaatatctatgtttctcttaattgtgaagatataactttcgggtttgtgttaaatttgtaaagccggtttaatttcatgaccatgcaaatccttaagaaggatgttagattttcttgatgattttataaattataaattgcgcgtctcggttattcagctaaaaaattccaaattc

SEQ ID NO: 29380 - DNA, 1865 bp, Glycine max
  Clone ID: TF_GmC558_1
gttaagcttcttcgtataagcattcacttaccttcccatcccatgttctctttctcatcgcaattttttttcttttttcttttaattttcctctcaagtggagcattcaggttgttagagcgtccattgagctttcaatctgtggctggattttgatctctctgagtttaaaatggatccaaaaggaagcttatgtgctacaaggtcctcttccttaacctctcctgggaatggactacaaacaaatttgtcgtcagatcctccctctttctatggggtcaggattgaatcacctttcgaagaattcatccaaccctctcctccaacccaatctgtacttccaggtgaatctaacacagatattgatatccctgaccaggaaaattgtccactgagtgactcatcacataccagtaaactccaagattggaatccaagtgcgatgttgaataacctttccttccttgaagtaaagattcatcagcttcgggatctagtgcatgtaattgttagtaaaaagtgccaaccttttggacaacctcatgaactagtgactcaggaacaacagctcatcacagccgatcttacatcaattattgttcaattgatctctactgctggtagtcttctcccctctgttaggcacaccctcacaaacgcaaatcccttggttggccagcttgaccagcttcatgggattaacctcccttttgaatcagaaccaagtagtggtattaggccacaaaataacagtggaaataaactgtttgatcagtccattcagaatgatctaccaaataaattggaaatggagcaaaactacaatatggaagagcatgagccaaaagatgaagaagatgtggatgagggagagaatcttccacccggttcctacgagattttgcaattagaaaaagaagaaatcctcgcccctcacacacatttctgtacaatatgtgggaaaggattcaagagggatgcaaatctccgaatgcacatgcgcggccatggtgacaagtacaaaactcctgcagctcttgcaaaaccacacaaagaatccgggtctgaaccaaagctcatatcaagaggtattcctgcccctatgccggctgagcgtaacaaggatcacaagaaattccaaccactaaagaccattttgtgtgtcaaaaaccactacaagagaacacactgtgacaagagctacacttgcagcagatgcaacaccaagaagttttcagtcatggcagaccttaaaactcatgaaaaacactgcggtaaggataaatggctttgttcatgtggcacaacattttcaaggaaagacaagctttttggacacattgctctattccaaggccatacaccagctattcctttggatgaaaccaaaggaatggctgagccacctgatatccagaacagagaaagcaacaataaggtagaaagtattaacttctgttttggatcaaattcttcaagtgaaaatgtagttcaaaacatgatggatatgaaaggtaataatgatgatcccatgaattatttctcatcattgaacttcgaaggctgtaactttggggcgtttaatgaattctcccaacctccatttgaagattcagatggttgtttctcttttcccatgtcaggatcctttaattatgctcccaaatttggtggcggtgaatcaagttctgacaatctgtagtgacaatttataataatgttactctacatcatgtctatgttttctttattcccctgttaacgaataatccttttgttttgtctaatttgtaaatccaggtaatatcttgtactccccccatttctttatattgaaaaaaataagttttatgtttatatttttt

SEQ ID NO: 29381 - DNA, 1380 bp, Glycine max
  Clone ID: TF_GmC135_3
atttagacccggaagctgaagttgtcgccttgtctccaaagactctcttggcaactaataggttcatttgtgagatctgcaacaaaggatttcaaagagaccagaatctccaacttcacagaagaggacacaatttaccatggaagctgaagcagagatcaagcaaagacattataaggaagaaggtgtatgtgtgcccagaacctagttgcgtgcaccacgagccttcaagggccctgggggacctcactggcatcaagaagcacttctgcagaaaacacggcgagaagaagtggaaatgtgacaagtgctccaagaagtatgctgttcaatcagactggaaagctcactccaagacctgtggcactagagagtacagatgtgactgtggaaccctcttctcaaggagggacagtttcataacacacagagccttctgcgatgcattagcagaggagagtgcaagatcagtgacaggcatagtagccaactcaacaactcaaccaactgaagcagcaggagtagtgatctcttcatcctctcttcatcaagacatgatccatgctagtaataataatttcccattgaagaaagagcaacaaggttgcataccccattggcttgggcaaccatcaccctcttctgcttcatcatcattcttgttctctcatcaagatcatcatctccatgaaaaccctaaccctagaggtggtcccactcttcttcctcctccttaccaccaaacagctcctcacatgtcagccacagcattgctgcagaaagcagcccaaatgggtgcaacgatgagcaaaaccggctccatgattaggacccaccaacagcaggctcacgtgtctgccaatgctgctttgaatttgtcctcacgtgaccaccagatgaaccccactccccatgacttgctacctttcgggaataataaagctgttgataacggtgttggtgtttctccttcactccttcatcatgttatcaattctttctcttcttccccctttgaagggacttttgaggacacttttggtggtggcgatgccatgaccgccgatgaaggtggcggtggcggtgccggaggaaacaataacgaaggcttgacaagagatttcttgggtcttagacatctctctcacactgatatcctcaacattgctggcgtgggaaactgcatgaactcctcccaacacaaccaaacccgaaacccttggcaaggttaactccatatgtcttatacatatttggattctttttctttaatatattaatatacatttattttagcttatttttaaattttgcttttgtttatgatatatattgtcaatcttcccgaacctttcggaatcccaatattttctttcctta

SEQ ID NO: 29382 - DNA, 1159 bp, Glycine max
  Clone ID: TF_GmC2530_8
ttcgcatttgcggcatcgctgtgtcctttttatatcttcactagatctactacactcccaactccacacttcttcttcttcttcttcttctgtccggattgcttctgtctcctaagatactttcctcttggtacctttaatgtttcaaaatctgagtttttttttctttttgttttctgacagacaagaaagcagggaaaaaatcaaacaaactttcagcaattagttccagattcgcagaacaattatgacggcagcttcctcatccactccatttttgggaatcagagaagaaagccctcagattacaacacaccatcaaccctccacagtttctccaaccacagcgcctcaaaagaaacggaggaatcaacctggaacaccatatccagatgcggaggtcataaaactatctcccaagaccctaatggcaacaaacaggtttatatgtgaggtgtgcaataaagggttccaaagggagcaaaacctacagcttcacagaagaggacacaacctgccttggaagctaaagcagaagagtacaacaaaagagccaaaaagaaaggtttatctgtgtcccgagcccacctgcgtccatcatgatccttcaagggctttgggagacctcactgggatcaagaagcactactatcgcaagcacggcgagaagaaatggaagtgtgaaaagtgctcaaagaaatatgctgttcaatctgattggaaagcacattctaagacttgtggcactagagaatacagatgtgactgtggcactctcttctctaggcgtgacagtttcatcactcataggggccttttgtgatgcgctagcacgtgtaaccagcagagaacgttgcatctatatttccaaggggacccgtagcaatggtgtctatgtgcatcaatggtggggagactgaattgcattgaacctttgatgattattatggtgttagagaaactctgtgtatgtacaagtttctcttgtgttttatgtatttggactatagtccaactatgtctctgttttgtgtttgttgtctgtgaaagtgtgtaggatgctatgaacatccgagtgctttatggttgggcgattaatgctaaaataaacaaccactgtcgttctcgtttgctaataaaatctgtgatgattcgtggt

SEQ ID NO: 29383 - DNA, 1234 bp, Glycine max
  Clone ID: TF_GmC57025_1
aattcggctcgagcacacatgtatatatatatatatatatatatatatatttaactacttcaattcacttcatcatagttacgtatatgagcatctctatttctctcaattaccttaactagcattgtttcaattcacatataaaatcgtttcgtgctcaacctttgtttgtgtgagatatagagatggaagggttggattctaataattctacccacaacagcatagccaagggcaaacgcactaagaggatgaggcttttgtccccttgcggtgtcatcgttgctgccatcaccaccaccaccaccgtcacctcgagcacttcgagtgctaattcgggtgcctcgtccaccacaacctacgagagcgaagaggaggacatggcgaattgtttgattctcttggcccaaggaggggaatctcgtcatcatcctcgtcacgacaagcaacaagttgaagatcatggtcttgagaattgtgatgatggtgccatcaagacagaagaaaagggtaacagcagcaacgttaacactaccaccgccgcaacaacaactgctgctaataataataccaaagttggtttctatatttatgagtgcaaaacgtgtaaccgaaccttcccttcgtttcaagcactgggtggacatagggcgagtcacaagaagcccaaactcgcggctgaagagaaaaaacaaccactgccaccgtcaccgctaccaccgccaacaccgtctcaattgcaacacatgattgttaccaattatgatcggtttgaggagggtagcgttaaaagtggtcctccaatttcccttcaattgggtaataatggaaacaacaacaagggtaagattcacgagtgttccatttgtggctctgaattcacatcaggacaagcattgggtggacacatgaggaggcatagggcatccacaaacgccaacaatgttgttgacacaacaagttgtaacactgtcatcaccaccaccattaccgcggttccaccgaggaatattttgcaattggatcttaacctcccggcaccggaggatgatctccgagaggctaaattccaatttacagcaacaagtcaggtgctggttggtactccggctttggtggattgtcattattaagccagggtgggaattggaattaatttcaaagaattattattattattttgatatctcatcaatgtgaattattagcgttattttttaattttaattatttg

SEQ ID NO: 29384 - DNA, 1287 bp, Glycine max
  unsure (1)..(1287): unsure at all n locations
  Clone ID: TF_GmC48528_1
ccaaaaccagcaccacccccccacccctctctatctcttttctcccaaactccaatccgacccgaatacttcactcatgtccaattctatctccgacccgacccgaataattcactctcaggatccgaataccaccgcggaccctcaggttccgcttcggaacctttcccaggttcggaacagaatggattctctacaacacttcctatctcaatccatcaataccaacactcccctcaccgtcgatcaaatcgccatggtctccagccagatcctctcctccatccaccaagtcatcgtcaacggcgccgccctcgtctcttactctcagaattccatcgccgccggagcaccggatccaccgccgtatccgaagaagccgaagccggaaccttcagttgccgataaagcgaagcaaacactcgattccaaactcgagcctctcgaaggcgacgacagcgaaatcgtggagctcgacgccgtcgaaatcctcgcggagcacatgcacttttgcgagatctgcgggaaaggcttccggcgcgacgcgaacctccgcatgcacatgcgcgcgcacggagaacagttcaagacggcggaggcgctggcgaagccttcggagaaagcctcgtggctgcgtgcgacgcggttctcgtgtccgttcgtaggctgcaaccggaacaagctccaccggcggttccggccgctgaaatcggtgatttgcgtgaagaaccacttcaagcgaagccactgcccgaagatgtacacgtgcgagcggtgtcgcaagaagcacttctcggtgctctcggatttgaggagccacttgaagcattgcggaggagaggccaggtggaagtgcacgtgcgggaccacgttctcaaggaaagacaagttgtttggccacattgcgctgtttgagggccacgcgcctgcgctcgcgtgtgacgaagagggtaaagggaaacaaatggtggaggacgacgaagatccaatgttgatgagtgaaagtggatttgaattggatgattgttttttggatcaagagtttcccgaaggcttctttgatgattttgggtccattgatgactactgttaaaggaagtgttaggttttcctagtaattgactttgcatatctatttttaggaaatactgtattcatattatactattgctagatttgtatttatgtctttatgttgttgagggattaaaattaaacagtgtttataggatggaataaaacgattaatttcattaccaaaaaaaaaaaaaaaaaaannnnnnnnna

SEQ ID NO: 29385 - DNA, 643 bp, Glycine max
  unsure (1)..(643): unsure at all n locations
  Clone ID: TF_LIB4165-008-Q1-K1-F10
cacgcgtccgatccaatattgacaactttattagaagtccgtgtgaggggttgaggccaagagctgggaagattgccactgacaaaagtggggtggaaatcaaccaagttgacaaggaaaatcaggtggctaaaagggcaaggagatcttctgaaggtttggttcctcacaaaaataaaaagggatgatgttaaaaagccccataagtgtgaccttgatggttgccaaatgagtttcaagactaaggctgagttactactgcataaacgaaacctttgcccacatgaagggtgtggtaagaagttcagctcccacaaatatgctttacttcaccagcgtgttcatgatgatgagaggccccttaagtgcccatggaaaggttgttccatgtcattcaagtgggcttgggcaaggacagagcatattcgcgtacatactggggagaagccttatcactgcaaggtcgagggatgtggcctttctttcaggtttgtatcagattttagcaggcacagacggaaaacggngcaccatgtgaaacctnctgcttgagaagatataatattcatttgttaactttttgttctcgcaacatgtgcatatttgcagttagattggtaaaagtgaggcatagagtcatgtc

SEQ ID NO: 29386 - DNA, 607 bp, Glycine max
  Clone ID: TF_GmC793411_1
taatccattccacacctttctattctttttaaacccttgatcatatccattttcgatcaccccttcaaaccaaaacaccaatattatttcaagtactattgatataatatagtgatgaagagagaaagagaagttgatagtataaccatggccaactacttgatgctgctttctcgaaccaccaccaacttgaacacttccaacaaccgtgtgtttgagtgtaagacatgtaaccggcggtttgcgtcgtttcaggcattgggtggccaccgtgcgagtcacaagaagccaaggttgatgggagagagtgatagccaagtgctaattcatggttcaccaccaaagcctaaaacacacgactgttccatttgtggattggagtttgcaataggacaagctttgggagggcacatgaggcgtcatagagctgcagcagcagcagcatcaaatggaaacatgcacactactattaattcttggttgagttctggcagcagtagtggtggtagcactgttgataatactttaccaccaaacatgaaccacaaccccaacgtcaccgacaccaagaggattttgtttcctgatttgaatttgacgcctctag

SEQ ID NO: 29387 - DNA, 1977 bp, Glycine max
  unsure (1)..(1977): unsure at all n locations
  Clone ID: TF_GmC282_3
atttatcacctcattttctgatgaaaaaagttacacctttggaaacgcccaagagaagaaccaacgagatcgaggaccttcttctgcttctgcttccgccttttccttcgcgcttcggtgctgcccacctacactcattccgtccaaacccctttttgtctgaaaaatcaaaccttaatttctgcgtttttttctattggatccaacttcactcgccggctagagtttcccgaggcactaccctattgggtctaatcattcgagttcttcgattaacgtgaatttgggtcagagacctcatcatcagagctggcaggtggcgggtaaaagaaaatttgcaggttgaccggtagatatagcaaaggagagtagaaaccctagaagaagaagaagaaaaagaagcaatccccatataagaaaaaggatctaaaaccaaaactttctccgtgaggttaaatgcccttaaggttattttccctctaagaaatcctcgagtcgtttaaggttcccatgccggttgacttggacaatgtttccacagcttcaggggaagctagcgtgtcttcctctggcaatctgacagtgcccccaaaacccacaacaaagaagaagcgaaaccttccaggaatgccagatccggatgcagaggtgattgctctgtctccgaagaccctgatggccacgaaccgtttcgtgtgtgaaatttgcaacaaggggtttcagagggaccagaaccttcagcttcatcggaggggtcacaaccttccgtggaagctgaggcagaggtcgagcaaggaggtgagaaagagggtgtacgtgtgtcccgaaccaacgtgcgttcaccacgatccttctagagcgttgggggatctcacggggattaagaagcacttctgcagaaaacacggcgagaagaagtggaaatgcgacaagtgctctaagaaatacgcggttcaatccgattggaaggctcactccaagatttgcggtacccgagagtataaatgcgattgtggcactttgttctcgaggagggatagcttcatcacgcatagggncttttgtgatgcgttagcagaggaaagtgcgagatctcagcctcagactgttgcaaaggctagttcagagtcagattcgaaggctgtgaccggtgattcgtcgcctccggtggcggtggaggctccgccgccacttgtaccgcctgttagttctcagtcaaacagtgttgttgtaccatcatctagcttgcagacacaaaaaccagagttgcctgaaaattccccacaaatcatagaagaaccaaaggtcaatactgctatgaatgggagctgtagcagtaccagtaccagcactaccagctcaacaagcaacagcaacagtggtgctagcagcagtgtatttgcaagcttgtttgcctcatcatcagcatccgcaactgcaagcctccactctcaaacaccagcattcactgacctaattagggccatggggcatccggatcatccagcagacctctcaaggccttcatcttcagagcccatttctctgtgcctagccaccaatcatggctcatccatttttggaacgggaaggcaggaacgccgtcagtatgccccaccgccacagccagccatgtctgccactgcattgctgcagaaagccgcccaaatgggtgcagctgcaacaaatgcctcttttcttcgtgggttaggcattgtatcatcttctgcatcaacgtcatcagttcagcaagataatttgcaatggggccatcagccagtggaaccagagagtgcctcagttcctgcaggtcttggacttgggcttccctgcgacagtagctctggactaaaggagttaatgatggggacctccctccatgtttggtccaaagcaaacacccccttcgatttctcgggttgggggaatgggctgctgggggcaccccctgggtggagggcttatcggcactcatca

SEQ ID NO: 29388 - DNA, 1174 bp, Glycine max
  Clone ID: TF_GmC427_1
gttttctttcgcttgttcgtttgtttaattcaataaaggaaattaggcatgaccctcttgttgagtatgctctgcctatttgaaaatttcacacctcttttaattgtcgtaatgatgtgtgaagtgtgtgttattttaaaaaaaaaaaaaaaaaaaaaaaaaaaaaaaaaaaaaaaagaaaaaaggcggagcgatttaaagcccggcgttcggctcgcgtgcggctcgttctcgagtcgattcggctcccgctatttttcatacaacacattctttctagacacgcaacacctagaagatttccttattctttttggtgctaaaccgttgggatccatcgaaattctagacacacaacacataaaagatttccttgttctttttactgcttaaccgttcggctatctcatatatgaacaacaacatgttaggaatgaagagacggagagatgataatgaagggtccttggatttggcaaaatgtcttatgctgttttcttgtccaatagaaagcaacaagacacaacagaaaagttttggttctgtggaatttgagtgcaagacgtgcaaccgcaagttctcttcttttcaagcactgggagggcacagggcaagccacaagaggcagaagctggagggggaagaactgaaagaacaggccaaaagtcttagcttgtggaacaaacccaaaatgcacgagtgctccatttgtggccttgaattctctctgggccaggctctgggtggccacatgagaaaacacagagcttccctcaacgaagggtttcctattattccttctatcgaccaagttattgcgaaaatcccggttttgaaaaggtcgaatagcaccagggttatgtgcttggacttggagttacacctgtagataatgactctgtgcttggaatcaactatgaaatcaccacctcagcttctttttctttgttctgactaactcttttttacctctttctggacacatgtagtattctttcatttttgtgtaaaaatttcattgacttttcccttataaagatcattgattctttatttgttagcaccaaaaattctcacatattatttagttggtgttggctaaccggtacgtcataccaccgattatcaaaaagttctgaatgttttaatagtattgatttttaattattttttt

SEQ ID NO: 29389 - DNA, 2202 bp, Glycine max
  Clone ID: TF_GmC23433_2
gacaccatgtccgggaaagtttcgtgggttttgtgtacaccccttcttcggtttcacaaatcccatcttcgttgtttcaattttcctctcgaccacactttcctttttgcaagtaagtagcaccaagaggcaggaactagagagtaacaacaaattcaatgtcaaactcaaacatcacaagttgtgatagttggagcttcactacagagaataataataatggagaagatgcagcagcaactgttaaacagcaattggagatgcttggccagctttatagtccaaattcaaacacttcaaccacaacaaataatagcaatggtggctcaaacgcagattcacaaccacctgctaagaagaaaagaaacctaccaggaaatccagatccaagtgctgaagtcatagcactctcaccaaacaccctggtggccacaaacaggttcatatgtgaaatatgcaacaaagggtttcaaagggaccaaaaccttcaattgcaccgtcgaggccataacctaccgtggaagctgaaactgagaaccaccactgaagttcgaaaacgggtttatgtttgtcctgaaccctcatgtgtgcatcacaacccagctcgtgcactaggtgatctcactggcattaaaaagcactttagcagaaagcacggcgacaagaagtggaaatgtgagaagtgctcaaagaaatatgctgttcagtctgattggaaagcccattcgaaaatatgtggaacaaaggaatacaaatgtgactgtggcaccatcttttctagaagagatagtttcatcacccacagagctttctgcgatgcactgagtgaggagaacaacaagttcaacgaaggacaattgccaaagatgcatggttcaaacttgcaaccaccaacaataatcccaaacctagttgcatcattaccaatcaatggcgccaataatcacaagcacccactatcactccctcacgacctcatgacaacaattcccgcaaaaccctttaacaacaacatggctgcagcattcacgagaagcctttcatccacctctcaactaagctcaaaatcaccaaacattaacatgttcgaggaaaatggtctcctttcacctcacatgtccgccacagcattgctccaaaaagctgcagaaatgggtgcaacagtgaatagtaacagcaacaacaacagcatgatgatgagtggagaaaaaagctttattaatgtcacaagcatggcaccaccatcatatgggatcatgaaccccaacatgcacaacggtcaacaagacttgtctcagtataatttcattgccaatggggtggtggatggtggtagcaatggcatgggaatgggtggtttggatatgtttaatgctatattggatcaaagtaaggccttgtcgaagatcatagagcagaacaacagaaacagtacttataatggtgttttgcatgcaatgaataatggtaagtcaagtgaccccattgaaggtggtggaactaaagggagtgaagctgtgaatcatgtgatgactttggacttgttggggataggaggtggtggtggagatggtaatttctatggtggtgatcaacagtcagaaatagctgctggagatggaatatggggaaattggtcaaataagaatgcagggcttgaatcattttcagcaacaaacagcaccatatgaatgatactgaccttgctggggggagggaagaataatttgcatgtctcttctattatggaaattaaaggtggaattttcagcttagtttggttctatgaactaattaattccttttcgaccatatcaaactagtagtacactgcagaaattaatcgtctacacattaacactgattggttttcctgtgacaaatcagtgtgtggacactttaatttggtcccttaaattagtgttcatcagtatctttaaatggcgaataatcagaagaattgccctgcacatttagttagttcaatgtgcacacttcgacttcacagcatttcaatttcagtcattccattttcatatcttattaataagaatggaatatggcaatatgctgaaaatttgtagcaacgttaatttgtgtattaagttggccatttatgataagacgatcgaaatggtccagatttagttaagttctatagaataccatccaccagtcaccacgtttcaaacttgataaaaa

SEQ ID NO: 29390 - DNA, 1182 bp, Glycine max
  Clone ID: TF_GmC282_4
ctcaaacttgttttatccatgggttgatcatcccaaaaaagtttgctttgtttgggtaaatgacccttaaccctgtttgtgaataataatagagttaggaggttccgatgacggtcgatttggacaacgcttccaccgcttcaggtgaagcagccagtgtctcttcctccggcaatcagacaaaacccgccgctccaaagaaaaaacgaaacctcccgggcatgccaggtagttgtagtaaaagtaaaacaaactaacaaacacgcaccaatttcaattaaatctcttctttattccttttttcttatcagatccggaggcagaggtgatcgctctgtcgcccaagactctcttagcgacgaaccgtttcgtgtgcgagatatgcaacaaaggattccagagagaccagaatctgcagctccaccgccggggtcacaacctgccgtggaagctgcggcagaggtctagcaaggaggtcagaaagagagtgtacgtgtgccccgagcccacgtgcgtgcaccacgacccttccagagcgttgggggacttgacggggattaagaagcacttctgcagaaagcacggcgagaagaagtggaaatgcgataagtgctccaagaagtacgcggttcagtccgattggaaggcgcactctaaagtctgcggcacaagagagtataagtgcgactgcggaaccgttttctccaggttcgtttccctttctctctcttgcttgattgtctaatttcttttgttttgtttcgctccactctaaaaaaagcctttgcttggttgttgggatttgaaggagggatagcttcatcacgcatagggcgttttgcgatgctttggcggaggagaacgccagatctcacactgttgtaaaagatatttcggagaatgattccaaggttttaatcggtgattcgccacccccgcagcctgttgcagccacggtggctgctactactgctgctgctaccaccaccaccactaccccacgtgtccgcggacgcgtggcgaatagtgttatgtcctttggattgcacacgcataacctatatttgccagataacaattccccacaagtcatttgaggagccacaagctgctactgctactgctataagggggagctgtggctgcagcagcttctgctcaactagcaatggtggtgcttct

SEQ ID NO: 29391 - DNA, 573 bp, Glycine max
  Clone ID: TF_jC-gmle01810062b01a1
cgccaggactgtcgatgcaagtcagccgcgcgctcaattcggacatggacaccgaccgccccccgttctcgatcaggattcttaccagcacaggacgatggcagggatcgccacggagacaatcgacagcttcatcactgctgcctcgccaaaaagctacgatggatctgacctgaccccttcgcagtattccgacgcctttgcaaatcaaccgacagatctcacagaggatgccttcactccgttcgaatccgtggatgacctacaggacgataggtctataataaaggacatcgatctcgcttctctgggtcatgcgacgcatgatgtgaatgaaagcgcaaactcgctcagtaagaagctgttcgcatgtgaaatatgtggccgctctttccaacggatcgatcaccttgccagacataaggtcaaccacgatagcgtcaagccgttcaattgcatcgtctgccatcgggctttcgcccgtaaggatgtctatcggaagcacttacagaggcacgaggcggacagacggacgcgcaaaccccacacggcaccacttcatgcacattgatc

SEQ ID NO: 29392 - DNA, 2346 bp, Glycine max
  Clone ID: TF_GmC168_1
attacgtttatccaggttttcttcatgagcgcgaaccatataagtcaccagcagctgcacaacgtgctatagaaagatgattaaagagaataacaactccaggagtgcagaaagaaagaaaggaagagaggaaccctaagagatagagagagagacaaacaataaagctagatagacagatagaaagctgatggaaaagctgaaagataaaaagcaagttaaaagaaaggctgagcggaaaccgaaacggaaagaagaaaaaaaaaaagaaaaacgaaaaaactaaaaaaaagaggccttttatttgttccttctctatctagtgtcttcctcctatcggcctggtgtacctctctctccctctcttcacctcaatgaatggtctcttctctatctctttctcttcttccttcttacttaattctatcaccaacatagccacagacacaaacataggcactacttatttctcttcttaggccttattatcatcatataccacatcatcaaagcacttgccatcatagagtaccatgttagccaataacttatctccatcgtcagttcccacttctgagccttttccctgcactgaaaatggcactgccaccaataaaaggaagagaaggcccgcaggaacaccagatccggatgcagaagtggtgtccctctcgccgaaaacgttgctggaatcggatcgttatgtgtgtgagatctgcaaccaggggttccagagggaccagaaccttcagatgcataggaggaggcacaaggtgccatggaagctattgaagagggagacaccagtggtgaggaagagagtgtttgtgtgtcctgagccaacttgcttgcaccatgacccatgtcatgccttgggtgaccttgttgggataaagaagcatttcaggaggaagcacagcaatcacaagcaatgggtctgtgaaagatgctccaaaggctatgcagtgcagtctgattacaaagcacatctcaaaacgtgtggcacccggggccactcttgtgattgtggccgcgttttctcaagggttgagagtttcattgagcaccaagatgcttgcaacatggggaggctcagacctcatgaatctcgccaagaggataagacaacaagcacaagcggaactcgacaaagcctactccttgaaagaacatgcaatgaagcaaatcaactccaccatgctccaaatcacttgccatggttgcaaacaacagttccaagcttcatgaacaaccctattactgctatcaccactgctgaaacctcctccaagagcaacaacaaactactccaccccaacttggatcttcaactctccacccccaccaataacaacaactccaacacctccaacaccaacacatcaaatattgcaaaccccattgataatgctgcaatatcagctaagagggatcattatcatgagaaccattcaacccatttgcaactctcaattgggtcatcagatatgagtgagaagaatgatcaatcaaacaggaactcatcagagaagagcagcaataacagcaacaacattaatgatcagaataataagcagcagtccaacaacatggccttgttgagggttcaagagcaagcaagggagcacttgaggatagccatggcagagaaagcatatgctgaggaagcaaggaagcaagcaaagaggcagattgagcttgcggagaaagagttcacaaacgccaagaggataagacaacaagcacaagcggaactagacaaggcctacgctttgaaagaacatgcaatgaagcaaatcaactccaccatgctccaaatcacttgccacttttgcaaacaacagttccaagctcgaaatgcaaccaccaccagccccgacgataattctttggtgctgagctacgtttcttctgctattaccacggaaggaggagaagttgaaaacgataatattgcaaaagatcatgccaaagacaacaactaactctactacttagagagagatattaatcatcttcatcatcatctttctctctaaagttgtttattctgtattttatttttctatgtcctcctcctttatgggttaatacttaataccctttttttttccatttcaaggctaatatctttgtgcattggtataccaagtgaagtgaaggtgaaggtgatcgagtgacgttgattatgtaagtgggatattataatagcgcacgggatggagaacttattgaagagtgtaattcttcgtgtaacttgcagtttattgtgccatgtaatttgttaattaaatttggtataaatgcagactatgataaaagggttaatttctcgctggttcaatt

SEQ ID NO: 29393 - DNA, 1305 bp, Glycine max
  Clone ID: TF_GmC168_3
acggctgcgagaagacgacagaaggggatggtaattgatcatggtttgttgtatgtatgtatgcagatccagatgcagaagtggtgtccctctcgccgaagacgttgttggaatcggatcgttatgtgtgtgagatctgcaaccagggattccagagggaccagaaccttcagatgcataggaggaggcacaaggtgccatggaagctgttgaagagggaaactacagcggtggtgaagaagcgagtgtttgtatgcccggagcctagttgtttgcaccatgacccatgccatgctctgggtgatcttgtcggcataaagaagcatttcagaaggaaacacaacaatcacaagcaatgggtctgcgagagatgctccaaaggctatgcggtgcagtctgattacaaagcacatctcaaaacttgtggcacccgaggacactcttgcgattgtggccgcgttttctcaagggtggagagctttattgagcaccaagacgcgtgcaacgtagggaggctggggccagaaacacaatcacaggcacaggcagtgcaagcagctgcatgcttgtctcgaacagcttcaagcgaaaccaatttcagcactggttccccttggccacaaagcggtactataataattccaaatcccaccgttacggtagtagaaccctcctcatacaccattgtcactgccgaaaccaacaacaaagtccaccccaacctggagcttcagctctctaataccactcctactgcatcatcacaggaagaaagggttcatcaagagcagttgaggattgcgaaggcgaagaaagcgttggcggaagaggcaaggaagcaagccaagaggcaaatcgaactggccgaacttgagttcactaacgccaagaggataagacaagaagcgcttgcggaacttgacaaagcctatgccttcaaggaccatgcaatcaaacacatcaattcaatcatgcttcaaatcacttgccgagcttgcaagcaccattttcattcgccaaccgacgaccaaatcttctcctacataacacaagctcgccaagtacaaaaacatcgtctcaaacccattattaattaactcttaattagacgacatcgatcccttccttcttttactattactactatgtcaagtgagtgctatggttatgtacgtgtgggattaatagccagctagcgaggtggtggaaaaaatgtgggttattattaatgtaaatgtaaattagttgcagcttgtgccatgttatttaaatgcagactataatatgatgagcaggttttgctgg

SEQ ID NO: 29394 - DNA, 1361 bp, Glycine max
  Clone ID: TF_GmC724_2
cccacgcgtccggatccaaatccaagtacggttgggttggagagaaaatgcgtccctgctgaaaacaccaaaccctaaaacgcgaaaagggttctaagaatttgcgaaggaaagagctagcggagatggagattcactacagtaacagctatttcgagaggcgccccatcctcaagtccaaggctgccgctgtcaaatgggtcaaagaatgaggataccttgaagaccttgaaagaaaaggtaaaagagccttcagtgccagagccagaacctgagccaactactgaagtactttttctttgcagctatgatggctgtggaaagacattcatagatgctggtgcattgaggaaacattctcacatccatggagagaggcagtatgtttgtcactacgatggatgtggaaagaaatttctggatagctcaaagttgaaaagacattttctcattcatacaggggagagggattttgtgtgtcctcatgaaggctgtggtaaggccttctccctggatttcaacttaaggtctcacatgaaaacacattcccaagagaactatcatatctgcccatatccagattgtggaaagagatatgctcatgaatacaagctaaagaatcacattgcatctcatcatgaaaagaatgcatccgtggatgtgacaaagtacactactcccccttcagagaagcaaacaaaaacttctaaaccatctggaggggcatatggttctgcatcatctgaccgtccctatgcatgtccctatgatgggtgcgaaaaggcatacatccatgaatacaagcttagactccatttgaagagggagcatccggggcttatggctgatgaaaatgcagagcatgctcaggctaatgttgacaatgaaatggatgaagcaagtgaccatgatgcctatgttgcgaaacgatcaaatggtaaaattcagaagcagagtaagcctaaaccaaacctcaagttgcctccttccaaaattgcaaaacgcaaactgtccactccctctttaactgtaaataaaaattcttggcccgtgaaagatgaacctttcgatgaagaagatagcgaagaaacagaagaggatcgtgacaatgttgaagatggttggagatatgcaggaggaaacaatgaagatgatgatgaggaaacagaatatgaagactgaatcagttatggcatcctctatgaaacttaccttttccaagaaatatattttctcttctacaaaaaaatttcagttgtctcttttttatttggctgaggaaatgacatcttgtcaaactgtgtgttgctgttacaagcattaggaagaatttatataaataaaatgcgatttaaaatgct

SEQ ID NO: 29395 - DNA, 1033 bp, Glycine max
  Clone ID: TF_GmC1644_2
tacggctgcgagaagacgacagaagggggagtgagtgagagaaagaagagaaggagttgaagtggttgttgtattgtagtagtgtgtaaagtcttggtgatggatagacacaaatgcaagctttgttcaaggtctttcagcaatggcagagcccttggtgggcacatgaaggctcaccttgcttctctccctctccctctccctccaaagcttcactcttgtttctcttcctctgactcagaacaagaacaatctttaagggagaatcctaagaaaaccttgaggattctggatcctgaagacagagagagcgagacagagtctaataagaacccgactcgtcaacgatccaagcgcaactggaaatctaccatgcccaagctcagcctcggacaccccgaagccgaacctctcagctccgtctccgacacctcccccgaagaagacctcgccatgtgcctcatgatgctctcccgcgacacgtggcaggaacacaaactcgccaatgcaggtccacccaagactcgctgcagcagcggatcagagatcaagctcaagagcaaagtccgctccaagcacctctgccacgcttgtcacaaatcctttcgatcctctcgcgctcttgggagccacagaaccctgtgctctccccgtctggaagcccaaaataacagcatcattagtaataacaacattaaggtttttgaatgccccttctgttacaagctgtttggttctggccaagcgctcggtggacacaagagatctcacctaattccttcttcctcttcaaccgttaatcattctgtcaagttgaaacagagcttcatagatctcaacttgcctgctccggccgaagacgacgatcttagcgttgtttctgatgcctaattcgatctggcatatgttttaattgtttaatgtttagttgtctggtggtgttactcataaagtgaatttttcttcttcttcttcttcttcttcttctttataaaagtagctgagaatatttcattatgtttattgacagatc

SEQ ID NO: 29396 - DNA, 1337 bp, Glycine max
  Clone ID: TF_GmC1922_2
ggtccggattcccgggtcgacccacgcgtccgcctctctttcaccaattctccaaaatttcaaccccccaaactcaagatttgtgctgtcagagcgattcacattgcctgtgttacggttgtctgctttcaaagcttttgaagttgtactttcggaatttgcaaggtagtgttgtttaggacacttcaattttcttcggttccaaaacatgatgtctcaagaagcaatatctgttccttccaacaacctcagagacccctcggttcaacttcatgaaccaaactcaaactcaaattcaaaccctaataatcctaaccctaattcacttaagagaaaaagaagcctacccggaacaccagatccgaatgcagaagtgattgctctgtcgccaaagtcgctgatggcgaccaaccgattcatctgcgaagtgtgcaacaagggtttccagagggaccagaacctgcagctgcaccggcgagggcacaacttaccgtggaagctgcggcagagaaacaaggaagaggtggtgaagaagaaggtgtacgtttgtccagagaagagttgtgtgcaccacgacccttgcagagccctgggagacctcaccggaataaaaaagcactcacgcagaaagcacggtgagaagaagtggaagtgcgaaaagtgctccaagaaatacgctgttcaatctgactggaaagcccataacaagatttgtgggactagacagtacaaatgtgactgtggtacaatattctccaggaaggacagctttgtaacgcatagggctttttgtgacgccatggcggagcaaaatgcgaggcttccgtcggttttgtcaaaccttggaagcgagattttgatgaatgctgctcaagctccaagagtaatgccacaggctttacaattacatgggtttcattcagagtttggtgggccaggccaagaaccatacattggaaattttgcggatgtgaaccatgatgagcataagctaaggatgccactatggctagaccagaccaataatcctcttcagcttaatcatcatcatcatcatcatcctctaagcgtttcaagcaacaactcttcaagtttgttctcaccaggaacaaccttggctgaagtgaacaacatgtttgggacatcatcgtcgtcacagggacagtggctgaattaccgataccacccagaagcatcatttacacatgccaacgtttctattcctcatggactgaagctagagcaagaagaaaacaaagggaacttgtcgcatagcagccccaagtcagaatctgctgataataatatagtgtgagctctttgtaccaaagtcacat

SEQ ID NO: 29397 - DNA, 1517 bp, Glycine max
  Clone ID: TF_GmC724_1
ctgagtcgacccacgcgtccgtacggctgcgagaagacgacagaaggggagagggagagaggatccaaatccaagtacggttgggttggagagaaaatgcgtccctgctgaaaacaccaaaccctaaaacgcgaaaagggttctaagaatttgcgaaggaaagagctagcggagatggagattcactacagtaacagctatttcgagaggcgccccatcctcaagtccaaggctgccgctgtcaaatgggtcaaagaatgggttccccaagatcttgtgacaacaggagggaagtgcatgatcttaaaatgggtaacagaggataccttgaagaccttgaaagaaaaggtaaaagagccttcagtgccagagccagaacctgagccaactactgaagtactttttctttgcagctatgatggctgtggaaagacattcatagatgctggtgcattgaggaaacattctcacatccatggagagaggcagtatgtttgtcactacgatggatgtggaaagaaatttctggatagctcaaagttgaaaagacattttctcattcatacaggggagagggattttgtgtgtcctcatgaaggctgtggtaaggccttctccctggatttcaacttaaggtctcacatgaaaacacattctcaagagaactatcatatctgcccatatccagattgtggaaagagatatgctcatgaatacaagctaaagaatcacattgcatctcatcatgaaaagaatgcatccttggatgtgacaaagtacactactcccccttcagagaagcaaacaaaaacttctaaaccatctggaggggcatatggttctgcatcatctgaccgtcgcaacgtgcttcgcctaatgttgagagtgaaggcatacatccatgaatacaagcttagactccatttgaagagggagcatccggggcttatggctgatgaaaatgcagagcatgctcaggctaatgttgacaatgaaatggatgaagcaagtgaccatgatgcctatgttgcgaaacgatcaaatggtaaaattcagaagcagagtaagcctaaaccaaacctcaagttgcctccttccaaaattgcaaaacgcaaactgtccactccctctttaactgtaaataaaaattcttggcccgtgaaagatgaacctttcgatgaagaagatagcgaagaaacagaagaggatcgtgacaatgttgaagatggttggagatatgcaggaggaaacaatgaagatgatgatgaggaaacagaatatgaagactgaatcagttatggcatcctctatgaaacttaccttttccaagaaatatattttctcttctacaaaaaaatttcagttgtctcttttttatttggctgaggaaatgacatcttgtcaaactgtgtgttgctgttacaagcattaggaagaatttatataaataaaatgcgatttaaaatgccccaaaaaaaaaaaaaaaaaaaaaaaaaaaaagcggccgctctagagga

SEQ ID NO: 29398 - DNA, 1185 bp, Glycine max
  Clone ID: TF_GmC50_4
agacactcaaattacatggtcatagtgtacacctagttaggcaaacacaccaaacaccaaacaccaaactagttggctcaattctctttgaatggctttggaggctttgaattcaccaacagcagccaccactccgttccgtggctaccaagaagaggaggaggacgaggaggctgaccttcacttacgtgagccttgggctaaaaggaaacgctccaaacgaccgcgttttgagacggaggaagagtacctcgctctttgcctcatcatgctcgcacaaagcggtaacaccagaaacatccacaacaacaacacccaattaccgtcttcttcactgtcagacaaagaagcgtcgccgccggtgaaactaacacacaggtgcaccgtttgcaacaaggcctttggttcttatcaagcactcggtggacacaaggccagccaccgcaaggcctcgtcggaatccaaccccaccgcctccgtctctgccctagccaacgacagcgtttctgcttccaccgtcggcggcggaaggatgcacgagtgttccatctgtcacaagagtttccctaccggtcaggccctgggtggccacaagcgctgccactacgacgtacggctgcgagaagacacagaaggggccaacggaaacaacagcagcggcgccactacctccgacggcggcgctgcctcctcctcccacacgctccgtgggtttgacctgaaccttccggcgccgctgacggagttctggtcgccgatggggtttgatttcgggaagaagaaggtaggcggtgaacaagaggtggaaagcccgttgccggtaaccgccaagaggccgcgtttgtttacaggggaagatgatgaaaccgcgtagatttgtttgcagaattttattttaaattgattgaaattgaatttgttgctggtatatcgcgaatatgattatgaattcaaaccagttagtttaattttcattttatgtttttttttagtatataggtgggattgggattttgtttctgctactctgtacagacaaattttgttcattgcttttggactcttttttgtcattgattcaatctaacaattgctttcatcagtaatgtttatgccaaagataaatataagttaattcccatcatatacagattcctatataaatttatttcttggcttcttccg

SEQ ID NO: 29399 - DNA, 487 bp, Glycine max
  Clone ID: TF_jC-gmXLIB3563P002dh04a1
cagaaacatccacaacaacaacacccaattaccgtcttcttcactgtcagacaaagaagcgtcgccgccggtgaaactaacacacaggtgcaccgtttgcaacaaggcctttggttcttatcaagcactcggtggacacaaggccagccaccgcaaggcctcgtcggaatccaaccccaccgcctccgtctctgccctagccaacgacagcgtttctgcttccaccgtcggcggcggaaggatgcacgagtgttccatctgtcacaagagtttccctaccggtcaggccctgggtggccacaagcgctgccactacgacggcgggaacaaccacagtaacagcaacgccaacggaaacaacagcagcggcgccactacctccgacggcggcgctgcctcctcctcccacacgctccgtgggtttgacctgaaccttccggcgccgctgacggagttctggtcgccgatggggtttgatttcaggaag

SEQ ID NO: 29400 - DNA, 1235 bp, Glycine max
  Clone ID: TF_GmC7996_1
ttcattctttttgccttgacatgaatcaaaaccagcttcagccccttcctctccttagtagcttcttaggttcatctcctgaagaatctttgctacaaaaccaaaatgaaaatcctaatgcatgccatgctcaagttgaggatgttacagtggccttacacataggcctccctgaccattcaagtggctccaattccaccaataatcatggatttgtgaatgccacaactcaagttcctaacaattactggataccaactcaggagcagatcctcattgggtttagccatttctcttgtcctgtgtgccacaaaaccttcaaccgctacaacaaccttcagatgcatatgtggggacatgggtcacagtatcgcagaggcccagactcactgaaacgaacccatccacggcccttgttggaccttccatgctactgttgcgcaagagggtgcaagaacaacatcgagcacgcacgtgccaagcctctgaaggattttcgcacgcttcagacacactacaagaggaagcacggttccaagcccttcacgtgccgcaagtgtggcaagcctctggccgtgaaaggtgactggcgaacccacgagaaaaactgtggcaaacgatggctttgtatctgtggttctgatttcaagcataagaggtcacttaaagaccacataaaagcctttggatttggtcacacccctttttcttctttttctgatggtatgtaattaattaaacatgcatggcacaaaacttattatatggctcctttagtgttgttggttgtacagtttttcaatcagaattcaagtttcaacttcatattttgcataattatttaacgcaaattttaattatgcaagttatcgaggtgtgaaactgactttgatcgaagaacggtacaaacatgcactttattataacgacttatcttgtcttaatttctagtacttagacaatttaagggtgatctctatgttgttatcaattaataatgaagaggaatgagtttttcttaagttatgttactgtgttagcatttaaatagagaggaataagaagggagacagggtaaagaaactgagaatttgattccaatttattgattccctggttgccttttctgcttcaatatatgtaattagtttgttctgtgtgtgattaaaaagtgaacaaattctgaaatctcaatggacttcttcttatgctagaaaaaaaaaaaaaaaaaaaag

SEQ ID NO: 29401 - DNA, 1341 bp, Glycine max
  Clone ID: TF_GmC1658_1
accactcgtacgaaggctgcgagagggcctctgtagggggtgtcctattggtggaggaatgcttgttacctactcctttttaagttcccaaattccccaaagaagcctaaggccaaaccaaaccaaacgtatcagaataaacaaagaaagtcctctctctaatggagcggtacaaatgcaagctctgctccagaacattctccaatggcagagccctcggtggccacatgaaggctcacttagccaccctccctcttcccccccaaaaccaacaaccaccactttctccctctgctgctgcttccttctcttctaattcctcttcagaacaagaacaagccacacacgatgaaaagtccctgatttatgggttaagagagaatcccaagaaatgcttcaggctcgcagatcccgagtttgacacgggctctgtcgttcaagacagggagagcgagaccgagtcaaagaacccaactcgccgacgatccaagcgaacccgaaggcccgtgaatttggaacaaaaaaagcccaaactgagtttcatggagtcgcctgagcccgtgagttcggtctccgacacttcccccgaggaagatgtcgccatgtgtctcatgatgttgtcgagagaccgatggagtaagaacaacaacatcaacgttgttaatgttaatgatgaggatgttgtcgaagaggaagaagaagaagaagaagaggaggaggagggtgggagatcagtactagagataaagttgaggagagttcgcgggaagcaccagtgtcagagctgcgggaagacgtttcgatcttcacgcgcattgggcagtcacagaagcatttgcgaaggttcgggtaacgatagtaaaatcttccaatgccccttttgttccaaggtgtttgggtctggtcaagcacttggtggccacaagagatctcacctcatgccttcttcttccacaaccgctaataatgattctgttagattgaaagagagcttcatagatctcaacttgccagctccgcccgaagatgacgaccttagtgttgtttctgatgcctgataattacttgttcttctctgcagcaattgggtaaagtccttttctttttttatagtaggtaacgatatttcattgcggttcattgttagatcagatgcttttgatgctacaatcatagcttataatttatgctctattgtgcctagattctcaactaaattgttactctaggtaacatcgtaatcaattaatataagattattttattttaattaccctgatctcaagtttgtgtttttaagtataattctacttaactccatcatcattactttgatttccc

SEQ ID NO: 29402 - DNA, 1120 bp, Glycine max
  Clone ID: TF_GmC153491_1
taaaaaaaggaaatatagaaaacgaaaagtgaaacataaaaatgttccttatgaaccagttcttgaagaataacagaaatacctcgaaagaagacatgaatcctgtaaagaattaatgaaataagtgcataaacttttcctatacagtttggaatcttcactccgaagttgaattgcattgaagtttgaactttgaacctctgctggaatgagcaactatgataggttttactttagttagaaatgaggccaaccagtgcctcctgcttgtgatttcctcctactacccaccaaggtctgtaatgctcagcatggccatggccagtgccttcttcctctgtagaagcaggaaggttaaggtcaaaaaagtccctaatttctggtgctgcttcctcaagtacaattgtttgactttgaaaatttcttgcactctcagacccaccagccaagtgatgagatctcttgtggccacccaaggcttggccagatggaaaaaccttgtggcaaattggacactcgtgccctttccccttcttggaatctctcactgtttcaacctcattgtcaaattgagtagtagtagtagcagtagtaacattagtaaccatttcatgttcttccacatactcgttcttcaggagcttactttctgttgtagggtctggggagagttctgcctccaactcagtgctgttctcactgctctcatttcttgaagcaaagcaacccttgatcctcttgtgactagccctgtggcctccaagtgcttgatatgagtggaagattttcttacaagtagtgcactcaaactttcctctcttattggagcttttgctgaattcaccttctgagttcttgttgttgttcacccaactcttcaaaggacttgacttcaactcagagtccataaactttgccttgattgaagtgtacttattgttactattatgattattatctgttccattgtcctcaaatgcagaattagaaaccatggtcttgctgaccccaaatccacttccaggactctgagtagtacccaaaagctctgaactcgtttttccttttgagttgagatttgaacaatccaaatttcccggacgcgtgggcggacgcgtgg

SEQ ID NO: 29403 - DNA, 1274 bp, Glycine max
  Clone ID: TF_GmC296_1
ggaagcaccagaagaactctcttttgggggctccaaagatcacaccaacattgccaaaggaaaaagaaccaaaagggtaaggccacaatctcctattcccttctccatcaccgccaattcttccaccggaggagaaaaagaagaagattgctacaatgttgatgatgacaacatcataaaaaatgaagatattaacaacaacaacatcaataacatcaacagcactcccaccacttctgcagaattacaagacatcacagatgaagaggaggacatggcgaattgcctcatccttttagcacaaggacaatcccgggaatccccgaaacacgccgaggaagacgccggcatgagctacgccaagcacaacagtaggaaattcttggaagctgctaccttggggtctagcagggcagggtactatgtctatgaatgcaagacatgtaacagaaccttcccttcatttcaagcacttggaggccacagggcaagtcacaagaagcctaaggcattgatggctattggccaaaagaaaaaacagcaacatcttttgtcatcagatgaggaagagtttcaattgaagaccaataagtcaccattttccattcaattgaatacaaatgggaatttgtacagcagcagcagcaacaacaacaacaagtccaaggtgcatgagtgttccatctgtggtgctgaattcacatcaggacaggcattgggaggccacatgagacgccaccgcgctccggtcggaaccacccccaccgccaccatactctccttcaccccgttggctttggaaccagaagaagatcaccccagaaagaaaaggaatgtgttgaatttggatttggatctcaaccttcctgcccctgaagatgatcatagagaatccaagtttgcctttgcatccaagcaacaacaacaacaacatggacagaaacaaccacaacaacatcatcatccagaacaaaaacaacaacagccacaacagcaacaaacaagtcttgtcttccccgtaccagctttggttgattgtcattactaacaaggttttagattggcatttctcaagatgatcaccaaacgaaactggggttaatgtgcaagttagccatacatttgtcgtatgatctgattttttttttcttttttgatctatacatttatcaaaaatttacattacatgatgattcttttgatcctttgtaaacttgatcgagccatggtgattattaagggtgagctcagtttgtttattggagaaaagtttt

SEQ ID NO: 29404 - DNA, 555 bp, Glycine max
  Clone ID: TF_uC-gmroLIB3258P126b02a1
gcgagtactgcggtatctgcagatccaaaaaaacccttatcacctcccacatcaatttgcaccacaaggaagagtatgaaaaagcaagagctgaaagagatcccgaagcagaggcttcgaaatcgaacagttgcgaggaatgtggtgccactttcaaaaaacacgcctatttgttgcagcacatgcaaagtcattcacttgagaggccatttgtgtgtgctgtcgatgattgtcaggcaagttacagaagaaaggaccacctgactcggcaccttctacagcatgaagggaagatttttaagtgccctgttgagaattgcaacagtgagttctctttgcaaagcaatatgaaaagacatactgaggagattcatgatgacagttctaccactaccagtagtgacaaaagtcacaaacagcatatgtgtccagagattggctgtggaaaggtttttagatatgcatcacagctacaaaaacatgaagattctcatgttaatttggaatcagtagatatggtgtgcttagagcctggttgcttgaaacatttcacta

SEQ ID NO: 29405 - DNA, 1204 bp, Glycine max
  Clone ID: TF_GmC1072_1
gccgtccgtgtctctttctctcttctattactattagtaatatatctatcttttcttgcacaaccaaactcgtcactctgtggtattaattcaatattcatagacttcactgtctgattgtctttgtttaataccatataggattcattaaggattctctaatgttggcacaaatggacatggaggagcttgtctcatgtaacaacaacgatgccaccaacatagccaaagggaagcgcacaaagcggcgcttgaggcctttgtctccttgtgctgttgtcgctgctaccactatcaccaccaccaccactgctatcaccgctatcaccaccgtcatgacatctagctgttcaagtgcttctgccggtggcggtggatcgtcttcatccaccacctttgaggaggaagaggaagacatggctaattgtttgattctcctagcacaaggaagagtaggacgggaccctcctcatcatcacaaggacctatgtggtgatgtcaagacagagaagggtagcaccaaagttgatcatttatatgtttatgagtgcaaaacatgcagccgaacattcccttcttttcaagcactaggtggccacagggcaagtcacaagaagcccaagatggaggagaaaaagttgttatcaccaccactgttattgccaccactgccagcttcgtcttcgtcactatttaattttgaggaagcaaaacaaagtcacatgaagaatattattagcccttctgtctcccttcaattagggtgtggcattaacaaggttggtttaaatttccatggcaacaagtccaagattcatgagtgttccatctgtgggtcagaattcacatcagggcaagcattgggtggtcacatgaggaggcatagagcatctaacaataataacaatattgttcagacaacaacaacaacaacaactacttctaatggtgctgttgatgttaagcctcggaatgttctagagttggatcttaaccttccggcgccggaggacgatctccgggactcgaagtttcagtttccggcgaatccgaattctatgatgctgtcggctgctccggctttggtgggatgccattattagaaaccagggtgggaattagatggagaggggggaaaagttatattatttgattaatgatcattgtgaattatttagctttattttaatttacaattattctt

SEQ ID NO: 29406 - DNA, 1167 bp, Glycine max
  Clone ID: TF_GmC21_1
agcacaccgcgcttacttgctcacccgatcaactcaacacaaaccaaaacctcagctaaaattctcacttctctctctcagctccgggaaccaagaatcaactcgatcaactcaacacaaaccaaaactcaagctaaaattctcactctctctctcatctcgagatcatagtatcatattcaatatcatttcataccaaacacatggctttggaagctctcaactcaccaacaacaaccgctccatcttttccctttgacgacccaactattccatgggcgaaacgaaaacgttcaaagcgttctcgcgaccatccttctgaagaagagtacctcgccctctgcctcatcatgctcgctcgcggcggcaccaccaccgtcaacaaccgccacgtcagccctccaccgccacagccacagccacagccgacaccagatccttccaccaagctcagttacaaatgctccgtttgcgacaagagcttcccctcttaccaagcgctcggtggacacaaggccagtcaccggaaactcgccgccgccgccgaagaccaaccccccagcaccaccacttcctccgccgccgccaccagctccgcctccggaggtaaggcccatgagtgctccatttgccacaaatccttccccaccggacaggcccttggcggacacaaacgttgtcactacgaaggtaacggtaacggaaataacaacaacagtaacagcgttgtcaccgtcgcctcggaaggcgtggggtccacccacactgtcagtcacggccaccaccgcgacttcgatctcaacatcccggcctttccggatttttcgaccaaggtcggagaagacgaggttgagagccctcaccctgtcatgaagaagcctcgcctcttcgtcattcccaagatcgaaatcccccaatttcaatgaactcgttgaatttttagtttatttttcgactatatattttggagaattttgagagttactataatttgattttgtacatagtacttggaagttttgttggaccgtaccggacccagttctctggttgaggttgtactttcacaacagtggcagatttgcaattcaattcaatttatttgtttattttaattagtaaaaaaaataatttgatcttaaaaaaaaaaaaaaaaaaactcgagac

SEQ ID NO: 29407 - DNA, 835 bp, Glycine max
  Clone ID: TF_GmC427_2
tacggctgcgagaagacgacagaaggggctcatcgagtctcatatttttcatacaacacattctttctagacacgcaacacctagaagatttccttattctttttggtgctaaaccgttgggatatagcaacaacatgttaggaatgaagagacatagagataatgaagggtcagagagcttagatttggcaaaatgtcttgtgctgttctcttgtccaatagaaagcaacaaggcacaacagaaaggttttggggctgtggaatttgagtgcaagacgtgcagccgcaagttctcttcttttcaagcactgggagggcacagggcaagccacaagaggcagaagctagagggggaagaactcaaagaacaagccaaaactcttagcttgtggaacaaaccaaaaatgcacgagtgctccatttgtggacttgaattctctctgggccaggctctgggtggccacatgagaaaacacagagctgctctcaacgaagggtttcctataattccttctatcgaccaagttattgcgaaaatcccggttctgaaaaggtcgaatagcaccagagttatgtgcttggacttggagttacacctgtagagaatgaatgactgaactaccaagtcacccaagctcctttttctttgttcttattaacttttctacattttttacctgtttctggacacatgtattctttcattttttgtgtgaaaattttattgacttttcccttatagatgattgattctttattctggacacatgtattattttgttaatacgattatcaaaagttcttagtgttttaataaaaaaaaattttcaccca

SEQ ID NO: 29408 - DNA, 496 bp, Glycine max
  Clone ID: TF_GmC39743_1
atactacacaattcacaatcccaacacccattttggagaatcagaatctaactagccaatagccatgaagagacagagagagaacgaagtaacaacgttggaaagctgggacatgcaaatttgttcaacttcaatcacacccgacacaagtgtttccagttccaccatatctccggaagatgtatttgagtgcaaaacgtgcaaccgcaagttcaactcttttcaagcgctgggtggccatagggcttgtcacaacaagagggtgaagatggaaggtgaagaacaacaactcaaaacaagggcaaaatatctgggtttgggaaaacacagtgagcccaaaatgcataattgctccatttgtggtcaaggtttctctctgggccaggccttgggaggacacatgagaagacacagagcttcgaccaacgatgttttctcttccataaaacaggttgttgcaaaagtttcggttttaaaaagatcgtgtaatgacaag

SEQ ID NO: 29409 - DNA, 1341 bp, Glycine max
  Clone ID: TF_GmC1644_1
tacggctgcgagaagacgacagaaggggacacaagaagtcatcttttattgtacgccaaagaaaagaaaagaaagaaatcatagtttttttgggttgtgtgtgtcttttggtggaggaatgcttgtcacctactccttttaagttcccccaaaaacacttttgtgagtgagagaaagaagaagaagaagaagaagaagaagtagcataagtgatggatagacacaaatgcaagctttgttcaaggtctttctccaatggcagagcccttggtggccacatgaaggctcaccttgctactctccctctccctccaaagcctcactcttattcctcttcctctgactcagaacaagaacaagaacaagaatctcttaattatgctttaagggagaatcctaagaagagcttcagggttgcggatcctgaagacagagagagcgaaacagagtctagaaaccccactcgccaacgatccaagcgcaaccggaaatccaccatgccgaagctcacaccgccaccccaccccgaacccgagcctctcagctccgtctccgacacctcccccgaagaagacgtcgccatgtgcctcatgatgctctcccgcgacacgtggcagcaacacaagcacgccaatgcagctacacctaagaggcgctgcagtagcggatcagagatcaagaaaaatgtccgcgggaaccacctctgccacaaatgtcacaaatcctttcgatcttctcgcgcgttcggaagccacagaaatgtgtgttgtccccgcgaggaaggccaaaataattacaacaacaaccgtagcactaaggttttcgaatgtccgttctgttacaaggtgtttggctctggccaagcgctcggtggacacaagagatctcacctaattccttcctcgtcttcaaccgttaacgattctgttaagttgaaacatagcttcatagatctcaacttgccggctccggcggaagacgacgaccttagcgttgtttctgatgcgtaattcgatctcgatatgtttaattgttcaatgtttagttgtctggtggtgttactgataaagtggattttttttcttcttcttctttttttttttaaaagtaggtgagaatatttcattgtttattaacagatcaaatgctcttgattctacaatgatagctgagtataagcgatgttctgtgtcttttttttttaacttttcgacaggtagaagatatgactagagttataacttacatggtgaattttattggtttatacgcaacttggttcatcgtactattaggttttaaacgtagtttcaatgcaaatttgagatttggttgtggacc

SEQ ID NO: 29410 - DNA, 2747 bp, Glycine max
  Clone ID: TF_GmC282_1
ggaatcactttaaagagaagcactttattaactttgtacatcctcacaatctacaccattaaatttttgatggggttggggatttgtttcactacggggaaaagggggaaaactgagaagggtttccgggggctcggggctgttagggggtgaacttgcgaacagagaagggaagaggagtttgtttagtaaggattatcgttgggggcattattggagctggtaggtagggggggctagggtaaataaatgagagaaacggggttaaataaataaataaataaaaggaagaaaaaactctggaggttgaccggtggatattagagtagaagaagaagaagaagaatcccaaaaagagaaaccaactcaaacttgttttatccatgggttgatcatcccaaaaaagtttgctttgtttgggtaaatgacccttaaccctgtttgtgaataataatagagttaggaggttccgatgacggtcgatttggacaacgcttccaccgcttcaggtgaagcagccagtgtctcttcctccggcaatcagacaaaacccgccgctccaaagaaaaaacgaaacctcccgggcatgccagatccggaggcagaggtgatcgctctgtcgcccaagactctcttagcgacgaaccgtttcgtgtgcgagatatgcaacaaaggattccagagagaccagaatctgcagctccaccgccggggtcacaacctgccgtggaagctgcggcagaggtctagcaaggaggtcagaaagagagtgtacgtgtgccccgagcccacgtgcgtgcaccacgacccttccagagcgttgggggacttgacggggattaagaagcacttctgcagaaagcacggcgagaagaagtggaaatgcgataagtgctccaagaagtacgcggttcagtccgattggaaggcgcactctaaagtctgcggcacaagagagtataagtgcgactgcggaaccgttttctccaggagggatagcttcatcacgcatagggcgttttgcgatgctttggcggaggagaacgccagatctcacactgttgtaaaagatatttcggagaatgattccaaggttttaatcggtgattcgccacccccgcagcctgttgcagccacggtggctgctactactgctgctgctaccaccaccaccactactactattacttctactacgcaggcaaatagtgttatgtcctcttgtttgcagacgcataacctagtttagatttgccagaaaacaatcccccacaagtcattgaggagccacaggctgctactgctactgctataagtgggagctgtggcagcagcagctcctgctcaactagcaatggtggtgctacttgtaatagtaacagtagtagtagtgtgtttgcgagtttgtttgcttcttcaacagcatctgtgaccctacaatctcaaacaccagcattcagtgacttgattagagccatggggcctccggaacaccctgcggatcaaatctcgggtccttcatccgaggcgatctctctttgcctctccaccactagtgcctcaccaatcttcgcaacaggtggccggcagtatgcgtcgtcttcaccgcacccggccatgtcagccactgcattgctgcagaaggcagcacaaatgggtgctgctgccacaaacgcctcccttcttcgcgggcttggcattgtgtcatcgtcacctttggattccacctcgtcgggacagcaaaatgtcctgcaatggggccaccaacagcagttggaacccgagagtggctcggtcgctgcagcagggctaggacttggtcttccatgtgaagatggtggttctggactaaaggaattgatgatgggaacttcctcaatgtttggtcctaaacacaccactcttgattttctaggattggggatggctgccggtggcactgctggtggaggcttatctgcacttatcacatctattgggggtggtttggatgtaactgcagcctttggcaatggagatttttctggcaaagatattggaagtagctcttgatatgatatcttttggtagtaagcaagaactgcacttatcagggcaaaagtatatgatgggggcctttctggattgtgttgccccctttaattgccagggaaagaaactgtgatttactgtgttagaaaacggaaggtggtacaagttacaatacgcttgctctggatgaagggtagttgttgaattaaggttgtttgcaacaaaagggtttgaactttggtatggttgtcgtaggttttggcgacagtgacacgtttgaagatagtatcatcttgtttcggctcctttggtctccacagttttgattaaatttaaattacggcattggatgctttggttcgtagttgttggcataattcaggaaactttgatgaggtagtagttttcttcaattgtcgatttattgtaacaaggtagttttccgcgtatgccccattgttttgtaccagtgaatggttgattgaattcttctagcaagtagtgtttttatgtaaatgtcataaagtattgtagtattcctttgtagataaaaatcctcttctaagaagctttatttaattgccaagtatagcattatgatggataattaataccttaattaggaaatcatgtgatttattttcttgccgcctgagatgtggttaaaagtagacaacatcatgaaagttttgatattcttgttaggctatgtgact

SEQ ID NO: 29411 - DNA, 2313 bp, Glycine max
  Clone ID: TF_GmC282_2
caaaaaccaaaaccaacaccaaaccaaaactttatccatccatcccaaaaagtttgctttggttaatgcccctaacaaatttccatttttattttccctgtttgtgactagagagttgggttcccatgccggttgatttggacaacgcttccacagcttcaggggaagccgccagcgtctcttcctccggccaccaaacaaaacccgccgtcccaaagaaaaaacgaaacctcccgggcatgccagatcccgaggcagaggtgattgctctatcgccgacggcgctcttggcaacaaaccgtttcgtgtgcgagatatgcaacaagggattccagagggaccagaatctgcagcttcaccggcggggccacaacctgccgtggaagctgcggcagaggtcaagcaaggaggtgcgaaagagagtgtacgtgtgccccgagcccacgtgcgtgcaccacgaccctgccagagctttaggggacttgacggggatcaagaagcacttctgcaggaagcacggcgagaagaagtggaaatgcgacaagtgctccaagaagtacgctgttcagtccgattggaaggcgcactccaaagtctgcggcaccagagagtataagtgcgactgtggaaccgttttctccaggagggatagcttcatcactcatagggcgttttgcgatgtgttggcggaggagaacgtgagatctcacgctgttgtgaaagataattcggagaatgattccaaggttttaaccttaaccggtgattcgccaccgctacagcctgtctctgcaacggtggctactactactacgcagacaaatagtgctatgtcctgtggtttgcagacgcagaacctagagttgccagaaaccaatcccccgcaagtcattgaggaggagccacaaggtgctactgctgtaagtgggagctgtggcagcaacagcacctgctcaacaagcaatggcggtgctactagtaatagcaatagtagtagtagtgtgtttgcgggtttatttgcttcttcaacagcatctgggagcctacatctcaaacaccagcattcagtgacttaattagagccatggggcctccggaacaccctgcagatcttatctcagctccttcatcatccgaggccatatctctttgcctctccaccaccagtgcctcaccaatcttcgcaacagtaggccaacagtatgtgtcgtcgccaccgcagcctgccatgtcagccactgcattgctgcagaaggcagctcaaatgggtgctgctgtcacaaacgcctcccttcttcgtgggtttggtattgtgtcatcatcatctttggcttcgacctcatcggggcagcaaaatggcctgcaatggggccagcagcagttagaatccgagagcggctccgttcctgcagcagggctaggacttggtcttccatgtgaagatggtggttctggactaaaggaattgatgatgggaacaccctcaatgtttggtcctaaacacaccactcttgattttctaggattggggatggctgctggtggcactgctggtggaggcttatctgcacttatcacatctattggtggtggtttggatgtaactgcagcctttggcaatggagatttttctggcaaagatattggaggtagctcttgatatagcagtaataatatattttggtagtaagaaagaaagaacaagagctgcacttatcagggcaaaaagttatataagacagtgtagaattaaaaatgttgtctttgtgtagaatctttagttgcaatgcaccaacatgcacaaatgagggcctttttaggattgtgttgctccctttaatgcgagggagagaaactgtatttagtgttagaaaacggaaagttggcacaagttacaatatgcttgctctggatgaagggtagttgttcaattaagggtgttttgccaaagggtttgaactttgatatggttgtcgtaggttatggcgacagtggcacgtttgaagatatactcaacagtgttgattgaatttgaattaagccgttggatcatggatgctttggttcgtagctgttggcataaatcaggaaactttgatgatgttgtagttttcttcaactgtcgatttattgtaacgaggtggatttccacgtacgccccattgttttgtagttaatggttgattgaattcttctagtgagtaagtagtgtttttatgtaaatgtcatgaagaattgttgtattccgtatttccttttgtagttaaagttgctgttttaagcagctttatttaattgccaagcatttacgat

SEQ ID NO: 29412 - DNA, 2763 bp, Glycine max
  Clone ID: TF_GmC1035_1
ggaaacaaaagagaaataaattataatcaagtattccaaaaaataatcatgatcaaaacgagttggattggctagcaatatgtaaacaacttgtgcttttatatattggttatagggcctttaaaccaacggcgaccactgattaaccagtaagaaactacaagaataagcaaacatccaacggcaacaggggtgtagttaagtgtcttaatggttattgggtaggaaacaggcaaggagaagagtacagaaatggtcagcacccaaagaacagcaacccaacccacaacgacaccataacggcccaagttgaaaggcccactgacaaagtgtttccgtgccaaggtcacccttaagaatatagggaaggcataagcaatatagaggccaattgttgctatggacaccatggcctcaaatgctactatgcttccaagagatgtcagtgccatgcaaaatgatatgaaaacggaaagccaaactgcatatatagggacctcctgcttgttaactttgtgccacaatgatgacaatggcatgcaaccatctctatttggtgcagaagccatatttgaattcctgttaacataactcataccacagaaaaatatgacaacagcaacaattacttagttaattatgtctccagatccatggactgatcttttcttgaatgcttggaaaatacttgagcaattgcatacccaccagcatcattatcttcactcaaaaggtaaaggatgtcagtgactgcaaaggtaatgcctagtatctaaccccatccaacaacaatggatatcccgacagagctgataattccttttggaccattcctatcagcatccttggtatcatctgtcatatgagctgatgcatcaaatccagttagggtatactgactcattagaagtcccaagagaaatatgtagggtttgctgttgattccttccccattttctgtattgaaatgagtgaaaacaaacttggcactagccctttccgttgcaacagatggaatgacaatcataagcacaaaaacacctataacattccaaatagctgccagctgtcctaagaatgataacaatgagataggaaggctgtttattataccgtgtaggaacaaaattcccccatggaaagcaataactacatatttagatgcctcatatccaccaccatttttgccaccagtactaaggagaataataacctgaatcagttgtgcaagtgaataatctacacttgttgtcactgcccactggccaacaatattgaaccagccagtaatccaggaagcaaagggtgcccatctgggcccagcaagcttggcactccaataataaagcccaccagaagttggataagatgaacaaatctcagccattgagaatgcaacgagcatggtgaaagcagaagctaaaaaccacccatacaccagcgaaacagggccgccataattcaacccagtgttgtaaagagtggtcactccagtcaacaccgatataatagaaaacgaaaacgcaaaattcgaaataaccgaaagatcacgcttgagttcttgtttgtaaccgagttctttgagacgggcgtggccggaatcaagtggggcgtggccatttgcgaccacatgagaagggagtattttgtcagagcccatgaagatggaggaaaaatgtcccttttcatcactttgtcccttttcatacattcacatattcattttgccacaccttaaaaccaagcacccggccatatttcaatttttgttttggttagttgtcatgaagagagaaagagaggttgatagcttaaccatggcgaattgtttgatgttgctttctcgtggaagtgaatttgaggccacctactcaagcacttctatgagcaatcgtgtctttgagtgcaagacatgtaataggcaattcccttcatttcaagcacttggtggccacagggctagccacaaaaagcctaggttgatggcaggagatatcgaaggccaattgcttcatgattcacccccaaagcctaagactcatgagtgttccatttgtgggttggagtttgctatagggcaagccttgggaggtcacatgaggaggcacagagcggcgaatttgaatggaaacgtgcacaattctacggctacgagtagtagtagtgggggtagcagttttgattcatcgccaaagaagaaagctgacaacaagagagttttggttttggatttgaatctgacaccctttgagaatgatttggagtttttgaagattggaaagccaactacttttgttgattatttgtattgattgatctgttgagtactgttaattaaacttaggaaggtatagtttatgtatcatagatagatgaatgttttgtttttttttaatctatcgtctataatatttgtttatcattctgtctgaaaaattgctcatttcttgggcaaaattagaacttcatcatgatattctgagtcactgaaaaaaatatttgcaacagaacacaaaccaagccattttcaatccgctacgagagggaaaaaatacaaatggccatgatcaagctaagaacctagaattggaaattaatgatagaccaaaaaaagacacaaaatgaaggaaggaattcaattaagcgagaaagagagaacctaatgaaaaatgacgcttgagttcttgtttgttaccaagttcaagaagacgggcatcaaaatttgtaattgcaaccacatgtaatgggggtgcggacgcgtgg

SEQ ID NO: 29413 - DNA, 1079 bp, Glycine max
  Clone ID: TF_GmC45046_1
ccgctcgaggggcgcggggcggcggccaggcgacgccgcatcggggggggtggagcgtgcgaagggagagggggtcagtcaaggtcagcatagaaagactccctctcagttccgacgaggcggcgactctgcattcccacccacctaacttctctctctttctctctctagggtttcgccatttatccctaattaagctaatttcaatttcatttttaaggctgtgtttgaaagtgtgttcaatgggtactccggaattcccagatctgggaaagcactgtgctgtctcggattgcaagctcatcgatttcttgcccttcacctgcgattgctgcgtccaggtgcgtgcagagtgatattagtattctcatgtacaattaagtgcagggactgcacagtagagcattgtttaaagcatcggtccggacctgatcataaatgtcctggtcccacaaaggtggaatcaagtttttcattcatgaatcttttgaatgggagtaaaaagcaggagtccaaacccaagtcaagtgcaacctcatggagtacaagctttcttaatgcggcttctaacgttcgagcttcggctgaggctggtgtgtcaaagttaagttcctggcagacagcaaggggtggggttggacagagccatagcagtggtcaagtggagcaatgccctcagtgtggtgctaagttttcctcagttactactttggttgaccatgtgcaaaaagttcatgaaaggagtcgcaaccgatctggagcaaaggttacaattgatgtttgtccaaagtgtagtagaggatttcgagatccggtggccctagtggaacatgttgagagggatcacggtggaagttctagatcataggtacgagttgctattgttattgaatgaattttaacttgaagaaattgcatatttttgctataaatagtctggaggaatatagtgtttataaacatgaatttaattggaatacatcgagagtgtaaacattgtcattcaatcatgtggtaaaaattgtaaattgttgacttttcttgtaattactttaaaagtcatatttaaggtgatatat

SEQ ID NO: 29414 - DNA, 978 bp, Glycine max
  Clone ID: TF_GmC166190_1
ctttcttctccttcactttctccatccatttttagcgttcagtgcttttgatgcttctgctgtccttccagatcttgcacatcattcagttcttctgcttcttcttcactcagatttctgtggggtgttcctcatgtcacggaagtaaaggcaaaaggaggtttctcttcttacctatatgaacttttggtgttgaatttggttggtgtttaaattattgaagagtgtattggaggattgtggagaaggaagtgttgaggttgattgtggagttgaaaaggattgaacttgttttgttgattattgtttgttgaagtttggtttttttctcaatggctgtagaggagtctgagcctgtgattggggagctggaaagggaggagaatttgattgctgcggtaaggcatattgtgaaggcactggggccaaataagacccttactagtgatgccaagaaaattctggcagatcttggcactagattgtcctccatgtccgtacctagtgagaaggaggaggggaaacaagggcaagggaaggatgatggtgataatcatgatgctcttgtgttggaacaggatagggttgatgaggatgaaaaagaggctgatacagcaaaagcagcatgggtttgtcgggtttgtctgagttcagaggttgatataactatagttccttgtggtcatgtattgtgtcgtagatgtttttctgcagtgtcaaggtgtcccttttgtcggcttcaggttacaaaagctatcagaatttttcgtccgtaatatctccaatgcttttgtgatcattttatttggacattgtcagagttccattcgccaatataggctaactgaagttggctaagattaatcgggttacattggactctgacgtgaatattatgtttttgtgattgagccccaaaaatgggtactgttgaaattttctggtaaataggccccaagggaaaaaaaaaggtttggt

SEQ ID NO: 29415 - DNA, 1369 bp, Glycine max
  Clone ID: TF_GmC76336_1
ctttctgtctctgtttttggaattttgtgggacatctttgaatgagaaattctgtttttgttcaggagtctgttatctttgaatgagcaaacattcagtatgagcttgccctgtaaattccttcctatttgggaattaaaaattgaatattttttctatgttgttgaagtttcaaacatgatgcatcactggaatttttattttttttctagaattgagtcttttttcttcctcttatgcatcattttgtgtaaactttgtgagtgttgttttcatgttgtgtgggactcttttgttatttggagctgaatgctactgtgtttttcttgaagtggtagagttggactttgaagctgagaatttgtttaaagaagatgttgatgaactgcacctgtgaatttgcatgacactcagttggaaaattgaattagataacacttttcaatatccaaaaacttcattgatatgtttatgatggagtctttcatactaattctttaagcagagtttagcacttttctcatgtgagtgagattgtatgctttcttttcgcctctttgttagggcattaggctatccaagggacaaagatggaggatgctttcagatgaggatatcatacagtccagcagcccctctttttctgtttcttgttcaatggaccgattaccgcctcgccggtgctctgggtttgctgagaattctaatttatgtgacttatggaaatgggaagaatactatgtcaatatatgaaaggaaagcaagcattagacaattttactcgattatatttcctgctctgttgcaacttgagaaaggcatcacagatttggaggaaaggaaacagaaagaagtatatgcccttagataccaaaggaaaagtgagttcaatgagagaagacaatctgaaattgacattgaaagagaagaggaatgtggagtgtgcttggaggtgaaagcaaaagttgtgcttcctaattgctgccactacatgtgtttgaagtgctacagagattggtgtcagaggtctcagtcttgccccttttgccgggatagcctgaagagaaccaactctggggacctttggatttacactgacaccagtgacattgttgatgttgggacaattttcaaagagaattgtaagatgctgtttctgtacatagagaagctgcctctaattgttccagatcccagatatgtgttctatgatccacttctgagatgaaggaattgcctacagatttttggaaaatagtgtgtatgtttcactttacttgtacatgcattttagaccataatttaattgtgtatatatttaactggcttttttccaatcggcttcaagttggtgatttatttctaaccc

SEQ ID NO: 29416 - DNA, 568 bp, Glycine max
  Clone ID: TF_GmC110067_1
gggatgcttatagttacccttaattagattgacatcacccaagccatagtattagtaactcattcccctgcagcttcatgcaaaaattggaaaagaatggaagtacatttgtggtagggaaaaagtaccgccaagagaaaataacaactcacaaacccactcccaatgctaatttcctatcaaaatttccccactatctacatgatcccgcaaatcaaatcactataagacacatgtttataatatgcctaattatgatataatcttcgtactttgtgaataagccttcggcatataggacacactatgctctcctcatctaaaatcctctgtgcacagtcatagcaagtggcacaatgtccacaaggaacaaagaagctactgcgttgttcatcataacaaatgcaacacaatttttcatcatataactcctctgaagagctactggatgctcctgaatcttcttcttcatcatcttttgcatttgttccatatgtcaatcgatttgtctccacttgcatcaagggctgagtttcggtttgccttgcaactacattacttgttctgt

SEQ ID NO: 29417 - DNA, 900 bp, Glycine max
  Clone ID: TF_GmC1475_1
ctacggctgcgagaagacgacagaaggggatgagtcatgagatacacttttcagttcatgaaacacaacagtaatcctcaaattctctctctattcaaagagaaaaaatcatcgtccacttgcaaccaacacaatttggtatcaaaatgggcctgtcaagtctcccagcaccatctgaaggagtgttatgtgtgcttcttgtaaacactgccttgtctatatccatattcaaaggcattgttaggacaattctacaaattgtcggtatccgcgtttcgtcgttgtctccttcaccagacatctcccgaaacccacctgagccattagaattcaacctcagcccctcggagggtttcattgaagagttcagaagcaggacaccaacacttaggtttggcagcatgtgtggcagtaaacaacctcaacatgaatgttgttgtgtgtgtctcacaaagtttgaaccagaatctgagataaactgtttatcatgtggccatatttttcacaaagtgtgcatggagaagtggttggactattggaacattacatgcccactttgcaggacttccttgatgcctgaagatgatgcatcttgcttttggtaaaaaaacatgtacatataaaagaaaagagatatattcatgtacagtatatattgtatgtacatagttgtggcagtgttgatgttcccttggtcttggctctaacttttttaaccctttacttttttatgattgttaaagtgtgtggagggtcttgttttcctttgtttctctgtatctggtgttgccacatatgagtcgagggatctacttttttgggataattgtgtttgtccataatatcctcttgatatgtaaacagacatcatatacagacccttttgcttttgccacatgt

SEQ ID NO: 29418 - DNA, 2868 bp, Glycine max
  Clone ID: TF_GmC698_1
catgttactagtgcctttcatttccctcctcttctcaacgcattatatatttattcaccgacctcggttttcgtgctgcgttttctgcttttcataaaaccccatttcttttctctctatctctaagccaaagctcgaagcttttcaccatttgagatctggggttggagctttttcccttttctgggttgcttgcagcattttcgccgttagagttaagagacaccaaaatatgggaagcaagtggaagaaagccaaggtggcgctcggtctcaacctctgcatgttcgttcccagaaccttagacgacgattcgccgccgcacacggtggtttccgagcgcctctccgacgccactctcctctctccggccaactggagcaccagctcttcccgcccaaccacaccggtttcctcttttcacggtttgaaactctccaaaagtagcagcaaatcatccaagcaaacctgctcaatatgcttaaccaaaatgaagcaaggatctggccatgctatattcactgcagaatgttcacattcattccatttccagtgcattgcttcaaatgtgaaacatggaaaccaaatatgtccagtgtgcagagcaaagtggaaagaaatacccttgtcaggtcccagtttggatcctatccagggaagagtttcacctagtccagtaaattggccccaaaatgatgctttgatggcagtggtccaccgtgtgcctctacctctacctcatcctcaccgagatttgaataggaggcatgttgtgccactttatcaggcttctgagccaggcatatttgacgatgatgaatccttaaatcatcaacatgcattttctgagagaagcacttgtaataagagtactgaagatactgatgctgctagagcaatggagattaaaacgttcccggaagtatctgctgctccaggatccaagacttattctaacttcacggttttggttcatctcaaagctactgctgccgccgcagcagctgcagcaaaaagacaaaaccttagtagaaaccagactaacttggcgcagatttctcagactccacgtgcccctgtcgacttggtcacagtgcttgatgtcagtggtagcatggctggaactaagcttgcactactaaaaagagctatgggatttgtcatacagaacctaggttctaatgaccggctctctgttattgctttttcttccacagctcgccgcctctttcccttgtgcagaatgactgattctgggcggcagaaggcattacaagctgttaattctttggttgcaaatggtggtaccaatatcgcggaagggctgagaaaatgtgccaagataatggaagatcgaaaggaaaagaatccagttgccagtattatactgttgtccgatggtcaagataattacactgtcaatggctctggaaccagccaaccccaaccaaattaccagtttcttctgcccacttctatcagtggtggtgataattcaggatttcaaattcctgtgcatgcttttggattcggtgccgatcatgatgcttcactaatgcactcaatttcagagacttctggtggcacattttctttcattgagactgaagctgtattacaggatgcgtttgcacaatgcattggaggacttctgagtgttgttgttcaggagctgcaagtgggaattgagtgcacacacccaaatctcaatcttgtctcactcaaagcaggaagttaccctagccatttgatggccgatggatgcaaaggattgattgatgttggagacctgtatgctgatgaagagagggattttctagtttcagttaatgtcccagctacatccggtaatgaaacatcattgataaaggtcaaaaatgtgtacagggatccctgtacacaggaaacagcaacattggaaagtgagggagttaagattgagcggactgaaaatgtggggcaggttgtaatgtcacttgaagtggatagacagcgcagcaggctccaagcggctgaggcaatggcccaggcaagcagtgcagctgaacagggagacctaagcagagcagtacttatccttgagaactgtagaaagatgctttcagagactgtttcggccaaatctcacgaccgcctttgtgttgcattggatctgaactcaaggaaatgcaagagcggatggcaagtaggcatgtgtatgaagcatctgggagagcatatattctttctggattgagttcacactcatggcaaagagcaacagcaagaggtgattccactgataggtcaagtcttgttcaggcatatcaaacaccatcgatggctgagatgcttactcgatctcaggccatgttactaggtagtccatcagggcagaggcttctccagccactggtgtcatacagaccacaaccaagcccaaggtgatccaacagagattttgtgaaaaccatctaaaaattaagcccttccactgatttgcctttttggcttataaaatatgtgggggagggtggtagtaaacgggagtcataaacagaagatttctttgagctttgattttgttgtttaatgtgtaaaaatgaataagaagtcgaggaaagggtggagggttacttaaaaccaatggagggcagtagataggaatttaccacattatgtttcttctattttgtggggtttaaggtttttcttttggcttcacttttctttcctctaattatgccgtttttttgggggggtggtgtacatacagaagaatgcctttgttttttttctgggacacctgggtataaagtttgtagctgcgcaaatgattggttgggattatctcatcagtaatatatatatgttttcaattaagaaaaa

SEQ ID NO: 29419 - DNA, 1151 bp, Glycine max
  Clone ID: TF_GmC166190_2
tttctccttcactttctccatccatttttagcgttcagtgctcttgatgcttctgctgtccttccagatcttgcacatcattcagttcttctgcttcttcttcactcagatttctgaggggtgttcctcatgtcacggaagtaaaggcaaaaggaggtttctcttcttacctatatgaacttttggtgtcgaatttggctggcgtctaaatcattgaagagtgtattggctgatcgcggagaaggaagtggttttgaaactttgctctgataagaaacgtccggaagttgaacccgtaaatgggagcagcaatatggttggcaaggaaatattgccacaagatgcacgtcttgtgcagttccatccattgaggcccttttattctggcgaaatagtggcttggcggtctcaacatggtgaaaaactgaaatacggtaaggtttctgaagatgtaagaccatctgcaggtcaagctctgtacagacttaaaattgaagtttccccgggggatacacaaagtttcctttcatcacatgtattttcatttaaaagtgtatcagcaagcagtcccctaaaagaatcattggtgcatgaaagccctgtattaggcagtaacaggccccatgttgatttcccagagagctcaggaaggggagaaagctactctcaggtgcagcctgtgagagatcagtctggcaaagtttcagctgcagaactggtgcaggctgtcaatgaaatcctctctgctgctgggatcaaaatggacgtggaaaagcaggctctacttcaaagaacagtaaatttgcaagaaaatctgaaagagtctcaggcagctcttgtgttggagcaggaaagggttcaaaaggctacaaaagaggctgatacagcaaaagcagcatggatttgtcgggtttgtctgagttctgaagttgatataacaatagttccttgtggtcatgtattgtgtcgtagatgttcttctgcagtgtcaaggtgtcccttttgtcggcttcaggttacaaaagctatcagaatttttcgtccataatatctccaatgcttttatgatcattttatttggacattctcagttccattcgccaatataggctaactgaagttggcaaatattaattggctacattgaattc

SEQ ID NO: 29420 - DNA, 799 bp, Glycine max
  Clone ID: TF_GmC2979_142
cttactcctaaccttcttcctctctctatatactgaacaaaaacaaaaagagagttcagaatttttagatctcacctatttaactacctcgtaacattctcttctgtgtcctaatcggaactcgcaaagattttgttatagtgatctgatgccatcttagggtttttgaattgcgatgggtctgggaaacgatgacgatgacggagacacgctcaagtccttcggttcagtgtgttgttcgatttgcctcgaggctgttaccgataacggtgatcgatcctgggccaagcttcaatgcggacatcaatttcatctcgattgcattggctcagccttcaatataaagggggcaatgcagtgccccaattgtcgtaaggttgaaaaaggtcagtggctttatgctaatggttgtcgatcatatccagaatttagcatggatgaatggacacatgatgaggatctatatgatcttagctactctgaaatgtcctttggagttcactggtgcccttttggtaacttgacccgacttccttcatctttcgaggaaggggatttttcttcaactgcgtatcatgatgtactgggacaacatgctatatttgctgaacatacggctgtatcatctgctagtcatccttgcccatatattgcctactttggaccaatacatccctccaccttcaattctggtggaactgtttccgaagcttctaatttcaaccactggaatggtccacctgtacctggtgacatgccaacctcctacacatttcctgcagtggatcttcaattatac

SEQ ID NO: 29421 - DNA, 2112 bp, Glycine max
  Clone ID: TF_GmC2979_186
ccggccgggctcgggaaaaaagtaagaaaaacaagagaaagaatttttgctttgctaccatcccaatctcaatctcattcattcctccaactccaaaccttcttcccctctctctctctctctctactgaacaaaaagaaaaagtgagagttcagaatttttaaatctcacctatttaactacctcgcataaaaattcacgtaacattctcttctgtgtcctaatcggaactcgcacaaattttgttatagtgatgtgatgtcattttagggtttttgaattgcgatgggtctgggaaacgatgacgatgacggagacacgcacaagtccttcggttcagtgccttgttcgatttgcctcgaggctgttaccgataacggtgatcgatcctgggccaagcttcaatgcggacatcaatttcatctcgattgcattggctcagccttcaatataaagggggcaatgcagtgccccaattgtcgtaagattgaaaaaggtcagtggctttatgctaatggttgccgatcatatccagaatttagcatggatgaatggacacatgatgaggatctatatgatgttagctactctgaaatgtcctttggagttcactggtgcccttttggtaacttgacccggcttccttcatctttcgaggaaggggatttttcttcaattgcatatcatgatgtgctgggacaacatgctatatttgcagaacatacagctgtatcatctgctagtcatccttgcccgtatattgcctactttggaccaatacatccctccacctccaattctggcttaactgtttccgaagcttctaatttcaaccactggaatggtccacctgtacctggtgacatgccaacctcctacacatttcctgcagtggatcttcattatcacagttgggaacacaattcctctcatttctcttctgccaacagccgtctaggcacctcagaacagacctcggtatcacctggtagtcaaaggcctgcccggggtggttcagatgtccctagatccgggtcttttatgcatcccttccttgttggtcacagttctgctgctagggctggaaactctgttgcatcttcaatgatccctccttatccaggcagcaatgctcgggcccgtgatagagtccaagctcttcaagcatattatcaacctcagcaacctcataattctaccacaatacggacacctgttgcttctagcactcgaagatccagtagtcatagtgggcctgttcaattagcaccagtggcctcgccaccagaccaaagtgctggcttcgtatatattccatcaggttcttcaggacgcaattttcaggaagaaacccatttgccaagtcgattccatgcttgggaaagagagcacttgccttcattggcgttaaacaatgttggtagagaatcaagttggagagcataccaccagactgccagtgtgtcagacccaagtatcagatccagcagctttcgattaagacacgaatccgacagaatgccttcacaaaatcggtgatatacttgtttttatgtcaaactacagttattgtggaaaatcaaaatttatgtatgattgagaaacgttacataatgcttttagcctggctggcgtgttatgacagactttatactctggctggccttggaattcatctttctggcagccgtgtggcagtgtgatggacattggtctcctctagtttctttgccttggagggcataaaataagatcgtatctagttgggaaaatcaggtttgggaagaaatactggtgcattgtcatctcaagtgataaattagtggatgagagcatttgtggttgttggatttattgtagtgggtaaattatttactttgatatcgatgctcatgcaaatgctgtgtatcgagaatatgcttaatcttaccactgctcagtggcaatgtgattatagactactattattgtgcaagagctgaccccagtgattctaaacttgcttagtttaggataatttcaaggctgatttaacgaaataatctttaatttttttattcgtaggaattattcacgatattacaagatttataatatatcatagttagttat

SEQ ID NO: 29422 - DNA, 1891 bp, Glycine max
  Clone ID: TF_GmC9820_1
atgaattcccgggtattgtgcgtaagtgcgagagagagaggtggtggaaagctggttaaacattcgcaatcccgacacaccgccaaaaaaccctcgtacccggtttcgatttccaatgggttgcacctgacctaggtttccacctttctcttccttcatatctttgtcccttcttcccattcctcttctcttctcactcccaacaattcctcaattctccctccatcacacgccatgtccaacagggtttgcaagttctatgcccgtggagcatgtttgaagggggatcaatgtgattttgctcatgagaaaaaggatgatatttgcagctattataaaaaaggatcctgtgcttatggtagtagatgcagatataagcatgtcaaagcttctcaagcgtcatcttcagcaaatggacgccattctcctgttttggatcctgttgtgaatcataccattaaaggaacatcaagttgggttccaaaggctgtgaagtcatcttcatcggacaagcgtgcaaggagctcacaacaaaagaatctgccctctcttgaaaatgatgttggtcaatccagtactagtagtgttataccatctgaacatttgttctgtgcatttgctgctgccaactgcccccttgaagataaatgttctcgcattcatggaaatcagtgcttatactgtagaaaattttgcttacatcctactgatcgaaaggaaaaagaaaaccatttgagaacttgtgagaaaaaggaaaaataccttcaggctttgaaagatagtcaagaagtagagtgcaatgtttgtttggaacgtgttctgtccaaacctaaaccagctgattgtaggtttggtctgcttcctgaatgtgaccatgctttctgtttatcctgtatccgcaattggcgtaatagtgccccaacctctggaatggacatcagtaatgctggcactgctaatacagtcagaacctgtcctgtttgtcgcaaactatcatattttgtcattccaagtggtatttggtattctactaaggaagaaaagcaggaaattattgacaactacaaggcaaactgcaaactaattgattgcaagcattttaactttggaaatgggaattgtccatttggggctagttgcttctacaagcatacagtgaagcccggctcttacacatggatacatcacaggccaccacctcaacgtagacagaaccattttgatgtgcatgacatgttgaacatgctccaggatgttgacttaacaagtgcagaatatttttccatcatgagggactcggacctttatgatgatatggatccattcgagatgatggtatctgataggcttgctggtgattcaggtccttgtttaggtccttttgattctgatgaggaggacttggatatttttcagatggctgcattgtcagaagtgctggcttctggtgtggatgattttggtcccgaagatttcggtgatgaagatttcaatcctatggaggctgccttgttatcaatgatgatgcattctaatatggaagatgaagatgacgacgatgatgaagaagaatacagtgatgaagactactagatttacttagttcatataaaacccatctatagaccagttgttgaggtagttatctttggcagtatggtatcctatcactttgctttgaaaagtattgggggcaggaacttcaagatttattctcgtttattttgcttatactcatgcctatacctggtatttgtgatcatatgccattttgtatattttctaatatcacgctattgaaggagttttggcttgagggttttgcttagtcttgtctcactgaattgcatgttttgaattgtgattgcgctatgtataaatatggcttgtt

SEQ ID NO: 29423 - DNA, 883 bp, Glycine max
  unsure (1)..(883): unsure at all n locations
  Clone ID: TF_GmC181123_1
ttnaccggtggaggcgggttaagtaccccctcagtaaggacttctgtacagaaaaattgtttttataaaaccccttgtaagtacaaattatggggagaccttctccacggtccgacaatatatacataccccatcgtaaaattaagaatttgtactaaaagatgtaagagctttatggaaactaatcctaagactagaacccagtaaaagctgaaggggtggagcatttccttttcttttctacttattactagtcagcagagtatcaaatcagggtcaagcttgttttgagcgataatgcacctcaccgttgtccaatctttatctcaaaaaggtcaaaccaatgtatcacctctaaggatattaaatttgcacagcgggcaagtagcttttgtccgaagccaacggctgatgcatccacaatgaaaatggtgtgtacagggaaggcgatacagttcttctccttcaacatatggacacagacagatacagcattcagaatcatctggatggagagaaagctcactcatatggcttccattgcatgaatctactcttactttaacaagttgcttcttgttgtcatcaaccatcaccaatgaatttgacaggctaaacctatacataggaagtgacctgatatcttcttctgatgcaccttctctgattctcatagcataagctaatgctattattgggatgatgcagaagagagcaatgaaaactatacatgccatccccatgcaaaagataataaaaaatacgtcaaaggctagaaagaccactgttaacccaatctttcacatgatctgtctctttttgaacccatacacaacaaggaaccacctgtaagctccccaaaatagaccaggggtctaaacac

SEQ ID NO: 29424 - DNA, 1072 bp, Glycine max
  Clone ID: TF_GmC225551_1
ccacgcgtccgcaaacagaaacacacaacactcggtttcggttcatgctcgaagaggtcctctcgattcagatcatccacaacacatcacaacagaaacttcctctggcaaatctaccataacccacgtcaaatcctcacgaatctcaccgacccattccctattatcatccatctccaccgatcgctaccattaccaacagcagcttcatccattctccacgcacgcttcttccttttctttctcacaccgcgcgttcgtgttcttaatgcagaccctgattgcaacgaaatggacgtaaatttgggaggtgcaggcgcggtgacagcatagcatagcatgcagcagcagcagcagggagtgagcgtgcgaggagggaaggaggagcagcagcatgtcaaatcaggtggtgaaagtgcgaagggacacgattgcagcatgcatgacttgcccactctgcggcaagctcttcagagaagccacaaccatatccgaatgtctccacacgttttgcaggaagtgcatttatgataaaattacggatgaggagatagaatgttgtccaatatgcaacattgatttggggtgtgttccactcgagaaactgaggccagaccacagtttgcaagatgtaagggccaaagttttccccttaaaggggagaaaggtgaaggcacctgaagttgtcacctcagtaccattaccagctaggagaaaggagagatctctttcatcttttgtggtcagcactccaagggtatctacacaagcagctatgacaggaagaagaacaaaacctacaagaaaggctagtggtctgcgatccactagtttttccattgaaaagcccattaaaaaagaggaagatttgctggaagatcgtcctgatagttcaagttcgcctgacacttcatataagtttgctcagaattctggacagagtatctctccttgtgagggtagtcaatccataccatataaaggatcagagaatggtgccgaaccatgggatgcaaaattggatctttggaaaccttagaatttcttaatagaagttgcaagtaggagtaaa

SEQ ID NO: 29425 - DNA, 2622 bp, Glycine max
  Clone ID: TF_GmC842_1
cggtccggattcccgggtcgacccacgcgtccgctctctctcttcattcttcgttaccatacataacaaactctctgcattctcacttattatttctctcttctattcgtctttcaatgctcagagctattcaaattcaaacttttctttgctccgtcaccgtgtcttcccattactgcttcaagatctgtctttcgccaaccaaatcaaatgggaagcaaatggagaaaagtgaagctcgctattgggatcaacatgtgcgttcaagtccctaaaaccgtcgaacattcctcttcctctatcagctccgccacccccttctccgaccgcctttcgccgtccggcgatgcctccggccactgctccgtctcttcgataacctcctccgcctccgggctccgcctctccagatccaaatccaactgctccaaggggacatgtgcaatttgcctgaactcaatgaaagcagggcaggggcatgccatttttactgcagagtgttctcactctttccattttcaatgcattacatctaatgtaaaacacgggaaccggatttgccccgtctgcagagcaaaatggaaagaggttccttttcagagtcgttcttctaaggtctcccatggcatcaaccgagtaaattcaccgcgaaatgattcctggacaactctactagggagggttcctacccaacaagctagtacagctccacaacttgcatctcctaataatgttgctgaaccagctatctatgatgatgatgatgaagtcttggatcaacaaacttcagttaccgaagatatggatgaagctgttcacaatctagtaaacacaatggagatcagaacatatcctgaagtttcagcaattgcaaagtcagcctctcatgataacttcgctgtattgattcatctcaaagctccccctcattcagggagactcagtaacaacactgaatcatcagctcaaaattctcgtgctccaatcgatcttgtcacggttcttgatgtgagtggcagcatgtcaggcacaaagattgcactactgaaacgagctatgggttttgtcatacagaatctgagttcatcagaccggctttctgtcattaccttctcttgcacagcccgccgcatctttcctcttcggaggatgactgatgctggaaaacaggaggcactgcaggctgttaattctttggttccaaatggtgttacaaacattgttgaaggcttgaggaaaggtgccaaagtgtttgttgaccgcaagtggaagaacccagttggcagtatcatattactatctgatggacaggattcatccataaacagtagcagaatcaatgttgtaaatgattaccggtcacttgtcccgtgctccattcatcggaacaatggaatgggtctgcatataccagtgcatgcatttggctttggtgttgatcatgatgctactgccatgcactcaatctctgagatatctgggggtactttttccttcattgaagatgaggatgtgattcaggatgcatttgcacagtgtattgggggactattgagtgtggtggttcagcaattacacgtagaagttcagtgtgttcaccgttgtctgcaacttggttcggtaaaagcaggaagttaccaaactagcttgattgacagtggaaaaatggcatctatcaaggtaggagatctgtatgctgaagaagaaaaagactttttggtgacagtcaatgttccggtggataagtctagtgatgagatgtcgttgatgattgttagaggtatttatagggaccccatcacaaaagaaatggtggggttgggagtaaatagtgaagtaaagattcaaagacctaatgtagctagagatgtagttatgtcaatagaagtagacaagcagagaaacaggcttcgagctactgaggcaatggccgaggctagagttaaggctgaacgtggtgatttgtctgctgcagtttctgttctagaaagatgtcagcaggcattgtctgaaactatctctgccaaagctggtgatgaactatgcatctctcttgctgctgaaatgaaggagatgcaggacaggatggtgaaccaacgtgtttatgagcagtctggaagggcttatgttctctcaggattgtgtgctcattcatggcaaagggcaactgcacgaggagattctacagacagcactagttttgtgaatgcatacagaaccccttccatggtagacatggtttcacgttcccaaaccatgcttttgaggcctccacaatctgcaaatgccgtcaaacctgctagatcctattctgaccggcagcgaagaaaatagtaatgcaaactgtttgaaaatttctcctcagaaaagtctaatgcatacacttttctgtggagacctttaagtttcttttcttttacttatctttcccttatggttttagaaagatgggggggtataatggaaagtggtaaggaatgagttctaagtgtctttcgttgaattgtacgtcttctggagaagagagtataaagtaacgtagtagtggagatatttgagagaatttcttcattgaattacatccatggtatattctacatacttctgattcttttaaaaccc

SEQ ID NO: 29426 - DNA, 2280 bp, Glycine max
  Clone ID: TF_GmC504_1
aattcggctcgagggggacctgtgcaatatgcctttacacaatgaaaccagggcagggacatgccatttttactgcagaatgttctcactctttccatttccattgcatcacttctaatgtgaaacatgggaaccagatttgccctgtctgcagagcaaaatggaaagaagttccttttcagagtcctgcttcaaatatgccctatgatcgactcaaccaagtatctcctcgggaagaaggctgggcgactgtcttacggaggcttccttctcctcaaggtgacgctgctcggcagatttcatcactttatcatgtcactgagccagctatttttgatgatgatgaagccctggatcaacaaacttcagttacccatcctaaaaacgagattgataatgatgtaataaatacagtggagatcaaaacatatcccgaggtttcatccgttccaaaatctgcctctcgtgatgcctttgctgtattaattcatctcaaagctcctcattcagggagaaaacaaaatattgatgcaaacagtactgaatcatcacctctggttgaaaactctcgtgcctcagttgaccttgttacagttcttgatgtgagtggtagcatggctggtactaagctagcgttgctaaaacgagctatgggttttgtcattcagaatcttggtccatcagaccggctgtctgtcattgccttctcctccacagcacgccgcatctttcctctccggcagatgactgacactggacggcagcaggcattacaggctgtcaattccttggtttcaaatggtgggacaaacattgctgaaggcctgagaaaaggcaccaaggttttttctgacagacggtggaagaactcggttagcagcatcattttactctctgacgggcaggatacatatacagtcaatagcaggcctaatgtcggaacagattacctgtcacttgttccaaactccattcatcgtaataacggtacgggcatgcagataccagtgcatgcatttggctttggctctgaccatgatgctactttgatgcattcaatatctgagatatctgggggtacgttttctttcattgaagctgaggatgtcattcaggatgcatttgcacagtgtattgggggactcttgagtgtggtggtgcaagaattacaagtacaagttaggtgtgttcaccctcaattgcaacttagttcagtaaaagcaggaagttaccaaacaagcttgatggggaatgcaagactggctactatcagtgtaggagatttgtatgctgaagaggaaagagactttttggtgacagttaatgttccagttgatcaatcgagtgatgagacgtcgttgttgaccgtgagatgtctttaccgagatcctataacaaaagaaatggtggctggctcgagaaacagtgaagtaagaattctgagatctgatgtcggtggaggagaactggttgtgtcaatagaggtagatagacagcgaaacaggctgagagcagctgaggcaatggcggaggctagagttgcagccgaacgcggtgatttgtctactgcagtttcagtcctggatagctgtcacacggcattgtctgaaactgtttctgctaaagccggggatcggttatgtgttgctctttctgcagagttaaaggagatgcaagagaggatggcaaaccaacgcgtgtatgagcagtctggaagagcttatgttctgtcaggattgagttcacattcatggcaaagggcaacagcacgcggcgattccacagacagcaccagccttgtgcaagcataccaaacaccttccatggttgacatggtgacacgttcccaaactatggtttttggagcgccggtgccgcaaaataaacgtgtcctcaggcctgctaaatcatttccggagaggcagagaagacaataaaaatgagtttggaaaattctacttggcctatacatatacttgtggggaaaccttcaagtttcttatcttattttacccttttgtttttggtttttgtcaaggtggggtataatggaaaggaaggaattttaggaggacaaaattcctgattttgccaaaaatataaaaagtgtaaatgggctggtgcagagaatgaatggcgaaaaggaacaggttgaatatttcagtgtgattctgagtgatgtacataacctattgttttcgcttgaattgtgcgggtgaatttcatcatcgcttgattatatacatatggtataatatatttgcttctgattcttttcat

SEQ ID NO: 29427 - DNA, 895 bp, Glycine max
  Clone ID: TF_GmC504_2
aattcggctcgagaaaaaagccaaactatctttctctttccatctctctctctttctctctcattgattacagccaccgttttctctttcttccaacttgctttggttcctctcctcaactaaagcctattcccttcttctcacccatgtccatttgtagcatgttttctcttgagcacttcaaagttcaaatctttcacacacactcattcatctccaacctccacacccacttgggtcacttctagaagatctatctgccaacccttttggctgaaaaaagaaaaaagaaagaaagaaaataatgggaagcaaatggaggaaattgaagctggctcttggtttggattcctgtgttcacattcccagagcctttgatgattcctccgccgccgcagcaaggttttccggcggcatctcacccaccgtcgtttcgccggccggtgacacctccggctaccgtccctccactcccacaccatcgtcttccggcctctggttacccaaatcgggaaccaaatcccctaaggggacctgtgcaatatgcctttatacaatgaaaccagggcagggccatgccatttttactgcagaatgttctcactctttccatttccattgcatcacttctaatgtgaaacatgggaaccagatttgtcctgtctgcagagcaaaatggaaagaagttccttttcagaatcctgcttcaaatatgccccatgatcaactcaaccaagtttctccccgagaagaaggctggacgactgtcttacggaggcttccttctcctcaagtgatgctactcggcagattcatcactttatcatgttaccgagccagctatttttgatgatgatgaagccctggatcaacaaacttcagttgcccatccaaa

SEQ ID NO: 29428 - DNA, 2231 bp, Glycine max
  Clone ID: TF_GmC23859_1
cgattcggctcgagcgatccttttcccataaagattgctgaaaatgcccttctgtctttcttacttctccttaagcactgtaaacttcaacaagatgaagagagagataatttgaatacatttaaatcagaaaaattggattctgttaaagatcggattctagagggtgtccttcgcctactattttgtactggtgtatctgaggctattgcaagtgcatgctacaaagaagctgcctcagttattgcatcatcacgggttgaatatacacacttctgggatttggtagcttctggagttgttaattcttcatcacaagctagagataaagcagtgaaatcagttgaattttggggactaaggaaagggtctattagctctttgtatgctatactttttacttccaagccaattccttcattgcagtttgcagcatattttgttctttcaaatgagcctgttttaagcattgctgtccttgaagataatgcttgtaactcaaacatatatgctgctagtgaagaggatatcagccgtcttgacttgccaatagaagaaaaagtccatctgaaagaggaaatatctttcatggtagaaagggcaccttatgaggttcttgatatggacttgcttgcagaccaacgagtaaatctcttccttgcatggtctttgttgatatcacatctacagtcattaccttcatcatcatctcaaagggagagactgatccagtacatacaagactctgctactccagttattttggattgcctttttcagcatattcctgtagagatttccacagttcagagtctaaagaaaaaagatgcagagctttctggtggcttatcagaagcttcaagtgctgcaacccgtgccaccacaactggttcactcttgttttctgtggaatctctttggcctgttgaattggggaaaatttcatctcttgctggagcaatatatggtttgatgctccaggttcttccagcctatgtacgtggctgggttagtgacttgcgtgatcgtaacacttcagctgttattgaatcctttacaaggacttgttgcagccctcctctcattgcaaatgaattgtctcagattaagaaatctgactttcgtgatgagaatttctcagttagtgtaagcaaatcagcaaatgagattgttgctacttataccaaggatgaaacgggaatggatctagtcattcgtctccctgcatcttatccactaaggcctgtagatgttgattgtacaaggagccttgggattagtgagaccaagcaacggaaatggttgatgtcaatgatgctatttgttcgtaatcagaatggagctttagcagaagctataggaatttggaagcgcaattttgataaagaatttgaaggtgttgaggagtgcccaatctgttacagtgtaatccacaccacaaaccacggtcttcctcggcttgcttgcaagacatgcaaacataaatttcattctgcttgcctttataaatggttttcaacttctcacaaatcatcctgcccattgtgtcaatctccattctaaggatacacctggagtgatgaattttaccaattttgcttgctggtgatatcttgaactgaaagtagtggatgaagagaacgtctcgacgtatgagaatcaacgctaatctccagcattgagaatcaatgctgattaaggcagggatgacttacaaactacaactggttaacgaaacaaacatgatttccagattcttttctccactaagattcattttaagcatatagctttcaactccttgaaattgaagaggaaggtgaacaatggttttgcggtaacaacatgggtgtatcatattttcctctcttgagaggtggatccgattcctttagcttgacaaatttatcctctctaattagatttttttccccatggttgtcataattattgttttgcagtgtttttgttctgttaagaggttagttcttatcaaaggaggttatcagaatcagagtggcttgtacatctagattatttatattggccatggaatcactcgagctaaggagcatgatttgcctaagtaagagtaattgttcatctagaaactatatctttattagccatgagaacattaaagagcagtatgctccacgaaatgcgtactatgcgttgtccacacaaatgatttttggtcagcaaaatttactaatcgaccattgatttgc

SEQ ID NO: 29429 - DNA, 2265 bp, Glycine max
  Clone ID: TF_GmC61_1
gttgggtttgttagtagtgtatgtatggcgtgtgtattgctttgcttctctttctctaagtctttgttcacgctctcttcttttctttgtcttggtctaatacataacaacacacaaacccaacaagaacaacattgaacggtgccggcttcatctttacgtaatttttgcggcaacaatcgaatcccatcttgcgatttcgcctcctcaaaccccgcgagttaaattccctccccagatccatattgcttcgacgtcgaatcggtgtggtacggtgtgttttattcattagacaagattggaatgcaagtttaattgattaatactaataatcaatcatcgtagcgagatggtgtcgccgagccaggtggtgaaagtaaagagaaatacgctacgaccatgcatgacatgccctctctgccacaagttcttcaaagatgccaccaccatctctctctgccttcacaccttttgcaggaagtgcatatatgagaaactctcggatgaggagatggattgctgtcctgtgtgccatattgacttaggctgccttccggtggagaaactcaggccggaccataatttgcatgatataagggcaaaaatattcccttttaaaagaaaaaagatcaaagcccaagaagttttgtcttcaatatcattgcctgcaaaaaggaaggaaagatcactttcatcattggtagtcagtgctcccaaagtttcaatgcagcctggctttacaggaaagagaacaaaaagcagtacaagaaaggctgctgctttacgtggatgcagttttcttctcgacgaatcaataaagaaggaacaaacaaatggtgatgataatatggattctcccatgcctgagcattctaagaagcataagccccatgaagatacagagaacagtgtgcaacatacagaagggaaggttgatctttggacaccactgaactgtcttgttgaagctgccaacagaacaaagtcctccaggtcaaattcacaagcaactcctcttgccaaattagagtccccaactactcctcatggtggacaggatgcatctgaaactacaaccaaaacagacctacctgcttctgcccagagtgaattaaacattccaaaatccaaaaataaggatactggacttaaaccaatatttggagatgacaaggatgcaaacagcttgcctttaggaccagtgaagcgaagaagattgcgtcctgctggtcagaaaagggttgcagcatctgagatgtctgcctcatccccagccccactcgatgcaacagggggcaagtgcaacagaaaaaacagtcctatttggttttcattagttgcttcagaggaccagaaaggagattttcccttgccacagatctcagcatgttacttacgaataaaggatggtactgtgcctgtctcatttattcaaaagtaccttatgaagaaacttaatcttgccagtgaagcagaggaagtcaagcaacatattgcaagccttgtggacattgtctgggggctgaggctatcttgagaaattagtacaactttgtatgcttctacataatatattacaaatgcacaactacgaacaactgggtagaagagaaatagagtctccactggcatgatcccatgcacccacatgattagctatgtaatgaaaatgaaaatattggaaacaaaattctcgtgttgaagttttaacaagtcaccaagtaggcactcggtgctgaaataacattgaaggtggaaataatgtgccgaggtctgccagtgctcccatctttacaactgcataatttagtagatctatggttccggacagcatcaacctcaaaaaagataccagcatcagtggggtcctcagccaaagattttgtaatggttttatcatattgtcgaaaggccttgcctccttgacaaagtttcctattctatctatatatcattttccctccgctactttacatacatacacaatcaactgttttgatagcattctcaccgatattactgcttagagatttgttcatttagtagcatgcgaggaatctatgattttgttttgctcatgactgaatatgtgcagccagcaattttcagttttcttctgcttcatttgctgctgttctttggatcatgattactatttccttttgatccaatgatgcctttccccttagtaagaatcaaaatgagtggttataaatcaggaagtactctaccaaaatttctctaatccaagatgcaatcattttc

SEQ ID NO: 29430 - DNA, 1739 bp, Glycine max
  Clone ID: TF_LIB3109-041-F10_FLI
gacgtcgaatcggtgtggtacggtgtgttttattcattagacaagattggaatgcaagtttaattgattaatactaataatcaatcatcgtagcgagatggtgtcgccgagccaggtggtgaaagtaaagagaaatacgctacgaccatgcatgacatgccctctctgccacaagttcttcaaagatgccaccaccatctctctctgccttcacaccttttgcaggaagtgcatatatgagaaactctcggatgaggagatggattgctgtcctgtgtgccatattgacttaggctgccttccggtggagaaactcaggccggaccataatttgcatgatataagggcaaaaatattcccttttaaaagaaaaaagatcaaagcccaagaagttttgtcttcaatatcattgcctgcaaaaaggaaggaaagatcactttcatcattggtagtcagtgctcccaaagtttcaatgcagcctggctttacaggaaagagaacaaaaaacagtacacgaaaggctgctgctttacgtggatgcagttttcttctcgacgaatcaataaagaaggaacaaacaaatggtgatgataatatggattctcccatgcctgagcattctaagaagcataagccccatgaagatacagagaacagtgtgcaacatacagaagggaaggttgatctttggacaccactgaactgtcttgttgaagctgccaacagaacaaagtcctccaggtcaaattcacaagcaactcctcttgccaaattagagtccccaactactcctcatggtggacaggatgcatctgaaactacaaccaaaacagacctacctgcttctgcccagagtgaattaaacattccaaaatccaaaaataaggatactggacttaaaccaatatttggagatgacaaggatgcaaacagcttgcctttaggaccagtgaagcgaagaagattgcgtcctgctggtcagaaaagggttgcagcatctgagatgtctgcctcatccccagccccactcgatgcaacagggggcaagtgcaacagaaaaaacagtcctatttggttttcattagttgcttcagaggaccagaaaggagattttcccttgccacagatctcagcatgttacttacgaataaaggatggtactgtgcctgtctcatttattcaaaagtaccttatgaagaaacttaatcttgccagtgaagcagaggtggaaataatgtgccgaggtcagccagtgctcccatctttacaactgcataatttagtagatctatggttcccggacagcatcaacctcaaaaaagataccagcatcagtggggtcctcagccaaagattttgtaatggttttatcatattgtcgaaaggccttgcctccttgacaaagtttcctattctatctatatatcattttccctccgctactttacatacatacacaatcaactgttttgatagcattctcaccgatattactgcttagagatttgttcatttagtagcatgcgaggaatctatgattttgttttgctcatgactgaatatgtgcagccagcaattttcagttttcttctgcttcatttgctgctgttctttggatcatgattactatttccttttgatccaatgatgcctttccccttagtaagaatcaaaatgagtggttataaatcaggaagtactctaccaaaatttctctaatccaagatgcaatcattttc

SEQ ID NO: 29431 - DNA, 1594 bp, Glycine max
  Clone ID: TF_GmC5904_1
ctcacgcgtccggtggtaagaccgacatccgacttctcctccggcatttgctatgagaatgaatgaatgaatgatacaaactaagcgacgactgacgtggtggattgtggaaacgcaaagagcaattgttccgagaatgagcaattaatgaatgaatgatcactgtcgcctcaggcgccgtccttaccctcttttatttctcagccagctctctctttcctccgtgcgcttttcggctcgccctccgtctccgcctccgtccgcccctccctccaaatcgaccgaccccccgacggcgctccgggcgctaccgcaattccctgctgcaccgtcgacgccaagtcggccgtcgatggcacctggaaaaccctgagaccaggtgtattggtttctcgcgagtccggcgataaaggtgttattcttcaaagaactcaaacgtgtatatacaatgactggaaaggcttattgggatggacttctgatcttcgagccatatgtgcaagatcttggagacagcaagagtctacatctttaaggaaggtgccttttcttctaactgatgttggacggcggccaaatgctgagtatgttgttgtaaacatggatggctcaagacatcctttacctttgacaacagtctatcataaattgcaaccaataactgcttctccttatacttttttgcaagcactttttgggcatgaatatccggttggactactagatgaagagaaaattcttccattggggaaggatatcactgctgttggcctttgcagtttaaaaaatggaattgctgaaattaagtcgtgcaaatatctaccatattttctgtctgacttgagtaaagatcagatgatagtggatctttccatcaagacaaaaatactgttttggggtggtattgctcttggttcaatgtcagttggggtacttggctatgcagttttgaggaactggattaagtggaaacggtggaaggtacagaggcagctccagcaacaaaggcaagcggtgagtgatgctgaacctcaggtggatgatgagattgaagatgttccagatggacaattatgtgtgatatgtctgatgaggagaaggcgttctgtcttcattccctgtgggcatcttgtgtgttgccaagggtgtgccatatcagttgaacgtgaagttgcacccaaatgtcctgtttgtcgtcaggagattcgagattcagtgcggacttatgaatcttgaacagacacagactgatttttctgttcactctgcggcaggaaacttttatgactgctattgagaagagtgtttgttttttactatttctataagatctggaatatggagttttagggaaaacttgcctctgctcttgtttcctgtgaacttattactttatctggtgtagatatttgaacttggtttagataggttggtcgaggttaattcgtagtctcctcacttctcactctgcaaggtcttttggggaaccttgtaggattttccaattatcccagttgctgtgtacataaacatttaattttgcctaacacctatagaatgaacactgatatgttcttgtgcagttgtgcaagtc

SEQ ID NO: 29432 - DNA, 804 bp, Glycine max
  unsure (1)..(804): unsure at all n locations
  Clone ID: TF_GmC5904_3
agtttaaaaaaggaatgcttgaaattaagtcgtgcaaatatctaccatattttctgtctgncttgagtaaagatcagatgataatggtctttccatcaaaacaaaaatactgtttggggtggtattgctcttggttcaatgtcagttggggtccttggctatgcagttgtgaggaactggaataagtggaaacagtggaagcaacagaggcagctccagcaacaaaggcaagcggtgagtgatgttgaacctcagatggatgatgagattgaagatgctccagatggacaattatgtgttatatgtctaatgaggagaaggcgttctgtcttcattccctgtgggcatcttgtgtgttgccaagggtgtgccatatcagttgaacgtgaagtggcacccaaatgtcccgtttgtcgtcaggagatccgagattcagtgcggatttatgaatcttgaacagacaggctgattgttctgttctctctgcggcagaatcttttatgctttgctaatgagaagaatgttgtttgctttttatttcgataagatatggaatgtggagttgtagggaaaacttgcctttgctcttatttcctgtgaacattcatctggggtagataataggttgtcgaggttaattcgaagcctcctcacttctcactctgccaggtcttttggggaaccttatacgcttataggatttccagttatcccatttagtgtacataaatatttaatattgcaaaagtcctatagaatgaactctggtatgttattgtgcatgtgatgttacttgtagactat

SEQ ID NO: 29433 - DNA, 711 bp, Glycine max
  Clone ID: TF_GmC1470_2
ccctaacaaggggggggttgcttccatgctttatatattaaatttcgcacatggatcccataggtgccccaaaactttcacaaagaaaagaactccaagagtaatttgccagttttattatatgaacaatatccttactccttagttacgaaataaagagcgcaccagaagatctatcagagcagaaatctagttctgctaccaatctgagaatgtattcaacctattgccatttaaaagcaagaacaacacagaaaacaacaaatagaagcagcttcttcaaataataatcttgttgcccttgatgggtgcgcagagggaatccatgagcatggacaccatgaaatgtattagcaaatccatgtggaaaaccagcccctcccccatacatggccgcatcatgaaacccatgcatctgaaagttgaataaggatggtataaaaccaccaaatgctgcggacaatgcaaaattcccaaatcttgttgttgccatcggcggtggcacaaatccccccaagcccttcctacttcaacaacaataataacagcgatgctgccaattttgaatgcaacatttgctttgaattagcgcaagacccgataattactttgtgtggtcatcttttctgctggccttggctttacaaagggcttcactttcactcacaatcacgagaatgcccggggtgcaaggctcttgtgggggaggag

SEQ ID NO: 29434 - DNA, 463 bp, Glycine max
  Clone ID: TF_GmC27292_3
tcccacgcgtccgattttttttctctcacacactcaaccaaagacgaaggaagaagaagaattacaaagtaccaccaaacaggctgcgacgacgtcgttctttgcaacttccagttcttgttcttgatgaatatgacaccagtttgcccctttgtcaaagctgctcgccccgatgataacaatgcctctaagaaatctggcgaaaactctatgaaacatcaggctgagtctgagagtaaggtgaagaaagaggttaatgactcagctagtacctcaccaaagtgcccttttggatatgattcacagtcgtttaagattggtcctcttagctgtacggtgtgccaagcacttttatttgacaccagcaaatgtgtaccttgttctcatgttttctgcaaagcatgcatatcgcgctttaaagactgcccgttatgtggggctgatattgtgaagatcgagcctg

SEQ ID NO: 29435 - DNA, 2036 bp, Glycine max
  Clone ID: TF_GmC27292_1
cttcagcttcgcttcagttctatcaacaccttcgtcaagccccacaccgctgaattcgaactccacgataatcagtgggagcaacacagaagacgagagagaccaaagctatgacagtagtaacatgttgaaatttgaaatcccagatattttagatgtgaatgagttcatgtaatgtgatcagatagatcttcaatgattaaatcgaccaaaacgttgatcgattatatcacatgtcccccaattgtttttcttttctgggatagcttgattatggatccatgatgtaggttcatacctgtaacatttcttaattttcattattgattaaattttcaaaaaagaaacatcttctgcctcgcctcctttttcactctcacacaatcaaccaaaaacgaaggaaaaagaagaaccacctgcaacgacgtcgttctttgcaacttccagtttcttctctctgtctcgtttacctcgatcctgttcttgttcttgatgaatatgacaccagtatgcccctttgtcaaagcttctcgccctgatgataacaatgcctctaagaaatctggcgaaaactctatgaaacatcaggttgaatctgagagtaaagggaagaaagaggttaatgactcagctagtacctcaccaaagtgcccttttggatatgattcgcattcgtttaagattggtcctcttagctgtacggtgtgccaagcacttttatttgacaccagcaaatgtgtgccttgttctcatgttttctgcaaagcatgcatattgcgcttcaaggactgcccgttatgtggggctgatattgtgaagatcgagcctgatgctaatcttcaaggtgtagttgatcactttattgaaggtcatgcaaggatcaaaaggtctgttagttcagacaaaggagaagaagcaactgagagtaaaaaggtcatatatgaggatgtgtctttggaaagaggttctttcttggtgcaacaagccatgagggcattccgtgctcagaatttagaaagtgccaaatcaagactcaatctctgtgcagaggacattcgtgatcagttagaaaaagttggtaacacttcagagttatgttcacagctaggagcagtcttgggtatgcttggtgactgctgccgagcaatgggtgatgccagttctgcagttgcatattttgaagaaagtgttcaatttttgtcaaagtttccaaaagatgatttggagattacccatacactttctgtttcacttaacaaaaattggagatcttaaatattacgatggagaccttcaagctgcaagatcttactattttaaatctttgaatgttcgacgcgatgttgtcaaacacaattcaaatgttccatcccaggtgttagacgttgctgtctctcttgcaaaagttgcggatgtggacagaaatctaggggatgaaaagttagctactgatggatttcaagaagccatagacttactggaatcactcacgttgaaatctgaagctagtgggctcgagcaacggcggcaatcagtcctagacttccttagaagccaacttccagataaacaagaacaagctgaggcaccagtctgagataggtggtccacatgaagaaaggaaacacagattccgatgcaataaggggtttcggtatgccgtgggatgagtttgtaaaataagctcagcttaacaaaggcactactaatggaggaagaggagatttctgagtaatgaatattccaggcatttctggcactgcagtgtctgcctatgcctaagattctaaggcgcatcctctctgtattttcttgtgcaccactcttatattttttttttccgcctctttgattgttttcttggtgcatactgacaattgtgatccttgcatcattgtaactaaatatacttctctaataaactagaaacgaagtagcatgtagtatataggttgtgtagtttgctctacaacttgatggatacaattctatactgtgaaaagtgaaatttatagatatactcctctaatattccc

SEQ ID NO: 29436 - DNA, 2430 bp, Glycine max
  unsure (1)..(2430): unsure at all n locations
  Clone ID: TF_GmC122273_1
aattaattctcctttggtgctaccacgaaggaagacggaatgtgaaagggaagtagtcaactagtgcacacaacgcatcacaagtctaacaaatggacattatcatctttctgttcgcccaatctcaaacacccaaacatagtcaaacgcaaactctgcaacaaagctttcctttgcacgctaaacatatccacacagattcgttttgaatctcttatttctttcaggtgaaagaaagactttaagtatgggaaatgaagaatcaacacatgattctcatgatgattttttccggcaaccccgttcccatgatggaagttcaccgaatactagccatcaatatcatcaacccccttcctatgatggaagttcagcgaatactagccatcaatatcatcaaccctcatcatatgctgggagttcggtgaataccagacatcaatataagcagcgacccacatatatagctgacagtttcagttcattggatcagtgatattgcacgcaggttgtttctgctttaagagaagctggtctggaatcttcaaatttaataattggcattgacttcaccaagagcaatgagtggacaggcaagcactccttcaaccacaaaagccttcattttactggaaacactcctaatccgtatgagcaagcaatctctataattggccgtactctctcttcatttgatgaagacaatctgataccatgttttggatttggtgatgcatctacacatgatcagtatgtcttcagctgttatcctgatgagtgctattgtcatggggttgagcaagtacttgcacgctaccgagagtttgtccctcgtctgcttatccgcaggtccaacgtcatttgcccctgtaattgacgcagcagttggcattgtggaaagaagtaatggtcaatatcatgttcttgtcattattgctgatggacaggtcactagaaattcagatacaccacatggaaagtttagtccacaagaacaagcaactattaattctatcattgctgcaagccactatcccctctcaattattttggttggagttggagatggaccatgggatgaaatgcagcactttgatgataacattactcaacgcttatttgataactttcagtttgtgaatttcacaaagattacgtctgagaacaaagatgcatcaaagaaggaagcagcatttgcacttgctgcccttatggaaattccaattcagtaccggataacccaaaatctacaaatcgccaatgaaaatccaacaagtcatcaacgtaaaaggcctcttcctccgcctaaggaagtaatagatcgtgacaatgcagtcctagctgttccacacgtgccaaattttgaatcagttgagccatcagctccagctgcagtagaatcagtatgccctatttgcttaacaaatccgaaggacatggcttttggatgtggtcatacaacttgcaaggagtgtggtgtgacattatcttcatgccctatgtgccggcaggaaattacaactcgcctgagactttacacttgagttgggttggggatttctcgtctgctaacttaagatttatagtttatattgctgttattgcctgttgagaaggaatgtaatgactacctgttaaatttcccaattcttcagattaaaaataagatgtaacattgtcatagaatattattgaaagtagagatatttcttatgatgttattagatatattttaagatatgaaaataaaataaaatctctaatttttgttattaaaaaaaaaaaaaaaaaaaaaaatccaaggggggcccggtaccaattcccccataatgagtcttattacaatccctggccgtctttttcaactcctgaactgggaaaacccggcgttcccacttaatcccttgcancactcccctttccccactgggttataccaaaaggccnccccatnccctccacattgcccncctgaatgggaatggcaattgtaacnttaaaatttgttaaatgcccctgtaattgacgcagcagttggcattgtggaaagaagtaatggtcaatatcatgttcttgtcattattgctgatggacaggtcactagaaattcagataccaccaccatggaaagtttagtcccacaagaaccaagcaactatttaatttctatcaatggctgcaaacccactatccccctctcaaattattttggtgggattgggagatggcccatgggataaaatgcagcactttgatgataacattactcaacgcttatttgataactttcaggtacttgactgatgtatgatcaagtatgtgttcaagtttgtgtgagcttgtaactagtgtttagtattgtttaaatgttcgggattagacggcaaagggaaaagaaatacttataagttataattagactctgaaaaa

SEQ ID NO: 29437 - DNA, 1366 bp, Glycine max
  unsure (1)..(1366): unsure at all n locations
  Clone ID: TF_GmC83664_1
tgattcttccattgagagcatttagttngctcttccttgcttctttgtatttaaacactaggttgtaaaacatttgatgtttatctgtattgcttgtgccaaggacgagaagatatttttaaattagaatgattattttggcacaagcaatacagataaacatcaaatgttttacaacctagtgtttaaatacaaagaagcaaggaagaagcaactttatgctctcaatggaagaatcatagaactctagtgttgtaggaaccacaactagggcatttgtggtagagccagtggaagggggtctctcctttcttttcacaatcattacataataaaacctgagtttgactagaaatctcatcagaaattctctcttcagccaacaacgcatctaacatcctaaaatatacctgcatgtctccaagtgacttgctacatattgggcaggtataattaaagcaggtatattcctgaaaacatgttgagtgcattacatgaccacatgggagggcttttaccggagagcaggatgtgaagatatattcatgacaaattggacagttgtcctctaaatgtttctccctttcatcatcaaataatttgcaacgagacaaataatattttgccatcgataaattacatgaaattgttgagcatgtggcactgattggttgaatcactaagcacttcatacacatcatctacgtaatagattttctgtcaactgaatgatctgattactcattagccatatgtatataggtatgaagttggttgcatcaaggagcaaaaagtttacagtttctcttgtagtgattacaactctagattagtttgtgagggtccctgtaagatggatgtttcccaggaaattccagttcatcattttttatattggcttctgtagaagagatctgctgcctaataatccaacgactcattagtaggttctgtattatgtatgactttttctgaggatccaagcaagagtcacgagacacccttcttatcaccgtctccaaatcatcttgactcaatttcaaaagtcggtcataacgcccagacttgtcacaaagttgagaatacttaccttcattgtttacaggatttatgatatttgttacttcattgcaagcatgtttgttatgatcatgaaattgatttgtgctcgagccaaagttgagaatacttaccttcattgtttacaggatttatgatatttgttacttcattgcaagcatgtttgttatgatcatgaaattgatttgtgagtttcgaacattgattattattttgttctgcattatgaaccttaactttatcatcaaagttgtagttagacagcacaacattatcaccattatgc

SEQ ID NO: 29438 - DNA, 1816 bp, Glycine max
  Clone ID: TF_GmC7458_1
ctcaacaacaacaaacaccaacgctgtccgaatccaacaagctccacctaaatccacgtccaatctcaccgacccatctcgttttttcttatcagtcttcaccgatccacacttggctacactacttaggtgattgtagcgaagaagtggacgtaaatttgcatgcagtgataggaggattcatatatacgtgggtgaaggacgttgatgatgacgatgaagaggttggtgagagtgaacagggatgcgattgcagcatgcatgacttgcccgctttgcaaaaagttcctcaaagaagccactgctatttccctttgcctgcatacgttttgcaggaagtgcatttatgacaaaattacagatgaagaattggaaaattgtccagtatgcaacattgatttgggcattgttccgcttgagaaaatgaggccagataacattttgcaagatttaaggaacaagattttccctttcaaaaaaagaaaggagaaggcacctgtatctgtctcttcagtactattaccagctagaagaaaggagagatcactgtcgtctttggttgtcagcactccaagggtatgtacacagtcaaccatgacaggaagaagaacaaaacctgcaagaaaggctagtggcctgcagggatctagtttatccattgagaagttcattaaaaaagaagaggaattactgtcgtttatccaaaatttattaatgaagaaactaggcctgaatagtgaggatgaggttgagattaaatgcatgggacatccagtgcttccttcactgcaggtgcaaaacttggttgactcgtggcttgatatggcggcttcaggacatagaattccagcaaccatgggatcctcagggaaagattttgtcatgatcctaacctatggtcggaaggtcctacacccttgattgtggttcccagttcttcccctttcacatttttatgctaaagtgctgaaagccaaaattaaggaaaagaagcgcaaggcaaaagttgaagaagaaaagattagcactgatcatgcctcttcagatacatcaaaacccaacaaattgcgaagagttcgccaaaaaaaggaacctgtttttggagaatctagaatatcacctcaggctgttctggatgctaccgacagaaatctcttatggaatgattcaatttggttctccttagcagcttctgaaaaccaggaaggagatgcacctttaccacaaattccttcaaattatgtaagaataaagaacggaagcatacctgtttcctttatccaaaaattattaatgaagaaactaggcctgaaaagtgaggatgaggttgagattaaatgcatgggacatccagtgcttccttcactgcaggtgcaaaatttggttgacctgtggggggttgatacagcgtctttgggacatagaatttcagcaaccattggatcctcagggaaagattttgtcatgatcctaacctatggtcggaaggtcctgcacccttgatcgtggttcccaattctgccctttctcatttttattatagcatgataaataaataaaaaaacgtcagagaataatcgcttcctcgtcaacgggcgtttttatgtagctgttgccaataagcacgcagttatgaggaaatctcctctcctgctagactgttgaatgtagagtagcatgctgttctgttggtcattgtagtgatcattggtctctgatttttctatagcatgtttttttgttttcatacttgttgctacagatggtttcttggatatttgacatttcaatttagatcgccttttcgtattaaaaa

SEQ ID NO: 29439 - DNA, 660 bp, Glycine max
  Clone ID: TF_GmC122273_3
gtcattatcctctctcgattattttggttggtgttggagatggaccatgggatgagatgaagtactttgatgataacattactgagcgcttattcgacaactttcagtttgtgaacttcacaaagatcatgtccgagaacacagaagcatcgaagaaggaagcaacatttgctcttgctgccctcatggaaattccattgcagtaccgggcagcccaaaatatacaacttaacgatagagaatcagttcttcatcaacataaaaggcctctccctccacctaatgaagtaatacatcatgataatgcacgcatggcaattccgcacatgccaaatttggaatcagcagaatcgacagctccagctgctgccgaaccagtatgccccatttgcctaaccaatccgaaggacatggcttttggatgtggtcatacaacttgcaaggagtgtggctcgacattatcttcctgccctatgtgccggcatcaaattacaactcgcctgagactgtacacttgatgaggaagcttgttttatgtattgaatatgataaccgttataccatttgaagttaagaatgaaatatataaagattttgggtgtaaaattctttaaccatgcagtcaatgctcattaaatgtatgaaaaaaaaaggttcaag

SEQ ID NO: 29440 - DNA, 924 bp, Glycine max
  Clone ID: TF_GmC2979_76
cagttgatcttccagaactcctaaaaaaaagttgatcttccagaagtgctaatttgaatccacaagtgcgtagaatgaagcatattaaatttaacatattcacaaagtcccatgtgggattgtgattctcctagtatagacacatttttctgtatgcatttctagctgaaaatgttaattttttaaacaagatgtgtactgctactttatgcaacatgcatgaacactgctaactcctccacaccgtctcaaatctcaaacatgatatagctttatgacttggtctatcttagctcgacatacagggcaaccccatttctttgatttcacctcgttcaagcaagacatgcatccagcaacatggccacagggtatgcatgccccttctgctggagcatctaaacatatcacgcatgatgaaccacttccaccggcatttttttctcctttaggaagcttctcagcatctggagatgccatatcaacagggcttaaatcaattgatggatactgaatgggaccatctgccagaatctcattggcgattggtggagctgatggattcaagtccaaagcactagcattcacgtggctttggaggtgctgagtattgccatctgggttagcttcttgtaccaactcactatcacttgtattaggatttggtgtgccaagaaaaccatgattgcctgtattcactgcactgcttgaagagcttgcttcaaagcttggctgtgtatcagaaaagggtggcctctcctgcatggcagactgaagggatgcactgatggccatagccaactctgtgtcttctgcaactggtagtgctgtgggtggacctgtaggcacgttattttgcaagaatgctggacttacctgtggaattcctttgcaagcattagaaaaccatgtaagttgttgctt

SEQ ID NO: 29441 - DNA, 411 bp, Glycine max
  Clone ID: TF_GmC1254_4
aagtgtgacccaagctatcattttcagtgtataaaacaatggcttgtgcataaaaatttctgcccagtttgtaagcaaaaagttgtggttcgacactaagtggcactatcctcaacgttttttacccttaaattggtgtatagtttttcatatgcaatataagcaatcttcattacatattttaaaacttttggcttccttagcgaggagtcggcaatattatacttgtaagttttatattatgatctcgtaattggacagtgattttgcatattatacgcaaggttttgaaatttgaatgttgtcactcaggtaaacaacgatttgataagggagaactcactttctattcctttttgccccgtgcaattctaagttttctagttattaaaacattggtatttttttacc

SEQ ID NO: 29442 - DNA, 436 bp, Glycine max
  unsure (1)..(436): unsure at all n locations
  Clone ID: TF_GmC761_3
atctgcttctgggagcaacttgtaggaggatttaatagatgttttcacttcaaattgttaatgcactcaggatgatgagtccttgacagttctttcctgcaaacatctgtaccatcctgagtgcattaacaattggttgaaaataaacaaggtttgcccagtttgtagtactgaggtatctgcttctgggagcaacttgtaggaggatttaatagatgttttcacttcaaattgaagaaaatttatgctaagttgggggctaatatcccttgttctaatagcatttccacattagggagatagtctgtgctattgtttccagctccttcattttaagtgtaacatgtaacttttggaacctgctctctagattgtctttattttaatggaaaatgaatggcatttaagtggccannnnnnanannnannnnnnnaa

SEQ ID NO: 29443 - DNA, 500 bp, Glycine max
  Clone ID: TF_jC-gmro02910041024d1
ggaataaacatttttgtaacatatactgagacatgataaaccattccacagtggcttaggcgagacataatggttccatatacaataatgatgaggacaataaaaatgacaaccaaattgcctcttgagataattatagccggtatgcactggacaacactgatatgcacaaccagttagaagccacaataactacaaataataaaaaaagctatcattacatgattacagcacacagcagcagctgcaactgtataggcccgtatcaaagtatattaacatggctgtgaatcgaaagtgtgcagattcctcaacatggctgctaaaaacttccctgacatcgatcttctacacttcctcttgactgagggtgttactttttaagatgttatacttgcagagggggcatgtagcattaatatacagccatttatccacacagacacagtgaaaatggtgaccacaaggaagttctcttagctcaaccccatcatcgtaag

SEQ ID NO: 29444 - DNA, 739 bp, Glycine max
  unsure (1)..(739): unsure at all n locations
  Clone ID: TF_LIB4199-002-Q1-K1-E5
ggtccggnaattcccggngtcgactccacgcgtccgggtagcctgcaaccgagaagagagaggattttgggaagttgcagtacgggtaatttaatctaatcttgcaaaaacaccttctctcgcttcctttccatttacgactatctccttcaatgttgttattctgcgtgtattcctttgttccacgcttagatgcgagcactataagagacgatgcaaaattcgagcaccatgctgcaatcagatttttccatgtcgtcactgccacaacgacgccgcgaactcatctagcaaccccgcagatcgtcatgaacttgttagacgcgatgttaagcaagttatatgctctgtctgtgatactgaacaggaggttgccaaggtgtgttctagctgtggcgtcaatatgggagaatattattgcgagatttgcaaattctatgatgatgatacggataaaggacaattccattgtgatgaatgcggcatttgcaggtgcttgctattcagtgagtgtgcaaaacaatcactcatgtgtagagaactcaatgaagagtttctgccctatctgtttggagtaccaatttgattcaataaaaggcagcaccattttgaagtgtggacacacaatgcatatggagtgctatcgagagatggcaactcaaaatcagagtcggtgacctatatgctcggagacaataggcaatgatgtgaactggggaattttagatcgggagattgg

SEQ ID NO: 29445 - DNA, 1980 bp, Glycine max
  Clone ID: TF_GmC6407_1
ctccaaggtttttccataactccaatccctcatcgcccaagtcgccatcgagtttttcacttctcaaatcaactctacgactatccaaaagtcgatgtggaatctgtatgcagagcgcgaggagtgggcaaggaacagcaattttcacagcggaatgctctcacacgtttcacttcccttgcatagtgaagaagcacccgatcgtcacgtgccccgtgtgcaacactagctggaaggagcttccggtgctctccatcaacaacaacaacaacgacaagagcgacaagagaggcttcaaggtctacaacgacgacgagcctctcatgtctccaacttcactctctcgcttcaatcctattcccgagtcagaaaacgaagacgaagaacaagaacaagataacattaacacggagtttaagggctttcatgtcaatccacttcccaatttacattcaacgacggtgattaggaggaacctccagctatcgttgctgccggaggcggccattgtcgccgccaaccgaaactacgagagttacgtcgtcgttttgaagctcaagccgccgcacgtgacgaaaacgtcgcgtcgtgctccaattgacctcatcgccgtgctcgacgtcggtggcgccatgtccggcagcaagctccgtctcatgaaaagctccatgcggcaagtgatctcgtcgctccgtccaaccgatcgtctttccatcgtcgcattctcggccggatccaagcggctgcttccgctgcggcgaatgaccggtggcggccagcggtcagcgcggcggatcgtcgacgcgctcgccgcgattgatcaaacaagagaaggaactccggtgaagaacgacgccgtgaaaaaagccgcgaaagttctcgaggatcgccgcgagaagaacgccgtggcgagcattgtagtcctctccgatctgaacgactcacgcgctggaaacaacatgcacaaaccctcgcttgtttccaccacgcggcttgcccacctcgaagtcccagtgcacgcggtgcggttgggagagtgttcccacgcgctctcagacgacgcgctggcgaatttcgtgggaggtttgttgaacgtggtggctcaggacgttaggattcagttagaggtggtgtctcgatcccgcgccgtggagatcgcgggcgtgtactcattatcgggtcgacccgtttctctcgggtcatcggattggatccgtctcggtgatctctacgcggaggaagagagagaattcctcgtggaactcaaagtgcctgcggcttccgctgggtcccaccacgttctgaccgtacgatcctcctatcggaaccccctcactcgtgagcctttgattcccgttgagcaggcaatgctcgttccgcgtccccacgccgtacgatcctcgtgcgccaagatcgaacgcttacggaacctccacgtcactgcgcgagccgtggccgaatcttcccggctcgctgaacataatgatctctctggagctcatcacttgctctcttcggctcgcgcgcttctcttgcagtcaagtaagccggaagaggagtttctccgctggctcgaagccgagcaagccgagctgcaacggcgcagacagaggcaaacacagagaaacagtcgtgttgaagagaaggtggagccgcttacgccgacttcggcttggcgggctgctgagaggttggctaaagtggctatcatgagaaagtctatgaacagagttagtgacttgcatggatttgagaatgccagattttagttgtaatttttattttaaaaatgttattgtgcatagatgaaaaggaattattaatagagaattgttttttagaaatgagcatgagacaaggagtagtactagacgactagaacctttctgggttaataaggaaaggaagcgatagtgatggcaaagtgaacccacatacatgtatgacttgattgggcattgtggctagctgtttcttctc

SEQ ID NO: 29446 - DNA, 2152 bp, Glycine max
  Clone ID: TF_GmC254_1
ggctcgaggttatatatatacacacacccctctaattcagctttggagtaacctagttgaagatgccatgggaaacctctttggcaaaaataaaaagcgtgacactgaaagtgccaacaataataaaggaagaggtggaagaatctacactgccgtgaccacaagaggcttaccacctcatttcccaacacaattacctcattcacagcctccaccgctattatatccaactctagaacctccgacaccgccaccgccgccgccgccgccaccggcactaccacaatccatgttcaagaaaccaagttttgcgagagttttcgctaaacaaagctcttcagtcatgaacaacaatcaatctggcataattgcgccacttcgatacacaataattgaatcaaccaagaaagtaacaaagcctaatatgccatgatattcctagttggtgataccaactaatcttgatgtgcaaaatacccacacttacaagtgatgagtgaaaaaaatctacactgccaagaacaaatttgtctaaccttcataaaatcaaaattgtgttagccaagaaatgaagaaatcaacgcattgaatgaagctgcgatgggaaactcgcatgctaaaaagcgtgacactcaattttccagaaacgttgttgaagggagagttccctctccgaaaaacaaaaccttgtcgccgtcaccgtcgctagaaccaccactaccacgagaaccaccaccaccagcagctatgtctttgaataagggttcggggaaactgtctgccaaagagaaatatgctctgattcccgataacttcaccaccctagaacaggttacaattgccttgaggaaggaaggtttagaatcatcaaatcttgtccttggaattgatttcacaaaaagcaatgaatggactggaagtgtctcattcaacaatagaagcctgcatgctattggaagtacacctaacccctatgagaaagccatctctattattggcaagactctggctccttttgatgatgacaacttgattccttgttttggctttggtgatgccaccactcatgatcaagaagtgtttagctttcacagtgatcattcaccttgccatggttttgaggaagttttggcttgctatcaaaaagttgttccaaacttgagactgtcaggaccaacatcttatgctcctgtgattgaggctgcaatagacatagttgagaaaagtcatggccaattccatgtgttagttattgttgcagatggccaggttacaacaagtgctgcatctgaacatggagaactcagtccacaagaagcaaggacaatcaaagcaatagttgatgcaagttcatatcccctttctattattctggttggagttggtgatggaccctgggaagacatgaagaagtttgatgacaagataccagctcgcgactttgacaattttcagtttgttaacttcactgacataatggctaagaaatcaagcccctcagaaaaagaagctgcttttgctctggctgctctaatggagatacccttccaatataaagcagccactgaacttggactacttggtcgtgcaacaggaagatcaaataaaatagttccaagacctcctccagcaccatattcccagcttgtgccaccagctcgtgttctgagcaatacgccaactttcatggaagatgaaagaaatcaaatggcatgtgcagtttgtctgacaaatgcaaaagatttggcctttggatgtgggcacatgacttgcagagagtgtggacacaaattaactaattgtcccatgtgccgagagaggatcactagtcgtctcagggtgtacagcgggtgattgtaatgaaaaccatgcacattaattacatagtttgcataacatgcctttctcaatagggtttatatatggtgaggttaaaagtctaaaaatgatagcttgtctctgtttgggatgtttcaagtgtattgaaaaatggagatgaattgtgcaaggtttctatatatatgcatggttcgtgtcgatgcgtttgaagttgtatattactatatacctgcacataatgtttaatatatttatggtctctaatcaaatttttgctctgcataaaaacctacaaaaaaaaaacaaaaacaaa

SEQ ID NO: 29447 - DNA, 1097 bp, Glycine max
  unsure (1)..(1097): unsure at all n locations
  Clone ID: TF_GmC254_2
aatcaagcccctcagaaaaagaaactgctttgctctggctgctctatgnnagatacctttccaatataaagcagccattgaacttgaactacttggtcgtgcaacagggagatcaaataaaatagttccaagacctcctccagctccatattcggagcttgtgccaccagctcgcgttctgagcaatatgccaactttcatggatgatgagagaaaccaaatggcttgtgctatttgtctgaccaataaaaaggatttggcatttggatgtggtcacatgacttgtagagattgtggatctaggttaaccaattgtccgatatgccgtcagaggatcaccaatcgtcttagggtgttttctagctgatagcagaatggaaaatcatgtacaaagtaaaattcaactaagggctaagaagataaatgtcttctgtacatttgttggtgtggctttcaagagtgcccaagaatgaccatggtgttgcataaaggtggtttcacattgtaggaatgatttaggagttgagacaattgtgcatgtatttgctagttgttcaattaggccatgtcccatgtgtttgaatttgaagaattgtattttaaccgctgcacattgtacatattgtttatatgtacttatgttaaaaatttatgtatgcaggatatccatgaacttatagataatatgataggttgcattttgtttaaacttaagaggatgtggtcacatgacttgtagagattgtggatctaggttaaccaattgtccgatatgccgtcagaggatcaccaatcgtcttagggtgttttctagctgatagcagaatggaaaatcatgtacaaaggctaagaagataaatgtcttctgtacatttgttggtgtggctttcaagagtgcccaagaatgaccatggtgttgcataaaggtggtttcacattgtaggaatgaattaggagttgagacaattgcgcatgtatttgctagttgttcaattaggccatgtcccatgtgtttgaatttgaagaattgtattttaaccgctgcacattgtacatattgtttatatgtacttatgttaaaaatttatgtatgcagg

SEQ ID NO: 29448 - DNA, 589 bp, Glycine max
  Clone ID: TF_GmC254_8
ccaaaagtcgtgcaacaggaagatcaaataaaatagttccaagaccttcttcagcctccatattcccggcttgtgccaacagctcgcgttctgagcaatatgccaactttcatggatgatgagagaaaccaaatgacttgtgctatttgtctgaccaataaaaaggatttggcatttggatgtggtcacatgacttgtagagactgtggatctaggttaaccaattgtccgatatgccgtcagaggatcaccaatcgtctcagggtgttttctagctgattgaagaatggaaaaatgtacaaaggctaagaagataagtgtcttctgtacatttgttggtgtggctttcaagagtgcccaagaacaaccgtggtattgcatagaaaaggtggcttcgcaatgtagggatgatttaggagtcgagaaaattgtgcatgtatttgttagtagttgttcaattaggccatgtcccatgtgtctgaatttgaataattgtattttaactaatgcacattgtacatattatttatatgtacctatgttaaaactttatgtatgtagagatcaggatatccatgaaaaaaaaaaa

SEQ ID NO: 29449 - DNA, 5328 bp, Glycine max
  Clone ID: TF_GmC23542_2
atgaagaaatcctcctaccctaatcccacccctcgccgccacgattttcaccgtccgccaccacccacccacggctgcggttgggctccccgccccgcctaccaccgcccctaccaccaatggaggccccgattccacccccacgccgcccgcatcgaccgccctccggagccctatttcagggtggagctccgcctcggcagcagccccctccaccgcgacgacgtcgaggccctgatcgacgaatgccactcccggcacgacaccttcactttctaccccgtcgacgacgtcgccgccgttctcagttaccggagctgggagcaggcgcgagacgccgtcgtttggttctgggaggcgcggctcgcggagaagcacgatttcacgccgacgctggattccaacgtcgtcgtcgtcaaggacgatgtggattgtcgccttcgaccggtgttcgcgaggcacgtgaaagggttgacggaagggaaggaggtgaagcggtggatggaggagagtgaacggttgtcgaaagaaatttctcggctttcgagttcgctgagtaagcccttgcgacttggcgtgcacaacgagttggtggagaagaagaaagggcttgttgatgagaagaatcttgttgaaaggaggttgaaggagtttgagtctgcgatgcagtgtttattgaagtatttggagggtggtgttgacgtggagggtgtgactgtctttaggtttgatggaggttttgattggaagcggattcattgtctgatcaaaagggagtgtcggaggcttgaggacgggttgcctatttatgcttaccggagtgatattcttcaggaaatacattatcaacagataatggtattaatcggagagactggttctgggaagagtacgcagttggtacagtttcttgctgattcaggcattggtactgacgaatccattgtgtgcacccaacctcgcaagattgctgccaaatcagtggctcaaagggtccaggaagaaagcattggatgttatgaaggccaatcaatcaaatgctgttctacattttcatcctcacgtgagtttgattccaggatagcattcatgacagatcattgtttattgcagcactacatgagtgataataatttatccggggtctcgtgcatcataattgatgaggctcatgagaggagcttaaatacagatttactgttgactttgttaaagagtttactttgtaggagggttgaaatgagacttatcattatgtctgctacagctgatgcaaagcagctgtctgattacttttttgcttgtggaatttttcgtgtgcttgggagaagctttccagtggatatcaaatatgttccttctgactatgcaggagattctggttctgctgttgttgcctcatatgtttctgatgttgtcagaatggcaactgaggttcacaaaactgagaaagagggaactattcttgcctttttgacctctcagatagaagtagaatgggcctgtgaaaagtttcaagctccctctgcagtagctttgcccttgcatggaaaactttcttctgatgagcaattccgtgtttttcagaactacactggaaagagaaaagtgatattttcaacaaatcttgcagagacatcacttacgattcctggtgttaggtatgtgatagattctgggctggttaaagacagcagatttgatcctggtagtgggatgaatgtacttaaggtttgctggatcagccagagctctgctgatcaacgggctggtcgtgctgggaggactgagcctggtgtgtgctatagactgtacacggaagctgattatcagtctatggacctaaatcaagagccggagattcggagagttcatcttggtgtagcagttctgaggatccttgctttaggagtgaaggatgtgcaaggttttgattttgtggatgctccaagtcctagctccatagatatggcaatcagaaatctaattcaattaggagccattgaactgaacaatgatgttcatgatttaacttctgaaggttggtgcttggtaagaatgggaattgaacctaggctgggtaaacttattcttggttgtttcaaacatggtttgggtagggaaggtatcatccttgctgctgtgatggccaatgctagtagcatcttttgcagagttggcaatgaatttgataaacaaagatctgattgtcttaaagtgcaattttgccattgtgatggtgacctctttactcttctctccgtgtacaaggaatgggaagctttgcctcgagaaaggaagaacaaatggtgttgggaaaacagtatcaatgccaaatccatgaggaggtgccaagacacaattttggagttagaaacttgccttgagcgtgaacatgacgttgttactccgagttactggcgttgggacccttgtatgccctctaatcatgataagaatttgaaaagggtaatactgttctcacttgctgagaatgtagccatgtactccggctgcaatcaacttggttatgaagtggcacaaactgggcaacatgttcaactacatccatcttgttcattgcttgtatttgctcagaaaccaagttgggtagtttttggtgagcttctttccatttccaatcaatatttggtctgtgtgagtgcatttgattttcaatcattatacgacctttgccctgctcccctgtttgatgtatccaaaatggaagagcggaagttgctaatgaagacactgtctggtcttggctgtattcttctcaagagattttgtggaaaagccaactgcaatttgcttgctcttgtttcacgtataaggaaagcttgtatggatgaacgcatcttcatcgaagtgaatgttgacaataatgaaatccacttatatgcctcttcaaatgatatggatatagcccttgggttggttaacgatgttctagaatatgagagaaagtggttacgcactgaatgtatggataagtttttgtatcatggttctggtttctctccacctgtagctttgtttgggtctggtgctgagataaaacatttggaacttgagaaacgttccttgagtgttgatgtgtgtcatccaaacataaatgaaattgatgacaaggagctcttgatgttttttgagaagaatacctctggttgcatctgtgctgtgcacaaattcacaggcaatacgagggatgaagatagggataagtggggcaggataacatttatgtccccagatattgtcagaagagctgctgagctagatggacgggagttttgtggctcatccttaaaagttgttccttcacagttgggaggggataaaacattttcgttccctgctgttaaagcaagaatttcttggcctcgtaggcttagcaggggatttgccatagttaaatgtgatataaaggacgttgattatatcttgagagatttctataaccttgcagtaggagggaggtatgttcgatgtgaagttggcaaaaagagtatggacagtgttgttataaatgggcttgacaaagagctttcggaagctgaaatatcagatgtgctaagaactgctacaactagaaggattttggattttttcttggtgagaggggaagcagttggaaatccaccatgcagtgctttggaagaggcactcctaaaagaaatttacccctttttgcccaaaaggaaccctcacattagtccttgccgagttcaggtgtttgcacctgagcccaaggatgctttcatgagagctttaatcacttttgatggaagattacatttagaggcagcaaaagctttggagcaaattgaaggaaaggtgttacctggatgtctttcatggcaaaagataaagtgccagcagttgtttcatagctcccttacatttcctactccagtgtatcgtgtgattaaggaacaactggatgaagtacttgcaagcttcaggaatttgaaaggtcttgaatgcaacctggacaggacatttaatggttctcaccgagtgaagataacagcgaacgccacaaggacagtggcagaagttagaagacctctggaagaactattgagagggaaaaccattgagcatgacagcctcacccctgcagttctccaactcatgttgtccagagatggctttagtcttaaaaactcattgcagcaagagactggaacttatattctttttgacaggcacaacttgaatttacgggtgtttggttccccaaacatggttgctttggctcaggagaaggtgatacagtccctcctttctctccatgaagaaaagcagttagaaattcatctgagagggagggatctacctcctgatttaatgaagcaaatgattaagaattttgggccagatctccatggattgaaagagagggtacctggggtagatcttacactgaacatacgtcgccacataatcattcttcatggtagcaaggagttgaaaccgagagtagaggaaatagtttttgagattgctcgttcaagccatcatttggttgagagatttggcaatggacccagttgcccaatttgcttgtgcgaggttgaggatggataccggcttgaaggctgtggccatttgttctgccggatgtgtttggttgagcaatttgaatctgctattaaaaaccaaggcactttcccggtatgttgtactcacagggactgtggagatcccatcctgcttacagatttgagatctcttttatttggtgataagttggaggatcttttcagggcttctttgggagcttttgtggcaacaagtgggggaacttacaggttttgcccttctcctgactgcccctcaatttatcgagttgcagatcctgggtctgctggcgagccatttgtttgtagggcttgttattcagagacttgtaccaggtgccacttagagtatcatccttacctttcatgtgagagatacaaagaattcaaggaagatccggattcatctctgatagaatggtgcagagggaaagaacaagttaagtgctgctcggcatgtggatatgtaattgagaaggtagatgggtgcaaccacgttgaatgcaagtgcggaaagcatgtctgctgggtttgtttagagttctttagtactagtaatgactgttatgaccatttaagaactatacacttaaccatataaattgccatttgcgtaccatttttctgagacttaacccccacaagcaaagtttccttttttagtttatataccggtgtgtgaacgctttttcccttacctttccctctcaactagattattcttttcttttatccttat

SEQ ID NO: 29450 - DNA, 1094 bp, Glycine max
  Clone ID: TF_GmC32907_1
ggggcgtgcgtatcgagaagacgacagaaggggactgttaaataaacctaatctttgtttagcttgttttgcaccttgattactggagcctgcaaccgagaagagagaggattttgggaagttgcagtacggatgcgagcactataagagacgatgcaaaattcgagcaccatgctgcaatcagatttttccatgtcgtcactgccacaacgacgccgcgaactcatctagcaaccccgcagatcgtcatgaacttgttagacgcgatgttaagcaagttatatgctctgtctgtgatactgaacaggaggttgccaaggtgtgttctagctgtggcgtcaatatgggagaatattattgcgagatttgcaaattctatgatgatgatacggataaaggacaattccattgtgatgaatgcggcatttgcagggttggtggtcgtgataagttctttcactgtaagaaatgttgtgcttgctattcagtgagtgtgcaaaacaatcactcatgtgtagagaactcaatgaagagtttctgccctatctgtttggagtaccaatttgattcaataaaaggcagcaccattttgaagtgtggacacacaatgcatatggagtgctatcgagagatggcaactcaaaatcagtatcgctgtcctatatgcttgaagacaatagtcaatgatatgaactgggaatatttagatcgagagattgaaggcgttcatatgcctgaggagtacaagtttgaggtttcaattctatgcaatgattgtaactctaccagcacagtatcttttcacatatttggtcacaagtgtttacagtgcggttcgtataacacccgtaggatttcgaaacccaaacaagaaggtttgggtgttagtggaacctaattataaaatcatcccaaaatttctattctattctttacattttgttttaatcacttttgcttattttcccgatgtaatatcaaagggaaataaaaggatatacattattattttgccgatagtattggcttatgttgtgaaatatattgtggatgacttgtgttacgtgcatgcgatttgttctagcgccttgtct

SEQ ID NO: 29451 - DNA, 1155 bp, Glycine max
  Clone ID: TF_GmC145275_1
cccagtccgaaccctctctccctctccctctcttcctctccctctcttccaaccattccgaatgcgaacaagttgttgttgttgaacggtatggtatatagtgtgtaggctgggggtccttttgctgtttttttgaacgtcctgaattgcatgctgggagtcacaccggggcccgttacttatgccttggctggcccaattcctgttaagataagtgtctactggtcaatgaacatgaatccctataacctgggattgtctggccctgggagtccatcctactatagttcttatgcggcaaatggtcatttgccgagaatggagattgatagtggctgagtgggaatatccttcgacaatttaccacttgtggaagagcctgctacaacagattctccacctagaagagatggagtcacgaacatgcagaccatccctgaagaatgcagtccaaagcttcatgagtctaatcgtcgtagccaggtcatatggcaagacaacatagcttctgataagattgctgtcgaaaaaatactggatccaggagtagcagctaggacttatagcaagacaattttctaagatgatattaagatttttgagaccctactgtacaaatttggtaaagttgtgaatagaagcaatggtgtttcaagataacttatttatctgcttacatacagaaaatataaattagatatttaattaacgaggaaaacttcgggtaaaaggtgtgtaatatgacagagtgcatacagaagaggcgagaaatgtccgaaattgccatgcagccatgtctatcatggtgaatgcatcaccaagtggcttagcattaacaagaaatgtcctgtttgcaacactgaggtttttggcgaggaatcaacgcattagcatcaaggtggcaaaagaggatcctttttgctctattaatttttgcttctcatccaactcaccctctccctcccattctcttttttaagttttaattttttacacgtaggtaggtgtagtatgaagaactatggcagctctcacacaatatatgttttgtttactagaaacaacctattggagtcgcatcttcttgtggttaatgtgtgattttgtgtgtattcatgcaatatatattctcttagcttttgtgccaaaaaaaaa

SEQ ID NO: 29452 - DNA, 1989 bp, Glycine max
  Clone ID: TF_GmC1422_1
agccgccgcaagcgatggcggactccggcggcgacctccggcggcgacctcgccggcatcatttgttcgatctcctatgagcccctcaacctcatcagcgaggatcttcaatcggtctccatctgcgtccacgtttttcacgagctctgtctgcggcaatggttggagtactcttcgaaagggaagaagcacacttgccccatttgcaagcagggttgcagggccagcgacgcttgctggctctattttcagtcagtgggagatgcgaacgatagtgtgaagcctcagaagagctttgaattggaggaagatgctggggttcctgcgtagggaggtgaatgtttcggggcttaattctcaggttgaagggcaaacaaaggaattggaaggacttaatgagaaggtatttttattttattttattttttaacggttgtgtttagatgggagagagagactaagaagcgcatcggaggagattgaaggatatcacgctttgtacttgcaaggagcaggcaaagatagagacagctttaaagaatgaggttttaaataaaaaagcatcaattccagcttcaaatgaaatcagaggtgaaatactctgtagccttctgttttatttgggacaagttaactatttacagcctgaattaacttgtaaagatttatattgaattaggagcttgagaagtcaactttggagtgttttagattaaaagaaagtaatatggctttgactaaagaacttgcagctttaaaattatgagtggagcttcattttgaattttgatcgagtaaccatattttgtttatgatataatttttgtttattttttttacttcttgctatgttggtttatggcctgcaccgtagagtatatctgatctggacattgatgaagaggaggttttgaagcttgccgctttgggtaaggggccaacagtaaagacacagtagatatattgaaaagatctctggtggtcatgcggaacaggagttataaacaattgatggccaagtgcaatattcttggaagaggtgaggcttggtatagcaaaaagctttagaaggctaaagagaagatcactaaactgaaggagagggtacaagaactggagacattaactgaagcaaaagagaacgaatatctgagcttgcaaactttcatcaaaagaacaaagcaaccgaattttgacacccaaatctggaattgacctgactgcaaacgacaacagtaaatattttcaatctttgaagatatagaactccaatgttactaaaaataaggctgtgaatgttagtaatggaagtaaaactaccttttctcttgatataaaaagagagtatatctcaattgatgaggatgatccagaaggcactaatgctttgcaaggatgttcaaaacacaactacaaagatcaagacagggatgatattgcttttagcaagccttctctagtgaagctagagtctgtgtctggcataaagactgaaacatcattgcaaggaaattgtactttggctgcgtctcctagagttgatattgacattggcattgacatggctaacatttcagctggtgctatggatgaagatgtaactttacaaaccaacattaaacaacccgtggtgaacattacaaaggagttaccattaacactttcaaattcagggtgataagaaaaattcactaagttcaaaaaggtcaaagtggtttgaaatcctagttgcaaagagtaaaggaatgcagatagaacttttttggggagagtcatccagtaatatattggtctgtatgggcctggttgggaaacccttgttccaaaaaggaaaggaatgcctcctttgtcccggaggggaaccaatggtagattaaataaatttattttttggaaaagttttcccccctttgaataatgatctttggggattttagctaaacgggtccgaaaatctagtaattgattgattgcttggcttcggctcct

SEQ ID NO: 29453 - DNA, 2092 bp, Glycine max
  Clone ID: TF_GmC1040_1
ttcctctctcagtctcactttgcctcgcgtctctcagtatgggttctggttggagaagagccttttgcactagcgacccagataattccacaatacgcaccaaacacagaacccaaagccctactccttcccccagaagctgcgtcagcctcggctttctctcttcaacaatcacagaattatcatcaaatagcagtcccaaatttcaaaccaaaaccaacacctcaaattcaaattctcctctctctcctaagctcaacctctccctcttcggaaacagtttcaaattcagaaataattgtggaatctgttcgaatagcgtgaagacagggcagggaactgccatttacactgcagagtgcggtcacgcgtttcacttcccatgcgtcgtttccgtttcccatgcacgcaccaacgtctgccccgtatgcgacgccacgtggaacgacgtgccgcttctgcaaaacaacgccgagaaacaaaatcaaccgattcatcatcatcgttccgattctgtctcctcctacgatgacgacgagcctcttccttctcctctcacatgctccgcacaaatcgctccaatccccgaagatgaagaaaacgacgacgtatccgagttccctggctttttcgtcgatccaaagcctcaatcctcgttgagacaaaacgacggtggtgattcgaggagcgttcgagtgaagctgatgccggagtgcgcggtcatatcagtttcgcaaagccacgaaacacgtgctttggttttaagagtgaaagctccaccggtgctgtcgccgccgagatggcggcggcctgccgatggatctcgtgacggtgcttgacgttggaaacagcatgagcggcgcgaaacttcacatgctaaagcgcgcgatgcggttggttatatcttctctcggcgcggctgaccggctcgccgtcgtggcttccgcggctgattccaaacggttgctaccgctgcggagaatgacagctcagggacaacgcgcggctcggcgcgtcgtagataggctcgtgtgtggccatggaaacagcgttggtgaagaagcaatgaacatagccgcgaaggttctcgaagatcggagagagagaaacactctcgctaagattttgctcttatcagacggtcacgataacgccaacaacaaaaatcaacggagattcttaagccacgtgtcttcttccatccggttcgattgtatcaaagttccggttctttcgtatggcttcgagacgaagagaaccggcttaatgcacgaaccgttagaggatgattttgcattatacgttgatagaacattgagtgtggcggtgcatgatttgagaattcagcttggtttctcggcgccggcggaaatccgagccgtttattcatgcagcgggggacccactgcgctgagtactagcgcggctcggcttggtgatttatacgccgaagaagagaaggaattgttagtagaggttagagtgcccacgtcagcattggggacccaccacgtgatgacattgcggtgtgttaatattaacaaagaccctgtgtctcaagagtttgtatacggtgcggaacatgtgtttacggtggtgccgccgcctaagagtattccaatttgtggcggtagggtggagcggcttagaaatgtgtttattacgagccgagccgtagccgagtcgcggaggctggctaagcacaacgatttttcgagtgctcatcatttgctttcttcggctcgggcgcttttggctcagcttggctcggctgaggaatacgtgcgtggcttggaagccgagcttgtggagcttcagtggcagaagcagcagcaacgggttgagagggaggcgaggtgggtggatgagagtggtgaggttttaacgccgacgtcggcttggagagccgctgagaagctggctaaaatggctaggatgaagaagtccttgaacaaagtgagcgacttgcacggcttcgagaatgctaggttttaataatgcttagttgtaatttgtatttttataaaaagaaaatgtaggttcccgaaaatgtataaaataaaataaaagtatggaattgtagttcaaaacc

SEQ ID NO: 29454 - DNA, 575 bp, Glycine max
  Clone ID: TF_GmC1719_4
gtttgagaagaaaaaaggagagttccgggtgaaagttgtcaagcagatcttgtgggtgaatggaataaggtatgagctgcaggagatatatggtattagaaattcaacggagaatgaccaaggaaaatgtgttatttgcttgtcagagccccgagatacaattgtccttccctgccggcatatgtgtatgtgtagcggatgtgcaaaggatttgaggttccagacagatagatgctcaatttgcagacaaccagttgagaggctgttggagatataggtagggtctgaggagtgaggaagatacactgttaactcctcaagctttatgtacagcccaactgttatacttcaacatttctccgtgtcttcttttcatggtgtcaccttacttttctgtattttccaataatcagaaaaacaaaagaaaatgtaatttatataggacttgcgtttcaacatgaacgacaggctggcattgcacataatttgtacaagacaatgcctccaattagcttgtttgtctgtgcttataaatggcttccattctatatgattaattaaatacattttctctt

SEQ ID NO: 29455 - DNA, 659 bp, Glycine max
  unsure (1)..(659): unsure at all n locations
  Clone ID: TF_jC-gmXLIB3563P041dc12a1
tcctctagagcggccgcttttttttttttttttttttttttttttttcggagaaaaacatctattgatataacgcaaattgcaaagaaattttgaatctaactgcccctatttacaataagaatctcaattctgaactgaaattaaaaagcttgttttccaaaaactaactccatccaaatcaatttcccaaaacccaggctctaaaacttcttctattgaagagtgaagttgaaaggctacggcttctagtcaaagccccaattctcccaaacaaattgcggaaaattctcccaaatccaccaccacgactttccctaactctgccgcttccaaccgccagagagattcttctaaaaccttcgttggagttcccgtcactctccatctccgtgtaaaccaccggcaagtggctctctccggcgaacctcccgacggcgaatcccccgcccggcaacctccatatggtcaaccctacagcctcctcctcgatctggccggcgactcttgtttccggcgcggtttgctccgacggcaactcgtggcggcacaccggacacgagtttcgcatcgaaagccacgggagaatgcaatcggagtggtagagatgcttacacggnatntcacgcgccaacgcgccaagctcgaaggcttccttgc

SEQ ID NO: 29456 - DNA, 519 bp, Glycine max
  Clone ID: TF_GmC631_3
ggccgcctgcagtccggccggattctggtcgcccagcatcgtcggctggagaaacacagaggggacacaaaaataagtgcgtccaacggaatataaagcatgagaaaaatgccctcccctcgggtgtctctgatgcggttgggagtggggacagggagggtttgtcattaggtaaaggtaaagcagcacaagtgtcattcatttctctgcaatggatatggatctctagcattcgcattcatcccctccttttctccatgcctccgtcttcacccgttattttcttgtcctgaatgcattcccagaatgttgtagagatggaaggcaagacagaaattcgtatgacatcagctgctgcctttgttgaaggggggattcaagaatcctgtgatgatgcttgcagcatatgccttgaggagttttgtgcaagtgatccttcgacggtcactacctgcaagcatgagtttcacctgcagtgcattctcgaatggggtgagagaagctcccagcgtcctattt

SEQ ID NO: 29457 - DNA, 1801 bp, Glycine max
  Clone ID: TF_GmC54531_1
gatcctccaaataatatatgcacattttatcagaaaggagtctgtgcttatggtagtcgctgcagatatgatcatgtcaaagcttctcgagagcaatcttctgctccatcttcttcagtaaccgaaccccagaccccagtttcagatactgttgcttttggaaatactagagctacatttaatggtgttgctacagctgcagagttttctctttccaggagtccttactttcttcctagtgaaccagcttggaatcaagaaccggtttggaatcaagagtttgggtataatgaacctttatcggctcctaacctcatattgaccggcgggcgccatatagcatatatttaacgctataaatggctatcctgatactttcccacgcgttcggagaggacaatgttggtcaaaccataatcacttcaccttctgagctttcaatttgttcatttgctgctgctggaaactgtccacgaggggaaaaatgccctcatattcatggggatctatgtcccacctgtggaaagcattgcttgcatcctttccgacctgaggaaagagaagaacatatgaagagttgtgaaaataagcataagcatcttgatgcattgaaacgaagtcaagaaattgaatgcagtgtttgcctggagcttgttctgtcaaagcctacagcagctgaatgtaagtttgggctgctgtctgaatgtgatcatccgttctgcatatcctgtattaggaattggcgtagtagtaacccaacattggggatggatgttaacagcacattgagggcctgccctatttgtcgtaagctatcatactttgtcattccaagtgtcatttggtactcaacaactgaagaaaaacaagaaatcatcgacaactacaaggcaaagctcaagtcaattgattgcaagcactttgactttggggaagggaactgcccttttggaactagttgtttctacaagcatgcatatcgagatggccgtctggagcaggtagttttgcgacatctaggggctgcagatggtgataccgtaattgcaaaagacatcaggttgtcggatttcctttctaacatgcatttaagatgaatggtgttgttcgtatgttccagtgctttttcagtaaaccatatgcacttgataaccccaagttttctgaaatgggtacctgagaaagaacctgcactgtgcattctgtcgttgttgtaataaagtgcatgtgttaaatggtagatggacatgctatgagggtataaacttaaaataagttcaatttttaaagcagataaatccaagtatggattgatggtggtatactctatttgaagcatggtggaaagcactcttttagccatcagtgagacttttagaagcatttcttttgtctggtggatttcaatgttaatatgcaaatattgatattggggtgatgaagtttttctgttcacattattgagatcttaagatatacctttttattgtatactgggattcccttgctgtgggtggcactgcaccaagagtcttgggaaagggttcaacatatgtatcggttttgttatctcttataggactttgtcatggccctttaggggcttatattgttgacccgtttccttttgatgaatatactagtataatcgaagtttcacccattgaatatacgattcctggtgaaatttcattcaatttaagaagcctgtttgtttaagggaaaaaaaaaaaaaaaaaaaaaaaaaaaaaaaaaaaaaaaaaaaaaaaaaaaaaaaaaaaaaaaaaaaaaaaaaaaaaaa

SEQ ID NO: 29458 - DNA, 718 bp, Glycine max
  Clone ID: TF_LIB4390-013-R1-K1-H10
ccgctttctttctctctcgccctctctctgcgttgttggagaacattcagaaaaaaaaaggagagtgagccaaaaaaaacaattcagaaaatggagaacaacgcattcagagatcgaatcttggaggacaatgaacacgaagaaatccctgattcctttgtttgctgcgtttgtctggatctattatacaagcccattgtgctatcttgtggtcacatatgctgtttctggtgtgtctataattcaatgaattgtctgcgggagtctcaatgtccagtatgtaggaatcaatattatcacttcccaacagtctgccaattgcttcactttttacttctcaagatctataccgctgcttacaagagaagggaaaaccaaactcttgaggaagaaaagcaatcaggattctactcccctcaatttgatcctgatacatgtgaatcacaagctaaatttggtcattctgggtcagctgccaatgaaggagatgatggcaccatctattatgatggagagtctgatattattggaactcctgctaaaggaaaaaaaatgcctcaggaagagctttctgtacaaaggaaattatcagttgcagatgtgacttgtacgatgtgcaagcaactgctctttcatcctgtagttcttaattggggtcatgtgtactgtcaaacttgtgtcatcaacatagatgacgagatgctcagatgtaaagttt

SEQ ID NO: 29459 - DNA, 1834 bp, Glycine max
  Clone ID: TF_GmC12260_1
gttgtcccgatccccgggtcgacccacgcgtccgaaaaaagaataataattttcatctaaaaaaaaaccaccgttgaatttgacagtcccggcgaggcatgttcttgctccgagtccactcagtggaagaggagcaccctctggatccccgaaccatcttccaatcccaaaccaacaaccctaaattcagccaacgcagaggcgcgctccacttgttccgaacctcttcccactcctctccctcttctcttctcttcatcctcgccgtccccaactacctctccttccacgacttcattcccttctgtgggccccacctcgaccgtctccaccaccttctcttcatcaggaacgacggaacagaagatcgctatagcgtcttgatcgagttcgccgatcactttgccgccgacgcattttataccaatttcaatgccaagaagttttctcctgcagaggcagaggtgtgccatattttgtttctgcaatccgtggagtattcaaaatatgcagaagctgcggggactcctcctcctggttgtacggaaataccaacttgtccggtttgtcttgagaggttggacccagatacgagtgggattctcacaacactttgcgaccactcatttgattgcccttgtgtttcaaagtggacgtatttgtcttgccaggtttgtcgattctgtcagcaacaggatgagaagccaacctgttttatttgtggaacattagatgatctctgggtttgtatgatttgtggatttgttggatgtggaagatataaagaaggacatgccattgctttttggaagggtactcagcattgctattctcttgattttaaaacacagcaaatttgggattatgtgggtgacagttatgtccatcgactgaaccaggacctgtctaaaattgatggcaagttggaggagatgaattttcgctgtatgtcactggaaggagattgtggtatgtgcgaatgccgtgaagatttgggaattaatggggcccttttcaacagcaaagttgaaacgattgtggatgaatacaaccgtcttcttacatctcagttggagacacaaagacaatattatgaatctttactagtggaggcaaaaagtaaaatggaaagttccatgtctgaagcagtggagaaagctgcagcttctgaaatgcaggatatccaaaatgaactggaaaagtgtacagaagaaagaaatgccattgctgaggtcaatcagaaactcataaaaaatcaagagatttggcggaagaagtttaaagaagctgaagagagggaagctaaatcaattaaattgatgaatgagaggataattgatttggaggaacagattagagatatcaagatttttctagaagcacaaaaaacaattgataaaatgtcagattcaaatgggatcaaggagggaacagtcctgccggtggcttatgagcaatcttctccaggccacagtaagagaaacaaaaagtctggccgaaggaggaattagttgcaacctcaaccagaacacaatattcgaacttatgggtagtctgctttttaggagggaaggacactgcttctgattattacactgatacttgttgatatatagaggcagttccaactcgtggccatggattgctgtctgcatattttagatgttgtatagtttattcttgtaaacagttagtttaacgaatttcgtggtcctaaccctttcctctctgatgccgttcgtggttacgatggtaactaaccaaaaattagcaagtaacaatttagctccattgcaatgtcagagtcatattttcagtaaattctttattaatc

SEQ ID NO: 29460 - DNA, 763 bp, Glycine max
  Clone ID: TF_GmC138647_1
gaccaggcagaggataggctgcaacaaatacctgcatgtggccatacatttcatatgagctgcattgatctttggcttgccacccataccacctgtcctctctgccgcttctccctactaaccactgctaaatcttcaacgcaggcatccgatatgcagaacaatgaagaaacacaagccatggaattctctgaatcaacatctcctagggatctagaaaccaatgtcttccaaaatgtctctggagaagttgccatcagcactcactgcattgatgttgaagggcaaaatgtgcaaaacaatcaataggagcatgatgatgcaaaactctttcaggtgtatcaagttgataatcaattctactatcaaaatgatgaaatccagatatattgacaaacttatcccttccaactcagttgaatgaagcctccagagtgtgcgcagcaactgcacagattgatacttcggcaagaaatgtcttcattcggggaactacagctttgatggtacatttgaattgactcatcattattgtaacttatggtaccctgaatgtgtcttttaagcattctaattttggttaatgtacctaagatagtttacatcacaagtgaaaagtattttatatattgctggtttttcttcttttttttcctgcgttttttcgttaaaaatgcaaagggtttggttttggatttagatcctgtcttatccattttgtcgttcccactaatgaatagcatttttgatgcatgcatacttc

SEQ ID NO: 29461 - DNA, 521 bp, Glycine max
  Clone ID: TF_uC-gmflLIB3275P162c09a1
gccaggacttagttttttatttatattatataaataataataataataataatatttcctaaccatgctcacaattcacagcatgtaatgtgagataagtagcctcactgattaaaggcacaaaattatgtaaaaattcacagggtatacccagcccaagtcccattgcaacataactttcaaacaagctaggaacttgccccaaatacacggattctctgttggatttgaaccctgcagcaaggacaagtagccttgccttttcttccatactcatcactgcaactagcacacataacttggtgcgcacatggcaagaaaacaatggagacttcatctttcatacatacaatgcattctctgttgctatttatttctttctcagaaaagtcctccagattatctaattcttgaagcagcctagcaatggtctctctttggggctttgcacccttgcagtcgcttgtaggtgaagtgcttgactggttatgcaactcagcagactgagcagatgctttaag

SEQ ID NO: 29462 - DNA, 1983 bp, Glycine max
  Clone ID: TF_GmC6133_2
gcgttcaccaagagttgattattatttgaacatcctctctctctctctcaacaccgattccagaatattccgaacgtcatgttccatcgccgttcagatccagagaattgagttgatggggggtaacaattctaaggaggataataacaattggaggcagaattcatctgtgcgttcaaggtcctctgcgtcttcttggggttcatatcctgacccccaatcaggttatggtcacgggggttacgcgtatgagccacaacagccttcttatgctacacagcagccgtattatgcccaaccggcggcggcgtcgacaaactatggcaatgaacctcagcctcatgctagcggcagagtggccggccacagaaatgagaagcgcttagacaggaaatactctcccgtcacagataactagtccgcttcgtatttttgggttttctgagaagtgcgtgtgttgatggggggtcaaaattctaaggaggaaagttggaggcagagttcatctgtcaggtcttcttcttcttcttggagtgcttacttggatccactatcgagttatggtttcaatgaaccgcaaccatcatattcttcttatggctatgaagcttatggtggcgatggaatggtacgctatgatagtacaaagctagagaggaggtactcaagaatttctgatcattacagttccatagatcaggttagtgaggctcttgcacttgcaggccttgagtcttctaatcttattgttggtgttgatttcaccaagagtaatgagtggacaggcaagaattcattcaataggcgaagcttgcatcacattgggagaggtctgaacccttatgagcaagcaatatcaattattgggaaaagcttggcagcattcgatgaggataacttgatcccctgctttggatttggagatgcatcaacacacgatcaagatgtcttcagtttctatccgagtgaaagattttgcgatggatttgaagatgtgttgagtcggtatagggaaattgttcctcatcttcgacttgcaggtcctacttcatttgcgccaataattgaaatggccatgagcattgttgaacagagtggaggccagtaccatgtgttggtgataatcgcagatggccaggtaacaaaaaatgttgacactaaacatgggagaccaagtccacaagaacagaagactgtggatgccatagttgcagctagtaaatttcctctttcaatcatattggttggcgttggagatggaccgtgggacatgatgaaggaatttgatgacaatatcccagctcgggcctttgataattttcagtttgtgaatttcacagagattatgtcaaaaagcatccctccttcacgaaaagaggcagcatttgcacttgctgcattgatggaaattccttctcagtacaaggcagcaatagagcttaagctactgggtagtcggcaagccaatgctcctcaaagacatgctcttccacctcccagatatagttctcatgctgcaaggtttgagccaagtatccctcctcaacatggcaacagccacccatttgccacagctccttctgccccaagttccacttctgacaatcaactttgtcccatttgtctaagcaatgcgaaagatatggccttcggatgcgggcatcagacatgctgtgaatgtggacaagatcttcagtcatgccccatgtgcaggagccccataaatacaagaattaagctttactaatcgtatgtggcttgggaattggtattattttttttcttatttttgtgttgtgccagtcacaattctttggttttttcttgattcgttaaattcatcaaaggttagaagtaggtgtggttgggtgcaacacttgatcagatgtatgtttccagatatgaaacggggaattctccatcaattattgtagatatattcatttgatgaattatattttttctttttttttcttcctaaaa

SEQ ID NO: 29463 - DNA, 322 bp, Glycine max
  Clone ID: TF_9204912
ggaaggcattaccgaaagtcatgttacatttgcaaaagcctttgtggaagggggggttcaagaatctcttgatgatgcttgcatcttatgccttgaggatttttgcaaaatttatcctgccactgtaactaattgaaagcatgaattccacctgcactgcattcttgaatggtgtcagataagcttccaatgtcctatgtgttggcaacctattctctagagggatactacatagtaagaactgcttgaggcaatatatctagaaaggagctatatggataccccatttaaaactgctgcgagttttcttcatccaacactt

SEQ ID NO: 29464 - DNA, 534 bp, Glycine max
  Clone ID: TF_GmC1738_6
ccacgcgtccggcgagaagacgacagaaggggaggatggagcagagctgcatgcttttccctgcaaccatcatttccatttgtcgtgcattgtgaaatggctgaagatgaatgcaacttgtcctctctgcaagtacaatattctcaagggaaacgaacaagtgtgacagaaaacgaagaacctcccaagtcccaactgggtgtttcaacaactgttgtgtaatatgtatatataatttcaagccaagaaagagtttacttccctactcgctgggttttgatggttgtttcgtttagctgtttctgtagagaaaagatatatagagcatttattgacgaataagttagcccctgtagtctacttagaattatttcgtcctttgttagattcaaaaatgtccaatttgtaggttgttcatttcttttctgacggaaactggattgtttcatttgctactggttgagtaatcgtaggctttattacaaaaaaaaaaaaaaaaaaaaaaaaaaaaaagcggccgtcttagaggaacca

SEQ ID NO: 29465 - DNA, 1120 bp, Glycine max
  Clone ID: TF_GmC1722_1
gtctcgaggctctttgtgcttataactattaaataaggagtttgatgacaggttcccagcccgggtcttggggtcgtttcgctttggctcctccaacgaaattatgtcaaagaatattcctccgtctcgaaaagaggcagcattcccgccccaaccactgatggagattccttctcagtttaagcccggctcgaggcttaatctcttgggtggtcgaaatgcaaatgctcctcagagagttgctctcccaacaccatcatatggttcagcatctatgggcatttcaaaaccttatggttcagcatcttttggcgcttcaaaaccctatggttcagcatcctttgatgccccaaaaccttatggttcagcatcttttagcagttcaaaaccttctcatgctgctagctttgagcagagtgccccttcttattatgacaacacggaccctgttggcacagctcctcctgccccaagttcctcatatgacaatcagctttgccccatatgtctgaccaattcaaaagacatggccttcggatgtggacatcagacatgttgtgaatgtggacaagatcttcagtcgtgtcccatctgtagaagccccattaacaccagaattaagctttactaggcggcctcttccgttgtgaattaattattttgttgtgtaagctaaaattctttgatttttttaaccttctctggttgtatacaaacgttagatcagctgtgtctattgatgaaaaatggtacaacaaaaaaatatccaaaccaattaaattatttggttttatttggtttggacttgtaaaaaaattcttcaaaccccaaccgaacaaatgtgaacaagaatttgtttggtttgtttcttgggttgtccaaacaaaaagaaaatgttaattcgaccattttagtatccagagtaaattggtgaaagaaaagcaatatttcagcacatgtagtcaactaattcttatcataaataacaaatcctaaagttatacctaatgatagaaatctgagtcatgtttttttattttttaatcggtaaattgttagtggtacaacgttctagttttttgttagctacaggaatcgaacccctgaccttatctaccct

SEQ ID NO: 29466 - DNA, 396 bp, Glycine max
  Clone ID: TF_GmC1722_3
ttttatatgtacaatattaggattggatttgctatgattttctatgaacttattaacaaatcgaattggtcttttgcagctttgccccatatgtctgaccaattcaaaagacatggccttcggatgtggacatcagacatgttgtgaatgtggacaagatcttcagtcgtgtcccatctgtagaagccccattaacaccagaattaagctttactaggcggcctcttccgttgtgaattaattattttgttgtgtaagctaaaattctttgatttttttaaccttctctggttgtatacaaacgttagatcagctgtgtctattgatgaaaaatggtacaacaaaaaaatatccaaaccaattaaattaaattaggatgatgctgatagccacgat

SEQ ID NO: 29467 - DNA, 631 bp, Glycine max
  unsure (1)..(631): unsure at all n locations
  Clone ID: TF_GmC1722_4
cagcatttgcactttcagcactaatggaaattctttctcagtataaggcagcaatagagcttaatctcttgggtagtcaaaacgccaatgctcctcagagagttgccctcccaacaccatcatatggttcagcatctatgggcacttcaaaaccatatggttcagcatctttcggcgcctcaactccttatggttcagcatcttttgatgccccaaaaccttttggcagttcaaaaccttctcatcctgctaactttgagcagagtgccccttcttattatgacaacagggacctagttggcacagctcctcctgccccaagttccacatatgacaatcagctttgccccatatgtctgaccaattcaaaagacatggccttcggatgtggacatcagacatgttgtgaatgtggacaagatcttcagtcgtgtcccatctgtagaagccccattaacaccagaattaagctttactaggaggcatcttccgttgtgaattaactattttgtggtgtaagctaaattctttgattttttttaatttttatcttctctggttgtatacaacgttagatcagctctgtttctattgatgaaaaatggtgcaataaaaaaaatccnncccnatt

SEQ ID NO: 29468 - DNA, 882 bp, Glycine max
  Clone ID: TF_GmC883_1
gttcgccatcttccatagaatacggctgcgagaagacaacagatggggaatggagaagtgagcggtgagaggaaacagaagagagaagagcaatcggtgagtgaatggaatggattcaggtcctccggcgaacgatttgtgttcagtgtgccatggcaactttcatattccatgccaagccaattgttctcactggttttgcggaaattgcataatgcttgtgtggcagcacggatcagtgggttgttcatgcaagtgcccactgtgtcgtcgagccatcagtctcttagtccccacagaagagtctctgaggcaacagcaggaccccgaagtttcccagattctgtcaaagattcatgcctataaccgtttcttcggtggccaacccaccactctctatcagagactgcgagatcttccctttctcttgcacaggctgctcagggaattcctccaccctcacagatcccttcctcttctcattcgcgctcgcgtctttgttgttatgatagcgagtgttatatacctcttcagccctattgacatcattcctgaagggatattaggagtagttggtttcttagatgatctcctaattgtgctcatctgcttcctacatgttgctgccctttatagatcagtactctacctccgtcatgggggttcctgaacatgttctacaattttacaggtaaaatgagatgatgatgcctagataggtgccggatatggatagtgggcattattctttcattttcaaaattgaactactttgttttctatgtacatagacaagttcaatttcaaatagtggaattagtaatggaaattacaatgaaaaagctctcttttaaaaaaaaaaaaaaaaaaaaaaaaccaaaa

SEQ ID NO: 29469 - DNA, 1709 bp, Glycine max
  Clone ID: TF_GmC247_3
aattcggctcgagatagaaagggaaagacaaagagagctgcagggcttgttggagcaccgagctgtttctgattttgctcatcgcaaccgtattcagtcactgctcagaggtagattcctccgaaatgaaagaactgttgaagatgagaggccaccgtctatggctgcaagtgaattagttcagctaagacaacggcacacggtctctggtttaagggaggggtttcgttcaagattagaaaatattgttcttggtcaagcaggcaccagtcctgattccacatcaaatagtaacgcgagtgaaacaagaggtgatgggagccaagcaaacagtctggtagatggccaacaagaaaactatgaacagcagattaggagcctggaaactgatgtgcgtcagttgcctaatcgaacaggaactttggagagtagcacaagtgagagtattagttggcaagaagctagtaatcaaggggggaattggcaggaacaaattgctgaagaagggggaggaaactggcaacggagtccatttgatcagacgagagatggaagggcagtcagtgattggccacaggaacctcccagaaacttaactggggaagatcctcatccccaggaagctcaaagaatttggcatgatgataacacaagggaaactgttggtaattggtccgaaggaccttctggagcttcgaggaatcgccgtggggttcccataagaagattcaatagatttcatccacctgatgatgataatgtatacagtatggagcttagagaacttctgagcaggagaagtgtttctaaccttcttcgtagtggtttccgtgaaagtctggaccaattaatacagtcatatgtggaaaggcaaggtcgtgcaccaattgactgggatttgcatcggaacttgccaacaccaactcctgcctctcctgaacgggacccagaccagcagggtgaggaacgtgatgagggtcaacatgaaaccattaacaggccttcactggtgttgccttctccaccagtacctccgccacaacctctggggcaccaggatttgcatcaaactggatggtctcgccaaagcatgcatcgttctgaaattgagtgggagataatgaatgatttaagatcagacatggcaagacttcagcaaggcatgaatcacatgcagaggatgttggaggcctgcatggatatgcaactggagttgcagcgctctgtcagacaggaagtatctgctgctctaaaccgctcaggtggtgagaatggatcgagtgctgagacatctgatgatgggtctaaatgggggcatgtgaagaaaggaacttgctgtgtttgttgtgataaccatatcgattctcttttgtatagatgtgggcacatgtgcacttgttcaaaatgtgccaatgagttaattcgtggtggtggtaaatgtcctttatgccgagcaccaattcttgaggtggtccgagcatattccatactgtaaaaaggaaattaagaggacatagagaagaaaaaaaagtctcaggaagttgatctcaattctaaaggtgtcgaggttcttatttataagtgtttagtagatgcctttgtttttctgattatatggaactccacgaattgtataattggattagcaaatggcgctgttgattcatcattcttacgtaaataaatagttgccctgattattctttgaa

SEQ ID NO: 29470 - DNA, 412 bp, Glycine max
  unsure (1)..(412): unsure at all n locations
  Clone ID: TF_13240189
gctactttataatgagatatctgagctaaggaaatcaataaagggctcatggaaatgcagatagaattacaacaatccatgaaacaagaggttcaaacagttaaaaaagaagaaaagaagtccaataacaggactccaaagaaaggcaactgctgcatttgctatgagatgaaagttgactcagttttgtacaggtgtggacacatgtgtacatgtctcaagtgtgccaacgagttgcaatggaacagtggaaaatgttctatatgtngtgctaaaatagaggatgttgttcgcgtatatgttgacggttagcctgtcacagcggacagaatctcactccagaggactatgcttagtcctgaaacttagtaaactgctacaattaacaccatacaccacaaatgactttctc

SEQ ID NO: 29471 - DNA, 1580 bp, Glycine max
  unsure (1)..(1580): unsure at all n locations
  Clone ID: TF_GmC1712_1
caattcgtccgtatggctgcactaggagtacagaagcggggttttcagtcaaattgaacggaaccaccgtttctctctctctcacgcacacatggtgctgccactgtcactcttctcttctcctttctgcttcgccgattctctatttttgcgcgcaatcgattgtatgctttgggccagtcgttaatgataacttgaggtctggatgatgctttctgattggttgtttacatattgtaattcagaatgtggaactttgcatcgaattgcattgctggaactgtgggactgaaaaatgattcaaagcctactcattctgcttcggaatgttctgatgatgaaaactctgttataggcagagaggaagggctggaatgcccaatatgctgggaatctttcaatattgttgaaaatgtgccctatgttttatggtgtggccacaccctttgtaaaaattgtatcctcggactgcagtgggctgttgtgaaatttccaacactgcctgttcaacttcccctttttatctcctgtccatggtgcaaccttctgtctttccgtttagtttaccggggaaaccttaaattccctcgcaaaaactactttcttctttggatggttgagagcatgattggtgatagaggggatggttgagaacatgaacggtgatagagtgaagtcacattctactgtttgcggggatcatcaaccagtgtggccaattatagacagtttaaccaacggaagccaagtaagccatgacagccttcagggagggcaagtttgccatccagagtcttcaagttccaatcattatcatggtgataccagtaattacttaagtatagaaacactgcatgcatctctgcggaagtcattggttttatttgttcacttgacagcaaagttcccattgatcattatatttcttttgattgtcttatatgccataccagtcattgcagccattttggctctgtatatacttgttaccattctgtttgctctcccatcatttctcatcttgtactttgcatatcctagtttggattggcttgtcagggaaattatcacttgagatcaaagctgtatttcttctgctttgcaagcattatgaatgtaactttgcctcaccttgtggccccttcatccagtgtcttctacttcgtaattggtcaacatttccatttgcagctgtatcttttatcttatcatatatagccccagtcaatctcagtacgctttttgaatctttttagctctggttgagcttggctggttaggaggagggatatcagtttttggcataaactatttggacaaccaaggccgtggagtgaataaggtaatgaatcgtgattttgccttttcctggtggcaaatggttgtttttatctgtatttgaacttcagaagaaccccctaatttattcatcaagtgggtcattatcagaaaagctgtttttttttttttcttttcatgggcacatttggatgctcctatgaatactgctgacagtatttttgctaattgtaatctgtaattattattagtagagctattttcctggccaanaaaaaaaa

SEQ ID NO: 29472 - DNA, 642 bp, Glycine max
  Clone ID: TF_GmC1712_3
tttgggtgcgagaagacgacagaaggggcggaaccaccgtttctctctcacggtgctgccactgtcactcttctctactttctgcttcccagattctctatttttgcgcgtaatcgaatgtggaactttgcatcgaattgcattgctggaactgtgggactaaaaaatgattcaaagcctactcactctgcttcagaatgttctgatgatgagacttctgttataggcagagaggaagggctggaatgcccaatatgctgggaatctttcaatattgttgaaaatgtgccctatgttttatggtgtggccacaccctttgtaaaaattgtatcctcggactgcagtgggctgttgtgaaatttccaacactgcctgttcaacttcccctttttatctcctgcccatggtgcaaccttatgtctttccgtttagtttaccggggaaatcttaaattccctcgcaaaaactactttcttctttggatggttgagagcatgaatggtgatagagggaaatcacattcacctttctgtagcgataatcaacaacactcaattaaagacaatttaaccacgggaagccaagtaagccatggaaaccttcggaggggtcaagtttgccacccagagacattgagttcc

SEQ ID NO: 29473 - DNA, 1759 bp, Glycine max
  Clone ID: TF_GmC66639_1
aatggaagtgagaggttggaaaggaaggaccgcataccaaccacaagtcactcttctgttcttctacacactatcttgatcttttctattgcccttttccttcactttactacttgcatccaattctctcgcgaaattaataaaggaactttaactttcgcgagcgacacaaacgcaatcaaatcaaatcatagattgatttggcaaccccaattcccttttgattatttttttttttttatgaattaaagcaatgggtttggttgcttagtgtttttttggacgcacgaaagatgattccttggggtggcctcagttgctgtttgagtgctgctgctctttaccttctcggcagaagcagtggcagggatgcggaaattcttaaatccgttacaagggtcaatcagctgaaggaactagctcaactgttagatgcagaaatattacccttgattgttacaatttctggaagagttagctctgaaaccccaattaactgcgagttcagtggtttaagaggtgtaatagttgaagaaacagcagagcaacattttcttaaacacaatgatgctggttcctggatacaagattccgctttgatgctatcaatgagtaaagaggttccttggtatctggatgatgggactgatcgtgtgcatgtggttggagctcgaggtgcttctggttttgcattacctgttggaattgaggcatttgaagagtcgggtcggtcacttgtacgtggaactttggattatctgcaaggtctcaagatgcttggagtcaagagaattgaacgggtacttccagttggaacttccttgactgttgttggtgaggctgctaaagatgatgttggcgctattcgaattcagcgaccccacaaagggccattttatgtctctcccaaaacaattgatcaactaattgcaaatctggggaaatgggcaaggtggtataagtatgcttctgtgggcttgacggtgtttggtgcttatctgatagccaagcatgctattcggtacatattggaaagacggcgccgcagcgaacttcaaagaagggttcttgctgcagctgctaagaagtcgggacaaaataatgatgttgaaaaggccgacagcttatcagatggtgctaaaaaggatcgcttaatgccagatttgtgtgtaatatgccttgagcaggaatataatgctgtttttgttccgtgtgggcatatgtgctgctgtacagcttgttcttcacacttgaccaattgtcctctctgccggcgacagatagagaaggttgtgaagactttccgtcattgagtgttgagcatacatggtaatccaacaaaaaaaaaagtcacatgcaatgaggaattgtgcttaagaatccaggagcaacaaattggtgaattagatattttttgcatgctttgtctgtgagcaattctaaaaaccaacggcctttacagacatatcaagacagcgatgcttttagcatcaaaacctgtacatatttatcagaagaagttatgttgcttctatctgctgcgaaattttatattcttacaggatgtattctactttttattgagtgtttctcttctgatatactcttacttaccctgtggaattctttttaaagtgaaaacactttgttaatcgtaccaggagctacttattgtatactcgagtccttaacgtgcgtatgaactattttatagattaaaaaaaaaaaaaaaaaactcgagactagttctctctctctc

SEQ ID NO: 29474 - DNA, 775 bp, Glycine max
  unsure (1)..(775): unsure at all n locations
  Clone ID: TF_GmC12260_3
gggtcgacgctacgatacggctgcgagaagacgacagaaggggatctcagaaacaatctatcaaacacatattccgataaacagaaacaccaccgttgaatttgagaatcccggcgaggcatgttcttgctccgagtccactcggtggaagaggaccaccctctggatccccaaaccatcttccaatcccaatcccaatcccaatcccaatcccaatccaacaaccctaaattcagcgaacgcagaggcgcactccacttgttccgaacctcttcccattcctcgctcccaacccagacctctctttcttctctcctcttcatcctcgccgtccccaactacctctccttccacgacttcattcccttctgtggaccccacctcgaccgtttccaccaccttctcttcatcagaaacgacggcaccgaagatcgctatagcgtcctcatcgagttcgccgatcactttgccgccgacgcattttttaccaatttcaatgccaagaagttttctcctgccgaggcagaggtgtgccatattttgtttctgcaatccgtggagtattctgaatatgcagaagttgctgggactccgcctcctggttgtacggaaataccaacttgtcctgtttgtcttgagaggttggacccagatacgagtgggattctcacaacactttgcgaccactcatttgattgcccttgtgtttcaaagtggacgtacttgtcttgcccaggttgtcaattctgtncagcacaggatgagaagccacctg

SEQ ID NO: 29475 - DNA, 515 bp, Glycine max
  unsure (1)..(515): unsure at all n locations
  Clone ID: TF_LIB4280-025-R1-K1-G6
ccacgcgtccgctttctctctctataactctttctcacccgctagggtttccttttcatcgcatcttgagtttgcaacctcgtcttgtgatttccatggagggtgctgggatggaagagaataatattattaatgatgatgataataataacaagtctgaggcgcatttgacttctgccgctgcttttgtggagggtggaattcaagacgcttgtgatgatgcttgcagtatatgccttgaagctttctgtgatagtgatccttccacggtgacgagctgcaagcatgagtttcatcttcagtgcattctcgaatggtattactatttggcttttcattaattgattcttttgggttaatcatggggattaattttgacgggactgtactgtgtcggtaatgatgcgcgctttgcttacttattattattgctggggactgctaccactggtatanctgctgcaatgttttcttggtcactgatgtggttttctcaagtaaccantttgtgtggc

SEQ ID NO: 29476 - DNA, 815 bp, Glycine max
  Clone ID: TF_GmC3032_1
gtctttgactgggtattgcaagttacaactcctgcttcgccctcagtagagcaggaccttgagcagcatggaaaggatctccttggcctacttgggaccagcactaccatcgtaacaactggtcacagaatgacttaactaatcagcatctagtaattgatttggagattattaacgacttgagaattgacatggctcgattacagcaaaggatgaataacatgcagagaatgctggaggcttgtatggatatgcagcttgagttgcaacgatctataaggcaagaagtttctgcagctctaaatcgctctgctggttcatcaggaatacatgattgcgagtcaccagaagataaatctaaatgggaatgtgtaagaaagggactttgctgcatatgctgtgaaagcaatatcgattctttgttgtacagatgtggtcatttgtgtacatgttcaaaatgtgcgaatgagttgcttcaaagcagaaggaagtgcccaatgtgtcaagctcctgtggtggaggtgatacgtgcttattctatacaataatttgacattaatataaaggtcacacttttaacaaaatacaggattctaacaagttttatttcctggacgtttccaggtacactttttcgttttttttttttttttttataattttcttactgtgattactgtatttatgtcgagtgcaccaatggaacacatgatggcatttttttgcggccatgattctcatatgaataaaaattgtacgtcgtttaaaaaaaaaaaaaaaaggttctagatcgcgattttttggggccatgattc

SEQ ID NO: 29477 - DNA, 531 bp, Glycine max
  Clone ID: TF_GmC386821_1
ccacgcgtccgtgttcctccactagctaagctagtcgctactcccaatctcagagcgcgccgccggtctccaccgcggccaagaacagtgctactagccaagaaagctggggaacaggctgcttcctgggacgaggagcaggacgacaagggatctggagccggagcccccgatggcggtgacgggaacctcggtggcagccgcggcgacgatgctggcggcggcggcggccatcttcatcaccttcgtcatctgcttctacctcttcctgtgcgcgaagcggtaccgcggggccgccccgaccatcggcggcgacagggcccggccccgcttcgtgttcgcgggcggcgcggggtgccacggcggcctcgacgaggccgccatcgcggcgctgccgagggaggaggcggcggcggcgggcggggactgcgccgtgtgcatcggcgagctggccgcgggggaggccgcgcgggtgctgccccgctgcggccacgcgttccacgtggagtgcgtcgacatgtggctgcgctc

SEQ ID NO: 29478 - DNA, 529 bp, Glycine max
  Clone ID: TF_jC-gmro02910011g03a1
ggctcgagggcggactccggcggcgacctcgccggcatcatttgttcgatctcccatgagcccctcaacctcatcagcgaggatcttcaatcggtctccatctgcgtccacgtttttcacgagctctgtctgcggcaatggttggagtactcttcgaaagggaagaagcacacttgccccatttgcaagcagggttgcagggccagcgacgcttgctggctctattttcagtcagtgggagatgcgaacgatagtgtgaagcctcagaagagctttgaattggaggaagatgctggggttcctgcgtagggaggtgaatgtttcggggcttaattctcaggttgaagggcaaacaaaggaattggaaggacttaatgagaagctttgtacttgcaaggagcaggcaaagatagagatagctttaaagaatgaggttttaaataaaaaagcatcaattccagcttcaaatgaaatcagaggtgaaatactctgtagccttctgttttattttggacaagttaactattta

SEQ ID NO: 29479 - DNA, 1069 bp, Glycine max
  Clone ID: TF_GmC5878_3
ggggaaagtgacaaaacttgaatggaagaaggcatatctttaaattgaattgatggccgcgcgagacctggtcaactctcgtagtgctgttgtgcaaacggttaatggtgtcaaccgcaagtacaatgatccaagagctggaaggaaggggaggatttctagccgtgctaatgaaatttcaggaactggtgtagatgattttgagtcaaggagtcttgatgctgatgatttaaagatagaactacaggctaggaaacaacgagaggcagctctggaagctgcattagccgagaaggaatttgtggaagaacagtaccggaaaaaaactgaagaggccaagagaagagaagaagccttggagaacgatttagcaaatatgtgggtccttgttgctaagttaaaaaaagacgggggtgctgttccagaatcaaacatcaatataaaaaaagttgatgaggaagcacatacaaatgatctgaaaactaatggcattgaaagtgatattgtccccaaggagcagattttagatgtatcaataccagaaaatgaaatagccaatgaagaccctttggttgttcgacttaaggcacgcatgaaagagatgagggataaagaattcaagcatcttggcaatggagatgccaattcccatgtttgtaaagtatgttttgaatcttcaactgcagcaattcttcttccatgccggcatttttgtttgtgtaaatcttgctcacttgcttgttctgaatgcccaatatgccgcaccaatatttcagataggctttttgcttttacttcttgactcttcaaaaaaagggttttatctcattgaactaatatatccgtgtggccacaggtgcaattctttcattgtatgtaaaactgtttaaaagttatatcgataatatctttcttttactctaccctggaaattgtataatagggggagaccaaggggtgggaaaaaggaatgtaaaaaggaaattgaaagggtgttaaccaccctgccgaagtacatgtgcacatagtgtgtttgttttaatgtaataaagcagattttttgttgaaa

SEQ ID NO: 29480 - DNA, 861 bp, Glycine max
  Clone ID: TF_GmC5878_5
ttctagaagaggaatgcattaaaaaggttgaagaggcccaaaaaaaagagaagcctcgttggagaatgatttggcaaatatgtgggttcttgtggctaagttaaagaaagaagggggtgccgtcccagaatcaaacatcaatataaaaaaagtggatgaggaagcacataaatatgatcggaaaactaatggcattgaaagtgatattgtccccaaggagcagattttagatgtatcaataccagaaaatgaaatagccaatgaagaccctttggttgttcgacttaaggcacgcatgaaagagatgagggataaagaattcaagcatcttggcaatggagatgccaattcccatgtttgtaaagtatgttttgaatcttcaactgcagcaattcttcttccatgccggcatttttgtttgtgtaaatcttgctcacttgcttgttctgaatgtccaatatgccgcaccaatatttcagataggctttttgcttttacttcttgactcttcaaaaaaaggtcttttgcaattttttatacatacgagccatattctgtacaagtacaaatttataacatgttttcattttttggctgttgaaaatttccagggttttatctcattgaactaatatatccgtgcggccacaggtgcaattctttcattagtatttttgtatgtaaaactgtttaaaagttatatcgataatatctttcttttactctaccctggaaattgtataggccaaggggtgggaaaaaggaatgtaaaaaggaaatggaaagggtgtaaacaacactgctgaagtacatgtgcacatagtgtgtttgttttaatgtaatacagcagattttttgttg

SEQ ID NO: 29481 - DNA, 1148 bp, Glycine max
  Clone ID: TF_GmC1712_4
tacggctgcgagaagacgacagaaggggacgcacacatggtgctggcgctgtcactctggtcttctcctttctgcttcacccattctctatttttgcgcgcaatcgaatgtggaactttgcatcgaattgcattgctggaactgcgggactgaaaaatgattcaaagcctactcattctgcttcggaatgttctgatgatgaaaactctgttataggcagagaggaagggctggaatgcccaatatgctgggaatctttcaatattggtgaaaatgtgccctatgttttatggggtggccacaccctttgtaaaaattggaaaaaaaaaaattcaatcttttaattctcactctatcatgatttttgcgttcaattgcttccaccttcggtttaaacttggtacacctctgtcacaaatgatatgtttcaaacttgatgctttgaccccgtcattagtgaccacattgaggtccaaatgatgcgtgtttcctgactatttctatagtattgtgacttgattcagaatgtggaactttgcatctagtttaattgctggaagtgtgggtctgaaaaatgattctgcaaaaccaactcaccctgcttcagaatgttctgatgatgagacttctatggtaaccagagaggaaaggctggaatgcccaatatgctgggaatcctttaacattgttgaaaatgtgccttatgtcttatggtgtggccacaccctttgtaaaaattgcatccttggattacaatgggctgtggtgaaatttccaacgctgccaattcagcttccgctttttatctcctgcccatggtgcaaccttttgtctctccgtttagtttaccggggaaatctgaaattccctcgcaagaactactttcttctttggatggttgagagcatgaacggtgatagagtgaagtcgcattctactgtttgtgggggatcatcaaccagtctggccaataattaaagacagtttaaccaatggaagccaagaaggccatggcatcccttggagagggcaagtttgccatacagagtcttcaagttccaatcaatatcatggcaataccagtaattacctaagtatagaaacactgcatacatcactgcggaagtcggttggttttatttgttcat

SEQ ID NO: 29482 - DNA, 715 bp, Glycine max
  Clone ID: TF_GmC1712_2
gcttcagcggctatgcctcgttaattcttccgatcttatttcacatttcatttccccatttttctcgcatttccttcaattagggtttcttttttcttagctgttgcaattgattttcattttactcacctggttcggttttcacatttgtttaaacttgttacacctctgtcacgattgatgtggtccagacttgatgctttgatcccatcattaatgaccacagtgaagttcaaatgatgcttgtttcctggccatttctatagttttgtgacgtgattgagaatgtggaactttgcatctagtttaattgctggaagtgtgggtctgaaaaatgattctccaaaaccaactcactctgcttcagaattttctgatgacgagacttccatggttagcagagaggaaaggctagaatgcccaatatgctgggaatcctttaacattgttgaaaatgtgccttatgtcttatggtgtggtcacaccctttgtaaaaattgcatccttggattacaatgggccgtggtgaatttcccaacactgccaattcggcttccgctttttatctcctgcccgtggtgcaaccttttgtctctccgtttagtttaccagggaaatctgaaattccctcacaagaactactttcttctatggatgggtgagaacatgaacggtgatagagtgaagtcacattctactgtttgcggggatcatc

SEQ ID NO: 29483 - DNA, 885 bp, Glycine max
  Clone ID: TF_GmC399_5
cggacgcgtgggttctgaaggtaggccatcatttgtactctcaacttgcagcaatgaaatgacagctggatccatatgcggatcatctgatggctggtcaatgcgcatcttctctgagctggtggcatcatcacaaagggaaaggtggtcttttgatagtgagtgtttcggatctggtcgtcacaagataagtggatccagtagcaggttctcgtattctccctccatggaactacaatcttgtggggcttgctcaaagctattgactgagagatcaacatggagcaaccagaagtttatttccaacagtgacctgtcagttgttgctgtactggtctgtggccattcatatcatgcagaatgtttagaggctatgacatcggaggcagataggtatgatccagcatgtccaatttgtatggttggagataagcacttgtcaaagttgttgtccagaaaaggtcttcgggctgaatcagacataaaggccaagaaccacaagatatccagaaaccgtgtagttgatagctaccttgatggtggttttgatgtttttgatcgtcaaaaaggcattgatttgagaggaaaagtgtcaaaatggaacctagctccagtgcaaggagctcatttggaaagccattcttgaggcggcacttttcacttggatccaagtggagccgttccctgtccgagaatgattctgccaggaagaaaggcttttgggcaagatatcgttaagattgagttccatttgctgtaagagtcaatcattctctaattatagtaataataacaccatcaatttagaattaatattttcgatctaaactaactttactgataactttgaatgctttaaaataattaatttttacttttgaccag

SEQ ID NO: 29484 - DNA, 983 bp, Glycine max
  Clone ID: TF_GmC1125_1
gcctcagcctttatgggatcggccctcacgtcataccaattggtcccagagtgacataaataatcagggttaaggaattgagggggatattgttaagaacttgagaattcacatggttaggctccatccaaggatgaataatatgcacagaatgctggaggcctgtatggatatgcagcttgagttgcaacgctcaataagacaagaagtctctgcagcagatgaccaagtggaattcatcacaggaatacatgacggtgtttcaacagacgataaatctaaatgggaatgtgtgaggaaaggactttgctgtatatgctgcgaaagcaatattgattctttgttgtacagatgtgggcacatgtgcacatgttcaaaatgtgctaatgatttgctccaaagtagaagaaagtgtccaatgtgtcaagcaccagtggtggaagtgatacgagcttattctatacaatagttttgacattaaagggtcacacatataacagaatacaagatcctaacaagttctatctcctggacgtttccaggtacgtttattttaataaattttttctgttcttgctgtgattactatatttatgtcgagtgcaccaatagaaaacctgatgtctctttttgtggccatgattctgaaaggaataaaaaaagtattttgtttgatttggttgtttgagttttttttctttcaattctatattgttatcaaaatcagatcggttgtcatgtaaatttgctttttctgttttcagcgtattgtttgtaggtttcttaatgaagaaatagccgaatttatgtgacaagtgacggctcagttcacgcttgggttatgtactatctagaaaaacatttttttcccataactatttgacattttgtttttgtatagaattgacattttttccttatatatttgatatttcttacatgaagggggggggggggggggggggggaaaaagggcgcgccgc

SEQ ID NO: 29485 - DNA, 548 bp, Glycine max
  Clone ID: TF_GmC1125_2
gtctctgcagccctaaatcgctcaactggttcatcaggaatacatgacggtgtttcaacagagataaatctaaatgggaatgtgtgaggaaaggactttgctgtatatgctgcgaaagcaatattgattctttgttgtacagatgtgggcacatgtgcacatgttcaaaatgtgctaatgatttgctccaaagtagaagaaagtgtccaatgtgtcaagcaccagtggtggaagtgatacgagcttattctatacaatagttttgacattaaagggtcacacatataacagaatacaagatcctaacaagttctatctcctggacgtttccagcgtattgtttgtaggtttcttaatgaagaaatagccgaatttatgtgacaagtgacggctcagttcacgcttgggttatgtactatctagaaaaacatttttttcccataactatttgacattttgtttttgtatagaattgacattttttccttatatatttgatatttcttacataaggttaataattttattattaaatttttattttatat

SEQ ID NO: 29486 - DNA, 1442 bp, Glycine max
  unsure (1)..(1442): unsure at all n locations
  Clone ID: TF_GmC30762_1
gccccacgtctcgaactgagattaatactttggtaccaatctcattgattaaaataaaaaagcttgtgagagacagataagggaaacggtgtgccacgaacacgagctacttgttacagaatacaactaaagtaataataacgtttaaaatgtaactccaaggtccaaacttcgcttctgggtgtgactccaaacaaaaactactacttgcttagcacacaatattatgaaaaccaccgcagaggttgtttcatctcattgtcttgttgtagcagagtgctctcaatccagccccacacaactttctgctatggaacctcagattctgaatttggggtgcatgcattacagaaggagatgcaagatcagagcgccgtgctgtgatgaggtttttgactgtaggcattgccataatgaagctaagaattctgaggaggttgatgctgtggatcgtcatgatgttccacgccatgaaattaagaaggttatctgctccttatgtgatgtagagcaagatgttcagcagtactgtataaactgtggaatatgcatgggcaagtacttttgtactatatgcaaattctttgatgatgatatttcaaagaatcaataccactgcgatgaatgtggcatttgcagaactggaggcaaggataattttttccactgcaaccgatgtggatgttgctactcaaaggtaatggaaaaggggcaccgttgtgtagaaggagcaatgcatcacaattgccctgtttgctttgagtatctttttgatacagtaagagaaatcagtgtcttaccttgcgcgcatactatacatttagactgtgtaaaggaaatggaaaaacatcagaggtactcatgtcccgtttgctcaaaatccatctgtgacatgtcaagtgtgtgggagaagcttgacgaattgattgcctcaactccaatgcctgaaacctacaaaaacaagatggtgtggatactttgcaatgattgtggagtaaactctcatgtacaattccatattgtggcccataagtgcttaagttgcaactcatacaacacaagacagatacaaggagtacctgccacatcaagctcttctagggtaactgaaatggtgagatgaacatttgattgcaaaaaggtctcttggaatggaaactgttagactattgatgtgatagagaaattagttgcaagttgttataatttaaatttcaatagaaacagctcttgttgaacagagttactctgttatgacactaaaattaaactctagttatcaaacttagatattaggaggataaacttggtttaggatgtgttgtattagtgttcttaaaacctaagaaacaattagacttcattgtcaatgccatcatggcattatctgaaaatcatgtaaagattcagaacaccgataannnnaannnannnnnaaaaaa

SEQ ID NO: 29487 - DNA, 753 bp, Glycine max
  Clone ID: TF_GmC5878_2
ccacgcgtccggttctaacatacatcaaagatattgctagatgttcaaactgttaagacacccgagtgtaactttcaatctctgtaattttcgaatttgttggacaggggatggttaggtctgagaaaacaaataattttttgatatttactgcaaaagtttataacttatgctgaaaggtcttcaaagattcagtgagattaatgatttcaggcgcgcatgcaagaaatgaaggaaaaagaactcaagtaccttgggaacggcgatgcaaattcccatgtttgtaaagtatgttttgaatctccaactgcagcaattctgcttccatgccgacatttttgtttgtgtaaatcttgttcacttgcttgttctgagtgtccaatatgccgcacaaatattacagataggatttttgcttttacataacagagggctctatcccattgaattaatatactccatgctgttacgggtgcaattcttttattagtttgcctgtatgtaaatccgtttaaaagatatatcaatatcttctttcttttatactaccccaggggaactgtattatagggggggggtggggggggggggacaaaggggtgcggagaaagaatgtaaaaagaaaaaaggtgtaaacagcactgctgaagtacatgtgcacaatatacgtttgttttatgtaatccagcagaattttgtttccccatcctctgtatgttctttactgagtgtaagagctgaggtttcttattg

SEQ ID NO: 29488 - DNA, 932 bp, Glycine max
  Clone ID: TF_GmC5878_4
aattaaggaaataagaactcaagtaccttggaaatggcgatgccaattcccatgttgaaaggtcttcagagatttagtgcgatttatgatttcaggcgctgaagaggccaagagaagagaagaagccttggagaacgatttagcaaatatgtgggtccttgttgctaagttaaaaaaagacgggggtgctgttccagaatcaaacatcgataaaaaaaatgatggcgcagaacacataaatggtccaaaaactaatgacgttgaaagtaatattgttcccaaggagcatcttttggatgcaccgaaaccagatgaggaaatgcccaaagaagagcccttggttgttcgcctcaaggcgcgcatgcaagaaatgaaggaaaaagaactcaagtaccttggaaatggtgatgccaattcccatgtttgtaaagtatgttttgaatctccaactgcagcaattctgcttccatgccgacatttttgtttgtgtaaatcttgttcacttgcttgttctgagtgtccaatatgccgcacaagtattactgataggatttttgcttttacataacagagggctctatcccattgaattaatatactccatgctattacgggtgcaattcttttattagtttgcctgtatgtaacggcgtttaaaaggtatatcaatatctttcttttatactaccccaggggaactgtattatagggggacaaagggggtgcggagaaagaatgtaaaaagaaaaaaggtgtaaacagcactgctgaagtacatatgcacaatatatgtttgctttatgtaatccagcagaattttgttgcccatcctctgtatgttctttactgagtgtaagagctgaggtttcttattgattccatcctgctgcctggatttggatctaagagaaaatatatgtttcggaaagtga

SEQ ID NO: 29489 - DNA, 732 bp, Glycine max
  Clone ID: TF_GmC32907_2
ataaaggacaattccattgtgatgaatgcggcatttgcagggttggtggtcgtgataagttctttcactgtaagaaatgttgtgcttgctattcagtgagtgtgcaaaacaatcactcatgtgtagagaactcaatgaagagtttctgccctatctgtttggagtaccaatttgattcaataaaagccccccccattttgaagtgtggacccccaatgcatatggagtgctatcgagagatggcaactcaaaatcagtatcgctgtcctatatgcttgaagacaatagtcaatgatatgaactgggaatatttagatcgagaggtgtgtggaactattattaaattttgttttgaaatattttttgttggtctatgtatgaccatgttttatgtctttgaactctaaagtaatattccacatgactttcttggagacaaggaaaattcatggggataaaacaactaggaaatgagccttggaagacattttgtatcaaatttttgctatgattgtaatggttggatggttgttgtcatatataaataaaatgcaactagcatggtgagttgcatatttgctttgaggcaaaaaaaaaaaattctctctgtacataggaaaacatgaggtaattgtagtaattgtctattgtgagggatgctttggcaccgtagcttattacaaaaaatcactttttgcttaagcggatggtcctggagaaatctgttgtcac

SEQ ID NO: 29490 - DNA, 1440 bp, Glycine max
  Clone ID: TF_GmC137799_1
ccacgcgtcctcgagccgaatcggcttaaagaaagagtgaccgagagcgatccgagagagagagagagagagagagcccgatcttcctctatcgatctctgctctttcctcccccctttcaagattcgttgcattttctcatttctcgcgaattccgaaatcgcgttccgttggctctcgattcccacgctcctcgttcacgattattcgttgcattttaccatttctcgagaattccatcaacgaaatcgcgttccgttggctctcgattcccacgctccacgttcacgattttgattgagatgaaacttgaaagggcttgatagtcaacaagggaagagaaaatgctgatgcccaggttcatgggaaagtgcttctgttttgggcaatggctgcaatgattactgcctctgcattgtaaatttgctcatctttcatgatgtggagttttgcatcaaatgcccttacaagcattagattgaaaataggctccaaacagccaagtcttcttcatagtgaataccgtgccctaggtctcgtcttatggcccagcagagaggaagggctggaatgcccaatatgttgggaatctttcaacatagttgagaatgtgccctacgtcttatggtgtggccacaccctctgtaaaaattgcatcctaggactgcaatgggcagtggtgaaatttcctactcagcaaatcaagattccattcttcatttcttgtccatggtgccacctgttatcattccggatcatttacaaggggaatcttaaatatccttgcaagaacttcttccttctctggatggttgagagcctgaatggtgataggcataaagtcttttccacttgcacagacaaccaaccaatctggtctcccaagtgcaaccttctgggaagccaagttactaattgtaacctaagaagggcctcagtaagtccttttcctagattgctgggatctaaaggtgatgttcgtgacaatgatggttcaacacaccactttcttaatcctaaattgcgctgttattttagttctacactttctagtcactattctttttgctatatcatcatttctcgtattgtactttgcataccctacgatccagaggctggtaagagaaataacatcttaagatatagccttcagcagactgtttctctggattgattgtcgtactctggtaatttctgtttgttacttttaggtttttatattcttatggctctatagcttttgcaatttttgtatcaactttaagtttcatcttgagaggaactttattttttggcagttgtatttttattcttaatttcctttttctgaagtgggtaattaaatattttgtacaaagaacaaggttcacttgccgaaaagtacatgtattcgaatgactatggttatgtgatacttatagaaaatgtttaatgcaa

SEQ ID NO: 29491 - DNA, 2951 bp, Glycine max
  Clone ID: TF_GmC399_1
actccgggccggaattcccgcgtcgacccacgcgtccggaaaagacagcggctcgagcattttcgttttccaacaacctctaccctaacgccgtcataacggtttgtgcttccgcgacgcgacgcttcaactgtgaaacgcacgcgacgtagtttatataaagcgccgtccctttccgtttgtgcagtcagcaagacgatgacctgtgccaaattattttccgtcttttctctcagtttctaatttccgagaggaagtaagttattgtttcttgctggaaattgaggtggcttttgagttttctattgtgattttcggctatcatgggatcagcttgttgtgttgctgcaaaggatcctaatcttcctaacagaactggggatgaaagtttgcatagagatgttgtgtgttcaccatcggggagctttcaatgggatagccgggggcgttttgctgatgaaattgagaatccttcatatcacacctcccatgtggacagtagaaatgtcagcatggagctaaaaggttcgttaagttctgaaagaggtaatttatctgatggtggaagcattgttgagaattctgtaacacctatttttctgaagtcccctgttgatgaggcattggttgcaaatctgatgacccccacttctgatctgtccatgtcaagcaatttttctacagtggtgaagaacccggcggggacacgtgaaatactgacaagagagagaaaagaagatgcagtgagtcacagtcatagaatagaaacagaggcaccatttccgttttccaacaacctctaccctaacgccgttataacgggtcgtgctttcgcgacgcgacgcctcaactgtgaaacggacccgacgtagtgtatatacagccccgatcctcaacaccaaatctttaatttacaagacatacagaagtctaaaggcctataacttaccctttgttcaatcacaattaagaccatctacgcaacagtactccaacaagatgggcacatcgatctccagcacaccctctgttgagacagatttctgatagtcgaatcatgggtctgaaatcgccagacaactcaatttctgaaggtaggccatcatttgtactctcaacttgcagcaatgaaatggcagctggatccatatgcggatcatctgatggctggtcaatgcgcaccttttctgagctggttgcatcatcacaaagggaaaggtggtcctttgatagtgagtgtggaatctttctgggtcacaagataagtggatccagtagcaggttctcgtattctccctccatggaactacaatcttgtggggcttgctcaaagctattgaccgagagatcaacatggagcaaccagaagtttattgccaacagtgacctctcagttgttgctgtactagtctgtggtcattcatatcatgcagaatgtttagaggctatgacatcagaggcagataggtatgatccagcatgtccaatttgtatggttggagataagaacttgtcaaagttgttgtccagaaaaggtcttcgggctgaatcagagatgaaggccaagaaccacaagatatccagaaaccgtgtagttgatagctaccttgatggtggttttgatgtttttgatcgtcaaaaagatatagatttgagaggaaaagtgtcaaaaatggaacctagctgcagtgcaaggagctcatttggaaagcctttcttgaggagacacttttcacttggatcaaagtggagccgatccctgtccgagaatgattctgccaggaagaaaggcttttgggcaagatatcgttaagatttagttccatttgctgtaagagtcaatcattctctaattatagttgtaataacaccatcaatttagaatgaatattttctatgtagcctaactttactgataactttgaatgctttaaaataattaattttgaatcttgacatggctggtcaatgcgcaccttttctgagctggttgcatcatcacaaagggaaaggtggtcctttgatagtgagtgttttggatctggtcgtcacaagataagtggatccagtagcaggttctcgtattcgccctccgtacttctcaaagttgttgtccagaaaaggtcttcgggctgaatcagacataaaggccaagaaccacaagatatccagaaaccgtgtagttgatagctaccttgatggtggttttgatgtttttgatcgtcaaaaaggcattgatttgagaggaaaagtgtcaaaaatggaacctagctccagtgcaaggagctcatttggaaagccattcttgaggcggcacttttcacttggatccaagtggagccgttccctgtccgagaatgattctgccaggaagaaaggcttttgggcaagatatcgttaagattgagttccatttgctgtaagagtcaatcattctctaattatagtaataataacaccatcatttagaattaatataaattccagtcaggttgatgtggttcatatgaactgtatgaatataaacgtcctttgacaaatggagctgagccaaagcagtgacgagcgcaagaaggcagaggaagcaaatgcacatttatgaagatagttatgcttcagttgtttttatggtaatagaggcagacttgcttcattctacctgctgcagatagcaaaataaggtttaacaatcaatcatacgctggaaacttaaaaatgtgtttttaactattgtatttatattttcaatgaatacaaattaacataactttgcaagttaagtcaagtgaaaggagttagttatgttgcccttgagagaacaaggcgaatctgaagattgtcatttgtcagacaggatcactgaatgttgtaattgatttaatgttggctcaaatatgatgcttagaagttaaaaaaaaaaaaaaaaaaactcagactagttctctctctcc

SEQ ID NO: 29492 - DNA, 1766 bp, Glycine max
  Clone ID: TF_GmC287_1
ccctcgcgtccgcatagaccccacgcacacactgttctgttcattcgtgtcggctcgcatttcaagctttagcgccaatattcagcttccgttcattccacgcatttctcgttcgtccgattcgtcgttctgcattccatttccttttaaattttacattttcaaattctttttgcagcttaaaatttaaagaatttgaaaagctcactcagttctcgctcgcgattttctcactctctcgtccgacgctcgcaatactcgctacgaccctcgctctactctctctgtctcacgcgcagtggtgcagagcgtctctcatctctgcgatttagatctttgttagacaagcactggatagtgatctgaaatcatcgttgaaatttttctgccttttatttcaagacatgtatggttaatattggacagctgaaatgagatgcaatgcatgctggcgagaagtagaagggcgagccatttccacaacttgtggtcacctattatgcacagatgatgccaataagatactcagcaatgatggagcatgtcctatttgtgatcaagtcctttcaaagagtctcatgaaacccgtggacgtcaatcccaatgatgaatgggtcaatatggccatggcaggggtatctccacagatattgatgaagagtgcatatagaagtgtgatgttctacttggggcaaaaagaactggagatgcagtttaagatgaacaagattgttgctcaatgccggcagaaatgtgagatgatgcaagagaagtttacagaaaaaatagaacaggtacatactgcttaccaaaagatggccaagaagtgccagatgatgcaacaggaaattgagagcttaaccaaggacaatcaagaacttcaggaaaaatttgctgaaaaatccaggcagaagagaaaattggatgaaatgtatgaccagctgaggaatgagtatgactcggtgaagcgatctgccatacagcctgcagacaacttttattccagaaatgagcatgatttgttctcgaacccacctaatataatggatggcagagaaatgggcagaaaaggtgggctggtattcactcctgccactccaggaccaagagaggatgtctggccagcaaggcagaatagcaacaactctggtcactttgatctgtccgtcggctcaccagcgaaacaaacagtcattgcaggggatgctggaaacagaagggctggtgctcatcctgtttttggacctggtgctactaataacccatccatgactttgaggaacttaatactgtctccaataaagcggcctcagctctcacgtaaccgcccccaactattcacgttgtaggcacaaaggaggaggctaaccttctataatatcaggaaaaacgaatctaaagtttgcacaaatcagtttgtagtttgcgtgatgtgctaatgatattttagacttccgtttctatttcttacctcaaactcctatagatgaagagctgctaacatgaacaatttatatatcattttagttccctagcttcaatctgtagatagataattcccagcgtattatacggtgattagagaaaactcaagtgaagccacagccccatttggtttcttgtagcaaagaatgaaagcatgttctttagcatttttaacatgaacattttgaacttttaaaaatgctatttgttcacattgttggaagacttgtatgtcacatgataacatgtatattgtcgatcaatatcctcgttcagcaggc

SEQ ID NO: 29493 - DNA, 502 bp, Glycine max
  Clone ID: TF_GmC5791_3
gatattttaggagctcagacggtatttttttaagaagactgtaagaagagaattttaatttctcactttttagaaagaaattgaaattccagatttttagttgtttaaaattctgttttaaaattccaaattttaaattttttataaaaagcatccaaacaataaattctaaattacagaaatttaaattctctgataaattactttcctcaattaaaattctctatccaaacgcactattaatgaaattgtgatgcaatatataccattaggagcaattgaaaattagttcttaccttaatgtggtgcaggtccgtggcctgccctgtgctcacaattttcatgttgaatgcattgatgagtggcttcggcttaatgtgaattgtcctcggtgccgttgctcagtatttcctaaccttgatcttagtgctctgtccaatatccgttctgagtctgaacaatcttctgccactgctgtgacaagcagagatatgacaggcca

SEQ ID NO: 29494 - DNA, 739 bp, Glycine max
  Clone ID: TF_GmC135433_1
gaattcggcacgatggattgaacaagatgttgagctaacacatggacatatgcgtgtactgcgattggacattgttaacatgtcataagagcaattgctggctttgaaagagaggatgggtactgtgagcacagctctaacagaggaaacactatcagaatgcgtaaagaaaagtgtttaccagtcctcaccatctgacaaagaagctgagagatgcaaagaacataaggatgatacaacacgtcccattttgcaggaggaatatgtggctgcagaagaagtggggagtttgcaatgcgagcacatgtatcatgtggcttgcatacagcagtggctacagctaaagaactggtgccctatttgcaaagcatcagtggcacagtcaaattcatcaccatcctaatgatcccatcaattgcaatgttaggccagacgagggagactgatttctttgtacccctcttgctgttcatttttttcttcatcacttttgtacaaaatacagttgctcctcacttatttttattggtcatttgtacatagccaatattttcattcccattatacaataatccaagccattggcctgatatagactggaacttcttgatcattatagaataatccaagccattgctggaacttgttaatctgctggtgcaatgtttttcagccttcatcttatgttccttttttttaatccatacataaagaagcactaaggaattcggaaggaaaa

SEQ ID NO: 29495 - DNA, 2362 bp, Glycine max
  Clone ID: TF_GmC241_1
atgccgcgtgcgcatgcacgcagtccgaccccgcgatacgaagtgaactcctcacgagtccgacactgctatcgctctccgctctaattcaccgatccactggataagtatgaagaataaaaacagtcgagctaatcggaaagctcgttcggtgaaaccccccgattcctgtttatcttcttccaattcaaacaagaaatggatggttccctataaattctacgatgtcaagggtcccaattccgagtcaaaccctaatgttgactcgtctagttgggttttgtgcaccgaggttcaattggaaaccattctgttgaaaaacattgaaattatatacaatgacactgtgccaaagcttgttgctttgggctacagtgaggagattgctgtcaaagcgattctgtacaatggacattgttacggtgccaatgatttggcaacaaacgtgctgcacaactccttggcttgtttgacaacggggaccttggacttgtctgagtccagccctgcgttccctgatatgaagaagcttcaggagtactctttgatgaaccttgtgtctttgttgaaagaggtgaggcccgatttaagtaggggtgatgctatgtggtgtctcctcatgagcaatttccatgtgttgaaggcgggcgccatcccggttcctgttggaaacacgtgccctcctcctcctcctcctttgcccgagcttgagaacacgggatggagatttgcgaaagagggaggcttgggttttcctttgaatgggctcttttctgatactgatatgactatacggttacagagagatattgaattcccaaaaagatttgaccttactcctgccatgaaaagcttgttgaaaagaaatgttgcaatgtttgctgatggttttagggctaactcaaaacaggtgcagccgcaagccagtgaatttcctaggactggctctgtttcgaaattgggttcttcatctgcttctgggactgctgcagtccttggtgagcagcctggtgactctcacaatcagaatgaccaggaggacttgaactctgtgatgagtaaatttcttgatctaaatattgatgataatgtggagtttgtgccagaagacgacaaggaggaggtgatagtcactctagttaatcagataaaggatcttgagaaacaggtcaaggagcggaaagattgggctcatgagaaggcaatccaagcggcaaaaaagctaagcagtgatctgattgagctgaaaaagttcaagatggaaagagaggagaataaaaaactgccgaaggagacaggggcagctgaggagctggacaacccaaccatgatgagactctcagaaatggagaatgccttgagaaagactagtggtcaaatggaccaagcaactgcagctgtcagaaaacttgaggcggagaaagctgaaatcaaagcagagttagaggcttctaaattaagtgcatcagagtcagtcacaagctgtttgcaagttgcaaaaagggagaaaaagtgcttaaagaagcttctgacttgggaaaaacagaaagtaaagatacatcaggatatttcagatgaaaaacagaagatattggagatacaagaagaactagctcagattaaacagtgtgcaaaggaaactgaggtaacgaggaaggaagagttgaaggctaaggaagaagccttggcactaattgaagaggagcgccgttctaaggaagcagctgaggctaatcataaaagaaatcttaaagctttacgcctgaagatagagatagatttccagcgtcgtaaggatgatctccctaaggctggagcagagattcacgccttaaaagcacctgcacggtctactactttgcctacaagtgagtctgaggatgcagagccccagagagagacacttgctaagcttctgctagagttagataatgtgaaggatttttctggaaaagaaatcaacggtgatagagaatgcattatatgtggaaaggatgaagtttcagttattttcttgccatgtgcacaccaagttatgtgtgctcgttgcggtaaagagtatgggaaaaagggtaaagctgtttgtccatgctgccgggttccaattgaagagagaattcctatatttggggcatgttcgtagtcttacatcggtaagctatgaatattttgcagaaaaactatgttctgccgtagcttatcttttgaatgtctgaaaatgaaaatctattattactaccttgaaaataagataggtaaatactaacatgtgctttgaaggcactagtcaaggattaaaaaatataaatgattttaggatatgagtaaactgtaaagacctgagttgtttatgcaacaaaac

SEQ ID NO: 29496 - DNA, 2435 bp, Glycine max
  unsure (1)..(2435): unsure at all n locations
  Clone ID: TF_GmC35912_1
ggacaaggaaagggaaaagagaaagagagagaaacttcgaggaaacgaccttcaccgttcatcaacctcaattgaacaacaacatcatcatcatcaaaacatcccattcttattcttagcatttctcaatcactgccacactgatactactgacacgcccaccttccatcttattgctcttcaactcccactactgcctctctctctctctctctcagccccttcaaggataacgaatttatgggtggatcaatttcaaaacggaggcgttctaggcaacgttcggcctcaaattttcttcctcggtatcaacaacctcatttcccacaaagccaagataatgggtctgtggggcattatgggtattcatctcagagctatagtggtggtcgtgctccagaacaagtaaagagcttggataggaagtatttaaggataggtgatgattataagagcttgaagcaggtaactgatgctctggcaaaagctggcctagagtcttcaaatctcattgttgggattgattttacgaagagcaatgagtggacaggtggaaggtcatttcaaaggagatgcctgcatcacattggtcatgaacaaaatccatatgaacaagctatatctatcattgggaaaacattgtcttcctttgatgaggataacttaattccctgttttggttttggagatgcatcaacacatgaccaggaagtttttagtttctatccggatgagagattttgtcgtggatttgaagaagtgttggaacggtacagggagttggtccctcaattaaagcttgcaggaccaacatcatttgccccagtcattgagatggcaatcaccatagttgagcaaagtggaggccaataccatgtgttagtgattatagctgatgggcaggtgacgagaagtgttgacactgagcatgggcagttgagtgcacaagaaaagaaaactgtagaagctattgtgaaagctagtgaatatcccttgtcaatcatattagttggagttggagatgggccgtgggatatgatgaaacaatttgatgataacatccctgcccgagcatttgataatttccagttcgtgaatttcacagaaataatgtcaaagaacatggatcggtccagaaaggaaacggagtttgcactcgctgccttgatggaaataccctcccagtacaaggcaacactagagcttaatatattgggtgcttgtagagggaaagatatagaccggattcctctcccaccgcctctatatggtgcagcatctttcaattcccccaaaacttcccgtcaatatagttctcgtcccagtgcaccatctagcagacatgatgttagcacaaaccctcctgcaacttctgcttctgataatcaggtttgtcccatttgcctcaccgatcctaaggatatggccttcggttgcgggcatcagacatgctgtgattgcggacaagatcttgagttatgccccatttgcaggagtaccattgatactagaataaaactttattagatgacctcttaaaacttgtccatgacttttcatgttgaggtatgaaactgggttttcgacaaattttcttggtgatgactggtgagggaggaggatggggggcaaaaagagcttcgcattgtacatatttatatttatttattcaagtctatgctttgagcgcattttatactagagttggatttttgcgttgttattatattaattttgtggcaattcatcaatataacattccatgcttaatatattgggtgcccgtagagggaaagatatagaccggactcctctaccaccgcctctatatggtgctgcatctttcaattcccccaaaacttcccgtcaaaacagttttcgtcccagtgcaccatctagcagacatgatgttagcacgaaccctcctgcaacttctgcttctgataatcaggtttgtcccatttgcctcacggatcctaaggatatggcctttggttgcgggcatcagacatgctgtgagtgcggacaagatcttgagttatgccccatttgcaggagtaccattgatactagaataaaactttattagatgatctcttgaaacttgtccatgacttttcatgatgaggtatgacaccgacgaatttctttgtgatgagggagggacgagagaatgaagggttgaaaagagtttcgcattgtacatattttttatttttgatatttatttattcaagtctatgctttgagcgcattttatactagagttggatttgtgttgttattatattaattttgtggcaagtcatcaatataatgttccatacttctaaaaaaaaaaaaaaaaaaaaaaaaaaaaaaaaaaaaaaaaaaaaaaaaaaaaaaaaaaaaaaaaaaaaaaaaaaaaaannnnanaaanaaaaaaaaaaaaaaaa

SEQ ID NO: 29497 - DNA, 1964 bp, Glycine max
  Clone ID: TF_GmC1087_3
acgctgcgagaaatcgcaagaaaggggaatgtcagcttttcttcttttatatggcaccccttgctttttctttttcatctcccaacttagaaattgaattcaacccaacactactaatacactgtgcctgactcacttggaaacctaacctagggctttttttttttttgtttatatattttttggattgttgtgtccatccatcaagtggtgtttgtgtataaattttgtgtggtttgttttctggattaggatttggtttctgtgtgctgtgttaaaaatagtatcaatcaatcagaaaggaaaaagagagagttagggaagatgagctggcgcagggtattgaattcagcacaggccttggctgcacacactttccttttgtgcttcactctcttcctcgttctcaagctcgatcacaatctctcttcttcttggtgggtaatattttcacctctttggatgttccatggtgttgtggctcgaggaaggttttcattacctatcgtggctatgctgcagttggtctaaagatagtgtttcttcccttactaacatttgaaatcattattctcattgacaatttcaggatgtgtaaggctctaatgccaggggatggagaaaatatgagtgatgaggctatatgggaaactcttcctcatttttgggttgctatctctatggtgttcttcattgctgctacagtcttcacactcctaaaacttagtggtgatgtaggtgctctgggctggtgggacttgtttattaattttgctattgccgagtgctttgctttccttgtatgtacaaagtggtccaatccagtcattcatagaaattcaagagaagccagtagttcatcttcaactacgattacatatcttgactggaacagtggtttagtggtttctacagacgaaaatcaacaccaggggagaatgtgtagccttcaagacataggaggtcatttcatgaaagtaccaattattgtattccaggttcttctttgtatgcatctagagggaacacctgcttgtgctgtacatatacctcttccagttattttctctccccttttcctactgcaaggagctggggtaatgttatctgcatctaaattaggggagaaacttgtgcttctgctacgaagtggagctggtggaggaatatattttagattttcttcaagagctcatgattgcttggggttcttgcatcatggttctagattattaggttggtggtcaattgatgaagggagtcgggaagaacaagcacgactataccatgagggagcaattgggtataatacattttgtggttatcctcctgagattgttaagaaaatgccaaaaaaggaacttgctgaggaggtttggagactccaggcagctcttggcgaacaaactgaaattacaaagttcagccaacaggagtatgaaagacttcaaaatgagaaagtgttatgcagagtttgtttcgagggagagattaacgttgtactgctcccatgtaggcatcgtgttctttgcagcacttgctcagagaagtgtaagaagtgcccgatttgccgtgactccattgctgagcgtctgcctgtatatgatgtttagatgttaacttggtcaacttttttcgtgttaaaagatcatagaagaaagggactagacaacatgttttaacagggtgaatatacttagtacagtgttggcagtgacattaattcgacaccaacttgactgtctaatacagcatcaaaggataggaagaaaaatagagcatccacttgatatactttggattttgagtttgatttgttttgttttgcattcagtctcttctgtaatttgtatatatatactatctttttacaggctctacaattgagtgatgagtgttgaatttgagtctcttttcggttccttggccttcactctcatctgtaagttgtatatattctagct

SEQ ID NO: 29498 - DNA, 503 bp, Glycine max
  Clone ID: TF_jC-gmst024165h11a1
ggctcgagctcgagccgaatcgtgttgagatttgaccaattttttgttcatatcttgtggtatcaggagaaagtgttatgcagagtctgtttcgagggagagattaacgttgtactgctcccatgtaggcatcgagttctttgcagcacttgctcagagaagtgtaagaagtgcccgatttgccgtgactccattgctgagcgtctgcctgtatatgatgcttagatgttaactagggcaacttttttcgtgttacaagatcatagaagaaagggactagacaacatgttttaacagggtgaatatacttagtacagtgttggcagtgacattaattcgacaccaacttgactgtctaatacagcatcaaaggataggaagaaaaatagagcatccacttgatatactttggattttgagttcgatctgttctgatttgcattcagactcttctgtatttgcatatatatactatctttgtacaggctctacaattgagtgat

SEQ ID NO: 29499 - DNA, 1701 bp, Glycine max
  Clone ID: TF_GmC1334_1
gacgattgccgctaaagactcagccttattatacagacacggcgttacacaaataccgtacactgctccaagccaaagaccgaagacggagccgaaaatgactactacttgcaaataattcccatttttttctccgaaactcaaaacttttcatttgaagagttatcatgggatcagcttgttgtgttgctgcaaaggatcatactattcccagcactagcagaactggaggtgaaagtttaaatagaaatgctgggccgtgttgctggtgaaattgaggatccttcctttcacacatctcgcagagtcagcagaaatgtcagcatggagttaaaagggtcattaagttctgaaagaggcaatttatctgattggggaagcaccctggataattctgtaacacctttgtctctgaagtcccctgttcgggagcatttggttacaagtcagatgactccatcttcaggtctatccatgtcaagtaattgctctgcagtggtgaagaatctgattgaatcaccagagattgcagaatcttcaataccaaatcgttcagtaccttcagttttctcaatccctacgacagatccaatgactaatcataattatcacaatcttcctaactcaacaccatccagatgggctcattgttctcccggacacccactgttaacacaaatttctgatagtcgaattctgggtcttaaatcacctgacaactcaatttctgaaggcaggccatcatttgtactctccaactgtagcaatgatatggcaacggcatcccaatgcggccctgtgatcggctggtctatgcgcaccttttctggatgggtggccccatctcaagtggaagggtgccctcttgctaccgtgttttcaggttcagctcgtcccaagattcgtggatctagtagcaggttctcgtattccccctccatggatttacaatcttgtggggcttgctcaaagctcttgaccgatagatctgcatggggtagccagaaatttattgccagcagtgacctctcagttgttgctgtactggtctgtggtcatgtttaccacgcggaatgcttggagactataacgccagaggcagatagttatgatccagcttgtccaatttgtatggttggagaaaagtacatgtcgaagttatccaaaaaaggtctttggaccgagtcagagactaagaccaagaactacaagatatccagaaaccgagtagttgatagctacgtagatggtgggaatgatgtttttgatcgcctaaaagatatagtttcaaagatggagcctagtagctccagtactaggagttcatttggaaaacccttcctgaggcggcatttttctttgggatcaaagtggagccggtccttattggagaatgattctgccaggaagaagggcttttgggcgagatgtcgcagagactgatttcccctagccatagcttttagtcgcaggagttcttcaattatactagtaacaccaaccaagttagaattttatattttctatgcagtctagctttagtaatagtttagatttatttcaaattttattttaacttgtcaccaaaagttcccaccatgttgacgtggatcatattgattgtatgaatgaagcgtcttttggcagaatcagagccttagcaatgacgaacacaaggatgcgaaggaaacaaatacacca

SEQ ID NO: 29500 - DNA, 369 bp, Glycine max
  Clone ID: TF_LIB4164-010-Q1-N1-H1
aaatgccattgattctccatttgaataaactacatatgctcgagagctggttccaaaagtcccatgttgcatttaaaatgaaggggctggccacatcacacagactctctacctattctggaaatgctgtcaaaataagggatattagcccccaacttgggacatattttcttcactttgaagtgactaacatttcttaagccctcctacaagttgctcccagaagcaaatacctcaggcctacaaactgggcaaaccttgtctattttcaaccaattgtggatgcactctggatggttcagatgcttgcaggacataactgtcaaggtctcaccatctctataagccacccggcgaatgacacactaa

SEQ ID NO: 29501 - DNA, 580 bp, Glycine max
  Clone ID: TF_GmC1151_1
agcgagttttccgaagaagaggaaatccggtgcatggcgaactgcaagcacattttccactgcgcgtgcgtggaccgttggatcgatcacgatcagaagacgtgtccgctgtgcagaagtacgttggtgccacatcagaagctcgaagaatacaaccagcgactatgggcggcttctggagtttcgcagttttattaccaagacgattacacggcttccctctgaatttttctttttctttttccacttatataattatatatatctttttttattatggtggggggacttgacagctagtgtagccaaatgtatatagctaattaaaacaaaaatattgtatcaatcaaaaagtgagatttttttttggattcgtatatacattttcccaacttctatttctatttactacactattattagttattataaaaattaattaatttttaattattttataggataatttatgatatgattgaatgaaagggttaatttttcttatggattattattctttgttgttcaagaaaaaagggattttattcacaaagaaatgatatgagttggttattgtaat

SEQ ID NO: 29502 - DNA, 1427 bp, Glycine max
  Clone ID: TF_GmC6780_1
acggacggaaggaacccgaagtgagctgaaaaaacccaaggctcttgacaagaccgacagaagggggaagttgaagatctgaaaccctaattatccaccgatcgatctggtgtggagggtgtgaattgtgaatttgtgattgtgggaaaaagatgccgcagaggcactcgaagaacaacaacgatcttgcgttcttcacgtacgatgagaagcgaaaactaggttatgggacccagaaggagaggttgggcaaggactccattaagcccttcgatgcttgctctctctgcctcaaatccctaattgatcctatgagctgccagaaaggccatctcttttgcaaagagtgcattcttcagtgcctcttgtctcagaagaaagacattcaaaggaagcttgcagcccatgctgctcagcagaagcaagaaaaagaggaggaagaagagaagttgaagttgcaaaaggctaaagagcttgatgcatttgatcaacaaaatcatggtgctgtaccacaatacagcgacagaaattatagtcgtgataagaatggtttccatggggcaaacagtgtgaaggtcacttcctatgaggaggaagcccttcggacaatgaaggcattttggttgccttctgctacaccagaagcttctattaaagtagatgcaccttctaacagtactatctgtccggaaggcaatgagaaactgaagttaaagacacttttccctgtgcagtttactgaggatactactgagcagaaaaaaatccaaggctcttgacaagacctacatttgccctagctgcaaagttactctcaccaacacaatgtcgcttgtggcccttagtacatgtgggcatgtattttgcaagaaatgtgctgacagatttatggctgttgataaagtttgtcttgtttgcaacaaggcgtgtaaagagagaaatttggtgaatttggagaagggagggacaggttttgccggtcatggggatcatcttgaagccagagacttcaagcatttgggaagcggtagtggtttagggctggttagacctgcaatgaaaacttgacgctttattgatttaggttgttgggtgtatgatatagtccattcaggagaagaaaattgtgctttaacttctcttgatgaagttaccttgttaccgcgatacacattattatctgtcttattatcttatgatgttctacttcgttttattttatttttacttttttttttggtttatcccagataaacctttataacgtaaaaaatcagcttgattcattaatgactagcgattggcaatgttaaatgtaaatggatgcattctctgctgtattcttatttattattgtgaaaggatgctgtctgtcaacactgtcccgattcttaaacaaatgaaaaaattggcacagatatatatcg

SEQ ID NO: 29503 - DNA, 549 bp, Glycine max
  Clone ID: TF_GmC6780_2
gcagtttactgaggatactagtgagctgaaaaaattcaaggctcttgacaagacctacatttgccctagctgcaaagttactctcaccaacacaatgtcgcttgtggcccttagtacatgtgggcatgtcttttgcaagaaatgtgctgacagatttatggctgttgataaagtttgtcttgtttgcaacaaggcgtgtaaagagagaaatttggtgaatttggagaagggagggacaggttttgctggtcatggagatcatcttgaagccacagacttcaagcatttgggaagcggtagtggtttagggctggttagacctgcaatgaaaacttgatgctttatttaggttctttcaggagaagaaaattgtgctttaacttctcttgatgaagttaccttgttaccgtggtaaacatcattatctatcttatctatgatatgatgttctacttcgtttattttatttttacttttttttgtttacccgagataaacttaacgtgaaaaatcagcttgatccattaatgactagcgattggcaatgtt

SEQ ID NO: 29504 - DNA, 1593 bp, Glycine max
  unsure (1)..(1593): unsure at all n locations
  Clone ID: TF_GmC76377_1
gctggtctggtggggcctgctctctctctggctcggaagcttgggtccggggctgcctcggttggtggccagcatctgtgcgcccccttacgacccgtccatcctgctccccctttctctctctaaactaaacagtaggggtagcagagagagagagagagaatgaagcggtgcatggacacacatcaaacgctacgaaaagaatcctgatgatgacgcaatgactctcccttcacacgatgcttggattcacacttcacacacactcctccccagatggaaatctctttccctccctcatcagcagtcaactcttccaatttctatatcaagagttaaccaagttgatgcagcgagattggacgttgaaatgtcagccatgttgaaagaacagttggttaaagtgttctcattaatgaagccaggaatgttatttcagtatgaagccgagcttgatgctttccttgagtttcttatttggaggttctcaatttgggtggataagccaaccccaggcattgctctcatgaacctgaggtacagagacgagcgtgcagtagaaccaagagataaagtccgaactggtctggagggacctggactcactgttgctcagaacggctgcgagaggattgcagatgtgggtggtcagtatatatgggctcgcttacaatccttctctgcttttcgtagatggggtgatactgagcagagaccattggctagacgtttatggatcttgatacaacggatagaaggaatatatagagctgcttcatttggaaacctgttgatatttctttgcactggaagatatcgaaatcttattgaaagagccttacgagctaggcttgtatatggaagcccgaatatgaatcgtgctgttagctttgaatatatgaaccggcaattagtttggaatgaattttcggaaatgttattgttgcttctcccccttcttaattcatcatccgtgaaaaatctccttcgacctttttctaaagataaatcattaagttcagctgaggatggctcagcatgtcccatttgtcaggctactcccacaattccttatgttgctctaccttgccagcacagatattgttactactgtcttaggacacgatgtgctgctgctccatcgtttaggtgttccaggtgcagtgagcccgttgttgctatgcaacgacatggtggtgtcccttcagaatgattgattgttactaagaatcagggaaacattctttagagttagggagcatttgatctacttacagaattagcatataaaatactacctgaaattgtggtggtattcttttccccttactttctctttattattattattattattattattattattattattattattattcacatttaattgggaaaacaaatcaaaatatcttcacagaatcacttactcggttcagtgggaagcattctttcccttgtaacaatgtatcatttagttaccccctcatacatttctttccgttattttgaagttaaacttcttgtaaattgtatgtgttgtgattggatatacatactaaacgannngctctcctataaactaaaaag

SEQ ID NO: 29505 - DNA, 637 bp, Glycine max
  Clone ID: TF_uC-gmroLIB3259P253e08a1
aacttaaaaataacggaaagaaatgtatgagggataactgaatgatacattgctacaagggaaagaatgcttcccactgaaccaaataagtgatgctatgaagaaatttgatttgttttcccaattaaataataataataataagggagaaaccaactaaagagaaagtaaggggaaaagaataccaccacaatttcaggtagtattttatatgctaattctgtaagtagataaaatgctccctaacgctaaaagatcgtttcttagtaacaatcaatcattctgtggggacaccaccaagccgttgcatagcaacaacaggctcactgcacctggaacacctaaatgatggagcagcagcacatcgtgtcctaagacagtagtaacaatatctgtgctgacaaggtagagcaacataaggaattgttggagtagcctggcaaatgggacatgctgtgccatcctcggctgaacccgatgatttatctttagagaaaggtcgaagaagatttttcacagatgatgaattaagtagggggagaagcaacaataacatttccgaaaattcattccaaactaattgccggttcatatattcaaagctaacagcacgaatcatatttgggcttccatatac

SEQ ID NO: 29506 - DNA, 846 bp, Glycine max
  Clone ID: TF_GmC74179_1
acccacggatgaagggacgcgtgggcggacgcgtgggcggacgcgtgggcaaggagctggggtttgtcctgcagcttatagattaatagagaagatagttcttctactctactgtggagatattcctgaaagatactcagccatagcatcaaaatcccgtgagtgctttgggttctttcgacgtgggtcaaggttgcttggttggtggtcaatagatgaaggaagtagagaggaagaagctagacttttttgtgctgggagtcctgggtataatactttcacccctgatacggtgaagaaaatgcctagggcagatctggttgaggagatttggagactacaagctgcattgggcgagcagacacaagttacaaaatttagccaggatgagtatgaaagacttcaaaatgagaagatcttatgcagaatttgcttcgaggagcagattaatgtggtcctacttccctgcaggcatcacattctttgcagcacttgctgcgaaaaatgtaaaaggtgccctgtctgtcgtggaccaattgaagaaaggatgccagtatatgatgtgtagactgagttcaatgaagatgtataggtatcttactgatcatacagcttgtgattttagacgaggcaagcactgagaattatcaatttctcttctcatagatatgatgaacatcagaagttgtatagaattttaaacgtgttaccccccctcccttaatttttcttccatagtgcatttttgcaattctgaagggattgccaatagttgcattgtcttgaattttggtaccataaggatttatctacaccaaaaatgaaagatgacatatttgaggtatt

SEQ ID NO: 29507 - DNA, 1427 bp, Glycine max
  Clone ID: TF_GmC74179_2
ggctcggaattcggctcgagctcgagccgctcgagccgttttcataggatgtgtagggctttggtgcctggagatgatgaaaatctgaccgacgaagcagtatgggaaactcttgcgcacttctggatttcaatatccatggtcttctttattgctgccactgtgttcacccttctaaagatatgtggtgatgttgcagctctaggatggtgggacttgtttattaacttcggcattgcacagtgctttgcgtttcttgtttgtacaaagtggcacaatccaactattcatggaggctgtcatattacagaaccatgctcatcgtcaaataccataagatacctagacttgaggacaggaggcttagttgtttacacagatgaagatagacagcaaaatgggttctgcaatctacaggatatcggtgggcatattatgaaaattccattcattggtttccaaatacttctttttatgcatttagagggaacaccatccagtgcaaagaatctgccccactgggtcattttttccccactttttttgttgcaaggagctggggttttatttgcagcttatagattaatagagaagatagttcttctactctactttggagatattcctgaaagatactcagccatagcatcaaaatcccgtgagtgctttgggttctttcgacatgggtcaaggttgcttggttggtggtcaatatatgaaggaagtagagaggaagaagctagacttttttgtgctgggagtcctgggtcagtactctacccgcaagaagtaaaatgagtatgaaagacttcaaaatgtagcatccatttactattaaaagtagtatatctacaacattctgttaagtttgtaggttatttttgttcattgtttgtacttgaatgactgtcaagtgtatcaggatctaacactcttcaaattgaatggtaaatgtatcaggagaagatcttatgcagaatttgcttcgaggagcagattaatgtggtcctacttccctgcaggcatcacattctttgcagcacttgctgcgaaaaatgtaaaaggtgccctgtctgtcgtggaccaattgaagaaaggatgccagtatatgatgtgtagactgagttcaatgaagatgtataggtatcttactgaccatacagcttgtgattttagacgaggcaagcactgagaatgatcaaaatctcttctcatagatatgatgaacatcagaagttggatagaattttaaacgtgttaccccccctattttttcttccatagtgcattcttgcaattcagaagggattgccaatagttgcattgtcttgaattttggtaccataaggatttatctacaccaaaaatgaaagatgacatatttgaggtattatctgttttccccccatgcttgagagctttaaaat

SEQ ID NO: 29508 - DNA, 496 bp, Glycine max
  Clone ID: TF_21602652
ttgtagttaatttttatttttattttattatttattttattttatatgatatttattataattatttaactttatcttttctttttgatttatattttactctcttattttttaaaatttattttattaatttcttcctttaataaaaacgaaaattaatttaaattttaaaaaaagaataaataattcattcattatttggttttaatttggaattaaacttggaatcaatggtgcaaatcaacacactcttacgaaattggattgttaaatcacttcgctatggtggttacggaataataacctctccctttaaagttattataaatcaaaacgaggaaattagagtggcaaaagagaagaattagaaatagaagggaaagtatggaggaagtgtttgatatgtgaaggagaatattcagaagaggagattcgaatgagtttggagtgttttcacagttattgtaaagaatgcattgaactaacctcttctact

SEQ ID NO: 29509 - DNA, 410 bp, Glycine max
  Clone ID: TF_GmC1149_5
ggctcgaggagttggggagtcgaaattgtgagcacagttatcactttcagtgtataaaacaatgggttgcacaaaaaaatttctgcccagtatgtaagcaacaagttgcggctcgacactgagtgactcaacccttctgtttttttggacagcttccattctcatccataaatttgtgtatagtttttcatatccaatacaagcaagagttttcattctttgctgtcaattatcatttcatctttcaaaattcctgcatcctctgcgaggaatcggcaattatatgttatcgagtaaaggtttatattcgggctgagacctttgcatattatacgcaagagttgccttgcttaagagcagttattattatttttttgttttgggtttttaatgaagttgtgtctgtgacg

SEQ ID NO: 29510 - DNA, 255 bp, Glycine max
  Clone ID: TF_700973284H1
acaaacccgaggtgcatcctctgaatcaattaatgctctgccgacttataagttcaaaatgaagagaaataaaagcaaaggggaaagcaactcagctgttggtgaaggtggagttgtggctgcagaactgaaaaggaacgtatgatctctggagaagatgcagcttgctgcatctgcctggctaagtatgaaaataacgatgagctgagagaattgccttgttctcacctatttcataaagattgtgtcgacaag

SEQ ID NO: 29511 - DNA, 448 bp, Glycine max
  Clone ID: TF_LIB3093-023-Q1-K1-C5
cgacttgttcacatcaagtgcaacagtgagagctttaccttgtgggcattacatgcattcatgttgctttcaggcatacacttgtagccactacacatgtccaatctgcagcaaatcactgggagatatggcggtttactttggtatgcttgatgctttattggctgctgaggagcttcctgaagagtacagggaccgctatcaggatatactctgccatgactgtgatagaaagggcacttcacgcttccactggttatatcacaaatgtggatcttgtggctcatacaatacccgggtaatcaagagtgaggcagcaaattctagctgcctttagtatgcttattttttgtaatgaaagtacagagcttgtaaatatttgtatagccaatccaattttccccaaaccaggaaactggttacctttcattttatacacaatgcgagt

SEQ ID NO: 29512 - DNA, 422 bp, Glycine max
  unsure (1)..(422): unsure at all n locations
  Clone ID: TF_LIB3093-047-Q1-K1-B9
gatgaattgaacccaaatactaacgtggtttctcttcaccgattccctttatatacactttttcaattacagttacaggtaatggattaaacaattattagtcggttaataaacacactctctctctactaattctcatcgcattccttttcctctttctccttccaattgagaattcgtttctctaattgacgcanagttcacagtgaaattagtgcaatggaagcggatttcgtcaccagtgacatgctcacactcacgcaggacgctttttacgccaacgataatgatgatgtagctgttgaaggggaaagatgtggaatatgtatggatatggttattgacaggggacttctggattgctgtcagcactggttctgctttgtatgcattgacaactgggctactatcactaatctttg

SEQ ID NO: 29513 - DNA, 432 bp, Glycine max
  Clone ID: TF_GmC76829_1
attcggctcgagcaaattgtcaaattcacattactctctcttcactctttctccgtcatgactacggaaccagacgttgaatccaagtatgcccacaacggcaagggcatggtgggcaccgccattctcctcttcattctcataataatcattattttcttccacacctacgtccgctcctgccgccgtcgccgccgcttctctcattcgcttccgaccaattcctccgccgccgcctctctcgacgacccgtgcctcgacccttccatcatcaagtcccttcccacttttactttttttcggcgacttccaccgctctctccaagactgcgccgtgtgcttatcggagttttccgaccgcgacgaaggccgcgtgctcccgaattggaagcactcttttcacgctcattgcatcgacacgtgggatcgggt

SEQ ID NO: 29514 - DNA, 361 bp, Glycine max
  Clone ID: TF_6455111
tcaccttggagctcccgtcgtattgtgagaagtggagacatgcctacaattggggttcttccttgttgtcatgcttttcatgctgagtgtttggagcaagcgacgccaaagacccggaaaagtgatcctccttgccctgtgtgtgtcaaattggaggaaaattcccctgatcaacggagccatttgagattgaggactggttttccaaagcttaaatcatctcgtgacaatggaccgtcaagaccttggggatgtgtacaggtaagtgattgtgttgaaagggctctgcatgcaccaccaagcaacacaatgttactgcttaatcaaaaccgcattaagaacccttctttgaaaagaattt

SEQ ID NO: 29515 - DNA, 231 bp, Glycine max
  Clone ID: TF_LIB3087-010-Q1-K1-D12
caagaatggatgatactggaagtaattcgtaactgtcgaatccatggatgctgcacttggagaaactcgatctcgaactcaagagccctctatgtttgagttagcacaagaggccggtgttactaccatgcaaccactcgtactgcaatacatgtctggctgattgcataacggctgggcctagatgtgctgtttgaacggcaacgtatgctcaaacgaatgtaaggcatg

SEQ ID NO: 29516 - DNA, 819 bp, Glycine max
  Clone ID: TF_GmC1579_1
tacggctgaaggcggaaaaactctgaccgagtccgagaggcatcatggcgacactggattccgacgtgaccgtggttccggccggcgaagcctccaccagcgccggtccttcttcgtccaccaagaagccgaagcgattcgagatcaagaagtggaatgccgtttctctctgggcttgggatattgttgtggataattgcgctatttgccgcaaccatatcatggatctctgtattgagtgccaggccaaccaggctagcgccactagcgaggaatgcactgtagcttggggagtttgtaaccatgcttttcacttccattgcataagccgatggctcaagacccgtcaagtatgtcctctagataatagcgagtgggagtttcagaaatacggtcactagaactttgatgcggctgagctacttccatcttggacatttggattgtagcatttctatcaactttatagctctacatgttgtctttgcttgcctattggagttttattcaaaagagtcacttctaaatgctttcgcatatagttacgcccccagttcctaattcgatcatatccttctctaacaatgtggcaaaacggtggtgttaattcactcaatgacaagatttatggaatattatagcatgcaaataaaaaaaaaaaacatctacctccccccctccgtcccccctgcccccctgctccccccttttcctccccgcgccccccccattaccctcctcccccctcactcccacccaccctcgcccactcttggccccccctcccctcctttctctcttttatacctctcccccacc

SEQ ID NO: 29517 - DNA, 649 bp, Glycine max
  Clone ID: TF_GmC1579_2
tgactactttcccaaggctgaaaaactctgaccgattccgagaggcatcatggcgacactggattccgacgtgaccgtgtttccggccggcgaagcctccagcagcgccggtccttcttcgtccaccaagaagccgaagcgtttcgagatcaagaagtggaatgcggtttccctctgggcttgggatattgtcgtggataattgcgctatttgtcggaaccatatcatggatctctgtattgagtgccaggccaaccaggctagcgccactagcgaggaatgcactgtagcttggggagtttgtaaccatgcttttcacttccattgcataagccgatggctcaagacccgtcaagtatgtcctctagataatagcgagtgggaatttcagaaatacggtcactagaactttgatgcggctgagctacttccaacttggacatttggattgtagcatttctatcaaatttatagctctacattactgctgataaaaaaaaaaatagctctacattacttgttgtcttttgcttgcctattggaattttattcagaagagtcgcttctaaatgctttcgatccaacatcattatttctaactgtggcaaatacggtggtgttaattcactcaatgacaaaagatttatgg

SEQ ID NO: 29518 - DNA, 1609 bp, Glycine max
  Clone ID: TF_GmC1361_2
tccacgcgtccggttttgtagatctctggtatcccaagtgggcgatcctacagcgatattctcttctctcctcctatgcgccttatctcatcccaagtggtcattctctttttctctatcactgctgcctgcaaacaaaagatatttatattgcattaaaaagatgaaaaaaaagggcaagagtgtgagagggtgtgtggtccttttaagttgaacatgatggaatggccgtctttctcttttgggtcttcccaaatcaggaaacactttctcatcttccctttcccagtctcacacccaaacctcatggaaggctctgtcaacgaacgtcttgattttgggaagatgggatatgggtgcaatcattaccggagaagatgcaggattcgtgctccctgctgcaacgagatctactcatgccgtcactgtcataacgacgctgcgagcttgttgaagaatccctttgatcgccacgagctcgttcgccaagatgttaaacaagttgtttgttcagtttgtgacactgagcaacctgttgctcaagtttgcacaaactgtggcgtcaaaatgggagaatacttctgcaacatctgcaaattcttcgatgatgatgttgagaaagaacaatttcactgtgatgattgtgggatctgcagggttggtggtcgagataattttttccactgcaagaagtgtggatcttgttatgcaattggtctgcgtgataatcatttgtgtgtggagaactccatgcggcatcactgtcccatttgttacgagtacctttttgattcattgaaagacacttttgattcattgttatgaaatgtggtcacacaatgcaccatgaatgttacctggagatgataaaaaatgacaaatattgttgtcccatatgctccaagtcagtgattgacatgtctaagacatggaagagaattgatgaagagattgaagcaaccgtcatgcctgaagattatcgaaacaggaaggtttggatactatgtaatgactgcaatgacacaacagaagtttacttccacattcttggccaaaaatgtggtcactgcagatcatataatactcgtgcagttgcgcctccagttcttccccaatgaccagattcttgggttcaagaagggaaaactgtcagcagaaaattaaagttagcaccctgttattattatagagggctattgaattaattgagcatcaaaagtgattggtgtattgtgtcctagatagttttcttaggttattcttcctccaacatatggagtgggattgttgtctcttggttattgggctggtatgaacatctttatactgtaacagagggaaaacatttttcccggtcatgaattgctggtaatagtgatgtatttgatactgggtgattgattgcattgtcagccattgtggttctctataatttggtcgggattatttgatccttgtagtttttctcgcacattggaataaactgtgatcgttagttttgatcattctattcccagccattattttacaaaagtggaaatagtcatctttttgtggttaaattgaccattccctacagagttgaatgaattgaaacttattatttttt

SEQ ID NO: 29519 - DNA, 252 bp, Glycine max
  Clone ID: TF_700875744H1
ggaagagtatgagaatatggacgatgtcggcacacttcaaacttgtggacatatctaccatgtgagctgcattattccatggctaacgatgaagagcttctgtcctatctgaaaagtatctgctttacctgaaagtacgaaggcatcatgcacttctggaatataaattactcccattatgtgtatagatttggacatccccaaaaatgacgacacgagcctgtatttggaaacgtaatcacaagcatgcta

SEQ ID NO: 29520 - DNA, 763 bp, Glycine max
  Clone ID: TF_GmC1714_1
ccacgcgtccgtgcttatactaactaactcttcttgagaaactctttctcacacgccaagagtaacatgggatttccagtggggtacacagagttgatgctgccgaaggtgtttctgcaggtgctatccgtattgggcttgataagaaaactcatcaccgtcctcttgtgctacatgggcttccacgatttcttcgaatccgacattgcgtggccggagagggcgccggaattccagtcggtgtgggcggtgctcataagggaaatcctaccggtggtgaagttctcggagatggagatggagatggcggaggcgccggagagctgcgcggtgtgtctgtacgagttcgagggagaggacgagatcagacggctgacgaactgccgccacatattccacagagggtgtctggaccgttggatgggatacgatcaaagaacgtgtcccctgtgtcggacacccttcataccccaccatatgcaagctgccttcaatgatagactttgggctgcttcagggattcctgatttctattacaatcatgaatgactctagggaaaaaaaatcctagatttggggacgggagtgttctgtttaggttgttgagtatgtgttcagtgttcaatgttcgtgtaaatattatacaaaatggaaagcggagaattgttgttaaaaaaaaaaaaaaaaaaaaaaaaagatgatgagaacaaaaaaagaaagggctaagaataaaataatttaaaaacataaagacatttatttg

SEQ ID NO: 29521 - DNA, 2546 bp, Glycine max
  Clone ID: TF_GmC266_1
cttccctccaaaccttgtgattcccttcgaatcaaagcaaaacttagcagttcgattcttggtcaccctctgagacacaacctcaccttcctgacatatccttcacaccaatcttcccttcctcctcttctatatacacttcatcatctctatcccctcttcatattttttctattcttaacctttctctacagtatgtggttgctgaaaggatcatgttgttgaagctttttgtgatatatgtctgattatgttgctaggagttaaagctggtgcagacccagaaaagatcttccaatcaaggtactagttccatccatcaacaaagttgtcaattgggatgcttcaatttcaaggttcttttgatgcaaacctgtgcttctaaaaaattcaattacttgatctctcgtacacgtcttggacaaattctcaacacaacggcaaaaagagaacatttaaaatgaattctaggtgcttccttgttcatccacaacaagagtatagcatggttcggcggttccgtagtgtaaagcattcaagtagtctggtcaccttgcacctgaccctttacatctttccttcttgttcctttttttatttctattacactttcattctccacctcttcttcacactcacttagattttttcacctccaagtctctttctgttcaccatgttattgctaaacggttcatgacatgcccttgaaaaaccttggttggtattaattgtagcactagctttgattttggtgccaagttcttgagctgtggtggtgctgaccctgaaaagttctccaagtccaacatgagataaggctgaaatattggagctggtttcaattagtagacaaatttggttgctgactttcgtattcgtgtgtcttcaatagatggtatttttaaatagaaagcatagttgacaatttcttgaatgttgttgtttcttgccttttgaattatctccaagacttcaaataagttggctctctcctacaattttttaaatgctattatgttcagtattgagaatcaaacaagacttggtctcaggcacaacaggtttttcaattttggactagttctgatttgcatacttatatagaggcaaaaggggtatcctctttttcattatcctctattcatacatatccaaagacaacaacatttcctttcagtacccctattagttgaatcagcatggcttcatttccttcaaattctgcatgggaacatagcatggccagtgcacaacaaaacagtaaccctcatgcttcctcaccttctttcatgactagagtggccatgagaatatctagatcaagatggttcactttcttgagaagagtattccattaccaaaacggaccaagatccaatctcggctccaaccctttcaattccagcacttggatgatgctggagttgattgctttgttggtccaaatagcaagcacaacattcactttggccatttcgaagagtgagaagccaatttggcctatgagagtgtggatagcaggttatgatattggttgtgtccttaatcttctgctactttgtggccgctaccatcaacttcatgtgactcaagggaataatgctcttagcctctctgaattggagcagcagagaaacaatgaagaatcaagtgtgtacaggacttcacatttgatagacaaatgccgtagttcactagagcttttctttgccatatggttcgtgatgggcaatgtatgggcctttgactcacgttttggatccttcccacaagccccaaaactccaagtgctctgcatcatcttgctttcttggaatgcaatatgctactctttccctttcctattgtttttgcttttgtgttgttgtgtgccactaatgagcaccctccttggatacaacatgagcatggggtcctctgctagaggggcatctgatgatcaaatctcacaactcccaagttggagatataaagggcttcattccaacttggacattgccaatgactctcaaagcagtgaaagattgatcaaccaagatccagaatgttgcatttgcttggccaaatacaaagacaaagaagaagttaggcaattaccctgttcccatttgttccacctaaaatgtgtggatcaatggctaagaattatatcatgctgccctctttgcaaacaaggattacaaaggtagcaataggacgaggcagaaaatacacaagaacattcataatcttatacattcccaattattttgttttatctcctttggttacacgagtgagtttgtacatgtacagaagaggtcaccagtaaccaaaactacattgaatacttggttcttaggagtgaatcaatccctttatttttcaaattagtttgtttttacaagtttttcctcccttatcctgccatctaaatattgcaaggtgagcatatagttgtactgaataatgaagtaaatatttatatttgctccttaatttttatacaataaaattatttggactgcgtttcctgtttaatttaaaagcagttatttgggctt

SEQ ID NO: 29522 - DNA, 1688 bp, Glycine max
  Clone ID: TF_GmC266_4
ggctcgagattgaatggcaatgtacaaatattttcatatcgtttgatcatatatgattttattttgtgattaagtaaaattcatgtaagatttattatcaaatattaaagaatattgaaaacaatatattaaataacaaaaatcctctttggtacgagttttttttacacaaattacgcttgaaaattttttcttgttgcaaatttgaagaaacagaaaagtaaattaacttagtcccatgcagtgtgtacaggagctcacatttgatagacaaatgccgtagttcactagagcttttctttgccatatggttcgtgatgggcaatgtatgggcctttgactcacgttttgggtccttcccacaagctccaaaactccaagtgctctgcatcatcttgctttcttggaatgcaatatgctactctttccctttcctactgtttttgcttttgtgttgttgtgtgccactaatgagcaccctccttggatacaacatgagcatggggtcctctgctagaggggcatctgaagatcaaatctcacaactcccaagttggagatataaaggggttcacaccaacttggaccttggcaatgactctcaaagcagtgaaagattgatcaatgaagatccagtaagtgaaataactatcatacacaaaattagtaacatttagattttgctattaatatgcatattctctaacacactttaacattggttaaaatttgttgaaaattataaaattatgagtgtgacacattaaataagtatgacatacaaacttttacgatatttaataaattttaactaacaataaaaagagtatgttaaaagaagaaattatttgtagtcggaaaccattatgtctatgatctacaagcaatcctcgtgtgatacatagtcaaatgttttaatttaggggaaaaagttaataaaattatacatattacataaaaattgattggaaatatgaacacataataatctcaagtcatgtaataatttttcactaaaagaaatgtgttactaatatttctcctatgtgtatatatggagcatgtgtaggtgagaacatgttgtcaataaaggaactaatctggggtataaatgatcaagatttgatttatgtttttttctctctcacttttcaccatatatacctcatatatatgtgtgcatgtttgttttcatatataattattttttattgaattgatccgtttgtgttgttgggtgaattaacaggaatgctgcatttgcttggccaaatacaaagacaaagaagaagttaggcaattaccctgttcccatttgttccacctaaaatgtgtggatcaatggttaagaattatatcatgctgccctctttgcaaacaaggattacaaaggtagcaataggacgaggcagaaaatacacaagaacattcccaatcttatatatattcccaattattttgttttttccccttttggttacacgagtgagtttgtacatgtacagaagaggtcaccagtaaccaaaactacattgaatacttgttcttaggagtgaaccaatccccttacttttcaaattagtccactgtttttacaagtttttcctcccctaccctgtcatttaaatattgcaaggtgagcatatagttgtactgaataatgaagtaaatatttatatttgctcctt

SEQ ID NO: 29523 - DNA, 1491 bp, Glycine max
  Clone ID: TF_GmC668_1
cacacacaccaaccatctcattataaattgctaagtttttcaactcatcatcaattggcaccttttgcttcagaatgaatgcttgaggttgaggagaaccagaaccagaagcatgaatcaacttggtggtgttagcgttatccttctggttctctcagtcttgtgtttccatgttagagcacagacttctgcaccttcttcaggagatgctgtctccaatttccagccaagccttgctgttgtcataggaatccttggtgtcatgttcttactgacattctttcttctcatgtatgcaaaattctgtcatcgccgccatggcggcgcttcggccgttggagactcagaaaatcaacttacttttgtgagatcaaggtctagattctcaggaattgacaagactgtcatagaatcactccccttcttcagattctctgcactcaaagggttaaaggaagggctggagtgtgcagtgtgcttatcaaagtttgaagatgttgaaattctgagacttgtaccaaagtgcaagcatgcttttcatattgattgcatagaccactggcttgaaaagcactctacctgtcctatttgcaggcacagagtcaaccctgaggaccacacaaccttcacatattcaaacagtttaaggatgttagcaggtgaggaatctaacatagagatcttggttcagagagaagaggaagagcatcatggttcatcaagattcagtgtaattggaagcagcagctttcggaaaacggtcaaggaagaagaattactcatccaaaaaggagcagaagatagtgatggtaaccagaaagggtatcataaacacaaccacaggattactatatctgatgttgtgttcaagcacaggtggagcaacgtgagttcttcagaccttatgtttctgaattcggagatgctcaatgatacatcaagcaacagattcagcagcaacctggaatcaattacaagaggggtagtggtggaaaatgagcaaattatgaacatcaaggaggagatggagaggaagatttcctttgagaacaaagttgttggtgcactaaacaacatcgtttcagatcataaggaagatcctccttttacatcagattctgcaccaaagtatgtgaacccgggtgagaaaaggtcaatgtcagaaatcactgctgtttctagatttggagatttaggcatgaaaatgagggtcttgaaggattctgattcccttcaaaacaaccttaaagaggaaagaatgaggcagatttggtttccaattgccagaagaacagctcaatggtttgtgaatagagaagaaagaaggtctctgcaatctcagaataataaacaacagccattagatgtataatccaatccaatccaaccttcccgaggtacacatgtttggtttcattccttgattaacaactacatgtagatttcaggctgtttttttgttgattagtatatagttaagtaaagcaaaaa

SEQ ID NO: 29524 - DNA, 1104 bp, Glycine max
  Clone ID: TF_GmC153_1
ccattccagctggctttcaattcattttctccattaccccaaaatttgggctctttcttatcctttctaatctaatcccaccatcatctcataaccaataaacaacaaaaagaacatcagcagcagccatggccctgaagtttgcacctttctgacacacccaggttctcccaatttgggttgggcaccatggaaactggaataatccagggaccttggggatttcgctctctatccaaattcgttttatgcaccatttctggggcccttaccgtgtgttttgcccttgctggggccctgacaggagctatagctggtgctctagcagctaaggccactaagagtggtcttctccggggagtttcattgggtgccattgccggctctatactctctgtggaggtgttggaagcttcccgtgcctattggtgtatggagcaaactggctcacggagtgcatcatctatggcagatttcatagaggaacttgttcgtgggaggcttgttgaggaatcccttacacctgctattttaactgcttacaatttgcagtttgagcaggttggcattgcgaatacaggctatgttgagactcatgatgttcatggcttagttgcacccagagaaacctgctgtgcctttgagatcatatgatggggtaacccctccaatgatctcaaaggcagagaatacctgctgtgcaatatgtttgcaggatattgaagtaggggaaattgcaagaagcttacctcgctgtcaccatacatttcacttgatatgtgtggacaaatggcttgtcaagaatgattcttgtcctgtctgcagacagaatgtataacttgttccttgggcaatttgagattatctttatgggcggatgtatatgttttattatttgtttctttacatacaaactgagattaccattaagttttgtatagttgacattggcattttgtactattctgcgatgtaattgttaaataatactatttggtatgaaagccaatgcccaataacaaatgttttgggagaaaaaaaaatgagaaaatggtaaactttgaaaagtatatcaatgaatgatttttctttctttattgaccc

SEQ ID NO: 29525 - DNA, 729 bp, Glycine max
  Clone ID: TF_GmC627392_1
tgccacactctatgcaacaatattttccagatccactctcatctccctccatagaatattagaatacttgaccccagcttctacctctgctccgttaattaatggatcctcatcttcctaagaatggaacccaacaacaccatggtaccccaacaccttccccagcttcagttgcaaataatattataataccacatcctgaattccggataccttcctttaaagaacatcacaaaaatgttcctcaactcgcgatgattgtcatggcatgcatggttggcgtcatcatgtttctctgcgccgtgtccgtactcataaggtacttctactcaagaagatatagccgcaataaccaaaacagaagagtcgacgcccccatattgttcgatttgaacggagattctcctccgagttcggataacgatgatgacgtggaggagttggcggttgtccacccgatatggtacatccgtacggtgggtctccaacagtccctcatagactccatcacggtattcagatacaagagaggcgaaggcatcatagacggcaccgagtgttcggtttgcctcggagagttcgaacacgacgagagtctgaggttgttgcccaggtgcagccacgccttccacatcccttgcgttgacacgtggctcaggtctcacaaaaattgccccttgtgtcgtgcacctgtgctacgcgacgaaactgacggcgcgcatgtgatca

SEQ ID NO: 29526 - DNA, 1249 bp, Glycine max
  Clone ID: TF_GmC938_2
tcctcgagccgattcggctcccagattagagtagtagtttgtgttgcgattgacgacgacgataacgacaacgacgaagcatcatgtcttccggcggcggcggaggcggagcaaagccgttcttctgccacgtgtgcagtcagaggatcacgtgctccgatgagtcggaacccttctgcccgatctgtatggaaagtttcgtagaagaatgcaaccctaacaaccctaaccctaatcttttcaccgagaatgaggaatcttctgattccgaaatctccttctccctgctccctctctttctctcctccgtatccaggtcccgacccgaacccgacatgttcgacccgatggttttcctccaaaaccacattcagggccttcgcgccgacggcgccaacatccaagttgactttggccacccttccgagcagcaagggtttcgcctccctgcgaacatcggcgactacttcatgggccccggccttgagcagttcattcagcagctcgccgacaatgatcccaaccgctacggcacgcctcctgccgccaaggacgccgtcgagaatctccccaccatcaccgtcgacgacgagttgttgaactccgagctgaaccagtgcgcggtctgccaggacgagttcgagaagggctctctggtgacgcagatgccctgcaagcacgcgtaccacggcgactgcttgattccgtggcttcgactgcataactcatgtcctgtgtgccggtatgaattgcccaccgacgacgcggaattcggctcgagtgaggttcgcgggaatggcggtgacggcgggtcgaggactggtgggagtggcgacagtggtggtggaagctgcggtggaggcggaggggggagtaatagacctgttcgcaggactgttagaatatatttgcggcatcctgatgctgctgactccgcgcaggacagtgctgaaaggggatgggagtggggaagttgggattgaaatttatgttttgttgttgtaaaactggaaactatcttgtgcagctcagagtttccgtgaatagattgctagcattgccatgtttacaatagtccttgtgaggaatgtaagagatgttatttcccgtgacaagaactttgttcgatcagaggtccttttttatgtagtagatagctggaacatgggattgcatgaaaacacccaactattgagattttaggtgctgttattgagcgttgataagaaacttctcgttacttttgtac

SEQ ID NO: 29527 - DNA, 668 bp, Glycine max
  Clone ID: TF_uC-gmflLIB3275P147a09a1
gacccaagaaatgtaagtttaatggtaaacaaattgtatgatttgtatagttgttacacggtactcgccgttcttctgatccctacacgtcagggtaattacacgaatactagtcatgagctactaatcttgatacatgacgagagtaagttacagttgtagaagattataatcacacgtccataaataaaaattagatgaggtattcaaaccatgtcagcgatgatatcattatgtccattgtcactccaaccagatccagctcgaaatttacatacagggcatgtcccttgttggcgcagccagggatcgatgcagttagcgtgaaactgatgcaagcaaggtaagctacgcagtacgtcaccaacatcaacttgctccaagcatacactgcaagtgagctcatcatcagaggctttcatgctcccaacagcagttgaattatcttgcttcttctcagcaggagtggaagatgatgtttgttgcattgaggaactaccactgtaagcaaaagcagctttttgtcaaacaatcagtactataatttatttagagtgcatatatagactccataaaatttccagatgaaggactaaattcccatttcaactagcattttaagtcaataatagaaactggcaggtgaaagtgtactggacagctaatat

SEQ ID NO: 29528 - DNA, 780 bp, Glycine max
  Clone ID: TF_LIB5118-056-A1-PF1-F7
gtacacctgaaccctaatgacactttccacactccattttccaccatgaccttctttttcttttctatttctttctcctcacggaatttccgccgcaggccaccgcgcagcctccgaacacgctgacgccgccgccgcagcaggaccgctttacgaggctgaagttcgacaaatccatggccatcgttctgctgatcctggtggtggtgttcttcatcctagggttcctctccgtgtacacgcgccagtgcgcggagcgcaggatgggagggaggttcgacctctccatcttgatctcgcgccggcaacgcggcctcggccgcgaagtcatcgaaacgttcccgacgttcgtgtactccaccgtgaagagcctcaagatagggcgcgccacgctagaatgcgccgtgtgcctaaacgagttcgaggaggatgaaacgctacgtttcatccccaactgcagccacgtgttccactccgactgcatcgacgcgtggctcgcaaaccactccacttgccccgtctgtcgcgccaatcttacttccaaacccgatgaccggtgttctgctcctatccaaaacccggatccggagcagcccgttttaacctcatcaacccgacccgaaaccgtgggtgctgatttgcttagtcagaaccgtacaccgccgcgaccatagtcaacgggtcttagtatcgcgagttggttttcgcggtctcactcgacggggcactcgctggttcaacccggggagaaattgtgaacggttacgctgcgtttgcctg

SEQ ID NO: 29529 - DNA, 645 bp, Glycine max
  Clone ID: TF_LIB4390-049-R1-N1-G9
ccaatcttatctcattaattttatatcactaacaagttctacctataaaatttcatagatacgttgggtaaaaaaagaaaaacattcattgtatatgtaggaataagctacaaataaatcatcctcccattttttttaaattcatgggggtacattagtaagtcatacttcccaattgaaaagctttttccatggccctcaaaattgacaaaagctctccattaatcaagttgctaggttccaaatttgctatgtcattgttattgaaggatgaatgattcccccttccaatctcacaaatcacaaacctacaaactgggcactggcccttacttgttagccatggtactatacaatcctcatgaaacatgtggttgcatggagtgagcatcacctcttcattgggatcaaaatcttctaaacaaatagcacagctcttgctatcttcatcattttctctctgcttctctttcaaaggctttgcagcattgtttctgtagtataagctcaccctcctagcatacctctttggggggagggtcatagactactttcttaagcttgctcaaagctgttgattttggtaatttctaccactgggagagccttgtgtgcttgtttggaatgggggatctttgagggggg

SEQ ID NO: 29530 - DNA, 1447 bp, Glycine max
  Clone ID: TF_GmC1689_1
tcgcgatctagaactagtttcaccccctaaattctccatcagagacacaatccactccttaattccccaaaccaaacacgccgttaactaactcaccaaccctccctcctttacccgagagatcgattctctctgtaagtaaatcttgccgttaactttctcggaaagtcggaatttcccggaaaatggaaggaggtcgccggaggataacactttacgatcaaatgaaagccggcaacagcagccgatactcactcgccagcctcatgctgggcgatgtcgttttcaagaaggtggaagcagaagaagcagaagaagcagaagccgaagccgaagcgagctgtgagctgagccgaagccggactctccaagacatcattcgcgaagaaaaacctagcaacagcagcaacaacacgaaggatcgcaactcttggagagccttcacggcgaagcttcggctcaagcgcgccatcggctcggcttggtcctccaccaccactatcactaatcacagcaatgatgatagaaatttacctaatatacccgaaactcgccatgactcggacgagttgactcagcagaacgacatcgttgtggacggcgccaacgattcggatccgatcgcgccggccgggtcaccggtggaacacgtggaagccgttggcaactcctccgacggagagaacaaccacgaggcggtggttggagtgtcgctgatggatttgttggcgggaagcgaagcaagaaatggatttatatagagtgagcgatgatgacgatgatgtggcagaatatgagaagagagaagaagaaaaaggtacggctgcgagaagactacagaggggggtggagtataattgctgcgtgtgcatggtgcggcataaaggcgcggcgtttattccgtgcgggcacacgttctgcagaacgtgttcgagggagatttgggtgagcagagggaactgccctctctgcaacaatttaattttggaaattcttgatattttctgaacctggtaataattttcattaatctttcaatataacctttttaatctctatctatgaatttttctttttctttgggtttggggaagaaactatttctactattagattaggatcatgtggttatgatgaatttgtacgtgacatgtgattatgatttgtgattaacaaaatggaattagtaacgtgtcatgaagattggttagaatcaaatgtaaaggagtggattatggatgattttatttacacatttactgtgtgtcatatatttggctcacgtgttcatgtgatgagatgctgtatcttccggtggattctagttgtgcttagacgataacgtgttactagtgagagagtggacaagctatggaatgataacttcaaatgtggtttacacgattgtatatatttatctttttatttttaatttggctattgatgg

SEQ ID NO: 29531 - DNA, 2293 bp, Glycine max
  unsure (1)..(2293): unsure at all n locations
  Clone ID: TF_GmC1738_1
gtcatctgtcatttcgttcactccatagaattgcagtcaggaacacactacacaactaagaatcacaccacactctgacctcaacgttttcaacaaccatttctcttcccatcaacggttcaacgcatcactgcacaatcacttccttcttcaaatacttctcctctcatcttttgtctcctttctcttcaatcaccgttttcccaaaacaattctcttctcttctaattctcatcacgcaaccgcgtaactaaaatctccgtttccgttcaattccttcataactctcctccactttttattattatcattatcattatttaattatttattaataatagtagtaataatttcattcccctctttgcttcgagtttaatcaaaatttcaatcatgcagcgctctcactctctctctctctagagagctcggcctgcctcgagccgctcgagccgggaagaactaacaagaggcgtaagcgtaaacttgtccgaagaataacaccgggaaagaaagagagtgaagaagggtataagcgtccttgtgaaggcactagggtgttctgaactgatcctctccctgggtctggcactgtaaaattcaacgtcaaccccataatatactttgaagaaacgcttccatcttctctctatttgtttcaacttcagttatgcgtttctctctctagccagccatcatcactatgtcatccccaaactccgtccctcagtcccacgcgccgctccttctcccgcgccccgatgccgccgcccgcctccccatcctagcgctcctcctcggccgccgcggccactccgccgtggtccgggagacggcggcgcgtgagctggaggagcgccgcgccgactggacctactcgaagccggtggtggcgctcgacatgacgtggaacatggcattcgtgctggtctcggcggtgatgctcgcctgcaccgtcaaggagaaccccaacacgccgatccgctggtggatctgcggctacgcgctgcagtgcctcgtccacgtggccctcgtgtggctcgagtaccgcaggaggaacgacgctcccagggacgaggaatctgctgccagcctccaatacgacgacgtcaacgatagcgacgaggacgatgttggaacctccgggagttcctcttcctccggattcacaaaacgatgtgcgtcattgaataccatgatttcattactttggtggatggtgggcttttattgggttgtctctggtggtgatattctgctgcaagatgctccacgtttatactggttgtctgttgtctttttggcatttgatgtcttctttgctatcttttgtgttgttttggcatgcttgattggaattgccctctgttgttgtttgccctgtattattgctattctctatgctgttgcaggacaggagggtgcatcagaatcagatctcagtatacttccaaaatacagatttcaattgttaagcaatgaggaaacacctggtgagggaggaggatcaatgattcctatggagaccagcaatggttattcggtgaatgaacgaacactttcacctgaggatgcagaatgctgtatatgcatctcttcttatgaggatggagctgaacttcacgttctcccttgtaaccatcatttccattctacgtgcatagtgaaatggttaaagatgaatgcaacttgtcctctttgcaagtataatattctcaagggaaatgaacaggtgtgacaatactaaaggcgatcaaagatatattatatcaagctgagttttattatataacagctcagggttttcaaccgctgatgcgtatatgtagataatatcaagacatgaaaaaatagaacgtctcccaatttgctcggtttagctgtcattgttttgttgcttaattgcttcagtagagaaaaaggtagaggtaagaaggaaaggtgccgtatagagatcttttaaataagttaacgatttcatttgatccttatttctcctttattagtcatttgaaaatcgtcatatttcttgtatcaaatttgtttatatggaagaaaacaatggaaagtgtggcagtctaactttcagcttatggcaggtgtggattttttagttatttgtttgtttgtgttggtagaaaaaaagataattgctttattcagagttgttcaatttgtggattgttcattacttttctgacggaaactagattgtttcatttgctgctgttgagtaatcacaggcttaattcaaccnaaaaaaaaaaaaaaaaaaaaaaaaaaaaaccgcccg

SEQ ID NO: 29532 - DNA, 1468 bp, Glycine max
  Clone ID: TF_GmC5691_2
tggacgcgtggggggaattctcattcggagcttgggatttttattagacatggcaacattccctatggcacttggccattacttgtatatatggcggcttcatggcatggctttccatctaatagatgcattgctatttctaaatatacgtgcattgcttagtgcaataataaatcgcataaaaggctttatcaggctaaggatagctctaggaacacttcatgcagctcttcctgatgtaacaactgaggagctaagagcatatgatgatgaatgtgctatttgtagagaaccaatggctaaggctaaaaggctaaactgcaatcatctcttccatcttgcatgtttgagatcttggttggatcaaggcctggctgagatgtatacttgtccaacatgccgaaagccactttttgcgggtgtgcctggaaatgaaacaaactctgatgcggggacgatatctagtgatgagcaacttgcacggcaaataagtgctggattggatcggccaaactctgctaggcataccatgcctacaggattctatccaaatcagacactaaacactcctgaaggtgttccttggaggggtgcagggctggactcaggttggttgcattcttggccaaatcaaggtgttgatggggccggtccatctactgctatcagaacagttggattaggaagagttcaaatgatgatgcggcatcttgcatctggtggagaaacctatgctcagactaccttagaagataccgcgtggaacctttggcccattaatccctctcaagcttctgcaagtggttcaaccattcctccccctggtggaagattgcctgaaagaactggtagtttacatttaaggactgcttcacagtcttctaatgataatgttgcaaatatacttgccatggctgagactgttcgggaggttctacctcatattccagatgacatgatattccaggacttgcaaaggacaaattcagtcacggttactgtgaataatctcctccaaatgtgatgaatcaaggtattattttactcctcaaggaatatgaagaagggcatagagttactactacaattgtccttggaaaggcataggctttcattttatgtatatagagtcagcacattcaatctgttgtactcaagaaagatagcagaaaatataggcattttctttctttctttgtcttctccttgaatctgtagtaaaataaatgtggggtgtgttcccaagttgggtaagttcctatctgtcatggttccatttcaattgtaattttgaatttgctgctacctccaaaatatgatgtaattttctttccactccccactccattttgtggggttggcagagagagtgaggggaatatcaattatcttcaagtgactcaatctgagtcatgcaacatctaattcaaatgtgatctaaaactataaaatagattctctattaaaa

SEQ ID NO: 29533 - DNA, 1279 bp, Glycine max
  Clone ID: TF_GmC1201_1
gtgtggatggctgccgtgctttgcagggcccgtgattttcgtaggcagcgtcctgcgctgacgggggtggggtacctcctcctgctggtccgggcctcggttgggttcgcgcttcatgtggttggtgtctactggtggtatcagaatgatgatctaatgtatccattgatcatgcttcctcccaaggatataccgcctttctggcacgcgattttcatcatcatggtcaatgatactttggttcgccaggctgcaatggtattcaagtgtatattgttgatgtattacaagaatagcagaggccgaaattatcgtaagcagggtcaaatgctgactttagttgaatacctcctcctgctttaccgtgccttgttgccaacaccagtttggtatcgtttcttcctgaacaaagaatatggaagcctcttttcatcactgatgacaggattgtatctaacatttaaactcacgtctgttgttgaaaaggtgcaatccttctttgctgcagtgaaagcattgtcgcgtaaagaaatgcactatggggcttatgcaacatcagagcaggtcaatgcagctggtgatctttgtgctatttgccaggagaagatgcatgctcccatcttactacgttgtaaacatattttctgtgaagattgcgtatcagagtggtttgagagagaaaggacctgcccattgtgcagggctttggtaaaacccgcagaccttaggtcatttggggatggctctactagcttgtttttccagttattctgaaatcatatataaataccaaccaggaagtttttttctgctttgaagctttactttttcaaagcagcagtcacgatctatatacatcaacacatgtaaaatgctctggaggcaattgtggggatactctttgaagatgaatgcagctgtatactggtcatgcgttcatataatgtactagcaaaaaaggttgagtgtatctaaatgaccctgtaaactaggaagtcgattgaaaatataatattaaacatgactcttcatttgcaaggaatgaaggtctttctccgaattgcatcacgattctgtcatatagtgccaaatcaaactgttaattttaaatatattttttatttttgaatctctctttatgtgggctttgatgcacacctcaaggagtgttgcccacgggcagattatggttaaagatctcgcacttcatgtattaaatctgtggatactagtttatttttgtagcagttaatagttaatttccccatgattatgtgct

SEQ ID NO: 29534 - DNA, 1521 bp, Glycine max
  unsure (1)..(1521): unsure at all n locations
  Clone ID: TF_GmC6412_1
gcgttcacgcgtgctcccacgatctcttcgctaattcaaatttcatttcgtcaatcactcctaacttctgggttgcaaaaatgaattcggacacgacttcctattggtgctacagctgcacgcgcttcgttcacatacaagaacagaacgacgtcgtttgcccgcgctgccacggcggcttcgtcgaaaaggtcaccgccccccaatcgtcaaggcaaggcttccgccgccgacgccgcaacgccgggaaccactcggcgttcaacccggtgatcgtgctccgcggaccgggagaggacgaggagagcagctttgagttatactacgacggcttcgacggcgaggggctccgcccgctgccatccaccatgtcggagttcttgcttggatcgggattcgaccggttgctggagcaggtttcgcagatcgagatcaacggcctcgggagggctgagaatccaccggcgtctaaggcggctatagagtcaatgccgacggtggaaatcaccgagtctcacgtcgcgtcggagacgatctgcgccgtgtgcaaggaagccttcgagcttggcgcgttggcgcgtgagatgccgtgtaagcatctctaccactccgattgcattctcccgtggctttcgatgcgaaactcgtgtccggtgtgccgccacgagttgccgtcggagcaaaccgcgccggaaacaagagtcgccggccagatcgaggaggaggctgtagggttgaccatatggaggttgccgggcgggggattcgccgtcgggaggttcgccggagagagccacttgccggtggtttacacggagatggagagtgacgggaactccaacgaaggttctagaagaatctctctggcggttggaagcggcagagttagggaaagtcgtggtggtggatttgggagaattttccgcaatttgtttgggagaattggggctttgactagaagccgtagcctttcaacttcactcttcaatagaagaagttctagagcctgggttttgggaaattgatttggatggagttagtttttggaaaacaagctttttaatttcagttcagaattgagattcttattgtaaataggggcagttagattcaaaatttctttgcaatttgcgttatatcaatagatgtttttctccagaaatgatcgccgaaggggactcgagagaaagattgttcttgctgcagaacatacgttctgggggaagaagacatgcttaattacttgatttttttaatgttcatatagtatgttttagccgcaaattctttgtaagcattgtttttagttttatgtcctatgttttcccaatatgatgaaaggagatattaatgattaaaaaaaaaaggacgggaataccgaagtgaggtgccatacccgggaatttcattctactcttggagctaactttttgctggtgctgatgattattggaattatggtcatgttggcctgttggcctgatgatgatgatgacactntgcatatcatgcgtttcatct

SEQ ID NO: 29535 - DNA, 1542 bp, Glycine max
  Clone ID: TF_GmC196244_1
ttttttattaaagaaaatataccattaaaatatataaaaataaataactttttcaaaacactcaagctaacaaaaataaactgaaccaaacatgtagttattgtgagactcgtaatagacatgtaatataatcacgcatcattgttcttagtaacattaaaaactgatgataagcctaaatcctttgaattatttccagaaagttcgtgcaagagacatctatgccttgaagttgaatgaactacatttggaagatatataaaactacaatcatgccaccaataccagatgaacgcaaaatcataatgcgaacttctgaactggcatgtgattcagcaaaaacaggagctgccaacttttaatgaccataaacatccagttcttcctcggactcagctggtagccactgagtcactgactattttggtctcattcttcagctctagaatcagcaaccaatcaagctagcggtaaatccataaataaccaacattggtgacagcctcaatttgaattcagaaactcgctaacggtgacaaacaaggaggcaggttcaattgaccatactcaaactgtacaacgagacatactggggatttataaaagacagtataccctcaaagaacaataatgatgacaaagataaaaaaaatgtcaaccaacttgcctccagataattatttacggtatacaatgagcagatgtacataaccattaagaagccatcataacgaagaataatcaaaacaactatcgctacgacgtaaacgagtatgcagcagcagcaactacaataaacgcctgtattgaattatattaacaagttgtgcctattatactgtgaaccacaagagatgcaatttccccaacatggctgccaggagcttttctgactacacttcgtcttgaccatgactggtacttttcaagatgttgtacttgcagagggggcaagtagcattgatatgcagccatttgtccacacaggcacagtgaaaatggtggctacaaggaagttttctaagttcaaccccatcatcataagcagaaaggcagatgcaacattccgcatcctcgtcagaaagaacatgttcaatgggagaatcagcatcgcattcaatcattattcctccagcagctccttgtgtattcccagcatgtttctcattagtttcagttctttggaacttgaattttgacaactgctcaatgtcttcttttgatgccccttcctggtctgcaactgcatacaggagtgcaatgataccggacggacggtcgcaaacagcaataccaacgatgcatgctagtgccatacagaaaacgacaaagaaaacatcaaaacccaggaaggctatacataaccagtagagcaggggagaatctcggaccaaagattcactatcagctgacacccaatagaatccaacaacccaccaaataaacgaaaacattgtgttggctgattccaaatgctttgccatacttataccatcgtcgtcgaactgcgccaacgacacgtagtgtccagagccgtccatc

SEQ ID NO: 29536 - DNA, 814 bp, Glycine max
  unsure (1)..(814): unsure at all n locations
  Clone ID: TF_GmC41583_2
cccaaaccaacaaaatgcttgaattgagtgaatcccactccaaaaacttgcactttcccctcactcacatcattctcttcttcacatgtttcaaactttctaaagcacaatcctccatggagccagttcccacctacatcacccaccacagctgggagccttctgtcgtcatcaccgtcggcgccatcatcatcgccctcctcttaatgggaatcatctcaatctaccttcgccgctgcgccgagtctcacatcatcatcaccacaacccaaaccaccaccaccctaccgtgctcctgcgcgcaggggatcaacagggagctcctcaacacgttcccaacgctcttctactccaacatcaaggatctcaagaaggggaacgaaacgctcgaatgcgcggtttgtttaacagatttcactgacaaagacgcgcttaggctgctccccaaatgcaatcacgtgttccaccctcactgcattgattcctggctcgcgtgtcacgtgacatgcccggtttgtcgcgcgaatctcagccaggaatcctcccatgtttccataaccgtccctcctcataacgaggaagagggttccagaaacacaacaacaaacgaagctacccaaattgagcaaagtacaagcaatgacgttggtcaagtttgtcttggagatcctacaccgaccagtgatgcggctaanataatgtatataagtgaagagcagcaacagcaacactcgtcttccgagccgacttttgaanttgagttagacccaacacanattctactactactactattaacantaatggtggcgat

SEQ ID NO: 29537 - DNA, 478 bp, Glycine max
  Clone ID: TF_uC-gmroLIB3258100e08a1
gaacaaacacacgttggtcactcatttcccaatcaaccatgaccactaattaactagtaaactcgggaagagcaaaaaaaaacatagcgtcgatggccactcggcaccactgtctccgctccggtgcttgacgagttgaaatcatcgaagaaaattttgtctcatccaacaaagttttttttttttttttcatatatacagtcaagaaatatttaagaaactgggtcatgcatttaccaactttgcgctagagcttgttggtcagcatggattttgggaagaagagaaaagcgaagggtcgagtttggctctgcaaaaagggcaaaaagggtgcttggagagccaggtgtcggcgcattccaaatggaaggggtggttgcaaccgggaaccaccccaaccggttgctttgtttcgatcttgtccaggcagacggggcatttgtttcccatgagaagggccttttcggtgattttgggg

SEQ ID NO: 29538 - DNA, 2771 bp, Glycine max
  Clone ID: TF_GmC552_1
atcttcacggcttttttcattttctttgtcaccgtaagcatgacggcccgaggccctccaaagcctctcgaatccaaactcaacagaacattcatttccctataaattcgacgtcgtttcgttccgctctcactccaagaaaacgttttgcgacaagattccaatcggagctcagaaaaaaaagaaacctaatcgccgatcgcgtcgaaagtccctaagcttacatcctgcttctagatagttggtaatcttatctgagggtagtagctagtaccatgggagaagtggcagtaatgcactctgagcctctgcagtttgagtggcaatgacattagtgtgaatatgactgagaaggaagtgtatcctccagaatcaaatgtggagcgcttacctggagaagaatcgagtcaatcaacagaccacaaaaatatcaatgacttgcaagagagaggatatatggagtcatggatgtcagcattaccggagaagatgccgtatcagggccccatgttgcaatgagatttttgattgccgccattgtcataatgaggcaaaaaatgatatcaacattgatcagaagcatagacatgatattccacgacaccaagtcaaacaggtgatttgttcactttgtgggactgaacaagaggttcagcaaaactgtataaattgtggtggtttgtatgggacaagtacttctgtggaaacatgcaagctttttgatgatgatatatctaagcagcagtaccattgcagtggctgtggaatttgcagaactggcggaagcgaaaatttcttccattgctacaagtgtgattgttgctactcaactaattctgaaaaacagtcacccttgtgtagtaggatcaattgcatcttgattgcccggtttgttttgagtatttgtttatatcagcaaacgatgtcactgttatgccttgtggacatacaaatccataagagcttcctgaatgaaatgagagaacatttccagtattcgtgccctctctgcttgaatatcagtctgtgacatgtcaaaggtttgggagaaatttgacatggagattgctgctacacgaatgcctgagcaatatcaaaaataaaatggttttggatcctgtgcaacgattgtggtaaaacttctcacgttcagttccattttgtggctcaaaagtgtccgaactgcaaatcctacaatacacgacaaacatgaggctgagcaagtggccacgattattcattggtttcgtcaaaagccttcacttgagttctcttgatgttgttgtgattcgtgaaggcagtgaaaatgcatgtgtgtccattgggtacgtggatgtgcacgtgggaatttgaatttggagtgcacgatgagccacattcaaagggatagaataatggttctttttcttatatgttgatttggagtggggtagtgtaatttgttggggcgccactagttggaatagggcccccgagtgttagagttcgtgtttgttttagcttagcaatttggctaaaagtgtttctatttttttgggtctcaattgataagtattctagttaaattactattaagtgaaattcatgcttctaattatttttattattctattcaagatatttataatcctgccgatgtcttaacgtggataatgatttcatttttgaatattgataacctagtcccctggagtagtgttaatattctttttggcagtgaacacacagtccactgtcttgtttcctagttaatgaagtgaagggttataatttgatccaaaggaatctgccaaggtgcagatgatgttgagtttttatgttcgtggttgttgctactcaactcttctgaaaaacagtcacccttgtgtagaaggagcaatgcatcatgattgcccggtttgttttgagtatttgtttgaatcaagaaatgatgtcactgttatgccttgtggacatacaatccataagagctgcctctgcgtgaggcgggcacgttccccggtgccgccccctcctgctttgtgcagtccgtgtatatacactagttttgatgtgttctcctcttggagtagtgctgattggagctgcattaatcgattttgttgttgctgatttcaattggtctgcggcagtatagaagaaatcaacgatgcattggtgtttacctggcttgatggggtgactgaatatgcctttagaagttttaggattatttctaaatgtgttcctacatgcaggtccctaaagcttacttcctgcttctagatagttggtaatcttatctgagggtagctagtacctgggagaagtggcagtaatgcactctgagcctctgcagttcgagtgcaatgacattactgtgaatatgactgagaaggaagtgtatcctccagaatcaaatgtggatcacttgcctggagaagaatcgagtcaatcaacagaccacagaaatatcaattacttgcaagagaaaggatttatggaatatggatgtcagcattaccggagaagatgccgtattagggccccctgttgcaatgagatgtctgattgccgccattgtcacaatgaggcaaaacatgatatcaacattgatctgaagctgacacatgatattccacgacacgaagtcgagcagtgatgtggtagactagaactttagcacaaatatttacatctctgcagtctgcactctaggcaggaacgatgacatgtttgaagggagttccttttttttcccctcaattttgtgtctcaatctctttttttta

SEQ ID NO: 29539 - DNA, 813 bp, Glycine max
  Clone ID: TF_GmC552_10
tgataatttcttccattgctacaagtgtggttgttgctactcaactcttctgaaaaacagtcacccttgtgtagaaggagcaatgcatcatgattgcccggtttgttttgagtatttgtttgaatcaagaaatgatgtcactgttatgccttgtggacatacaatccataagagctgcctgaatgaaatgagagaacatttccagtattcgtgccctctctgcttgaaatcagtctgtgacatgtcaaaggtttgggagaaatttgatatagagattgctgctacaccaatgcctgagcaatatcaaaataaaatgggttggatcctgtgcaacgattggggtaaaacttctcacgttcagttccattttgtggatcaaaagtgtccgaactgcaaatcctacaatacacgacaaacatgaggctgagcaagtggccacgattattcattggtttcgtcaaaagccttcacttgagttctcttgatgttgttgtgattcgtgaaggcagtgaaaatgcatgtgtgtccattgggtacgtggatgtgcacgtgggaatttgaatttggagtgcacgatgagccacattcaaagggatagaataaaggttctttttcttatatgttgatttggagtggggtagtgtaatttgttggggcgccactagttggaatagggcccccgagtgttagagttcgtgtttgttttagcttagcaatttggctaaaagtgtttctatttttttgggtctcaattgataagtattctagttaaattactattaagtgaaattcatgcttctaattacgcaaaaa

SEQ ID NO: 29540 - DNA, 1363 bp, Glycine max
  Clone ID: TF_GmC271926_1
gaacaagatcaaaattcaccccaacccaaagtgaacagaactgctttcccaaacatgaaaattcccaataccatactcaaactcttcctcttcatcctcttgaacccatcccagatagcaatagcactagcaagtatagaagcatgtttagacagcgtttgccaaactcacgagccagtaatccgattcccgttccgcatagagggagagcaagagaattcatgtggccacccagggttcagcgtttcttgcaaccacaacggccaaacactacttaacctatcttactgcggcgaagaactcagaatccaaagaataaactatgccgcgcagcaactatgggtgaacgaccccaacaactgcctccccaaacgcctcctctctcttaacctctccgcctctcccttcgacgctgtttaccgccaaaaattcaccttcttcaactgctccttcaacttggagtacctcgtccgtcgttaccgtccaataagttgtctcagcgattctcccaagtacctcgtttttgcgacgccttcttcgactgtgtttggacacttgtcgtctgtgtgtgacttggtggcgacggtgacggtgccggttcagtcgccgtttaatgatcgagtgacgtcgtcagaactcagcgacgatctgcgattctcgtgggactcgccgtcgtgcgggaggtgcgagtcgcacggtggacggtgcggattcaagagcaacgagacttttgagcttgattgttcccttgtcccttcaaaagggatttcccatggtgcacgttacgccatagtcatatgcataggggcaacagctttgttgtgctgcatgggagtattgaggtgcatccacagctggttaagaatcgggaaccaagatgggccttgggctaatgaaacggtgccagattttgaggctctagcgggctcacggcccacaacagtcacgggcctcgacaggcccacaattgaatcgtacccaaaaatagtgttaggtgagaacagaggcttaccaaagaagggtgacaagacctgctcaatatgcctatcagagtacatacccaaagagacagtgaaaaccataccagaatgtggacactgctttcatgcacaatgcatcgatgaatggcttccactgaacgcgtcgtgcccaatttgccgaacttctccacgaaagttaccacaaccacgtgctcgatcatcaccacaataatgctttaactttttatctctcatatttatatacgaatcactttaccacagaagatttttaagacaggcataatttgataactattacattctcctgcattgtaatgtgaaacatacatatcttacaactagtaatgtaaatatttctttgc

SEQ ID NO: 29541 - DNA, 723 bp, Glycine max
  Clone ID: TF_GmC1196_1
cggaccgtttattaaagccttttggggtctagtgaggagaagttgcagtgcacagtgtgcttggaggatgttgaggttgggagtgaagcaaaggagatgccatgtaagcacaagttccatggtgattgcattgtctcatggctcaaacttcatggttcttgtccagtttgcaggtttcagatgccatctgaggattcaactcttgaagccaatgtgggagttggaaatggggacaatcagaacagtgagctggtcagagctggagaagagagaccaagaaatggaaggaggaactggtttcctgtgctgcaatcatttaacaattttcttccttatccttgatcaatactttgttgggttttaaattgcagtcgtggttgtggctgtggttgtggtctccttgtgatccttgactttgtgagaaactgcaaaaagatgcgattgatgctgcaattgtgattgcaatgctgtcgcggagagctaaagaaccttgatgctgctgccaaaattgctgtcacggaccgtttattaaagccttttggggtctagttttcctcaccctcatcaagcatgaacagctaagtctagacactgtcatgcctctaaaatccttcctaattgtatatatcatttagatttccttgtctgactttcttgtaccattcaaatgtatatgtttgtcaataatttgcaaaaacagaataaacttaattattattctct

SEQ ID NO: 29542 - DNA, 961 bp, Glycine max
  unsure (1)..(961): unsure at all n locations
  Clone ID: TF_GmC310374_1
aaaacgtaactctcaatttcttagcccccttcccttcctttccctcgttgactttgtaacataatatctttcagtagccaaaaaaacaaccaatacttcattcctagggaatctcattctcatccatcaccatggctaacataaacacttttttcaacccctttcaatccaaaacaatcttctagcaagcactttttcatggtttcatcatcatcaagatgaacaacacaaccgattccggattcctcggctccaacaacaagtggctttggcatggggataggaatctcaattgggattcttctcctcatcacaaccatcacactcacctcctacttctgcacaagatcacaagtgccaactcctccaaggagaagaacaacaagtaattccaacccacaattccttgagccacaccacacaatagttgatgttggcctagatgaagccacaatcatgaactaccccaagatgctctactctgaagccaaactaaggaaatttgattccacttcaacaagctgctccatatgtcttggagattacaaaggttctgattttctaagggtgttgcctgattgtgaccatgtcttccaccttaagtgcattgacccttggttgaggctgcatccaacatgtcctctctgcagaacatctccaattccaacacctctgtcaactcctctggctgaagtggtccctttagcaaccaggcgagattaattcatagtttgaaatgttcgttttaggtctagcatctcttgatggaggcaatcctgttcgagcctgatataatcaccatgggatagtttgaaatgtttttgcgttgtagtattagtacactaagtttgaggtttatcaaaatttcataaagtactctattgattgattctatattgtaaattcttctcttgtatcntttttaaaaanaacaaaaaaaatgttccacccccnacccccc

SEQ ID NO: 29543 - DNA, 2128 bp, Glycine max
  Clone ID: TF_GmC1470_1
aatctgtaaaccctgatttttcttctttgtagaaattcggaatttttatgtgacaaagacgttatgattatctagtttttttctttttctttttttccccctgtacaacgatatctggctattttgtcaccttcacctattcttgtttgtttgattctctctgcttaacgtaactttatcatttttctttagagattttgctgcatttgacagttgtttctttcaattccgtccaacatttgggcttcgtcgtttacttgaggccgtgtcatcgaaaacgcgttttgtatgttatgaaacgacgcaatagcctttttggttcacgaataccacatgtaaaatattgattatttttatccctaagtgtgcccctaagtgtgctgtacgaggattgtcatgtgtaagctcgaaacccggattcttcgtctctggcccaacgagtaatacggaggagacgccgccctttttctccctccgcgcgcttcagccaaattgcatgtcgcgccacaacgatatgataccccgtcctcaccattttctcttttgaccggtcactttctcttcggttcccgtcttctttagatggcaagtgggtttgggggatcaacggggaggtcacccccaagcccttcctacttcaacaacaataataacagcgatgctgccaattttgaatgcaacatttgctttgaattagcgcaagacccgataattactttgtgttgtcatcttgccgcctggcattggctagaggggggccttcactatagctcagggcaagtcacacatacacgatatgataccccgtcctccctctcttcacttttgactattgacttcctcaaccgatccactcttctctctatctgcagatggcaagtgggtttggggaatcaacagggagatcacccccaagcccttcctacttcaacaacaataataacaatgatgctgccaattttgaatgcaacatttgctttgaattagcgcaagacccgataattactttgtgtggtcatcttttctgctggccctgtctttacaaatggcttcactttcactcacaatcacgagaatgcccggtgtgcaaggccctcgtggaggaggagaagctggttcccttgtatgggagaggaaagtcgtcgactgatccaagatcaaaatctattccgggcgataacatcccgcatcgtccggctggtcagaggcctgaaactgctcctccacctgaaacaaatcattttcatcaacatgggtttggatttatgggtggcttggggggatttgcgccaccgccgatggcaacaacaagatttgggaattttgcattgtccgcagcttttggtggttttataccatccttattcaactttcagttgcatgggtttcatgatgctgccatgtatgggggaggggctggttttcctcatggatttgccaatacatttcatggtgtccatgcccatggattccctctgcgcacccatcaagggcaacaagattattatttgaagaagcttcttctatttgttgttttgtgtgttgttcttgcttttatatggcaataggttggatacaatctctagcagtatctgacttctgctctgataggtcttctgatgtgctctttgttttgtaactaaggagtaaggatgttgttcatatgataatactgtcttattaatcttgtagttcttttctttgtgatagctttgtggttcccatggtatccatgtgcaaaagatataaagcatgaaagcaatgcacccattgttaggaataaggatctgggtaccggtccgtagatattaatttcttagttattatactgagtttgaaactacaagatagctgaaatagtgaagttatgcccttggtttccttttgtgttctcatatttgcaattacatgttggcatgctattgctaatgttatatctaatattattttggtgcctcaaaaaaaaaaaaaaaaaaaaaaaaaaaaaaaaaaaaaaaaagaaaaaaaaaaaaaaaaaaaaaaaaaaaaaaaaaaaaaaaaaaaaaaaaaaaggggggggccgcccaaaaggaaccaagctaacgaacgcgggcaggcaacgaaaaagctctgcaaaggggggcccaaa

SEQ ID NO: 29544 - DNA, 632 bp, Glycine max
  Clone ID: TF_GmC1470_3
atttttatccctaagtgtgcccctaagtgtgctgtacgaggattgtcatgtgtaagcctgttatatatgttatgaatcactcattaatttgtataggcatttgatggtttgggttttgtagatggcaagtgggtttggggaatcaacagggagatcacccccaagcccttcctacttcaacaacaataataacaatgatgctgccaattttgaatgcaacatttgctttgaattagcgcaagacccgataattactttgtgtggtcatcttttctgctggccctgtctttacaaatggcttcactttcactcacaatcacgagaatgcccggtgtgcaaggccctcgtggaggaggagaagctggttcccttgtatgggagaggaaagtcgtcgactgatccaagatcaaaatctattccgggcgataacatcccgcatcgtccggctggtcagaggcctgaaactgctcctccacctgaaacaaatcattttcatcaacatgggtttggatttatgggtggcttggggggatttgcgccaccgccgatggcaacaacaagatttgggaattttgcattgtccgcagcttttggtggttttataccatccttattcaactttacagttgcat

SEQ ID NO: 29545 - DNA, 539 bp, Glycine max
  Clone ID: TF_jC-gmXLIB3563P066aa12a1
cgaaaagtaagaggaagaagcttcgtcctttctatctccgcaggctgcagacaaaccaaattttgagtcacacatacatgatacccattcctcaccattgacttcctcaaccgatccatttttcttagtttttcgctttcctcagatggcaagtgggtttggggaatcaacagggaggtcacccccaagcccttcctacttcaacaataataataacagcgatgctgccaattttgaatgcaacatttgctttgaattagcgcaagacccgataattactttgtgtggtcatcttttctgctggccttgtctttacaaatggcttcactttcactcacaatcacgagaatgcccggtgtgcaaggctctcgtggaggaggagaaattggttcccttgtatgggagaggaaagtcgtccactgatccgagatcaaaatctattccgggcgttaacatcccacatcgtccggctgggcagaggcctgaaactgctcctccacctgaaacaaatcattttcatcaacatgggtttggattta

SEQ ID NO: 29546 - DNA, 709 bp, Glycine max
  Clone ID: TF_GmC1231_1
tgcacgcgccgtaagctcggaattcggctcgagctccacctgctcagaaggaggccattgaagcgctgcctaccgtcataatcaatgagaattcgcagtgttctgtgtgtctggatgattttgaagttggttctgaagccaaagagatgccttgtaaacataggtttcatagtgggtgtatccttccctggctggagcttcatagttcttgtccagtttgcaggcttcagttgccattggatgagtctaagcaagactctgatctgtcaagggatagcagaagccaaagggaggatgaaagtattgaacatgacaatgatgaagaaagagatggcgaagggagaaatgcaagtgggggtagaagattctcatttccatggcctttcaatggattattttcttcatcaaactcttcatcctcttaaagttccaatgccaacggaaatgataatcaatcagatgaaaactgagtatttttgcatatctgttgtgctattcatgtgctgccttgcttatgtacagttttcgaccaatgaaagaatccaatgttgatagaacaatttgtgatttttcttgtggctttgtttttgctaaattttgtgcttctagaattcagttgctatttttcttcaacttttacccttaacttggcatttgtataattctcgtggtggttttatttccccatcttatcctgtactactttggt

SEQ ID NO: 29547 - DNA, 658 bp, Glycine max
  Clone ID: TF_GmC187_2
caactttcatgcgcatagagccagacaagagcctggtgtgtgtgtttgcctgtatttattggacttcaagctgcaattctcctacttcagcactatcttgggtcacgttggttcattcctcgtcagattctccccgagaaatacagctattataggaggtttgatcaggatacacgacatgctactgactgtgttatttgcatgacagccattgatctgtcccagcgatctaatgattgcatggtgacaccttgtgatcatttcttccactctggctgtttgcaaagatggatggatataaagatggagtgcccaacttgccggcgcccactaccccctgcctaaagggctttcttcactgtttatgtcaataggattaactgaccctgctcagcttcatagttttagtatatgcttaaatgaccaagttttacattgtttttgcttttaatttcgagagaagtgaaatcacacgggctttggtggtcaaccttttcttctcatgaggactgaatgtttcttcttctcatagaaattttgtaatttgattttgccaccttataccatatgctgagggtatatttttgtacacaagttggaagggccatcaacattaaattgtacttttttctcaatacaaaatttatttttattcttc

SEQ ID NO: 29548 - DNA, 2109 bp, Glycine max
  Clone ID: TF_GmC999_4
ccggtgccggaacttcccgggtccgcacccacgccggcctttttcacctatagcgcggggaataacataaatggctcgaagattcctccacccacctaccaccgaagaacggatattacagagggaagagagagagatgttttgcttcctctaatctggcgaatcattcgttctagcaaattttgccgaaaactccaaaaccccccctttagaaaactcgattaacaacaatctcaatcttctacagcttatcctctctctctctcttcttcgcttcccccaacagcaatttcattcaaaactctctctcagatgatgaaaaaatactaaaaaaaaaaaaactacacttcacccaccaaaccaaagcaaaagggaaagaggacgatcgggaaagagagtgtctttaatttcacagtttcatagcaattatcgccgaaaaatgcaaaatttccactcatatctctttgtttatgacatctaaaacatctatctactctctacccactttctcagttccaggtcagcaagagaaacagtacttatccatattacagggttatgtgaactgaagagggagggtactggtttgcggaggcagtgacacttctgcaagcctagaatcctctctcctagttttttgtgaaaacagatagtgtgatgcttttggaggatccttttctcaaagcttgcatgtaacactatctacattttggtgatcagttgaagtgtggaaaaaatcttaagctaaaggcaatttgggaagctggaacaatgggttctgtttgttgttgtttgagttttgatgattttgaagattatgtaaatccaaatagtcctgtatataggaactgcgtgtgtctcagttgcttgatacagaaccttttgagtgtgtattcttcaatattccgtagaggggatgctcattcaattccttcgtctattcaaggggcagcatctataacttcagcagcatcactcgataattcactatctgacatgtaccgctctcctccaaggccattaccatatgatgcagaacccagatattttcgctcacaacgtgatggactagtttcaaggcgtgagaagggttcaagtcattcaaatgaggaaacagaacctctaagaagtgatgcagatgtggatccagaatctttaaattcaggagacaaatggaatgaaagtgcctgtgaagctggatcaaaggaataccattctaagtcctcactaagacttcaatcaacaaaatattcaactggagttggccttgtctatgcatcatcagaggaggaggatgtctgtccaacttgtcttgaagaatacactaaagagaatccaaagataatgacaaaatgctctcatcattttcaccttggttgcatttatgagtggatggagagaagtgacaactgtcctgtttgtggaaaggtgatggtattcgatgaaacgactttcacttgattacaaggtttgtgttgtggatgaagtcagcaactgaggcatggaagaatataagtatatagacattgtgaatactacatattaagtgtttgtcatgtatagtaagaatgaaaagtttccttaaccattgttgtgagttcattctaatcccgcttgtttttgtgttttaaaatttccacatgtccaaaactgtgaagaaagaaagaatatgcaattttagatggaaactttgtgatggcttcaacatctttccccttaattaatttgtgattaagagaatcagagtttgcttatccatataacagatcatttgaacagaagagggagggtactggtttgcggagtcaattggacttctgcgagcttagaatcctctctcctttatttattaatgaaatcatagtcattagtcttggctagtgctgttggggactctttttcacaaagcgtgcatgtaacagcatccatgttttggtgatctttgagttgagaagagagaaaaatttaagttgaaaaagtgagggatattgaagctaaaacaatgggtgcagtttgttgctgtttcaatgttgatgattttgaagattatatgaatccaaatagttctgtatataggaactgtatgtgtctcagttgcttcgtacagaa

SEQ ID NO: 29549 - DNA, 711 bp, Glycine max
  unsure (1)..(711): unsure at all n locations
  Clone ID: TF_GmC1738_4
aatgaggaaacacctggtgagggagggggaggatcaatgattcctatggagaccagcaatggttactcggtgaatgaacgaacactttcacctgaggatgcagaatgctgtatatgcatctcatcctatgaggatggagctgaacttcacgttatcccttgtaaccatcatttccactatacgtgcatagtgaaatggttaaagatgaatgcaacttgtcctctttgcaagtacaatattctcaagggaaatgaacaggtgtgacaaaatactaaaggcgatcaaagatatataatatcaagctgagcttaattatataacagctcagggttttcaactgctaatgtgtatatgtagataatatcaagacatgaaaaaatagaacctctcccaatttgctcggtttagctgtcattgctttgttgcttaatgcttcagtagagaaaaaggtagaggtaagaaggaaaggtgcgtataaagatctttttaaataagttaacgatttcatttgacccttatttgtcctttatttttatttttttttagagaaatttgtcctttattagtcatttcaaaattttcctatttcgtgtatcaaatttgttcatatgggagaaaacaatggaaagtgtggcactttaactttcccctaaaaaccccccccnnnnnnnnagggcggccgccgactttagtctcgtcgtcccgggaatt

SEQ ID NO: 29550 - DNA, 1069 bp, Glycine max
  Clone ID: TF_GmC249_1
cacaaatggagaattccccatctcatccttcttctcttcaatgtcctccttcaaccctttctcccctccaccacccaccccttacctcaccaacctcggcttcggctactccatcgccatcgccctcggcgtcctcttcctcctctccaccctcatcctctcctcctacctctgctgccgcaccctccgccaccgcaacaacaaccgccacaccccccgtaacaacacctccgatggcatcgtcctcccgcgcgtgatcttcgtcgccgaggacgacgacgatgacgccacccgccagaacgacgccgtcaccggcctcgaccaggccgtaataaactcctaccccaagtttccttacgttaaggaaggtgattacgacagcacctgctcgatctgtctgtgcgagtacaaggattcggagatgctgaggatgatgccagagtgtcgacactactttcacttgtgttgtctcgacccgtggctcaagcttaacgggtcatgccccgtttgccggaactctcccatgccaacgccgctgtcgacgccgctgcaggaggtcgtgccgctctcacagtacgccgatgccagggcgaggaggtgaattcgaattttcttctccggtgtggctcgggttgctgggttcagtgggaaaagcataaaggacaaaacttagatcagttatttacatgtttttgcatgctgttattatcccatcaaaattggagttttacctttaatagttactggttagttttactcagattatccaagtaaaacttcagtttttgacgagagaacagcggtaaaaacacttgaataattgtatttaagttctttgtaagtgtaaatcttctcccgtgatggttgatgatggggagtttctgttttttgattatgtggttgtatggtgtcagcaagcgtgttgctggttactgaattattattggtaatgcactgaaagtctgaaactatgcagaatgtcacttttaggggaaattgtccgcgacttcgttttgttagtaccatgatttgacattggatataatggatggtaggactattatttatt

SEQ ID NO: 29551 - DNA, 905 bp, Glycine max
  Clone ID: TF_jC-gmfl02220056h06_FLI
gccaccaccaccccttacctcaccaacctcggcttcggctactccatcgccatcgccctcggcgttctcttcctcctctccaccctcatcctctcctcctacctttgctgccgcaccctccgccgccgcaacaacaacaacaaccgccgccacacccccgatggcgtcgtgctcccgcgcgtgatcttcgtacccgaggacgaggatgacgacgacgacgacacccgccagaacgacgtcgccaccggcctcgaccaggccgtcataaactcctaccccaagtttccattcgttaaggaaggtaattacgacagcacatgctcgatctgtttgtgcgagtacaaggattcggagatgctgaggatgatgccagagtgtcgacactactttcatctctgttgtctcgacccatggctcaagcttaacgggtcctgccccgtttgccggaactcccccatgccgacgccgctgtccacgccgctgcaggaggtcgtgccgctctcgcagtacgccgatgccagggcgaggaggtgaatttgaatttgaattttcttctccggtgtagtttgagttcagtggggaagtaaaaggagaagcatttaaatgtttttagttgtttttcttatcaaaattcgagttttatctcgaccatcataataaaaagtagttcatgtttagatgttggtgtagattgtcgaggtaagactacaattttgattagagaatagtactaaaaacatttaagaaaaaaattgtatctaaattttctgcaaaatgtaaatcttccctgtagacgggagatggtgattctttttttttttttttttaattctgaggaagaaaaatgaggtggtggtggtggtgggagcatgtgtaggattacaaggcaatttcaggagggtttg

SEQ ID NO: 29552 - DNA, 1252 bp, Glycine max
  unsure (1)..(1252): unsure at all n locations
  Clone ID: TF_GmC150616_1
gcaaagcaaaagatgttgttgaatactctgttactattatgggtcaaggccaagttagaccagtccattctggaggttctccaaccagactagtcctctccaacttggtttctttttatacaaccttcccactctcattcttcaatcaatccaacccaaaagaccctttctttcaatattcatagcatcatcatgggtgactcttccgcggctaatgaccatttgggtgaatccccggccgttgagttaaccggaaagataatgattgtggttattattatcatgttcttcgttattgtaattgctctctgccttcatctcttcgccagaaacttctggtggcgcagccctgctccccaatctcgcagccaccgccgccgccgctttgttttctcgtccggtccagacggtggaagcggactggatcccgcggtgctgagctccctaccggtgttggtattcgaaggccatgcccaagagtttaaggatggtttggaatgtgcggtttgcctctccgaggttgtcgaaggagaaaaggccaggcttttgcctaaatgcaatcatgggtttcacgttgcttgtattgacatgtggttccaatcccattctacttgccctctttgcaggaaccctgttgcatcctcagaagaatcttcagaatctcccacttttcccacaaacgtcttggtttgggggaatcaagctcaaataagttctactggtggtggtggtgcttctttggaggaaggttcatcctcatcctcttccgcttctacttgtgatgatcatggaatgttggtgattgatataccaagtgagatgacttcaacctctctgtcgcctgaagatgacgtcaaatcgcctatgacgggaagactcaggtcattgaagaggcttttgagcagggacaaaaggtttaatccttccagtcctacttcttctccagatgtacaacaaccaggatcagggagctgagttaggaattatttcccaatcatattcattattttttctttttttcttttctttcatgtgcacatattgcgcattcaggtgactgaagattgtatctaatgtttgcaagtacaccatgagggtgtttaatttttctgttcttcagaggtcagagctcctccagctctcatagatgtgctattattgtctttccnatacttgtgcatataatgccttagcagattcattgtctctcattgtctttgttgtatacagtataggtttctttcangnnacg

SEQ ID NO: 29553 - DNA, 1127 bp, Glycine max
  Clone ID: TF_GmC35324_1
aaccatgtgaacaccttgcctatatataatccccttagacaaccaaccacaagaggctctaataactcattattcattaacacacacctcaaactaaaaaaaaaaatgtattctgttgcttccacttcccttacttcaccactcctccacgaccttgagaacttccattactcaagaaggttactccttcactccccataccttaaccaatcagccaaacccccaagaagcagccacgattcttcaacagaaacataccttggagatggcaatttcgatgcaaatgttgtcatggtactctcagtcctactctgtgctctcatatgctcactggggctaaactccatcataaggtgtgcactaaggtgttcaaattttgttgtgagtgactcagtggcaaccaataacaataacaacaaccctccagcagcaagagttgccaacacaggagtgaagaagaaagcactcaagactttcaccacagtgagttactcagctgagctaaacttgccaagtttggactcagagtgtgtgatatgcttgtcagagttcacaagtggtgaaaaggtgcgcattttgccaaagtgcaaccacgggttccatattcgctgcattgacaaatggctaagttcacactcttcatgccccaaatgcagacagtgcctaattgagacttgccagaagattgttgggtgcagtactcaacaagctagctcatcgcaacaacatgtgttggcagtgccagaaaccattgtgaccataatagccccacttgagccagaaggtttggtgcgtaactatagggaacttagctaaattatctagtacttattaattagagcttatcgattaataatgacataatggttgaagtggatgaatggaatggaatggaccctagtcagccatacttggttaagactagtcagccacccaccactcaatcaatcatagttaatgtagtggttaatgatgatgaatgtatatagcatggagtctcttttcttgtgttgtttcaattttaccttccccacttaaatgtacaaaactagttcaaattgtaattacattctttccaataatagtaatctgaagtgggtaccttaacagggtacttagtagcctac

SEQ ID NO: 29554 - DNA, 3035 bp, Glycine max
  Clone ID: TF_GmC23999_3
gttttaggtggggatggagaaaagagcaagacgcaagcatagttgccaatagaacccgaggtcaagcatttcaagtcctggtagcttcaggaaaggaaggttcaaaagatgatgtggtcatggttgatcctgtggaagccaagagattggctgccaaacaaatggaaaaaattaaagcaaaagagaaactcaaggtgaaagcagtcttatgtttgaatttgaatcacatatttggggttattgtcttttattatagaagtatacaagaagtttgaaagtcattgtccttccccgaatccctgtaattgtcagtcaggacagaagcaaactacggatacagaggcagcgacggtcaaggtccagaatccagaaccgaatgaataacccactgcccacagattatagaattttggacttgcacgccgtcgtctcccaccactcaatcaccatgccttctccttctgcagatcaatcacaatcccaaccaaaacctaaccccaacctcctttccctcttcctcaagcccatcatcatgctccttctcacctccctcttcttcctcttcctcggcttcgccgccttcctcctcctcaacctcttcctcctcggtggcgccttccaccgccttcgcttccgcccctccgttacctccgcccccgcctcctccatcggcctcccccctcgtgatatcaacaacctcccccgctttcttgtcgccaatggatccgcgacccgacccgactccaattgcgtcgtctgcctggacgcattccataacgcccaatggtgccgaaagcttgctgcgtgcgggcacgtgtttcaccgcaggtgcgtcgacacgtggctccttaaggtcgccgcatgccccacgtgccgcacacccgtgggattcaatgccggtgctacggtacatgacccgcctcagcggtctgaccatttgcatacctgcggaactgactccaatgctctcaccacccttttatagcttgtaagttttcgtttttaagcctttcccaaaccatgtaaggatatcaagtaattgtttttttaatctatgtatatgaattgtagcaatagttttttctcccatttcgacgactattgggaagaaatgaaccaacttaattcacgaatgttttggtaagtttttacttttaagaagaggagaatgctggacccccttcaggaaaggaaacccgggtccgtggttgggtcctgtcgggcctcctgcttttaggatcggccctgatcgggtcaaagttggaacccttattgggcggtcaggattcgttcccggttaaggataaagcgggtttaatagtttcttccggattgttagtgctgtggagttacgttgttatccctgtcttttccggggcctgtagaaaaccccccccaattagggacccccccccagatgattatgcccccccccaccaacaactttttgtaatataaaataatgtaattcaccctcatgatcccctttttccaactttagtttttgtatttccagttttcccccacctccccccaagaaagataccaaaaaaaattaaatgtcttttccgggaattttccctaaaaaaagtttcgcacttcgcaaccaggggaaaaagaggtgtagcaagtacgggagggcaatgcaatggccaccattctgaccgccaagcaacgctcagtttgtttcctttcatcagcttgccaaccgctacttcctctcccacttctcccaaaggtggtgatggagaaaagagcaagacgcatgcatagttgccaatagaaccctagccgtcgaagcattttcaaacctcctgcttcgctttcacggaaaggataaggatcacaatgatcgatgtggtctttggcgtgatacctgtaggaggcccaagatattgactgccaaacaaaatggaaaaaatgaaagcaaaagccaaactcaagagaagacgccaaattgaggcaattaacggagcatgggcaatgattggtctcacggctggccgtagttattgaaggccaaactgggaaaagtattctgactcagctgcaagactacttgggtacaattcttagtttctttgtgcggtagacttcttccacgagttccatggatacatattaaggactccaggttctttctcacattctttgtactttatatttgttaaaagtatccctgcgagatttttcttcacatacctagccatacaattttcacttctcaactttcgtcgttgctcggttaagctacatatggatcataaatttttgagctgcaagccagtttatgaagtttggtttttttgtttgtctatgtagatgaaattcggaccgatatcgggctaccgagagaacgcatgattcaaggggcgtgtgttagtcgcggtttagggctaaatcggttctgataattcctactggatcgttcgtgctgaggtgttaagttatgaaaaaaaaataactctgtcactaaaggaaaaatgatcagagtggagttatccattcagaccttgtctttattactgatgagaaacctcatagtctcttaaaaagggatggcaatgatcttgttgtcacccagaagatatcgcttgtagaatccttgacaggttacacagtgcaactgacaacccttgatgggcggaatcttacattccccattaactccactattagtccaacatatgaagaagttgtcaaaggagagggtatgcccattccaaaagaaccttccaagaaaggaaacttaagaatcaagttcaatatcaagtttccctccaggcttacatccgaacagaaaagtggcatcaagcgattattgacatctccttaagcaacagcagtagctcttcctaccatttagctaacattgtaagatgtcagttattttatgcttggtttatttgttttcaaatggaaattgctgccgctgtgaactggatttcagttagaacagtttattagaggatgatatttgttaattgtttcatgtcttaagtatttggtagtgaaaaaaaaaaaaaaaaaccaag

SEQ ID NO: 29555 - DNA, 483 bp, Glycine max
  Clone ID: TF_LIB3242-353-Q1-J1-B10
ctcccatctgtctctgatgcggtggggagtggggacagggagggtttgccatttataaggcatacaacccttccttttctactagcctgtgtgctgacccgtccttttcttctccatgcattaccacaacgttgtagatatggaagacatgacataaagtcatatgagttcagctgcggcctatgttgaaggggggaatcaagaatcctgtgatgacgcttgcagcatatgcctcgaggagtttgatgcaagtgatcctctctcggtgactacctgcgagcatgagtttcatctgcagtgcattctccaatggtgtcagagaagctcctacagtcctatgtgctggcatcctattagcttgaaggaccctactaagtaggaagttgatgagggagtccagcagagaagaagcttgacggctaccccatcaagaaatgctgctgttcttcatcaccctgcctttggagatattgagatgcagca

SEQ ID NO: 29556 - DNA, 1655 bp, Glycine max
  Clone ID: TF_700842658_FLI
gagcgctgctacaagagagagagagagagagagagagagagagagagagaagcatcgacaccaaaatcgcgaatctcgttcattgttgtgcttccgtttcgcgttggtgatcctcctctcgctgctctctccaccaccacacagagtgactcactcaccaaatagcaatggctgctcagaagcgttccttccctgatgctcctaacgataacaaccgccacgccaaacatcaccacgaagaagcaaaaactgaagaagaagaagaagaagaagaagaagaagcacaacaacaacaacagcatgatgaagaagaagaagaagaggataataattacaaatcagacgattctcctcccgaagacaaatccgaatatgtgtttgtagaacttctggaaatacgcaaagaagtccaatgtccaatttgcctaggtattattaagaaaacacgtactgttatggaatgcttgcaccgggtttgcagggaatgcattgacaagtcgatgcgactagggaacaatgaatgccctgcttgtcgaacacactgtgccagtcgtcgttctttgagagatgatccaaactacgatgccttaattgcagctttatatcctaatattgagaagtatgaacaagaggagcttgaatttcgtgaagaggacaagaaccgcaataagcaggcttcaattgcaaaagttgttcaacgacaatctgaagcactggttaagagacgtagagatacaccaggttcatttgtgacaagatcacagcgcaatcaacgaaatgttctctctaggagacaaaaccaagggatggataatcaaggatctgaagataatgaggaggaaaatgacaataatgaaaaggactcatcttccacagatgagcgatgtacagaactcaggcagagaaggcgaaagaggcggaccagaggtcgtccttctcagccctcatcatcgacggcaagtcctgatggtggatgcatagaaagtgacatggacataagaatttcttctagactggtgtcaaaacctcaaaaactaacttggggaaggggtggttttaggagtcacacacggcatggcagtggcaatggtagcaatagcaaaagttcccgcagtagtcgcttggctaagttagttgattatctccatagcttgaatgaaaacactgatgagttagatgtccatctcattcttttgtctttagacaaacaaattacaccaagcttgcagcagccacacctttgctgtcggccaacattgtctgtgaagcatctttgtgaatatgttgctcatcagacacctttgctgcttgaagaagttgagatattggcagttaaaggatgctgcagtacagtttgtgacaagtcatttgatgagacttcatcctctgatgagctaactacgctggttatagatcctagcaaagatgaactggaaactctgcaagggcatgaatctctggcagggattaaatctaaatgcatatctaaaagggagcatttgattctggcatacaggaggaaggaatgaacattatagacagttttgagatttatgaatgccagggcttattctgtacgtacataggaaaattttcgactacaaaactatatatagttaaataataatatgaacctcccgaaagattatatagac

SEQ ID NO: 29557 - DNA, 943 bp, Glycine max
  unsure (1)..(943): unsure at all n locations
  Clone ID: TF_GmC127138_1
ctctctctcccttcacaaatggctaacaatcccttttctcattctcttcttattcttctttttttcttttattcttcactctcatgtcatcttcttccattccctcctcccctgatcacttcccccacctcggcctcggctactccatcgccatagccctagccttcctcttcctcctctccaccctcctcctctcctcctacctctgctgccgccacaaccgccgtcgcctccgccacaccaccgccgccgccacctccgacgggggcatcgtcctgccacgtgtcatcttcgtggcggaggacgaggacgaggatggcagcgtggcggtggggttcgaccagagcgtgataaactcgtatccgaggttccagtacgacagggacaacgcacggaacaataatattattaacaccacgtgctcgatatgtttgtgcgagtacaaggattcggagatgctgaggatgatgccggagtgtcgccattacttccacctatgttgtctcgattcgtggctgaagctcaatggctcttgccccgtttgcagaaactcgccgcttccgacgccgctttctacgccgctgcaggaggtggtgccgctctctcagtatgctgctgataggagaagaaataggtgaatctttttttacaaaaaaaataactttttgggttaattggtgatgtgggttttgctttttttgttgttggggtatttaaagtttttaactttcttagttttagaggttgggtaggtgtagggggagggggggaaaatagagggtttttatctttttcttttttgtttcgatttagctttgatcatgtgagggaaatgggaaaaaattattagagctagttggttgattatgtaattcttccatagggctattttgtttcgttttcccccctcttttaaatagattaattcaagtnntgnngtaga

SEQ ID NO: 29558 - DNA, 1974 bp, Glycine max
  Clone ID: TF_GmC1149_1
agatttcatgcccccaagtccaagtccaagtcccattctcttctctctctctctgagcaatgcctgtcacaaacacaacaacaccaactgtggcagaacacatcaaatggagaagacccagaaaccaattcaaccaccatcagcaccccatttcagaaaccgatccaaaccctcaaatcccttccattatccaatccactaggtgcaagtctaccatttcctccttgctcctctccactttctccaacaacacctcctccaacaatgacactcccaccaccttcaatgccactgcccatagcaagaaaaaaagcaacttttctgcatcaaccttcagagggttggggtgcaccgccggagcgtcgcagcaggtgtcggtgccggcggtgattcgctcctccgccgtccaatccaagtcccattgtcttcactctctctctgtctatttcctgccacaaccatacctgccacaaacacaacagcacccaccgtatcaggacacctcaaaattggaaagcaaagaaaacaagtaaaaagaagcacaagagaagcagcagcagcagcaagcacaaaactttccatcccctaggtgcggttctaccaattccagcgtgcgtgtattttcaagctgtttcgtccgtccctctcaacagtttctcctgcaccacccttcaataccgctgctgattgcaggaagaaaacaagcattttgtctcttctgcaagagggaaaattgatgtggataagatcactcacagggagcgatcatcgtatgtgggaaggcgcactgaaaccttcacttttctggacagtactgatcctgacattttcacaccacgctctgcctctgactcttatggaactgcaacatactatcgtcatgttagagatccttcctctgatggttttgctgagataatgatgcttcaagggagtctactaatgggtggacaactaaattcacatgatcatttcaaagactggagacttgatgttgataacatgtcctatgagcaattgctagagcttggtgagagaattggtcatgtgaacactgggcttaaggaagatgagatgggacggaacataaggaagactaggcttcaattttgggatgatacatcaaagcaccaagtagataaagagtgcagcatttgtcaggaggagtatgaagcaggaaatgagttggggaggctaaattgtgaacacatctatcactttcagtgtataaaacaatgggctgcacaaaaaaatttctgcccagtatgtaagcaacaagttgcggctcgacactgagtgacacaaccctactactgtttagcttccattctcatccataaatttgtgtatagttttccatatccaatacaagcaagaattttcattctctgctgtcaatcatcatttcatgtttcaaaattcctgcatcctctgcgagaagtcggcaattatatgttattgagtaaaggttttttattcgggctgagacctttgcatattatacgcaagatttgtcttgcctaagagcagttattttttattttcttttgggtttttaatgaagttgtgtctgtgacatagtagggtgttcttatttggaatgcttgtcctcaactatacccattttggatcctatggtgataagtttttgttggctgttgctacttgcttgtcaattatcatttcatctttcaaaattcctgcatcctctgcgaggaatcggcaattatatgttatcgagtaaaggtttatattcgggctgagacctttgcatattatacgcaagagttgccttgcttaagagcagttattattatttttttgttttgggtttttaatgaagttgtgtctgtgacgaagtagggtgttcttatttggaatgcttgtcctcaactatgcctatccattttgaatcctatggtgatagtttttgttggctgttgcaatatctatattatgtaacttgtttatggg

SEQ ID NO: 29559 - DNA, 947 bp, Glycine max
  Clone ID: TF_GmC1428_1
atttgcacctgtactaaatataaggcagtggaagaaggtttaattactgtgaatgttagggaagaagtactgaaggtgtggtgatgggtgttccacaacctccacctccctctcaacatctctatccacaagaaattcagcttaaaatttccgtgaatgttagagaagaagtactgaaggtgtggtgatgggtgttccacaacctccacctccctctcaacatctctatccacaagaaattcagcttaaactttaccaagccttcatattctcaattcccatactcttttccatcattttggttcttttgttttacttgttctacctcaaaaggagggcttcttctctctcatcaccacctctccacatacttcccagtactactaattcacaaactacatatccttatccttcacaaccttgccgtttagatctgacagtgcaatttctggacaaacttccaagaattttgtttcatgaggatttaagaacaggagattcagtatgttgtgtttgcctaggagaatttgagctgaaggaagagttgctacagattccttattgcaagcatgtgtttcatataagctgcataagtaactggctgcaatcaaactccacgtgtccactttgtagatgctccatcattccctctaccaagttccttaatcccgcgccacctattatatcagacccaacacggcaaggtggagtttcaggctcttcatcacacatcttgtcattgcctcatcaacaagaagaagttggtgcttccacaaatactaccatttttcaagggaatgatgtataatgtattaaataataaatagacaataataccttttgaattgtagggggaggaggcattcaactggtcctcatgagtctagagttctgtatattcaaaaccaatattaatgtatgaaataaaatgtggcctttctttatct

SEQ ID NO: 29560 - DNA, 2529 bp, Glycine max
  Clone ID: TF_GmC552_4
tctcgggtgcgagaagacgacggaagggggaaggtcaatttcgaagcctctcgaatccaaactcaacagaacattcatttccctataaattcgacgtcgtttcgttccgctctcactccaagaaaacgttttgcagaagattccaatcggagctcagaaaaaaaagaaacctaatcgccgatcgcgtcgaaagttcgttgttgttctgtgaaattgccttttttttttccgttctgtgataattctgtgaataataacaataattgtgtgtgtttcctcttttaggtaacgtagctgaggttccttttttttttataatttttttgccgtttgaagataggcgtttcggttactgctgcgttttgtggtttctggagttttaattctgtgcaatctgttaattctacatgtttgattgtgttatttttgggtgcgagatttgattgtttcctatgacttctgtgatctggagttgaaatgttggctaacgagtttagaagccggtgcttttgtggtaatttactgctcgattctgtcaagtacccccagtgctaccttgtagtaatatgtggaattcttgtaaacacattagttgcgctgtgtttatctcttggagtagtgctgattggagctgcatttctcgataactgtgtcgctgatttcacctcatctccggcagtataaaggaaagcaacgatgcgttggtgtttacctggcttgatagggtgactaaatatgcctttagaagttttaggattatttctaatgtgttcctacatgcagattggatcgcccaccactctctccagctccaaagtcaccggactactgcctgcttctaaatagcttataatcttatctgaagatagagatatcatcatgggagaggtggcagtaatgcattctgagcctctgcagtttgattgcaatgacatgaagcatatcactgagaaagatgtatataatctattgtcaaacgaagagcacatacttggagaagaatcaagtcaatcatcaaatgacaaaaagatcaatgatttgagagagagaggatacatgaaatgtcaacattaccgaagaagatgccgtattagggccccctgttgtgatgagatttttgattgccgccattgtcacaatgaggcaaaaaataatatcaacattgaccagaagcatagacacgatattccccgccatcaagttaaacaggtgatatgttctctttgtgagacagaacaagaggttcagcaaaattgtattaactgtggcgtttgtatgggcaagtacttctgtgggacgtgtaagctctttgatgatgatgtatctaagcagcagtatcattgcagtggctgtggaatttgcagaactggaggatgtgaaaatttcttccactgccacaaggggggctggtgctactcaactcagctgaaaaacagccacccttgcgtggaaggagcaatgcatcatgattgccctgtttgttttgagtatttgtttgaatcaagaaacgatgtcactgttatgccatgtggacatacgatccataagagctgcctgaatgaaatgagagaacatttccagtatgcatgccctctctgctcaaagtcagtctgtgacatgtcaaaggtttgggagaaatttgaccttgagattgctgctacacgaatgcctgagcaatatcaaaataaaatggtttggatcctgtgcaatgactgtggtaaaacttctcacgttcagttccattttgtggctcaaaagtgtccgaactgcaaatcctacaacacacgacaaacatgaggcggagcaggtggccacgattattcattggcttcatcaaaagccttcactcgagagctctcttgatgttgtcgtgacttgtgaaggcagtgaaaatagatgtgcatccattgggtacgtggatgtgcacgtgtgggaatttggagtgcatgatgagccacattcagagggataaaataatggttcttatgttgatttggagtggggtggtttaatttgttggggctcccctagtagttggaatagtccagagtgttagagttcttgtattatatttgttttagccctatcgataagtattctagttaaattactctttaagtgaaattcattcttccaattatttttatttttctatacaactaatccagattatcacttatgacaataataatgtaactacattttcatcgtccggtagtggcaatccaagtgcatcctttattgaggaaaatgcatgtgggaattgtcattcaattgcaggcaggccgaaccccatccaaaagaaaaacggtttatcccgttgatgtggtgtcgagggtagtgtagagtcagcaattgtcgtgttggttattttgtgttgggaaaacccttttagtgttccagtgttcactcctgtaatgtttgtttgggattaatgccaactttcaaattagctgttactttatatatttgtagaatcgtaaccctgttttaaaagttgtgttaagaagtaaccttcatctcgtatgg

SEQ ID NO: 29561 - DNA, 2088 bp, Glycine max
  Clone ID: TF_GmC481_1
aaacccctcttccggtccggattcccggtcgacccacgcgtccgcgccgctttgctgggccctcgatctgctcgtcttctcagaccgccaagcacccagttcgatgggggtcactctgccagcttcaaaaccatcacaacaagaagcaatttcatccccctatacgagctaggtgagttctcagttcaacacatcgtgtgaaaaaaaaaaaaaagaaaataagaagcctattttcgtaatttgtatgtgataaagtgcccatcttgatgtatgtacttcttcacttctttgaatgagtccctagtttgagatttatctaaaacattttgaagtgattaaggtgccaacagatgtgactattattgtgttgggtgaaggaagcatggtatcaaaaacattttgaagtgattgtgatccctagatttgactatgattgtgttgggtgaaggaacatggcctcatggttgtgtggttttctttgtgatccatgagatgaaatgagatgagaagtcagaaaacatgtatcctaggttgttgttttgtgaccaaacccattttaagatggcttcttcttcttcttcttcttcttcttcttcttcgcatcaaatccagcaaactgagggttacttgagctaaggaatcatcattgccttcttctctaccaccaccaccaccatctggcactagaattagtcctgctgttctattcatcatagtggttcttgctgtcttgtttttcatctctggcctcctccacctgcttgttagatttctcataaagcacccttcttctgcatctgctcaatccaacaacagacaccaagaactttccacatctgatgctcttcaaaggcagcttcagcagctcttccacctccatgactctggcttggatcaggctttcattgatgctcttcctgttttccagtacaaggagattgtggggttgaaggagccttttgactgtgctgtttgcttgtgtgagttttctgaaaaggataagctcaggttgttgcctatgtgcagccatgcctttcacataagttgtatagacacatggcttttgtcaaactccacatgccctctttgtagaggaacacttctcactcaagggttttccgttgagaatcctatatttgacttcgatgatcttatggaggatgagatgtgtccttggaatggggagaatggattcaatacccggcagaaaacagttgtggttgaagaaagtgtggagaaagagaaaggtgttttccctgtgaggcttgggaaattcaagaagctaagtagtgtggaggggggtggggagagtgaagtgggagagacaagtagcagtaatttggatgcaagaaggtgttactcaatggggtcttaccaatatgtggttggaaattcagacctaagggtggctttgaaccatgatgaaattggtaaaggtcaagtcacaaggctcaacaaaggaatggaacttgatgatgggaaggtttcagtggaggagggggatgtggaaggaaagaagattagtagtgtcagtaaaggtgacagcttttctgtgtccaaaatctggttgtggccaaagaaggggaaattgcctacttctttggatggtcaaattggcatgccaatgccttcttttctaaacacagattttccaaggatgagggatacagaaggggcatgaaaggtatccatccacatgttttttaatttttttttttacttcttatttcacttgaattcgtttcaatccattgattaaaactggcttcccctccttacttgtcttacaattccaaaaaaaattggtgtgctaattttgacattgtgatgactgattgtgccacatactattgatgtattatgattgtactttatgaagatataagaaacactgcatctgtttttcttttatcaaaaaaaaaaaaaaaaaaaaaaaaaaaaaaaaaaaaaaaaaaaaaaaaaaaaaaaaaaaaaaaaaaaaaaaaagggcgggccgctcgcgatctaaaaccggaccgcgtggggtcgaccccgggaaattccgggaccgggtcacctgcaggcggtaccagcttttccctataggga

SEQ ID NO: 29562 - DNA, 1067 bp, Glycine max
  Clone ID: TF_GmC23999_4
acggctgcgagagactacagaagggggaaacaaacatggaaaggatatagattatagaatacagaggcaccgacgtagcgacggtcaaggtccacaatccacaatccgcaaccgaataacccactacccacagatttctctctctctctctctgttggattggatcctaatatctgtgttccactttcagaggttgctccttcattcacgcccttgctctcttcaaatctattttcttcctctgctctatctatctcttgttatttttccctctcacgccaatcaccatgccttctccttcagatcaccaccgcccccaaccaaaacctaatcccaacctcctttctctgttcctcaaaccaatcatcatgctccttctcacctccctcttcttcctcttcctcggcttcgctgccttcctcctcctcaacctcttcctcctcggcggcgccttccaccgccttcgcttccgcccctccgttaccaccgcacccacctcctccaacggcctcccccctcgcgaaatcaacaagctcccccgctttcgtgtcgccaatggatccgagacccgacccgactccaattgcgtcgtctgcctggacgcattccataacgcccaatggtgccgaaagcttgctgcttgcggccacgtgtttcaccgcacgtgtgtcgacacgtggctcctcaaggtcgccgcatgccccacgtgccgtacacccgtgcgatttaatgccggaactacggttcatgacccgcctcagcgttttgaccaatttcatacctgcggaactgactgcactgctctcaccacccttttatagcttgtaagttttagttttaagccttttttaaaccatgtaagcttttttttaatctatgtatatgaattgtagcaatactttttttttcacaaatgttttggtattttttttacttctaagaataggagaatgccttaaaatctaactctgttttttctgatcaccctcaccttcgtgccacttgcctgtggttgtttaattgcccagtgtttttgttttcaggaaagttcaccgttgttattgata

SEQ ID NO: 29563 - DNA, 1942 bp, Glycine max
  Clone ID: TF_GmC24755_1
gcacgggccacgccgttcacgtgcttagagttccctctgccgagatcgtatactggaatcactcagcagaaactcctacatggatgggccaacccttcgcttctcttcttcgcaactaggttctgaacccactcgccgaatcggcttctttcaatctcaacacgtaacaacatggccaccacaaggtcatcgtccgaggacatcgtcgattccacgccgcttctcgccaattccgccggctcctccgacgacctcacctccggccgtcgattcgcgcggcgtcagcggctccggcaggcggctcagttcctcaggcaagcgagcgggcgccggatgatgcgcgaaccgtcgatgctggtccgggaggccgcggcggagcaactggaggagcggcagagcgattgggcgtactcgaagccggtggtggttcttgacatcgtgtggaacttggcgttcgtggttgtggcggggaccgtgctggttttgagcgcgagcgaggcgcctggcatgcctctgaggttgtggattgtagggtacgctatgcaatgcgtccttcacatggttttcgtttgcgtcgaatataggaggcggaggaggcagcaacccgctgccgcctcgtcagtgcaagacagggttgggagcagcagtgggaatttgagtgtgtcttcaagagagggttctgcttctgcctctgcctctgcgcagaatgtgttgttgggccaactcgatgacgagagtactagtgttgcaaagcatttggaatcagccaatacaatgttttcatttgtttggtggattattggattctactgggtatcagctgggggtcaagcattagcccaagactctcctcagctttactggctatgtataatcttcctgggttttgatgttttctttgtcgttttctgtgttgcactggcatgtatcattggaattgctgtttgctgttgccttccctgtatcattgcacttctttatgcagttacagaccaggaaggggcatcaaaggaagacattgagcagttgtcaaaatttaaattccgaagaattgaaagcaatgagaaacttaccggtactatacaaggacctgttggaggaataatgaccgaatgccaggctgattcacctattgaacatgctcttgctgaggaggatgcggaatgttgcatctgcctttcttcttatgatgatggggttgagctaagagaacttccttgcggtcaccattttcactgtgtctgtgtggataaatggctgtatattaatgctacatgccccctctgcaagtataacatcttaaaaagtagcaacctcagtcaagaggaagtgtagaagatcgatgtcaggaaagtttttggcgcccatgttgaggaatctgcacactttcgattcacagccatgttaatatactttgatacaggcctatacagttgctcctgctgccgtttgctgttatcatgtaatgatagcttttttgattgtttgtagttattgtggcttcttactggttgtgtatatcagtgttgttcagtgcataccggctataattatctcaagaggcaatttggttgtattttttttttgggttttattgtcgtcatcattgttgttgtatatggacccataatgtcttgcttaagccactgtggaatggtttatcatgtctcggtatatgttaccaaaatatttagcccaactgcctccatgcgtttcacttggcaacttacttataccccctattgtgtttatttgagtgtaaacagaaagaaaatgaaattgagagataggagtttcctaagtgagactgcattagttatttggttctgtttttttatttattattctgatctataaaaaaaatcgagataggatgtaaatatcaaatttttactatttctgctataaatacagaaagaactcaaaggagttactctttttc

SEQ ID NO: 29564 - DNA, 1259 bp, Glycine max
  Clone ID: TF_GmC56808_1
tactcatagttttgtaggcactagagtcttaaattttccagatgagggagatgagtttgacagtgacactgacatagatccaatgcatgctggtctcagccaatggatttctactgatgaagacaatgaagaggaggaagaggaagaagaagaagaggaggaggaggaggatagggaatgggaattagctgatgtttatgaagctgaagccacatcccaccttcaaatttttttcacctctagtccaagtgagagcagggatcacattaattctactgaatctgggggaatgtttagccagataatccgggagacctggcatgcttttgaggatgttgatttacctcatggagcaaactttggggattatcttgatgctagacgttttgaagatctgcttgagcatctggctgagaatgacagctcaagacgaggagcgcctcctgctgctgtgtctttcgtgaataatctgccacgtgtagtcattggcaaggaacatgagaaccacggcgaactagtttgtgccatttgcaaggatgtcttggcaccccgcactgaagtaaatcaacttccatgctctcacctttatcacatcaattgcattttgccatggttgagtgcccgaaattcatgtcctctttgtcggtacgaacttccaactgatgataaggactatgaagagggaaagcagaacattgatagtagaaatgtgatccatgagaggcaacgaatagatgtaacagatgatagttattctgatgtttctgatggagatgaggtgaatggtagtggtcaaggtggaatacggcaaagacttctgagctcaggttccactgtggattcttctgcaacaagaagtggtagaggaagatggttttttcttgctgcagctccaattgttagtctagtgggcattgttcttgtcttgtggttgggtaacaactctcagaatgaaggaagtagacatctgggcagtcactacttatccgggcaaaaccaacacgctgttcatgcttattcctctccaaaccagagggagggtagaagcagagggtggtggtgcccattttaagtgcttcttgatttgtttatcaatatgcctcatgatggccacttgggatgaaatttttaactgactcatggcgtgccttttgtccttagctctctaattcaagaagacatgtacagattttagtttgtaatatggtatctgcttttgtttcttgtttcatttctttcctagtttgtgcttcaaggac

SEQ ID NO: 29565 - DNA, 1001 bp, Glycine max
  Clone ID: TF_GmC37201_1
tctctcttcactctccacaatcccacacccaagcccctctctccgaagttgggaacatgagttggcggtcggtgaggggaagccgtaagaggaagatggatttcgaactggacctcaaccgtgatccgccgctggttcgagaagaggaggaggaggaggaggagggggggccctcaaggcatcagcagcaccaccaccaccaacaagaacctcaaactcccattgtcgatgtcgacgccattgacgacgatgttgttgaaagctcgcctaggtctttcgctcaggctaagagcaatgctgatgagaggaggagagttcgcaggaggacgactattgttgatttggactcagaagatgggaccggaggagttcctcaaaaccaaacaatcatcaatggcgatctttatgtaaatttggccaacaacagcagttctgcgagtgaaaatgctaagaagacacctgaacctcccaaggagcctgaagctcctaaggagccgttttttaattgcccaatatgtatgtcccctttggttgaagaaatgtcaacaaggtgtggtcatattttttgcaagaattgcatcagggctgctatatctgcacaggctaaatgccctacctgtagaaaaaaggttacaaagaactcactaataagggtgtttcttcctgcaactagttaaaggatctctatccaatcattaattgaggagaatcaggatttaggaatgtgagaagaagcttcattgtactctgcagaatgctgagtggctctgttgttgcttacatgtttgttgtagcggatgcttatttattttcaaggagctgtttctcctcattaatttgtcatgtaatacatagggatgctctgttttttatttaaattgttcataaacctcagttttttttactttttatatttattggtcaaagaataatcttataaacaatttatgaatgtgtagtttttttttttttttgtcataaaaaaaaaaaaaaatatccat

SEQ ID NO: 29566 - DNA, 1933 bp, Glycine max
  Clone ID: TF_GmC1077_1
ggccagcccccctaagctcggatactgcctcggctcctggtatccgttcgcggcgtgcagtggggttgtctgtttcctgtatgcgggaccgagagggccaggaaggtggcgtattttcgctgaggtctgctcgtcggcttcctcagttcctgaggctgcggggtctgggccaagccagcttggaaactatacggaatctgatgttgatactcgtcatctttatccggatgtccattccgttgcgagttggagaggtcatgaaaggttgatctttgaccctgcaattaatagttcaatttttctagtcagagatcgcaacgtggcacttatagtagctagcgcgatctaaaagcgatgttcagagttgtgctcatcaagagatggctactgctgaagctgagatagcagacatgcgacagaaattagaagattctaaaaggcaaatgtgtgatctgtctgatgtcttgaaatctaagaataaacaaaatgagaactacatgtctgaaatagagagtattggacaggcatatgacgacatgcaaactcaaaatcaacatctgttgcagcagattactgaaagagatgattacaatattaagcttgttttggagggtgtacgggcgagacagaagcaggactcattgctcatggagaagcgggtcattgaacatgagattcagcaagcaaacatatcattgaatgtatatgatgtgaaagctacaagaattgaagaccagttgaagttttgtttggatcagcttcaaaaacttgcagaggataagcttcaaagttctgtcactttggaaaatacacaaagaaggctgtccaatgttagaagacaatctcagcaggttacggatatggtggtggaaatgcaatctaaaattggcagtaatcgagtgacgcgcatggagttacaagtagaacttgagaaagaaaggtttgccaagaaaagagtggaagagaatctggaggttgctaggagaaagtttacatgccttaaagaacagaatgagggctttttagtaactgaaaagcttcaacaggaacttgaagagtacagggaaattatcaagtgcagtatctgccaagacagggcaaaagaggtggtaattacaaaatgctaccacttgttctgctactcatgtatccagaaagttgctgggagtaggcatcgcaagtgtccacaatgtggtacaagctttggggctaacgatgttaagtctgtttatttgtaactagaaacttggttctctcccggatgtcgagaagaggctggtgttcttttgaaaaagatctggtgtatggatacctacataggaggttcaattgtatgcttagtgccaactgtcgagataaggaacattggcagcgatcaatgagttgcttgtctacatttggaccaaaaatgattattttttgctgatttatcataatgcatcttccaatgcgatttggagaggggtcatgaaggttggtctttgaccctgcaattaataattcaaattcgaaagcctgaattggccatcatggcaaattttcttggaagttgactccaaaggtggcaaccacgatgcctcacatctgtatttctgtttctcctgctgaaatgacacaagtacaaattttggtttcaggggatttgtatatatgctagagtttataaggggtcgttcaattttgtttataacagcctgtaatttgtgtaatcgtagatgatatgactagatatcattgtaattgatgttgtgaaaagttaagaaagctcaagtttatcatttttttctattttcaatgttgcctgaaaaaaaaaaaaaaaaaaaaaaaaaaaaaaaaaaaaaaaaaaaaaaaaaaaaaaaaaaaaaaaaaaaaaaaaaaaaaaaaaaaaaaaaaaaaaaaggggggggccttttaaaagaacccaattttactc

SEQ ID NO: 29567 - DNA, 694 bp, Glycine max
  Clone ID: TF_GmC99_1
tcgagcttattaagggttcaatagatatgcttccctaccagtaaaaatcagatgactctcaaaggcttggtatcacttgtcatcaatttaattggcctagctgagggaacaaggaacaatgatgccccccctttaccttgttacatgctatctagccatatacaaaataacaagcaacaatcatctgaatcagcatcagcatccaattttaatgaggatagttggtgttgtgtgtgcttgtcaaggttaaaggccaaagatgaaatccgtgtccttccttgctcgcacaaattccataagatttgtgtaaataaatggcttaagggtcgccacaagacgtgtccactttgccgtttctcaatgggagccgaggagaagtctcatcgtgccgaaatgttcactgaagagatgttaatatggttttcttctttccatgtagctggtatgtaatgatctaagtttcaccagtgaatctatttgtagttttctacaagcagagccttgctttgctttcaagttttgtttaaggcttgtgaatctgatttcgtgcaagctgaaacaaattgttatggcttatcatgcctgctatatatgaatgaaaatgtcgatgttcataaggggaaatctagatttacattccacctttcttttaccttaatggaggatcgattctcttcaatatactatgtcttat

SEQ ID NO: 29568 - DNA, 1339 bp, Glycine max
  Clone ID: TF_GmC127181_1
cagccatattattatgtgctttttgcatcttcctttccaatctccaaagcacaagagggagcaaacaggtcaactgcaacaccttgcgttgcggcaatatagatattcagttccctttcggtttgagaggatccaaccaagatcgtggctgcaggtattacccagttcaaagcttccaactttcgtgcctccacggaggaacacaaaccattctcaccctcccaggcttcggtaacttaaccgtcaaaagcatcgattacgaatcccaaagcatccgagtcaacgacccagatgggtgtctcccgaaacggttcttacaaaagtggagcctttcggtttcggattcaccttttgttttaaaccccatgatttatggaacaattccctttaacctcactttcctgcgatgcccctccaacgtgacggactcgtctcaataccccttggtgccaatttcgtgcctgagcaacaacagcaactactcggtcatagcttcgtggtcgcaacctattatgtcgtcaccctcgttgtctcaacagtgccaggtcatgtctcgggctcttgcccggctccccctgttggacatgcccatgtggcccttctggcccgatctcaacactgatcttgatttggtttggaccgaacccgattgtaggaactgtgcactcagtggccaagtttgtgggttctccaaggagaaaactaaaacccctcaagttcggtgtttcgctagggactccaccaaaggtctttcaagaagtgccaaatatgggttagcaataggagtgggaatacctggactcttgtgtctaatcgggatttcttgctgtatctgcggcaagctaacaaatcgtcgacgtagcgcggatcttccggtgacaatttccctagaacccgtccctttcgtaatgggactggacggtgccacaattgacaagtatcccaaaactcttattggggagagtgggcgcttactgaagcccaatgacaacacctgcgcaatttgcctctctgaatatcaacccaaagagaccttgaggagcattcccgaatgtaaccattattttcacgcagattgcatagatgagtggctcagattgaatgccacgtgtcccttgtgcaggaattcgcctgaggcatcttccactgcttcttttttttccttgtctcccacttcttcatcgtcctctcggtctccacagtaaataccctttttatatatatatacttgatgtagttgtagatcgagagtgctggtggtttctgtgttacacttacactgttataacctctcttcttttttctctccaaagattaataataaggatcatcttatttc

SEQ ID NO: 29569 - DNA, 1072 bp, Glycine max
  Clone ID: TF_GmC4200_1
cgacgggctcggaattcggctcgagcactgcaacaataacaatcaaagaaaagaaaccttctcagacacacaacaaaaataacatggaaatggaatcgaaagactatgccttcagcggcaagataatgctaatcgccattgtggttctcttcatcgttatcatcataatgctttgcctccacgtctacgtccggcggcgcctcgtaaacgctcgccgccggccacagctccgccgcagtaaccgcccgcagttcgtgttctacatggaccccgccgcccgcattgccctcaccaggcgggggcttcacccctccgtgatctccacgctcccgatgttcaccttctccgccacaaacaacccaacggaatgcgcggtttgtttatcagagttcgagaacggggaaacgggtcgggtattgcccaaatgcaatcacagtttccatactgagtgcatcgacatgtggtttcagtctcatgccacgtgtccgctttgcagggaacccgtagaggctatacccgagcgagaaacccgatccgaggtggctgttattgtgtgcgacaccgaaccggttcgggaagaggtgaaccggtctggaccggtgggtgcttcttcttctgctgctgctacttcgttgcatattgagaacttggggtgcgaggatgggtgtgaatcggagtcatcgtttcgttcgccggtgagtcgtatattgtcgttcaagaggattctgagtagagagaagaaaggaagcgttgtaggagtgtgcagctccatgaccgagttagacgtagaacaacgtggagagtgtgactcggtgagttgatggcagcgacaacgtgaaatcgaaattggaatgagtctgagattgaggaggaatttacgctgcggcagagtttgcagaggtgacatgacacacaacactgtcgagtgtcgacgtaatatctgatatgtaccataccttgtacagtcaaaagagaatgacaggttaaaagattcttttattttatttaattttaaagtttgtgtttttgccattttctttaaatttaatagaagaaaatgaatttttgtttt

SEQ ID NO: 29570 - DNA, 4664 bp, Glycine max
  unsure (1)..(4664): unsure at all n locations
  Clone ID: TF_GmC25542_1
aattctgccatcaataatgatgaaagttttccgaganagttggcatcctgcacaggagctttgcagacgtcagttagtcaacacatggcaaaggaagaggagcagtattcctgtgaatatgatggccgaatttctaccatggctttcaacatctatatcacctgatgaatctcaggatatgcaaaattgcttaatcaagatagtgccacaggaaaaactccttcagaaggtcgttttctcctggatggaaggaagaagaagaaagaaataacaaaaaagaaagttaaaacgcgcatggcgtcgccgttggacggaggaggagtggcggtgctcccgaattccgtcaacaaggttgactcctcctcggctctcaatggcggcttgaagtgctccaaaccggagtcgccaattttgattttcttgttctttcacaaagcgattcggaatgagcttgacgcgctgcaccgattggccgtcccattcgccaccggcaaccgctccgacattaagccgctctacggccgctacaatttcctcagctccatgtacaggcaccactgcaatgtttaaacttacgggatttttccagctcatgttagccgtcagtagaaggttgcaaagacataatcagacgtgaagagtatgcgctgcctgaatatacagccaatagggcccctatgcataacaccttcatgtaatgttgtatcaatggcaaagaagtattactacatctcaaaattttttgagagggaaatgaatgtatatgtgtggcatttatgcaagttattctgtattgggcacaatcttaagattgctttttctcaatgcgtgcagtgcatttgttgcctggggattaaatcatcatctcatatgtgcccggagaatgaattataagtgaatgagcaatataagcgaaatggcatgcttagttcagcttgttgtgtcatgaatttacctttagagatctagttatgtcaatgtaagttatagcccaacgggtagagaagcaacataggaaataatgtgaacgcagtgcctaactatacagccatttgggtctgtatgcatgtcaccttcatgtaatgggcttaaattggcaaagtattattgcaacatttgcaaattttttgatgatgaaagggatgtttatcattgcccattttgcaatatatgccgtgttggacaagggcttgggattgattatattcattgtatgaaaatgcaattgttgcctggggataaaatcagcatctcataagtgcctgtagaaaggtttagaactgaactgctcaatttgctgcgacgaaatttacacatcaagtgcaacagtgagagctttaccttgtgggcattacatgcattcatcttgctttcaggcatacacttgtagccactacacatgtccaatctgcagcaaatcactgggagatatggcggtgtactttagtatgcttgatgctttattggctgctgaggagcttcctgaagagtacagggagctatatcaggatatagatcatataatggaaaccatacagaggcatttccataatgaagaagttcaggttcttccacttgcaagaaagcactttagctttagaaggcaatgtgaacttttgtatcaaagcttatgcatgatgcctctgaaattgattgagcgtgtcctgccatggttggtaggatctttaactgaagatcaagctaagacgttacagggaaacatgcagttggtagctccagaaacagatccagctcctttcaaactcttctgtgaagggttttgcaaggctcgtaataaaggtctgtgtgtatcttcaagtgcattagattgctgtcctgttcaaagactttctgctattgaagaaaattttgttgggccatcctgtgcttttgcttttgctcatctaatacacattgctcgtgattagctaattaaggtgggaacaatagatcagtcaagcgcaacatatcggagttgcacaaaaatgaagatctacctgaaacttcagaggctgaagatattcagaaacaatgttgtagtgcacggtcttgttgtgtgccaggtttaggagtaagtagtaacaatttagggctgagttctctttctacagccaagtccttacggtccttgtctttctgctcttctgccccatctcttaattccagtcttttcatatgggaaacagagagcagctcatgcaatgttggatctacacaaagaccaattgataccatatttaaattccataaagctatacgcaaagacttggagtatctagatgttgaatctggaaagctgagtgatggtgatgagacaattcttcggcaatttaatggaagatttcgtcttttgtggggtttgtatagagctcatagtaatgctgaagatgatatagtatttccagctttagaatccaaagaggcacttcataatgtgagtcattcgtacatgctggaccataagcaggaagaacaattgtttgaagatatttcctgtgttctttcagagttttctgtccttcatgaagccttgcagatgacgcatatgtccgacaatttaagtgaaagtaattttggaacctctgatgccaatactagtgatgttatcaaaaaatataatgaacttgctactaagcttcaggggatgtgcaaatctataagagtgaccctggatcagcatctttttagagaagaatgcgaactgtggccattgtttggcagacatttcactgtggaagaacaagacaagatagtgggtcggataattggaacaacaggtgctgaagttctccaatcaatgttaccatgggtaacgtctgcacttactcaggatgaacagaacaaaatgatggatatatggaagcaggcaactaagaacactatgttcaacgaatggcttagtgaatgctggaaagagagtcgagtgtctacagcacagacagaaacgtcagctcgcagcacttctcggagaggtgctgaatatcaagaaagcttggaccacaatgatcagatgttcaagccaggttggaaagacatatttcggatgaatcagaatgaacttgagtcagagatccgcaaggtatatcgagactcaactcttgatccaaggagaaaagcatatcttgtgcagaatctactgacaagtcgatggatagctgcccagcagaaatcacctaaagctttatctgaaggatcatctaacagtgtagaaatagaaggactctcaccatcatttcaggacccagaggaacatgtatttgggtgtgagcactataagagaaattgcaagcttcgggctgcatgttgtggcaagttatttacttgcagattttgtcatgacaatgtcagtgatcactctatggatagaaaagcaacatcagaaatgatgtgtatgcgctgcctgaatatacagccaatagggcccctatgcataacaccttcatgtaatgggttttcaatggcaaagtactattgcaatatatgcaaattttttgatgatgaaaggaatgtatatcattgcccattttgcaatttatgccgtgttggacaagggcttgggattgattattttcattgcatgaagtgcaattgttgcctggggattaaatcatcatctcataagtgcctggagaaaggtttagaaatgaactgcccaatttgttgtgatgacctgttcacttcaagtgccacagtcagagctctaccttgtggccactatatgcattctgcttgcttccaggcatacacgtgtagtcactacacatgtccaatctgcagcaagtcattgggagatatggcggtttactttggtatgcttgatgccctattggctgctgaggaacttcctgaagagtacaaggaccggtgtcaggacatactctgccatgactgtgatcggaagggcacttcacgcttccactggttgtaccacaaatgtggattttgtggctcttacaatacccgggttatcaaatgtgagacgtcaaattccagctgctcttagtgtgcttcttttgtcgggaggtagacagagttggtaaatacttgtatagcaaattaagaatgcaaattttgccttgactaggaaggaacccccttatcgtttcgtcttatacttgaacagatgctccaaatcagtctaatagcaattatattaatgcaacgtatattgttgcagctccaatgcgagtcacttccaaggtctcatgagtttacttggcttctcgtatgccggagatagaagcaccaaatcaagtccatagttgtcatgtataggtaaagctttcttccaaacttgtttttgtagtggatactttacctcttcctcttttctgcttctagttttagttgaaagttcatttaagtgcgcactagcgttgctttacacagcaatcgttgggtaaagggagactatttgaactatgccagcttttgttagattctttttctttttctttttatgatgtgacgatatatactaaatgattctatggggcttacttaataaacaatagcatatcattttgatcattctcaagttcaatgtagttctaggtcattaacccatcaggttgagaaagtaaactgtgcttgtgaatccacaacaacgggaaaaaggaaacattctgaatctatgatagatggttctgataccacttgaacac

SEQ ID NO: 29571 - DNA, 1808 bp, Glycine max
  Clone ID: TF_GmC5791_1
cccacgcgtccgagtgaatgccccatctgcttagaagagttctatgtagggaatgaggtccgtggcctgccctgtgctcacaattttcatgttgaatgcattgatgagtggcttaggctcaatgtgaaatgtctttggtccctttgctcagcattcccaaaccttgatcttagtgcactgtccagtttccgttctgagcctgaacaattttctgccattgttgtgacaacagccagatatgtgagaggccaaccatctagtctaagttaccggctaagattgcagggtcttctgtgtccagtccgtgctgaaattgcaggaccagttggtgacatagataatgcgttgaaaaatgctcagaatggcgttgtatcaattgtgactcaaaatgcatcatcatctggagaccaagcctcttctgtcgaatgcatgcctgttactgtctgtcattcctctgcacaaagttaggctacattgtttctgaagtcctattatatttctaacccattcttgagaaggtgaagaatgcatatccatatctggcccttgtaaaaacgatgttttgatccacataaagaattgggtcagttccttgtcggggcagcttggagttgtaggacttggaaaatcaaagtataatttttggcttaactaacatagattagagctgcaaatgtgtagttgtctttacgtttaataataacttgtaaagagagtttgaaattccaattatatattgaattctgcttttgccttttaccttcctactcggggataaaatattttcatacttttttggaattggggtgagtagggttatacacacagcaagtgcttgtaggtattttgtaaaagtcagataaatcgatttgtgattgaatgagtaaataagataattttctccagcccagagagaagcagttgaagctttaattcaggaactcccatcgttcaggttaactgctgttcctactaattgcagtgaatgcctcatctgcttagaagaattccatgtaggaaatcaggtccgtggcctgccctgtgctcacaattttcatgttgaatgcattgatgagtggcttcggcttaatgtgaattgtcctcggtgccgttgctcagtatttcctaatcttgatctcagtgctctgtccaatatccgttctgagtctgaacagtcttctgccactgctgtgacaagcagagatatgacaggacaaacttctagtcagagttaccttctgagattacaggggcctctccacccagtttgtgttgactttgcagggccagctggtgagacagacaatgctttggaaaatgctgaaaatggtgttgtacctgttgtgactcaaaatatgtcaactagagatcaggccacttctggtgaacacatgcctgttggtctttcctcttcccaaaattagattgcttctcaactctgttatattcctaacccattcgtgagaagttgcaggttacatatcagtatccagccattgcctgaagctttatatatgatgtactttctaacatgaaaatttctggactgattcataaagaaatggatcagcttcctttttttctgagggatcttgtagaaataaagacttgaagggtgaaaatataccttttttttacttcgctaagaatattatattgaatattttttcctacccttgtttttacctggggtaagaattcctttagtttttcataaaatgaatgacacaacgtcattcgacattaaaaaccaaagtttcagtatatccaaataaaaatacacatttgtttttctctttcgttaaaaa

SEQ ID NO: 29572 - DNA, 858 bp, Glycine max
  Clone ID: TF_GmC9444_1
tgtggttttagtagtatttatcaggcaagtgggggttggtttgtgtttttttgttatatttgtatgttgttctgtgctgggtccttaatttgtggctgagaattaattattattattatcaattatgggtctctcaaatttcccaagtgcatctgaaggggtgctacctgtgcttgtgataaacacggttctctcagtggcagtgttgaagaacatgtttagatccatgctccaagtagtacttggtggcagtgctgctgctaatggttcaaacattgaacatgatgaaagttcatcatcatcatgggaaaggagggtgtcaataactcagtacaagtcattgtgccacagccacgacataggaggaacaagtatggctatggtggagtgctgcgtttgtttgtgtcgttttgaagccaatcaagaggtcagtgagttgccttgcaagcattacttccacagaggttgcttggacaaatggtttgataacaaacacaccacttgtcccttgtgccgttccatcgactagacagacatatacatacaaaggttgattaattaccgttagagatatagctagctagttaattagttgttgctatatactgttaactggttatagcgttccatatcctagacacatttccaaaggttaattagtttcaaatttacaattagagctagccagctagctatagttgtagttgttgctatatattgttaacttgttatagtgaaaagaatcaatgcctcttttcatttctttacttttagatttgtacacctccttcaacccaactcagtttctctatgttttagcttttatatatggaacataatgagagatgacattgcatt

SEQ ID NO: 29573 - DNA, 2331 bp, Glycine max
  Clone ID: TF_GmC96_3
accccaattccgaagcaaaaactaccttcacatccacaaaccacacctccgccataaataaaagtaacctccctcatggaagagctctcagcggggcctctcgtccccgccgtcgtcaaacctgaaccgtccaaaggcgcctccgccgctgcctccggcggcacgttcccggcctccacgtcggagccggacaaggacttcctctgtccgatttgcatgcagatcatcaaggacccgttcctcaccgcgtgcggccacagcttctgctacatgtgcatcatcacgcacctccgcaacaagagcgattgcccttgctgcggcgactacctcaccaacaccaacctcttccctaacttgttgctcgacaagcttattgttatacggtttctgtaccacatttgtagctactgaagaagacttctgcgcgtcaaatatcaaaaaccgcttcacctgtcgaacattttcggcaggtattgcaaaagggttctgatgtgtcaattaaggagctagacacccttttgtcacttcttgccgagaagaaaagaaaaatggaacaagaagaagctgagagaaatatgcaaatattgttagacttcttgcattgcttacgcaagcaaaaagttgatgagttgaaggaggtacaaactgatctccactttataaaagaggacataaatgctgtggagaaacatagaatggaattgtatcgtgcacgggacaggtactctgtaaaattgcagatgcttgacggttctgggggaagaaaatcatggcattcatcaatggacaagaacagcagtggcctcggctgcgagaagacgacagaagggggagggttgtcatcagggagccatactaagaaaaatgatggaaagtctcatattagctctcatgggcatggaattcagagaaggaatgtcatcactggatccgattcacaatatataaatcaatcgggtcttgctctagttagaaagaagagggtgcatacacagttcaatgatctacaagaatgttacctacaaaagcgacggcatgcagctgataggtcccatagccaacaagaaagagatataagtctcataagtcgagaaggttatactgctggtcttgaagattttcaatcagacataatttctttcacatgcaacagccgattgagagatattgtcggaacttagacatggggatatatttcatttagcaaaaataatttcaagcatagtgtacttccgcgatgatgatttgtttgcttctgcttgagtttcgcggcgaatcaaagttgttcattattctgcttttatgattgaacctagagaggctcattattctgatttggagaagtctacacattcaaaacgtagttgcttttgtaggaataaatttggaaagaatcaaatagcttgtaattgttatgatcgatttgtatctgattaggatgtaatcattcagaaaagtttaatagattataaagagcattaaaagggtgtatggattttagtcagttcatgaacggatccctctatgcttgtaactggtcgtattgacagtaacgtcaaaatatgtttcactaatcaggaagctagtgttctaaatatagacatgaaagcaaacatatgttgtgtcaaatataatcctggatctggcaattatattgcagttgggtcagcagaccatcatatccattattatgatttgagaaatattagccgtccagtccatgttttcagtgggcacaggaaggctgtttcatacgtgaaatttctgtctaatgatgaacttgcttctgcatcaacagatagtacactgcgattatgggatgtgaaggaaaacttaccagttcgtactttcaaaggccatgcaaatgagaaaaactttgttggtcttacagtaagcagtgaatatattgcgtgtggcagtgaaacaaatgaagtctttgtttaccacaaggaaatctcgagacctttgacttcgcacagatttgggtcccctgatatggatgacgctgaagatgaggctggatcatatttcatcagcgctgtttgctggaagagtgatcgccccactattctaacagcaaatagtcaaggcaccatcaaagtgctggtgcttgcagcttgaacacgagaaaaaaaatgaaatagaatgtggaattggtattatcttttcccatatgctatgattgattgtatcatttattaaattgtacatagtattcgagtgtatatggcaggcgttagggatcttaatgaaatattagtcgagtgcttaaacctttatcaataaaccaattaagggactcaacttcaatttttgtcaattgaggacctc

SEQ ID NO: 29574 - DNA, 556 bp, Glycine max
  unsure (1)..(556): unsure at all n locations
  Clone ID: TF_15200544
gacacttccaatttcaaaagaaaaccaaggttgggaccagtgagtgaaaattaggtcagaaccagattatggaaattgtgatttccttgatcatactctttgtggggatagcaattttggtggtcatccatgtctgcgtcgtggggagggccttcagagggaacaacaacgaagaagaagaagaaggtactcatcgcagcatcaatgccatgaagagaatgtttggcggcgacagcgttggtgacctgaaaaaccttccttgctttccttatgaagagccaaaagagagtactaanagggtgttgtggcctagtggattgtgctgtttgcttggagaatttcaaggttggtgatgtgtgcagattattgcccaattgcagccacagcttccatgtgcagtgtatagactcatggatactgcagacacccgtttgtcccatttgtagaacatgggttcattcaccagttgtgagggaacaaagtgttgtttctgaaagtttagaaattgtaacggaatagaacacatacatgtgtatgattagttgaatttcagcac

SEQ ID NO: 29575 - DNA, 1022 bp, Glycine max
  Clone ID: TF_GmC7141_1
ttttacggctgcgagaagacaacagaagggggttaagaacagaacgaagccacgcatgataataacaatacccttcttcgtttcttccctctccactcggcactcacaattctcaacccaaccaccccctattaaccctcaccgcaatctctgattcgatcttcttcaatttcggggtttcccatataccacaaggcataggcctgtgtgaatttgcgatatgctgggtaattgtcgccaagacccaatctcttgggtactcctttaccaacccccaccgccgcattaattgtttttctattggaatcggacaaaggttccactgcgactgaaactttcaaaggccaaaaaatgctcgattcggtccttctggcgcttttcttgccgtgccttggcatgagcggggtttttatcgtctacatgtgccttctttggtacgccaccacccggcaccaccagcaaccccccatcgacgggcaaccggtgaagcccgtcgctgataagggtctatccgctttggagttggagaagcttccaaaaatcaccggcaaagaactcgtcttgggcaccgaatgcgccgtctgcctcgacgagatcgagagcgagcaaccggctagagtggtccccggttgcaaccatggatttcatgtccaatgcgctgacacctggctctctaagcaccctatttgccccgtttgtaggaccaagctggacccgcaaatcttcacttcccaaagcccctgctgaacaatgaagcattcattattcaaggaatgaataagggaagccaaattttcaattagtaatttcataattatctttattgttttctttgtcagttctttatagtttcttgaacttccgttactaattattattattattattatgtgtcgtgtagtggttcagtggttgtggtgtgttatggcctggatgaatttagcagtagtacccgaaaattcagaagccatgtttaatttatgtgtttattgtttaaattttaaaataagggggttggaggg

SEQ ID NO: 29576 - DNA, 1233 bp, Glycine max
  Clone ID: TF_GmC23646_1
cacagatctccccccgattgaaaagaaaagaacttcgatcatatattcctcaggtcactcctacctatgactatatatgacatataatggaccatgcatctctgaggaaagaattgagctgggaatcaagcagcaaaaacggtccccaattcggatatattaacaaccaccaccctccaaaacaaaatttcaccctttcgttttccttatcccatacccctcaaaagaaaaagctggcgattctccaattctcctcttgtttcgtgtcctttactactccgaatcctcacaacactctctgtagtacacactactaacccaaaagtcactcacctctagaaaacctcaaatctcaaaacccatcaagattttagcacaaagactcaaacttttcacaaaattaaagagacccagttgatttttttctctttagactgaagtattttgaagcatcgaacatgctacaacggcggcttctggagacggagctgagcatgccaccgtcgtacggcggcagcggcggaaacaacacgcgcgacacgttcatcagcgacgcgaacttcgacacaaacatggtgatcattctggcggcgctgctgtgcgctttgatatgcgcgctgggcctgaactccatcgcgcggtgcgcgctgaggtgcgggcggcgcttcggcgacgagacggcggagcaggcggctgcaaggctggcggggaccgggctgaagcgccgcgagctcagccgcatcccggtggcggtgtacggcgccgccggaggcgaaaacactattccggcgacggagtgccccatatgcctcggcgagttcgagaaaggggacaaggttcgaatgttgcctaaatgcaaccacggtttccacgtgaggtgcattgacacgtggctcttgtcgcattcctcgtgccccaattgccgccactcgctcctagagaaaacctccgccgcgccggaaagtgggtcggggcggcggagcgaggtggttgttgtggtggagcaggcgagttgaatggcattaacagtgaaaggtggaaagaaggacaagttttggtgaatggaggttgagaaatttaatgttagtagttagagtagttattagttggttattaataaattccaagtgaccatccataattccatatacacgtttattttttaaaattaaaatatatgtttgtgtttgttacagtttgtatataagttggatattggatattatgatgctt

SEQ ID NO: 29577 - DNA, 1445 bp, Glycine max
  Clone ID: TF_GmC502_1
cttaaattagttttttttgattactgtacgctaggtactctgtccctttaatctctctctctctctcatgtttcattctttctcttctcttgtcgagttctcattgccctcttctgttcaataataataacttaataaaagaaaaaaacagtaattgaaaattgaatcgggaagaatcatcatcatcgtcgtcacgcttcccaatcaaacccaccacccatctgaatcaatccagggatccccttcttctgggtgggatagcttgattctgatgcaaggacaaaggaggactattggatcatttccagcaattgtaagtatgatgcaagggcccagttctagtggcactgatatgagtcatcagtcttccttgaatcatgtgcaaaatgcagtagatttccggttgtcagattacaggggatcttctggtgagactgcatgtttacgtggcactggtcataatgttcagagcttcaatggctggagtactggtgaatctagttctagactgaatctgatcaaccaagtcaatgatgaaggtctaaaatcagaacatgggctgtcttcttcgtataatgctgctactgaggatggtctcaggtctgaggaaagacaattcgaaccaaataatgtaatttttcctgttagttcaaatactaatctacatggcaatcaatctagagtccacccttcctttttgcaagcttacagttctactcgtattgaaatgcatgacaggcacagagaaatgcgccttgatgtcgacaacatgtcttatgaggagttgttggcattggaggagcgtataggagacgtgagcactggattgagtgaggacatcattattaagttgatgaaacaacgaatttacgtgtctgtcatgacagactcttctattgatttggaaccttgctgtatctgtcaggatgaatttgctgatggagagaatgttggatcactggattgtgggcatgagttccatagtggctgcatcaagcagtggctaatgcagaagaacctctgccctatttgcaaaacaaccgccttagctacttgatagggagaacctctatcctcttaagctggttctacctatagcttcttttattttttaaactttatgaacttctttgaactggacctctcatttgtcatgattggggacgataacatgtcccctaaaaagaagtaaacaaaaaacattggtgggtgaactataactattgtagagtttcatttatacagttgtaatggatgattacatgtggtttagataagctataagcacttggatattattaaatttcattataaatctaaggttggtggctgatgagacttgagaggattatatagattgcatgaggaatgctgctggattgtgggaagggcaaaacttgtatgccaacattactagtggaatagatagagaaaaaaaagggggg

SEQ ID NO: 29578 - DNA, 1629 bp, Glycine max
  Clone ID: TF_GmC1189_1
gcacgtctaggcgccaagacccgctcgcgtcaagacccagaacttgttattgccaattctttgtttgttgataactccaaatctccttctgacaaccatatgggtcttgcgcctactccgtgccgtttgcgttcttcttcgttcgtgagactcgttgagcggattatccagcttggtaccctcgccctttctgcggtcatcgcgaacagcttctccgcgatcttgaccttctgcttcgctctagttggcactgtgttggcggctttgactgcagcttcgataggacaacaattcgggtcgaggcgagagagagagagaaagggtcgctttaaggcacagaagctttaaatgcgagttggttgattgtagcttcctttcaatcttctcctaatgcttatggactaagcatttgcccaagagcgcgttttttattctcaatatccttcttcttgttattattattattgttattgttctttgttgttaacatatattaataactctttcttaaacccaaatcttgtgacatcacaaaccgtaccctttttgtttatttcctttgtgggttttcaattcgtgcaaatttctgcgacacccagatggattttgcgctgaatccgtgtcctttgcgatcttctacgttcgtgaatttcgtcgagagggttaaacagcttggtaccctcgccgtttctgcagtcattgggaacatcttctccgcgatcttgaccttctgcttcgcattagttggcactttgttgggggctttgactggagctttgataggacaagaaactgagagtggcttcattcgaggggctgctgttggtgccatatcaggagctgttttctccattgaagtgtttgaatcctctcttgttctctggcaatctgatgaatctgggattggctgtgtcttatacttgattgatgttattgccagcttactgagtgggagacttgtgcgtgagaggattggtccggccatgtttagtgctgttcaaagtcagatgggtgctgttgaaaccagctttgatgaggttcaaaacatctttgacaccggtggttccaaaggtttgtctggagatttggttgacaaaatccccaaaatcaaaattacaactgataacaatgttgatgcatctggtgatagagtttcttgttcagtttgcctgcaggactttatgcttggagagacagtaagaagcttgcctcattgccatcacatgtttcacctaccttgcatagataagtggctcttcagacatggttcttgcccattatgcagaagggatctgtaattttgtatatgctagtacagaccgctaaaaatgtcccttttttttttgtttttgtttataagcttatttaattctaggacttacatctagtgggagccattgcagtttgagtggtaatcattgtactaaattagtgtaaagaaaattttgggataaaccagtttccacttgttgtatatggatgagagtgattgacccattttctagcccgtctccactctttttctgctctttttttttttttttttgaataaagaacaagagacggtgatataactagtgttttgattcttgccaaaaaaagggcggccaaaagaatagtaagctcgtc

SEQ ID NO: 29579 - DNA, 840 bp, Glycine max
  Clone ID: TF_GmC723_3
accacgcgtccgcttttctttattttattctcttctgttctccgctacctatggcgaatttcacctcttcctcctcctcctcttgttctcccttacctctatctctaactatgtcacacatttcacctccgtcatcttctgcggctttcgacgacagttccgaggacgcctgcagcatatgtctagagccattcagcacccatgaccctgccaccattaccagttgcaaacatgaatatcatctgcactgtattcttgaatggttgcagagaagcaaagaatgcccaatatgttggcagttacttatcttgaaagaccctgccagccaagagcttctaaatgcagtggaagctgaaaaacgcttaagttcaagaactgtatattcacatgcattcactgattctcgtagtccccttcatcggcttaacaatgaccaagatgattctgattttgatgaacaacttacgcagcacctagtttctgctgcaagtagagctcgttatatctgcagaggggaaaggcagagatcccctggagcaggtccttcagaggttcttgtttttaactcttctatgcatgcgtcagggatgcaatcaacacttacaacttcaccatcttctggtgtgccttcaacatctgctttttcctctgttggcatggttacaacaaatacttcttctgagagtgacatgccttgcaaacccagagttatttatagccagccatcaccggagaaatgcaggagactaaacacttctgagatattctccttccctgagtccttcaaatccaaactttctgctgcttcagccagatgtaaggaatcaatttcaaaaatac

SEQ ID NO: 29580 - DNA, 1576 bp, Glycine max
  Clone ID: TF_GmC147_1
tacgccgcgacgtcacgacgggtgggctggggggggtagtacgtccgggactgtagaggaaatgaagcatgcggtgccagctaagctgtatgtcggttcctcgtcaataatcgtctttccctgcctcatgccatcatccagtggttagggttggagaacttgccctcacttttttcttccttcttcactcttagtctcactcactcaccattcaccattgtcctttgcatcgctctaagcaacacgtccttttcttcacatattccagtgtgctgttctgagattcggagagatgggtttggaagaagcttccagaaactgtatataagtcatcatgctgttgtgacagttaaaggtagtgtggtgtggggaaggagcctagtgattagttgtttgagaccactaaggaagtgaacaagaggatgtcaaacagtaggaacactcattggtgttatagttgcaggaggccagtttggctgggacggcgagatgcggtttgtcctagctgtaacgagggatttgttcatgaacttaatgatatggtgcatgttaatccttttgacttatttgaaatggacaacaatgaagaacgagatcaaaggcttggactcatggaaacattctctgcctttatgaggcatcaaatggcagatagggggcgaagccatgacatcagggcgcgaacagattcaaatcctgaacacagtgcaagttttgctcctctgttgatctttggtggccacataccttttagattgtccagacatggtggctttgaagctctatttaatggggctccaggaatcggtctgacacagggtaacacaggcgattattttatcggtcctggactagaagaactgtttgaacagctttcagctaacaacaggcaaggtcccctgccggcatcaaggtcctcgatcgatgcaatgcctaccatcaagatcgtgcagaggcatcttcgatcagattcgcattgtccggtgtgcaaagataaatttgaactgggatccaaagcaagacaaatgccatgcaaccatttatatcactcagattgtattgttccatggttggtgcagcataactcctgccccgtttgccgccaagaactgccgccacaaggattgagtagtagtaacggtggcgccaatggtagaagtagaagtgcaagggtaagtagtagtggtagggagagccatggaaggagaaatccattttcctttttgtggccttttcgttcttctcattctagcagtaatgatgaagcaacaggaagcagcacaccaacaccaactatccctgagaatagccatcatcatcatgctgggtattctgggtggccatttgaatgacttggtgtgagtataacattttcttttgtttattaatatgctcatgttgatttaaaaatcttatgtactgatgctgcttgcttggggtgaaaacggtttgagatctgagcctaccagtctggatttgctttctaaagttgtgaactattttgtataaatggttatttatgcataattgtttgaatctaatattcaatataacaagttttctttgtttaatagat

SEQ ID NO: 29581 - DNA, 1381 bp, Glycine max
  Clone ID: TF_GmC761_1
tacggagaagacgacagaaggcgctcttcaattgattcgatgctctaatctatctcttattcttcttctttaaaatttcatcttcaattcaattctctctctgtcaccgttcctcattcgcatggagaacgacaccgccgccgccgttaacaataacaccaccgccaccgccaccgctaaagcaggttctggaggagtgaaatcgaacaaccataacctagaagaggagcattccaatttgaatggcgaggagcagatggcagaacaagtggaggcagaagaagaggaagatcgagaagccgatgatggtgaaggagaagaaactggatctcgtcaaccttccagaacccctttcactaatctcagccaggtcgatgctgacctcgctctcgctcgaacccttcaggaacaggaaagggcatatatgatgctgagaatgaataatgatggaagtgattatggaagttgggaaggcggaagctatttgcatgatgaaggagatgattttgatgatctacatgatggcactgatgtggatgaggatgaagatgatgatgatgatgaagatgatgatgatgaggaggatgaggatgaagatgcatttgatgtccatgctcatgctagtgctggagaacatgataatcccactattgaatttgacccagatgtattttcaagtgatgaagcatatgcaagagcattacaagaagctgaagagagggaaatggcagctagactattggcttttgctgggataaatgatcgggaagaagaggacatagaggagcatggtgctaattctcaggatgcttgggaggatgttgatccagatgaactttcatacgaggaattactggcattgagtgaagtagttggaactgagagcagaggtctttcaactgatactattgcctgtttaccttcagtcaactacaagactgggagtgatcaacatggaagccatgattcgtgtgtcatttgccgggtggactatgaggatggtgagtccttgacagttctttcctgcaaacatctgtaccatcctgagtgcattaacaattggttgaaaataaacaaggtttgcccagtttgtagtactgaggtatctgcttctgggagcaacttgtaggaggatttaatagatgttcttcacttcaaattgaagaaaatttgtgccaagttgggggctaatatcccttgttttaatagcatttccatattagggagatagtctgtgctattgtttccagctccttcattttaaatgtaacatgtaacttttggaacctgctctctagattgtctttattttaatggaaaatgaatggcatttaagtggccagttcttttaacagggtccgaggggataactgttgtgatg

SEQ ID NO: 29582 - DNA, 1205 bp, Glycine max
  unsure (1)..(1205): unsure at all n locations
  Clone ID: TF_GmC133_2
cgacgatgggtcgggtacagcggctccggtggcttccctttaaagacggcttcatgagtgaagcataacccacgcgtccgtacggctgcgagaagacgacagaaggggaatgcaaacaaccaaacacaaaccattccccacactctcccctcttctttttcattgtcattcttcaccattattctgcaatatgttgctactcatcactcactctcatcaccaacattttttaacagtcatttggaattatatcaccttacctctgatgttttaaaaatcttcatcatttgctccctctccacccttaaactggacatgctcgattctgtgcttctggcgcttttcttgccgtgcctcggcatgagcgccgttttcatcgtctacatgtgccttctctggtacgccaccaaccaccactccgaccccgcgctaccggccaagcctgtctccgacaccggaatctccccttcccagctcgacaagctccccagaatcaccggaaaggaccttctcatgggaaacgaatgcgccgtctgcctggacgagatcggaacagagcaaccggttcgggtggttcccggttgcaaccacgccttccatttggaatgcgccgacacctggctctccaagcaccctctctgccctctctgcagagccaaactcgacccttcgcttttctcttcttcccaaaatccatgctgaccaacaagctctagcgcaaagttggtagatgcatgacccagtttcttaaatatttcttgactgtatatatgaaaaaaaaaaaaaaaactttgttggatgagacaaaattttcttcgatgatttcaactcgtcaaggttagtctcatgtctttaaaaaaaaatccatccggaaggtgaaggtgtgtttttgtttcttaacgtactctctttggcactgtacagtttcttttatatctcctgtgccgccgcacaatatatattctcacattgtttttttcaaaaaaaaaaatgcaactaagaaatatttgaagagtggccatcgacgctatgtttttttttgcttttcccgagtttactagttaattagtggtcatggttgattgggaaatgagtgaccaacgtgtgtttgttctcttctcttctcggaagtgttctagaatttttattttctgaaaaaaaatgattttttttttttttaaannnnannannnnnnnnnnaaaaa

SEQ ID NO: 29583 - DNA, 442 bp, Glycine max
  Clone ID: TF_6227772
ttttttttttttatccatacatatataattctttatattaatatttaagatgatattctacatataaagtttgcatcgtaatgttagagaatacaagacattattgcgtgccgcggtgccgggtttgagacaagacagccaccatttcctaacaacatcagaatcaaatacttcacatagccatatatatagaattctagttgttttctaaactgaatcttttgatggaacaagaatctaatagcagaatttcagctctaaataactttccagattccctttttcccgatgaatctctgcaaagagggcaagtagtggcattgttgaaaccaacccaagtattcaagcaatctctgtggaagacatgtccacaccgcagcgttatgatcctttcttctgtttctcccattatgcagagacacacggcgcaatcttcatcttc

SEQ ID NO: 29584 - DNA, 1768 bp, Glycine max
  Clone ID: TF_GmC725_1
gcggaattccttgtaattcggctccagcctgactctcctctgtggcaccaccgctctctctgcgttgttggagaacaatcagaggaaaaagattggagggtgaaccgaaaaaaacaattcagaaaatggagaacaacgcattcagagatcaaatcatggaggacaatgaacatgaagaaatgcctgattcctttgtttgctgcgtttgtctggatctattatacaagcccattgtgctatcttgtggtcacatgtgctgtttctggtgtgtctataattcaatgagttgtctgcgggagtctcaatgtccagtatgtaggaatcaatactatcacttcccaacagtttgccaattgcttcactttttgcttctcaagatctataccgctgcttacaagagaagggaaagccaaactcttgaggaagaaaagaaatcaggattctactcccctcaatttgatcctgatacatgtgaatcacaagctaagtttggtcattctggtatccctagttcatcctctattttgaatttgacgtccaactcatgcaatgtgggaacttctgaatgtctggagcaatcagggtcaactgccaatgaaggagatgaaggcaccatcttttcgaaccgagagcctgatattattggaactcctgctaaaggaaaaaaattgcctcaggaagagctttctctacaacagaaattatcagttgcagatgtgacatgtacaatgtgcaagcaactgctctttcatcctgtagttcttaattgtggtcatgtgtactgtcaaatttgtgtcatcaacatagatgacgagatgctcagatgtaaagtttgtcaaagtccacatcctagaggattaccaaaagtgtgtttggagttggatcactttttggaggaacaatttcctgaagaatatggacagcggagagatgccattgaactacagcaaatcaaagtcaaacctgacaccccttcttcttgttcattggatggtggtaagaaaccagaaaatacagattggtggtctgatcctgactcaaaagttcacattggagttggttgcgatttttgcgggatgtttccaataattggagatagatatagatgcattgactgtaaggagaagatgggctttgatctttgtggtgattgctacgcaagccgctccaagcttcctggtcgatttaatcaacaacacacctcagagcacaagttcaagcttgtacaacccaacattattcataacataatgttgaggctggccacagcacagttaggggaaggttcgattgacctggagtctataggaaacatagaagttacttcagacggcgctgcattgtttggtgatggagaagataaccacaatgattctgaagccgccaattgaaaaattgagctcaacaaaagtccattgtctaaaaattggtgttttggtggggggtttaagtggataactcctaatagtaagaggagcaaataatgcaatgcttcaaggaagtttgctagtcaattggttgaggaattctcaattctacatggtctctgtgattttctaatgcatgccaacttgatagtgtttttatgtctcaactgaatttgtctccagcttgtggctattttatgttattgcattcgggaatgtatatattctaggagtttgtctgagatctatgatgatgtgtttgttacaataatattaataataattggtacatcattgtgaataatataaaaaaaaaaaaaaaactcgagactagttctctc

SEQ ID NO: 29585 - DNA, 2584 bp, Glycine max
  Clone ID: TF_GmC502_2
ccacgcgtccgaaccaccacccatttgaataatccaggatccccttctggtctcatatctttaatctgttttgggggtggaggatcgcgtcaatccattaggtgggatagcttgattctgatgcaaggacaaaggaggactgttgggtcgttcccagcaattgttagtatgatgcaagggcccagttctagtggcactgatatgaaccaccagtcttccttgaatcatgtgcaaaatgcagtagatttctgtttgtcagattataggggatcttctggtgagactgcatgtttacgtggtactggtcataatgttcagagcttcagtggctggaatactggtgaatctagttcaagactcaatctgatcaaccaagtcaatgatgaaggtctaaaatcagaacatgggctgtcttcttcgtataatgctgctaccgagaatgatccgctcaggtctgaggaaagacaattcgaaccaaataatgtaatttttcctgttagttcaaatactaatctacatggcaatcaatctagagtccacccttcctttttgcaagcttccagttctactcgtattagccagaatattagtctagatatggggcatgttactaatgctgctgatcgtgggaagggcaaagaagctggtagtagtgttaatgccaacaatactagtggaatagatagagaaaagacattgtttggcagtgcttcttgtaatcacacaggagcttcatctgaaagctctggatacatggcttggggtgatagtgctaattcaagttcttctttagttaattggggtccttcctgcaagagaaaggctcttgaaggtagttctaggcaactgtgttctggaggaagctcaagcactcttgtacaatccggaaatggttgctggcctactgatcctgttgatcttaatgcttccagcgacttaactgattctacacctatagaagatattcctgttactagtcctccattatttcagaatgcaacaaatgaagagcgacaagaagctcccaatggatttcctttgataagtattgcagaaaatgtggaaaggcctctaagaaacttcgatagaagaatgagccatctacagcatcaggaatctgtacctctcaatttaccatcaacagggagtgctaggcatcataatcattcttctctgcatcaagcacctggctctcactcaatcaatgattcgttggagttgaggttaacagctggagggacatcttctgctaattctggcgcttctctgaaccagtcacctgccttgcgcatccattcttttccttggaacagaactgccaatcctagaggggccagatcttcaacttcttataactctggagaaagagccgtgcgcgaagattttaatttgagaatgtttccaagagatagtacggaacaccccatgaatgtgcctgcatcttcaggacacgaacctattggttggcatacaccatctggtaatgtgaacaattctggaggtgcacctcctccatcctggattggatctagttcaaatgttcactctcccgctaaccgtagctggatttttaatcatgaagtcccagcagaaaatatgcagagtgtgtcagagttcagtccttggtccctttttccatcaattagctctgcatctggtgttcataatgcccattctgccccatcttcttctggtcctccttcatttacccagggttctagcagcaaccaatcatacgcaagaacagcattggtgatggaaagaaggggtggtgatgttctctctggtggtccccattcactgcgagcattaacctttgacaatgaggggagacgtcgactaatatctgagattcgccaagtcttgatggcaatgcggaggggtgagaacttacgagctgaggattatatggtctttgaccaccctttcttatatcatggcatggctgaaatgcacgacaggcacagagaaatgcgccttgatgtcgacaacatgtcttatgaggaattgttggcattggaggagcatataggagacgtgagcactggattgaatgaggatgtcatcattaagttgatgaaacagagaatttacgtgcgtgccattatcatgacagactcttatacagatctggaaccttgttgtatctgtcaggaggaattttctgatggggagaatgttggatcactggattgtgggcatgagtttcacagtggttgcattaagcagtggctaatgcagaagaacctgtgtcccatttgcaaaacaacagccttagctacatgatagggagaacctctatcttcttaagctggctctatctaaagctttttttactttataaacttttttcttaagaacaggacctctcatttgttgtgattggggacgacaatatgctccctaaaaagaagtaaacaaaaaacattggtgggtgatctatgaactattgtagagttttatttatacttttgtaatggattattacatgtggtttagataagctataagcactttgatattattaaatttcattataaaaaaaaaaaaaaaaaaaaaaaaaaaaaaaaaaaaaaaaaaagag

SEQ ID NO: 29586 - DNA, 1395 bp, Glycine max
  Clone ID: TF_GmC119902_1
gggcctgctgcgctgtgaggttattgacgtgggagatgggaacctcctctccgttaatgactcctttctcatgctcatggggcagcctgccccactgttcaccagatatccgctgaccagcagcgtgaggggtcactcctccgttggagttctcatagctcatcccggacctctcccttggagcatgaagcggctgatttgcagtccaccccaaggtttccacaaagctcttctggagagtgagctgtggatcacgatacttcctcggaagctctggcacggcaagtggaagcagttgagagattggcacgtgaactccaagaacaactgtatcacgatgatccttttgaaggcagagggattgatgaagatttagcatgggacctgcagcgtgcagaggctcttatgcgtgcaactattgatagccacagcataagtcaaccgagacatcttccaagggcaatcagacagcctcgtacacggtttccagaaaatccttctagaaggagagctatggctcaagcttctttctctgctaaaatttcacaaagattgtatcgatccttggctccagaggaaaacatcatgcccggtgtgcaagtcatctatcacctaattcattttggaattttagtggttaatggtgctgtagtttgttatctcagccacctcattttgtctttcaaagtaaaaagcaaaaaagttgaaattgtaataggcatgctactctgttctgttcaatcctttgatacattagatatttgaaagtgaatataaaggtatagaaaaatctgcaacttgttaactttcaatgtgctgatatgctgttactgttgtcttttgaattatgattagttctgcgacatgaatgatgcacgttgagaaaactgctctgaatcacggtgtcgtaattgaacttctactgttggtgctaatgaagagtctgcaaagcagagacaactctgaaggccgtattatttcttaagatagagatatgaccatttaggaatcctaatgttgaaatgtaaccaataacattgtaattttattttaattgttatttattttaaaactaccaatttttggaggagtcgtgctacaagtcggactcgagcacctagcacatcatctagaggaagaggcccccggtttcctctggatatggacttagatatgagacttgatatattggaagctttagaggattcagtaggggatttcagtgatatgggaattactgatggcatctttaatgcacgtcgtgatttcactgacgctgattatgaaatgctattggcccttgatgagggaaatcaccaacatactggtgcatcttccaatctgatcaatagcttgccgagtccaccatccagactgacaacttcacagatgcat

SEQ ID NO: 29587 - DNA, 765 bp, Glycine max
  Clone ID: TF_LIB4203-002-R1-K1-G10
ctggccatcaccgcccccgccctgccgtgggcagtggcccgagggcgggctgcgagccgcgcaatgtcgcagactgcggctccgggggtgggggcttcacggtgctgcacgagcctcactcgggcctagtcccatgaggcctgcgcaccccggcactgaaaccacgagacggcgcaggaccaccgctcttccggcccgtgacggagaccgagcgtgaggcgcgccggggctcagggcatctgagggccctctccgggcgtcgggctcagggccgccaccaccaccactactaccaccaccacctcggctcctgccggcgccgtcgcctctcccgcccacccctcgccatgtccgaggaactttcggcggccacgtcctacacggaagatgatttctactgccctgtctgtcaggaggtgctcaagacgccggtgcggaccgcggcctgtcagcacgttttctgtagaaaatgtttcctgactgcaatgagagaaagtggaatacattgtcccctatgtcgtggaagtgtgactagaagagaaagagcatgtccggaacgggccttagatcttgaaaatatcatgaggaggttttctggtagctgcagatgctgttcaaaaaagattaaattctatcgcatgagacatcattacaaatcttgtaagaagtatcaggatgaatatgggtgttttcttctgtcattccaaactttaagatttctcaagattcagtaaggagcagtaataggagtgaaacatctgcatc

SEQ ID NO: 29588 - DNA, 993 bp, Glycine max
  Clone ID: TF_GmC1667_1
cccacgcgtccgcccacgcgtccgtacggctgcgagaagacgacagaagggggcgtagaagagagtgaaagtaaaaggaaagctaaaaagagcagagtagcctccactgcaccaccatcatattttggctttataaaaaagccatagaactcattagaacttccccctttcccctttcttcttcttcttcttctctctaatttcatttccttgattatagctttcaattaatgggcttctacgctgaagatcctctctcaggcttgacaataggccaggccatatatgaggtagctctcatgattgcagttctgagatgggtcttgtgcttgatcttcagagtgatcaacgacagaagaacaacacaatccgacgagaccccaacaccagaaccatgttctcagatgacaagggacaacgacagcattcttttgctgacgactttcggagagattaaggagaggcttccagagacagaggagacgtgtgcggtgtgcctgagccagctgagcgtggaggacgaggttagggagctcatgaactgctaccacgtgttccacagagagtgcatagacagatggttggaacacgaacacgagaatcacagcgccacgtgtcctatctgcagggctcctttgctcagttcttcttgccaccacagctctgccacgtgtctgcctcctcctcagcctagttgggctgtggagagactcctctatctctttggagatgatctgcttccttgttagttacttgttttctttgtagattgtgcagaaaaaaaatagtttaggggattcattatttgttatgtttatcatctgagccttgtaattgttgcttgctgccacaaaataactaaactaagacacaaactagcttcctgtttgtgtgtgtgtatatacatatatttttcacatttgactaatattaatgttgcctcccaaaaggaacaagggcctttttttcaatcaatgtatggttggatgaatt

SEQ ID NO: 29589 - DNA, 1927 bp, Glycine max
  Clone ID: TF_GmC251_1
ggctcgagcaaaaaaagattatgaaattttctctccaatgaaagtcacgatcctctcgtccatattcattctctatctctctcttcacctcctgtgtttttttctctctccttccttctcccttttttcaatctttcaatcaccaattctaatcactcgtagatcctctctgtttctcattctggattaatttgcattggcaaatctctacattatggatgaaatggtggattcagaaatggatcaacagatagaagattatcaacattctgaacccgatatcctttcgagaggaaccactagcatctcgcagcctaataataaccatgcaatggtgggagaatctgagaacacaactaatgctgattctcactttctgccagatgcttatgacaatgctagggtgtatggggttccacaatataatggtattcagcctccacataatcttgatacgggtgtaccagttgcaactaacttatattattctagcattaatcctccttccagtactggtgtttttcatccgccttaaagtcatagagccattgaacaattgccgggttcaaacacatttgaagttgctggaggttcttcaaataattttggaagaagttctagtttcatgaatgatgctagaggtccacacaaaaggaaaattcctaaaggaataagaggaaattcacaagattttaatgcttcgtcgtctagctcttcaactgctccccctaatgcaagacatgccaatgatgttgctataatggataatacacaatttcatatccgttcacttgtggaggtaggaccacacggtagtgaatggagccggccaaatgagtctattatggtgcatgatcataatcatttgatccatggaaattatttagggcaacactttccgccaatagctcctccatggttgttccaacagttgaatagtaacaataatgatggccatgctacaccctggaatcaatctcttccaatgccttgtgtgcaagcacccgctataaacggaagttcattagagagtgtaagtatgggattgcagagatatcatgatccagttggaaatcgaaatggccttaggtttccttatcatgttcctgtcaaccaacaacaccatagttatcatcactcaacactgcccatgcaaggagtaagagatcatagtctcaacttcttccctacagtaactacaaattcatttagggttccaacaaatcctttgcgtaatgttgcaatcccaacacaagctagttttgagatgggtcctagacatgttggccctgcaccatcatctagcctccgaatttaccgacctcatagaggggttgtgcctgagacaactctcagacatcgaagtcttcctcccatgggcttccttcgagttaatgatgttgctttaattgatgaagtgggaaatttggttgacaatcacagagatatgcgcttggacatagaggatatgtcttatgaggatctcattgctttgggtgagagaattggcaatgtaaacactggtttatcggaggaaacaattacaactcaattgaagacaaaaacttatttaacgggtgctactagtattaatatggaggaggaagtttgtgatgatcagggaacattttcttgtataatatgtcaggatgaattcaagaaccaagagaagattggagttcttcaatgtgagcatgaatatcatgcagattgcttaagaacatggttggtggtaaaaaatgtttgccccatatgcaaatctgaagctttgaaatcaacttctgtgtctcctcctacctaatttatttatgaacaaaattcttatgaattttgtacatgtacttgcacatatatagacgtcatactacccaactcatttgttgttagcaccataacttgtatctataaacctgcattatgtttggtg

SEQ ID NO: 29590 - DNA, 792 bp, Glycine max
  Clone ID: TF_GM651B23rgnG1.C1.o42.ma
atggccttatccgttatttgttcttcaaaaggcaatgtgttgagtgagtccaatatcttagttgtctcttgtgttgtgttgaatggccttgcctcgttcgttatagtggagggcttgcatgacggttctaaagcgagagatgtgaacttaggagggtggctggttatcgaaggttggatgatcaagccttcactctttggtggcactgccaatggagacatgcttgttcaatttaagtcagggacgttgcagaagtatgtgtctgctgagaatgggggagaaatgaataacttgacaatttgtgtgtttataattgtcatagctagcacagcttgtgtaattatgtttctcatcacgttgtccaaaatcctaagttactattatgcaaggagatataacgttagtagaagtaacccaccaatattatttgacattcgtggagattttcccttttctgatgatgaggaacaagaacaagccattaggcatcccatatggttcatccccacagagggtctccaacaatcaatcatagactccatcacagtctgcaaatacagaaaagatgaagggttagctaaagaaactttaactgagtgtcttgtttgccttggtgagtttcaacaagaagagagtctcagagtgttgccaaagtgtaaccacgcttttcacatctcttgcattgatacttggttaagatcacataaaagttgtcccttgtgccgtgcccctattgttcttgatgctgctagtctgtgtgatatcaaccaagacatagaagaaagtatttga

SEQ ID NO: 29591 - DNA, 2488 bp, Glycine max
  unsure (1)..(2488): unsure at all n locations
  Clone ID: TF_GmC1719_1
atttctaaaatcgaatcttaaatgcttggatatccaaatttgctcccgcacaacaccctttcggctcttaacttctcggttcggccttggattcattctcttccctctctctcaaaaaacactgaaacccataatcgttaaaattagggcttcggctcgaggctgggtggagctttacgcaatcccattacactctctttctctccatttccttctattctctattattatatccttttctatttttatttttctcattgcattctctaatctttaatctctattctctacccattcatattcatccccgtttttctctgtcactgtcgcataacactctttgaaccaccgcaactaaagtaacaaccccatgtcctgaacctcacttttcttctcgccaaagcttccaattttcgatttttctcttgttttcggaaaaagatcaacaccccagataaaaatagaagaaagccttttctgggttaatttggtaatttggtttttttcatgggtaacataggaagcagcggctccaacagccgctggagacacggcggaggcggtggcagcgggaggcggattcacccgccgcctccgccggtgatgtcgccgccggaggtaacggcgaaccgattcgtgtaccctccggccgccacgccgtatcacaactaccccgggtactacccgccgccgaccaccatgccggcgccgttgccggcgccatacgaccaccaccaccgtccggcggtggacccgatgtgggtgaggtatccgccggcggcaccgccggcaccggcgccgtacgtggagcaccagaaggcggttacgattaagaacgatgtcaacatcaagaaggagacgcttaggattgagcctgatgacgagaatcctggctgttttctcgtgtcgtttacgtttgatgccaccgtttcgggaagcatcaccatacttttctttgcaaaagaaggggaaggttgcaccctaaccccaatgaaggaaaatgttcttccacctgtgactgtaaatttccagcaaggtcttggccagaagtttaatgggaagcctgggtgaaaagcaaagtcaattgctgctaaagattgcttataaacatttctttcttccacgtttgatatgttctggattttgatctgatctcacactagacacatcaccatacttttctttgcaaaagaaggggaaggttgcacactaactccaatgaaagaaaatgttcttccacccgtgactgtaaatttccagcaaggacttggccagaagtttaaacagccagctggaactggtattgatttttcaacatttgaggagtctgagttattgaaagtaggggacatggatgtctatcctgttgcaattaaagcagatgcatcctccagcgaccatgatgaatcaaaatcaaatgaaactccatcatccggtagctcaaactctcagataactcaagcagtgtttgagaaggagaaaggagaattccaggtgaaggttgtgaagcagatcttatgggtaaatggaatgaggtatgaactgcaggagatatatggtattggaaattcagtggagagtgatgtggatgggaatgacccaggaaaagagtgtgttatatgcttgtcagagcctcgggacacaactgtccttccatgccgccacatgtgtatgtgtagcggatgtgcgaaggttttgaggttccagacaaatagatgtccaatctgcagacaaccagttgagaggctattggagatcaaagtcgggcctgagcctgaggaatgaagattcaatgttagtgacacaacaagcttcctgtacagtccaactgttatagctaatacttttctcttactttatcaggtttttccaataatcccacaaaatagaaattggaatttatgtatgacattatgtttgacatgtacagcaggctggcattgcacctgacttgtattattgtataagccaatgcctccgccatgcttgtttggttttacttctaatttttatgtggctttcccttctgaatcatatttagatgtgtttctcaccttcgcttcagatcccaactgtttttcttcaacatttctccgtgtcttcttttcatggtgtcaccttacttttttgtattttccaataatcagaaaaacaaaagaaaatgtaatttatattaggacttgcgtttcaacatgaacgacaggctggcattgcacataatttgtacaagacaatgcctccaattagcttgtttgtctgtgcttataaatggcttccattctatatgattaaggatatatttctcttggagatgantggcattntttttactngtgatagaagggttggtatgtannataatggtaactaatattccttgccatgctgtaaantatgtaaaagttctcgactctcgaatccatatatagtacgcgataaagtgggntatgttaggnaatccacggaaaagggaanctaaaaanaaaaa

SEQ ID NO: 29592 - DNA, 1999 bp, Glycine max
  Clone ID: TF_GmC7728_1
cgtggggcccccggaccgcatccctgtcgcaagtgtagccggtagcgctgctggtttccgctgtcatgtgcgtccgccgcctagcttgatcaagtctagtggaccgttaaatgagcatgttgcaccaacagttggttctggtccttttctgcttccttctggaactgctaatggctttttaggtgaggaaactgatggtaggccaggttgttctctagacacccgccgtgtatcttgtaaaagaaaggctgttgaacgaaatgttggacaatcttcagatggtggaagttctagctatagtcagcatacagatggtagtacttggaacactcttcctactcaggcttatggggggatcagttttaacagatctgccccaacggatcaggtaaatgcgagacttggcctgagtacaggggatggatcctctgaaagcattcctgtgtcaaatgtagcaagaagctcaggaagtttccacagaaattttcgtccgaggacaagtccttcaagtcaacaaatttctgttccttccactgcaatctcaagtgggaatgttattaggagttctggtgtttcatcaccctctcctatattgcaacgatttcatcctgttgatattcctttgacttgagggcagtgccacctgttgatactatggttcctcaaagtcagccccttgttattcatgttcctgctttaccaaggaatgcacagtcattcaggtggagtggtggttccagttcaacaaacaaccattcctcaaactcagttatgtgtgcagatagaaataatctaccaaatgaggaagcaagctcaagaagtatgcctagaaacattatagaatacccaatgtttgtgcctgcaaccaacttaagaaacgttgttcggaatccagctagaacttcaaataatgcaaatttaagtattccaggaaatgttggttcttcatcgcggacaggctcaaatccagctgtcaatccaccacctgcctcggcgtgggtttctcgccctaatcctcagcagtatccgcgcagattatctgaatatgttcgtcggtccttgttttctcctggtttggaagctgctggaagttcaagcaatagttatactcccttccgtggtcctcctacttcatctgaatcaaggggactgtcatctggggtaaacccgttcgagaggcaaggtgatagtgaatttggaattccatattcgttacaatctttggttgttgctggtgaaggaagtagtagacttgtatctgagctgcgcaatgtgttgggcctcatgcgtaggggtgggaacctgcgatttgaggatgttatgatccttgacccttcagtgttctctggaattgctgatattcatgatcgacacagggatatgcgacttgatgtggataacatgtcctatgaggagctattggctctggaagaacgcattggaaatgtgagcactggattaagtgaggagattgtatcgaaacttttgaaaaagaagaagtattcagctgaaccagattctcagcatgaggcagaaccatgctgtgtttgtcaggaggagtataaagatggggatgatttaggatcactggattgtgggcatgattaccatagagattgtattaaacagtggctaatgcataagaatttgtgtcccatttgtaagacaacgggcttggcaacctgagacttgtatcaaaaatattttcatattttctcttagaagatgaacattgaggtaaaggaaagtggcacaatttaatcagaaaattctgctgaattgtagctgaagtctctggtgctttgctgcttactaaatggcccatcttcttaagccttagccaaatttcttattatcaaattttttgtttacttgtagaagccaatgatctccggttaaagtgacacatgagatgattggtgtggtggataaaggaacatttcttaactgtagttgacaaggcttgttttacatttatgaaattttttatacattgctc

SEQ ID NO: 29593 - DNA, 1162 bp, Glycine max
  Clone ID: TF_GmC1025_1
caattattcccccattctttcccaccttgctcccaattattccacaaaatttccctcaattatttctcaccatcatcaccccctttccttctctcaagaaaaaaaaaagttaatttcttgaacccaatggcttcagagacagaggtgccggatattatttcctctgttttcgaaaggtttcaacaaaacagagacatgtctctgtttctgcccttcctcttcggcttctctgacgccaccccaggacgaaatagcgacgacccagatcacgaaactgctcccacagaagccccacaacgtcaaagaataatcttggtgaaccccttgactcagggcatggtggtgatcgacggtggttcgagcctcgaggctctgtttcgcgaattcaccaacggaaaaggtggtcgaccaccggcttctaaggagtccattgaggccttgccgagtgtggaaattggagaaggtaacgaagattcggagtgtgtggtttgtttggaggagtttggggttggtggggtggcaaaggagatgccatgtaagcataggtttcatggtaattgtattgagaagtggttggggatgcatgggtcttgccctgtgtgtaggtatgagatgcctgtggaggagattgattgggggaagaagagggaggaggaaggtggtgagaggagaaggagtgatggtggtgaagtttgggttagtttttctttcaataggagtagtagaagaaaccaagatcatgatcaagctgattctggtgattcaaatgatgatgatggttcttcatcaagtcatggagatggtgctgctgaagagagttagagaaggttttttttcttttttgtgtttttctggtagatcaaggttttaaattgcggtcacagttatggttttgttgcggtcggtctttgatgttgcaggaaactacagacaaatgcagtcgatgttgttggaattgaggtcgtggtggtgactccaaaaacattgattttgtggccaaaattgtgatcgttttttaaaatcttggggtagagtgttgtcggttttcaagttggggaggactggaaaatatgtacaggcaaaaatgcacaaaattgttattatatcttgtggtgataaataaaaatgatgattttttgctcttataaaaaaaaaaaggata

SEQ ID NO: 29594 - DNA, 393 bp, Glycine max
  unsure (1)..(393): unsure at all n locations
  Clone ID: TF_LIB3029-001-Q1-B1-A5
agcgcattggaaatgtgagtactggattgagtgaggaaaccctatcgaaactcttgaaacagagaaagcactcggttgaaaaagggtctgagactgatgcagaatcctgttgtgtttgtcaggacgattatggtgatgggactgatattggaacgcttgattgtggccatgatttccatagcagctgtatcaaacagtggctaatgcaaaagaatctgtgtcccatttgtaagacaacgggcttggcaacatgatgtatgtgactctctgtcctcaggcaaataccatgaccatgaaggaaaaaaaaaattggcacaatttacccaggaaattctggtgcttggtgccttgtcntctgtttccagcctagtaaattggcgtacctgactgaca

SEQ ID NO: 29595 - DNA, 1617 bp, Glycine max
  Clone ID: TF_GmC92_1
gttggaatttgggttcgggtcctaattggttttaatggtcttgaatctgcttttaattctctcctaacccttaatggatccaaaactaggttttttttctctcaattggataataccacccatttacttgttaaataaacttggtcacacccctttttaattggaataacaccccatagcctaacctcaagtagattttcccaaaaaggggctattggttttctctctaatcccttacattggtgagttcttctattcatgtattgggttcatattcaagatctgagggaaccaatttgccagcatttttatctttaacatctggtatggatcttgtaagcagaagatacttgatttatgtgtcacaacatgggtcacaaccacaagcactttcaccaatcacaagtccagggagttcaatctttcatccacatcaacatgcttcgagcaccagttttcccatcattgcaattgccataataggaataatggccacagcattcttgcttgtgagctactacatctttgtgatcaagtgctgcctcaattggcatcgaattgatgttctgagacgtttctctccatctagaaggcgtgaagatccaccaccaacatactcaccagccacagatactcgtggactagatgaggcactgatccggttaatcccagtgactcaatacaaagcacaacaaggggatgatagagactttggagagagaagattctgcgaatgcgctgtttgcttgaatgagtttcaagaagatgagaagctgagggttataccaaattgcagccatgtgtttcacattgattgcatagatgtttggcttcagagcaatgccaattgccctctttgtagaacaagcatttccttgacaagcagattccacattgatcagcttctcaccctaaggccttcttcttcttcttaccctcatgatcaaaccccacctagggaaaacctcattggtggtgatgaagattttgttgtgattgaattgggtagtgatcatgatagaagccagaatttgcaagaaagaggcaatgctttggagttaccaacatgtcctattagtccttcttcaccaaggaagctattggaacatagaaatgtgcagaagaagaaagcaatgaaactgcagaaagtgacaagcatgggggatgagtgtattgatattagagccaaagatgaccagtttttctcagtgcaaccaatcagaaggtctttctccatggactcatcaggggatagacggttctatttagcagttcaagaagctctgaggaatcagaactggcaagtcaatgaggtcaactccattgaaggttgcagtggaattggtagtagagctaagaggtcattcttttcctttggacatggaagtagatccaggagttctgtgcaacctgtttctttggacccctgaaatttctcttttgtccctcgtcccccctttccattatgtttgcaacttgcaaggttcttaggtctttaccttttttctttttattcttttggtgaggatgagatagagatgttactatgttagatgtatgaacaggtcataggattgtataacacacaaatattcaaatggatttaattcttaactt

SEQ ID NO: 29596 - DNA, 641 bp, Glycine max
  Clone ID: TF_uC-gmroLIB3258040h12a1
gacaagaaccaaatgtgcaaatctcttgttaataagaagtgattaattcgatctgtacagggatatacaaaagagctaactagatagatacaatttaccatctcaacttcaccaccaacccacaattaacacagggctggatacttctggcagcaaaagtgggaagcaagtactgcgactctatgtataattcgaactcaattagcctctgattgggtttgggcttgggcttttatgtgactaacttggaagtggagaggaatatagctctatccatccaagacaacagcatacattaaaatctgttctgttgcaatcacttaccttatgtgagagtcgtatgtgtcaaaaagggagtctggaacaatcagaggcaacttatctatgtacatgaaaagccttctgagattctccctagtcactgttgccatgtctaccacatcccttctatcagtgaatacccagagatcgcctgagtttactctcttgagactgtcacggcaaaatgggcatgattgtgatatcgttcgccattctctgtaacatttcaagcacatggcatgattgcagttgggaagcacaatcttactattcatgtccatgcatattccacattcatcttctctttcaatgtctatgtc

SEQ ID NO: 29597 - DNA, 974 bp, Glycine max
  unsure (1)..(974): unsure at all n locations
  Clone ID: TF_GmC127065_1
ctgggctcaacgattatccaaacacagcttaactcgtcttctttctttcgctagctcgctcaagttctctctcgctgaaaaataacaaagttgcaaattgctctctctctgtttccagtgaaagaaaaggatgtcaagtggagcaacatactggtgttacacatgcaggcagccaatctgccttgcaaggagggatcacatttgcccctactgtgacgaaggcttcttgcaagaacttgatgaattgcaaggaggtatggaacaaagaggttctgaaccaagaatgggtggaagatacataaactttggtgttaggaggcctggttctacccctcttcctgaatcatggactcgaggtgtgttcatatttcccaatcaagaggtggccgcagatcgggaaggattctttgaacaacacattacaaatgacccgcttggtgcatcacaatcttcaattgatgcaatgccaactattaagatcacacatgaacacctctactcaaatccaaagtgttcagtttgtatagaaagatttgaagtgggttctgaggccaggaagatgccatgtgaccacatttaccactcagactgcatcgttccatggttagttcatcataactcatgtcctgtttgccgtggtaagctgccacccgaaggacatgttagttctcgtggtagtcaaatttggagaggaaggaatgtcaatggtaatagtgaaaatgatatctataggggtagggagaatagacagttcaacgatggatggagaaatctactatcatttttgaatttttgcggccaatcctttcttctaattcaaatacttaatcgnnngagctgagactggggatactactctcctacaactctttgaccagaacaatggcagaagttaactgagtttcatttcttctccagctgtcaaataannnnnntttaaatgacatgaataaagcttctgaatgctttgaact

SEQ ID NO: 29598 - DNA, 1075 bp, Glycine max
  Clone ID: TF_GmC1797_1
aataaaaagatttaaaattaattgcagtaaggtcttaaagagggaagtgttggtggttgataatacacaaacaccagtactagtatgttttatatgaccatatcaggttaaaaaagaaagaagatgctaagatattgtgcttctcaggtaagaaacctagtcgtagcgaatccattgagcagtgaagacgtgcagtaatcgatgacgtgtcgtcaaaagaaagtgataggatagcatgggaaaacaacccactggcctcaacttcaccaacgacgccgacgtggagcagagcagccaccacaatactcgtaagtgagtgcgcgtaaaaggagaaaataaaaaacacagaagcacacaaccacagtcaacctttgtatctttctttgcattacccaattgcacagtcttctctctctctctctgctctgtttttgtttgtagaactactctaaaactaaaaccctattcctctgtttttgttattcccacgatgatgcctccttctcagccacctcattgggccccatctcccacaccaatcctcagcaagtctttcctacccccgacgtcaaactcgccggcggttgacttcactccgcccttaatagcaatggtcgtcgtcgtcgccgccgcgtttcttgtcgtcacctactcccgcctcatcgcgcgccacctcagaccacccgtccaccgcctcctccgccgcttccgacgccgccgcttcctcccctcctccgtcggcgacctcgagtccctcccctacgattctcccttcgacggaccgcacgtgttctccccctacggtttggacgaaacggttattaaaacaatcccgttctcgctttatacagcgaaatacgacgcgcgttttgatgagtctcgctacgactgcgccgtttgcttgctcgaattcgaagacgaggattacgtaagaacgcttcccgtttgttcacacacgttccacgtggactgcatcgacgcgtggcttcgctcgcacgctaactgtcctctctgccgcgctggagttctctgcaccgattcacctttcactccgatgatggccgctctcgagccg

SEQ ID NO: 29599 - DNA, 485 bp, Glycine max
  Clone ID: TF_GmC520291_1
ctagaagccaagccatgacctctgtgtgtgagttcttgtatcagctttatgccaaaacaatagttctattaacctacatgctcatagaacttatcctcatcattcagtaccttaagtcagatacacgtccaatttcaaccgcccaatacctcaatttcattgaagagaagaaccccacaattcagttcactagaagattgaaggcagagaacatagattgcagggtgtgcttatctgaattccaagaaggggagaaagtgaggaatctcaattgcagacacacatttcacaaggattgtttggaccagtggttgcagcaatactgtgctacttgtccactttgcaggaacaaggtgctcccagatgatgttgtggccaaccacaacttgcttcaaaatcaggcagaatatgatgggaatgatgaccaacttatctttttgttatctgcattaaggggtggtagcactttgcacagatatctctga

SEQ ID NO: 29600 - DNA, 2066 bp, Glycine max
  Clone ID: TF_GmC7706_1
ggctcgagcttcccagctgtactttgcttcttctttctttatccgttccttcttcatcatcatcgtcgtcattctttaatcctggcaaaaaaaaattacgctactttcgttgcgatcgtttccaatttcatgcgctttcttgtgtggggtggattggtggtgggttggttgattttaggtttgggaaaaaacgcgtgactttggtgattacgaggattaaattgcatcaacaagtctctatgatatggatcaaatgagtcagcaaaggcatggctattttcattccgaaagtatccatttcagaggcagcaacatctctccgcctaatgtatgcacactcgtgacagcctcagggcacggaactaatctagattcccattatttactagatgcttatgacaatggtatgatgtatggaatgacacaatacaatggagttcaacatcaacataatcttgatatgggtgttccagctgctgccaacatatattattctagcatgaatccttcatctggtacagctgcatctctaaatgctgaagttaggagaggaaattatcaatatttcaatgcctcggctagttctacagttgctccccctaacgcaagacacactgaaaatggcatcccctcactaccacattgtacttcgtggagcagatcaggcgagtctatgatggtgcgtgaccctaaccgtataactcaaggaaattatttaagtcaacactttcaaccagcagctcctcctccctggctggaccagcagttgaatagcaataataatgatggtcatgctttgccttggcatcagtctcttccaatgccatatgtacaagctcccagtgctaatggaagttcattagagaaatgcaagaatgggtcctcagagatatcatgatacagctggcagcagaagtggccacagatttcctcatcctcctcttgtcaacccacactatcatagctttcatcatcaaacacagcctgtgcaagaaatgagaggtcactccatcaactttcacccccctcctccagtaactgcaccttcatatagagttccaacaaatgcatcacgaagttcttcgatcttcatacaagatgctattgagatgggtgctaggcatgttggtgctgcaccattggcaggttcacatatataccgaccccatagaggcagcacacatgagactactcttagacatcgaaatcttcctcccgtgacttttctccaagttgatcaggtttcattggaaaggtgatcgtggtgacgttgtgttgtggaggctgcaagaaatgccattgcggccaccttgcttgtcgtgcatcttgcgtcacagattgggtatggcagagcagtgaggtttcaaccatcattttttctccaagttgatgatgttactttactggttgaccatcataatgatatgcgcttggacattgaggatatgtcttatgaggagcttcttgcattaggggagcggattggcaaagtaaacacaggtttgtcagaggaaatgattacaagtcaaatgaagacaaaatcttatttattactagctactaatgctattaacttggaggaggcagcttccgaggaacaggaaactgattcttgcataatatgccaggatgaatataaaaaccaagaaaaaattggtattcttcaatgcgggcacgaatatcacgcagactgtttaaagaaatggttacttgtgaaaaatgtgtgccccgtatgcaaatcagaagcattgactcctggagagaagtgtgtataaaatctgagatttacatgtctctgttcctacatgcacacttcttagctactacatttttctaacgatttcatgttttgttgtgtatatgaacccgtacatatagacagtcgcattgtccaactcatttatttgttggcatcaaaacattgtatgtatcaagttgtacagacttctgttgatatattaactttaggcaattacattgttgctattttttattttcattttttatatggatggttgaatgtgccatgtccaagtatagaatgaaactttatgttttattcatgt

SEQ ID NO: 29601 - DNA, 638 bp, Glycine max
  unsure (1)..(638): unsure at all n locations
  Clone ID: TF_LIB4391-049-R1-K1-C7
cggacgcgtgggcggacgcgtgggcggacgcgtgggcaccgctttctttctctctcgccctctctctgcgttgttggagaacattcagaaaaaaaaaggagagtgagccgaaaaaaacaattcagaaaatggagaacaacgcattcagagatcgaatcttggaggacaatgaacacgaagaaatccctgattcctttgtttgctgcgtttgtctggatctattatacaagcccattgtgctatcttgtggtcacatatgctgtttctggtgtgtctataattcaatgaattgtctgcgggagtctcaatgtccagtatgtaggaatcaatattatcacttcccaacagtctgccaattgcttcactttttacttctcaagatctataccgctgcttacaagagaagggaaaaccaaactcttgaggaagaaaagcaatcaggattctactcccctcaatttgatcctgatacatgtgaatcacaagctaaatttggtcattctggtatccctagttcctcctctatttgaatntaacgtccaactcatggcatgtgggaacttctgaatgtctggnagcatcagggtcagctgccaatgaaggagatgatggcaccatctattatgatggagagtctg

SEQ ID NO: 29602 - DNA, 1324 bp, Glycine max
  Clone ID: TF_GmC243_1
cgaggcgtccaggcgtttggttgaatggaagcgcgtgggcgggtggttcgtgtttccgtttcgcacagtgtcaatgtcctcctcccttcttttcccttttaagtcatagctttccccttcccttcaaattctcctcaaaccctacctccctttccccccccctcttcgcgtcttttcgcaaccgactgcatcttggatactggaatagtgtgccaatatgagctctcgggcaggcaagggacctgccgtcagaagttatcggaggagaaagacagcgttggaccttgaccttaaccgtgtaccagctggtgagaatcgtgagcaggagggaccttcgactcagtcggtgcctcgagaagttcaagttgaacagcagcagcaggctactcaacctccgatgattgacgtggaagccattgatgatgatgttgttgaatgtaccccaagggcttttgctgaggctaaaaacaattcaagaagagttcgtaggaggactatagttgatgttgatctagaagatcagactaggcgcaacaaacgccgaagagaattgccaaatctgattattaattgtgataagtatataaatttggaaggcggtagcagttccatggagcaaagttttaaaaagccacctgaacctccaaaggagcttgtcttcaactgtccaatatgtatgggccctatggtacatgaaatgtcgacaagatgtggtcatattttttgcaaggattgcatcaaagctgctataagtgctcagggtaaatgccctacctgtagaaaaaaggttgttgcgaaagatcttataagggtgtatctcccatcgactagttagaggctttccgtggaagctgtaaagaggagaacagggattggaagaaacgtcattgtactttggacaatactgaatggctgtgttgtttctaatatgttccctcatagctgatgcttagtctgttgttgggtagctgtttctcttaatttatcatattaatacatgatgacatttggtatatagatataattccttgatcaggttttttttagctttcatgttgtgaaaacttggtcttttctttttggtgataatatagggcagagaggccagtcatgacccattcttgagtggggattttttttatgtaatccttcacaagttccctgataggatttcttttgcttcgttattagtggcttagggcagcaggttgccagtatgaatagctatctgatttggcaaactgttttgcagtactagtccagcgtgtttagttttggtttacatgatatattcatttgctggttaaatactgtttttttttcc

SEQ ID NO: 29603 - DNA, 1680 bp, Glycine max
  Clone ID: TF_GmC285_1
gcacgcgttgcggcgggcgcctcgtcacggtggggagcccgtaatccagaggcgacaaggaacggacattgaattgcgacaggggcatttccgtcattccacagagcaacccgttatagccccaaaccccacactttccatcataccacactttctaaccaaccaaccatcaatggcagatgtaaccacctacctccgccaccaccgcgaccccgaccccgaccccgacgacgacgaccaaaccctaattccattcccttattgggatttggactttgatttcgaccccgaattccccacaaacactttctccttcaccgaccgcgaaaaccagatcaatttcgtcatggatctcttccaccagcgcgtggagcagtctcaactcaccgatcccctctccaacgacgccgttttcggcgtcatcgacggaatcgacttaggtttccccgccgccgacgacttcttcatcggacggagattctccgtcggatccgacgaatccgacggaggacactctcactcgcacgcggggattgacgacggtgtcctggggttctgcgcgcattccgacgaagactacaacgaaaacgacgacgttgcgagcatccctctctgctgggacgcgcttcaattggaagacaacaacaacaactacgatgacttcgagtgggaggaagtgatagacgagagagacgttctcagcatgctcgacgacaccgtttccgttaacctcggaatcgaagaggaaacagcagcagcagcagcagaagaagaagaagcagaatcagaagtcagcattttggagtggcaagttttattgaactccaacaatttggaaggaccaaattcggagccttatttcggagataacgaggatttcgtttacaccgcggactacgagatgatgctcgggcaattcaacgacgatgcgtttaatgggaagcctccggcctccgcctccgtcgtgaggaatcttccgtcggtggttgtgaccgaagctgacgtcgtttgcgcggtttgtaaagacgagtttggcgttggggaaggggtgaaggtgttgccgtgttcgcatcgttaccatgaggactgcattgtgccgtggttggggataagaaacacgtgtcccgtttgtcgctatgagttccccactgatgatgctgattatgagcggaggaaggcgcagagatctgttgttatgtgataatcatgatcatggtgttattattagggtcagtttttttttcttactttcagtgatagggtataaaaagtatagatttttttttttgctgctgaagaaaattgtgcttgttgattttccgaaatttgagttttgggatgatgcttctcttcgaattgtacttttgggatacatcacagaaacgattcatttttccatcatggaatctgtttatgttgtgatttcttcatgttcttgttcttgtggattgctctgctgctatcttgtatcgttctgggttacggccagattggaattctgtgaaagtcttagctggttcctttgacggattttatatcctctcatgttttgaatgtgtgtttgcattcacattcgatgatctataatgatgtagaaataccatttaagttcgttttaggtaaatgttcgtaacttcgtgtgtttggttctggattttgaatctgaaattgatttttgag

SEQ ID NO: 29604 - DNA, 1460 bp, Glycine max
  Clone ID: TF_GmC6834_1
ctttaaaattgtttacacatttggtgctatagttttttattgtttttcggatctcagttcgttgtatttgagttcgttggcttgattccttagagccaatgcggttctcttttttcatctgggtctaaagaaccactggtgaccaaaattgtgaaaaggggttccttgattttcaccaattcatggcatttcagcactacatttcccgggatttgaaaaccatcccaaatgctgtgactgaggcagaaaaccccaatggttgttttgattgtaacatctgcttagactttgcacatgagccagtggtgacactttgtggtcacctctactgctggccatgcatctacaagtggctccatgtccaaagtgattctcttccacctgatgagcatccacaatgccccgttctcgttgaaacttctcacagagccaaagctgttctctttttttcatctgggtctaaagaaccactggtgaccaaaattgtgaaaaggggttccttgattttcatcaattcatggcatttcagcactacatttcccgggatttgaaaaccatcccaaatgctgcgactgagacagaaaactccaatggttgttttgattgcaacatctgcctagactttgcacatgagccggtggtgaccctatgtggccacctctactgctggccatgcatctacaagtggctccatgtccaaagtgattctcttgcacctgatgagcatccacaatgccccgtttgcaaggcagatatatccaatagcacaatggtcccactctatggccgtggccatgccgccacagctgaaggcaaaacatcttcttgtgatgtttttataccaccaagaccatctgcttcatgtgttcaagcccttttggcaacatcatctcaaaggggtcagcaccttccatatcgtaatccttatcagggtcactacttcagctctcatccataccaagaagaggatgatgccacttcacaaatgctcaatcttggatcccaccaccaccctgtgactgggatgtttggggagatggtttatgccagagtgtttggcaacccagaaaatttgtatgcataccccaattcttatcagctgatgggaagtgccacccctagattgagaaggcaagagatgcaggcacacaaatctttgaacagaatttctatttttctcttttgctgcttccttctttgtcttgttgtcttctaagtgagcacttgagattattttctctcattctctgttgtatactttgtaaagaagcatggatgcaacctttaaaaacttgatagatcattgagtaaaattatcacaggctaaagagcttgtgagtctatacacctgcatctacacttctattcgttttattacaccttttttttggtgtgtgtgtatatataagaataagacactaataagatttaaactttgaatctataaactaaaaagaaaa

SEQ ID NO: 29605 - DNA, 816 bp, Glycine max
  Clone ID: TF_GmC12407_1
atccctcggtgctaattagtgtgtattatttttgtacctatgtgtcgtcctctccatgttccccactttctttattatgaaccgaatttcctcatcactagtacttctccatcaccatggctgaaactccatcaccctctgagtctcccacagcctcctttggccccatcataagtaatggccaagttggtggcttcgattggattgtccttgtggcagcaattttatgtgcctttgtgtgtgctcttggcctcaacacaatgttacaatgtgtgtttcaatgtgcttgtcgtgtcctcacagagcctcgccaatggattgcttcacgaaggctcaactctggcctcaagaaaaaggaaatggtggctttgccaacctcaacttacactactacacactctgctgctgcctcttcttcttcttcacctaattctagtagttgtgtcatttgcttggctgagttctctgatggggaccctataaggttccttccaaagtgcaaccactatttccatgtggtttgcattgacaagtggctactctctcactcttcttgccctacttgcaggcacctcctcaagtcaaatgattctcttcactccttacatattgtcatagcttaggtatcctctactcatgagtagcatcattatggctataaaacttttacttttgatatttaatgtaactgtatattcaagattcaaaaattaagatcttcaattaagttagaataattgtatatcaagttaatctagctacttagtgtttcatagcttaattatttaaatagttatcagttgtttagcatttcta

SEQ ID NO: 29606 - DNA, 527 bp, Glycine max
  Clone ID: TF_LIB4198-005-Q1-N1-F12
atactaccgggtaaatcacattcgaagttataattccatagcttggacactcgtctaagcacgctagaattcacatgaagatacacagcatctcatcacatgaacacgtgaggggagcatgtgacacaaccttaggggcgagagaaattgtgcaaataaaatcatccataatataccccttacatgtgactccaaccaatcatcatgacacattcatgtgtcactaattcctttttgttaattacaaatcataatcatgtgtgactaattccttttacttccccaaaccaaaagaaaaataaaatcaaatagagattaaaaagggtaaattgaaggattgatgaaaattattaccggggtcagaaaatatcaagaatttccaaaattaaattggtgcagagagggcagttccctctgctcacccaaatctccctcgaacacattctgcaaaacgtgtgcccgcacgggataaacgccgcgcctttatgccgcaccatgcacacgcagcagttatactccaccacacc

SEQ ID NO: 29607 - DNA, 1934 bp, Glycine max
  unsure (1)..(1934): unsure at all n locations
  Clone ID: TF_GmC37342_1
cgcganggangttggaaagtgtcccacacggcggattttttttttgcttcagtggcgcancacccaggcgctgggaccncgacgtctggggggcggggtgaccaaagtcttcgtcgggcctccgctccggccgctatttactactgggggatttaagaaggaattttaggtagctgaaaaaaaatagaatttcaaattccatctatctcaagacagggaatttggaaaattctcactctcgacggaggcggatcttcgtgctctcgacgcggagcctcgctcactcactctcgaatgcgaagccggccgtcactgttaaagtgaaaatcacgacactcaagtggaagagggaggtcggcgacggctgctacttcaatcggcgccgctaccgaggtctccgtcgcggcggaaaggggcatctccgctccactacggcggctattgactactatggttaattgcattaattgtacataaatagacctctaaatcaaagttatggaagattctgatcaacctgccaaatctgctgaaaaccagcaaactgaacaagtgtgtagttttttcagaaagccggttaataaaaagaatttaaggaagcgaactattgaaattgaagataatgaggaggactcaaacaatgaaacttctctgttgcatattcagaagaaaaccttaaaggctgacaataagttgtacttttccaccggctcttcaaaaagctctgcatctgctgaaccaagtgaagaatctggaaaaacagtctttcaatttgagtcttcaaaagagattcaagttcaacatgatagcaaagcaacagcaattctagagaccgagactgagttttcaaaagatgctcgtgccatccgcgaaagagctcttaagcaagcagaggagagtctgaaagggaaaagtgcaagctctgaggataaaaaattatataagggaatgaacagttacaaagactacaaggctggctttcgtagggagcaaacaattgctagtgaaaaagctggagggtcacatggtcctcttagggcttcagctcatattagagtttcagcaaggtttgattatcagcctgacatatgtaaggattataaggaaactggttactgtggatatggtgattcatgtaagtttatgcatgatcgaggggattacaagtctgggtggcagatggagaaggaatgggaagaagctgagaaagcaaggaaaatgagattggctgcaggagaggatgcagatgaggaggagggtgctaatttgactgatgaagatgatgaggattcgctaccatttgcctgtttcatttgtagaaactcttttgtggatcctgtagtaaccaagtgcaagcactacttctgcgagcattgtgcattgaagcatcattcaaagaataagaagtgttttgtctgcaaccagccaacacttggcatttttaatgttgctcatgagatacgcaggaagatggccgaggataaatcataaaaatgtctctgtaggatacatggatctctttacttcaaggaagttatcttttctccctcattttagtttcatgtttaagtttgatgctatgtaatgagttgaaaacataccataggtctgcacagtggaattaggtctcattcgttttgttgtatttctttgacatatagatcccagaatatctaatggtgagagacatttatggatttacccatttgtatatagcatgtcagttggccatactatggttctttttgcagtagtttgttaccaaattaattttgaatacagcgacctttacttcctccagaatatctaatggtgagagacatttatgatatacccgtttgtatatagggtcatactgtggttctttttacagtagtttgttaccaaataaattttgaatagagcgacctttacttaaaaaaaaaaanannnaa

SEQ ID NO: 29608 - DNA, 723 bp, Glycine max
  Clone ID: TF_GmC1096_1
tttcgggaaccctatataccatttcatactttccgacacctaaaacttgagcatgctgagtaagtacctagctccaatttatactcatctcaaatgggtattagattttgttctctactaccctttttacatgctttatgattctcatccacccataaatcttggaactgaattgagtacatttcattatgaattttcctctggctcagaggaacatgtggattgtgctgtgtgtctaagcaaatttggagaaggagatgaggtgattagagttatgagatgtgagcatgtcttccacaaaggttgtttggatagatgggttggtttcgagaatgccacgtgtcctctttgcagaggatcactgactccaaaaaggcctatcactaactctggagctgaggttgtgctatttcagttttgttctgtccaaaagtgtaatgatgagacatggtggctacgctgagtacattaatgggggcttcaaggcttttgcatcctacaccagcacagtgtgtagattgttagtttttttttttttttaagatatggtttagaaattcgagttctagtcatgtgtataaaaaaaatattttgttgagataaaattcaatacaataactctacgtctgaaatcaaattagtctcagactatcgttagaaggatagtgggaaaaaacttttggatccaatgaaataaaccaatcgcagagtttagtttatcta

SEQ ID NO: 29609 - DNA, 652 bp, Glycine max
  Clone ID: TF_GmC257111_1
ccacgcgtccgcccttttctccttcaatggaaggtgaggaggggaaacagtcttcccaaaaaaacccttacgttgaactagaagaagttgactttgattttattctagcaatgagcatgcaagaacaagagagagagttcacaatgctttcaactattgaaagtgaaagtgatgaatatctaagtgactcctctatagataatgatgatgatggtgatcctgactttatagcgagtcaagagtttgaaaccgaccttcggtttcttgaaggtgaaggaagcgacgatgatgatgaagacatggaaatggaagaagatgagattgatccagacgaattatcttatgaagaattgatggagttggaagagtttataggagaagaaacaagagggttatcagcaaatgaaatctctttgtgcttgtacccttatacctgccaatgtgctgaaagcaaaagtggcattgatcgttgtgtgatttgtcaggttgaatatgaagaaggtgaagcactagtggcacttcaatgtgagcacccttatcattcagattgcataagaaagtggcttcaaattaagaaggtttgtccaatttgtggaaatgaagtttcaactcccaacttggcttcgaacccttagttatttagtttggattg

SEQ ID NO: 29610 - DNA, 570 bp, Glycine max
  unsure (1)..(570): unsure at all n locations
  Clone ID: TF_GmC266_2
gccggtgtcaagttagagcttggcaatggctctgaaagncagtaaaaaaattgatcattaaagacccagaatgctgtatctgcttagccaagtacaaagacaaagaggaagttagacaattgccctgttcccatatgttccacctaaaatgtgtggatcaatggctaaaaattacatcatgttgccctctttgcaaacaaggattagagaggtagaaatagcagaaacaacagtcaaaaggattaatcttatttggtcacatgtactcttgatattaccctcagttttttcttcttctttttccttaaattttggtttaatatactttacacgtgtcacttgagtgagtttgtatatgtacagaatagctcaccagtgaccaaaactataatgtgtggttgtaaggaatggatcccataaccattcaaattagtgatttttcttgtattgtcatctaaatactgcgagataagcatctgcatctctgtagggaaaaaattaaggcaagtaatatattcgttccttaattcttaaaaaataaaatgtccataatttagggctttttcccct

SEQ ID NO: 29611 - DNA, 770 bp, Glycine max
  unsure (1)..(770): unsure at all n locations
  Clone ID: TF_LIB4167-008-Q1-K1-E9
cccggctcgacccagcgtccgattttttttctcgagacaaaaaaaaagtgtggctacaaaacaacactctcatagagagagaacggttcatcgttcagttcaattcaactacccgccggcgccgctagcgatggtggactccggcagtgacttcgccggcatcatttgttcgatctgctacgaacccctcaaccccattaacgaggatcttcaatcggtctccatctgtggccacgtttttcacgagctttgtctacagcagtggttcgagtactcttcgaaagggaagaagcacacttgccccatttgcaaacagggttgcagggccagtgacgcgtgcaggctctattttcagtcagtgggagatgcgaacaatagtgtgaagccttcgaagtgctttgaacttgaggaagatgctggggttctgcgtagggaagtgaagagattggaggtgaaagtttcggggcttaattctcaggttgaagggcaaacaaaggaattagaaggactcaatgaggagctttgtacttgcaaggagcaggcaaagatagagacagctntaaagaatgaggctttaaatcaaaaagcatctatacaattccagcttcaaatgaaatcagaggagcttgagaagtcaactntggagtgttttagattaaaagaaaggaatatggctttggctaaagaacttgcagcattaaaatagtatctgatctggacattgatgaaagaagagttntgaagcttgccactttgggtaatggggccac

SEQ ID NO: 29612 - DNA, 589 bp, Glycine max
  Clone ID: TF_uC-gmflLIB3275009b02a1
agggaccaaatttttacctggccttaattttttccttacaaaaatgcaaatgcttatctcgcagtatttagatgacaatacaagaaaaatcactaatttgaatggttatgggatccattccttacaaccacacattatagttttggtcactggtgagctattctgtacatatacaaactcactcaagtgacacgtgtaaagtatattaaaccaaaatttaaggaaaaagaagaagaaaaaactgagggtaatatcaagagtacatgtgaccaaataagattaatccttttgactgttgtttctgctatttctacctctctaatccttgtttgcaaagagggcaacatgatgtaatttttagccattgatccacacattttaggtggaacatatgggaacagggcaattgtctaacttcctctttgtctttgtacttggctaagcagatacagcattcctgtaagcagatcagaacataacaaatctatcaattcaatagaaattgaaatatgtcaaatcttaaaatgaatggaacttaaaagcatacatccaaattgagggtaaaaaatgcccaactacattactagct

SEQ ID NO: 29613 - DNA, 955 bp, Glycine max
  Clone ID: TF_GmC80819_1
aaaaagggtaaattaatcagttaatttcatatggaaagaatcacattttccatttacggtggatatcactagatctccataaattgataacccatttgaatctcaaactcaaacttaaaactcttctctatctatataacgcaccttcttcttgttcacttctctctctctctctctctctcactttttctcttgacacggaaagaaacaacatctgaattctgatgggtttcccagtggggtactcggagctcctcttcccgaagcttctccttcacatcctctccctcctgggcctcctcaggaagctgatttgcagcctcctccgcttcatgggcctccacgacttcctcgagcccgacattgcctgggccgaaacccagacccgagtgcccgaagagttcgaatccgtgtcggccacgctcatccgggaaatcctgccggtggtgaagttccgggagctggtggatcccccggagacgtgcgcggtgtgtctgagcgagttcgaggaaaacgatgagatcagacggctggcgaattgtcgtcacatattccaccgaggatgtttggaccgttggatggggtacgatcagagaacctgccctctttgcagaacggcctttataccggacgaaatgcaaggtgcttttattgagagactctgggctgcctctggtatcgctgaatatccgcatgttgcccctttctagtatcattcatatttccttattttacttttttggggaagggatatcaaaagccataaccagaagaggttcttttgatttcgtggtttttttttgtgtatgtgtatatatacagagacctctatcaattgtatatcgatttctcttagatgatggatttttttagaattgggagatctggttcatctcatattttgacctgtataacataattggaaattaattatgttttgattcatcttagttgc

SEQ ID NO: 29614 - DNA, 708 bp, Glycine max
  Clone ID: TF_LIB5118-038-A1-PF1-E2
tctctctctctctctctctcactttttctcttgaacggaaagaaacaacatctgaattctgatgggtttcccagtggggtactcggagctcctcttcccgaagcttctccttcacatcctctccctcctgggcctcctcaggaagctgatttgcagcctcctccgcttcatgggcctccacgacttcctcgagcccgacattgcctgggccgaaacccagacccgagtgcccgaagagttcgaatccgtgtcggccacgctcatccgggaaatcctgccggtggtgaagttccgggagctggtggatcccccggagacgtgcgcggtgtgtctgagcgagttcgaggaaaacgatgagatcagacggctggcgaattgtcgtcacatattccaccgaggatgtttggaccgttggatggggtacgatcagagaacctgccctctttgcagaacggcctttataccggacgaaatgcaaggtgcttttattcagagactctgggctgcctctgggatcgctgatcctttgtagtatgctactatatatattctaaatatttcctttttttggggaaatcaaaagcctgaaccagaagaggttttttttctttttttgtttatgtgtagtgtatatatacagaggtcatggaaatactcagacttctatcaattgtatatcgatttcttttagatgatggatttttgtgg

SEQ ID NO: 29615 - DNA, 1127 bp, Glycine max
  Clone ID: TF_GmC1513_1
tgaaactagaaggaaaaagtaggtggagaaggataaggtgacgaagcaatttcccatcacctactcttgctttgcttctcaagtacgccccattgtttactttattctcaatttcccatctcgtgattctgattccctccttttctatactaagctcggaaatcggcgcacggaaaacatgagatcattcatagatagaagagtaaaatttcactcacataataataatggggtctatgggtaactcaaatccaaatctaaatccaaatccaaatccaaatccatggactccaaaggattgttctgaaggaatttgcagcatctattgtcctcagtggtgttacaaagtgtactctcctccccctccaattctactaggtgatggcgatgatgacccttcaggctttgaattctctcctctcatagttgctgtgattggaatcttggctagcactttcatcttggtcacttactataccattatctcaaggttctgcaggcgcagaaacaacaccaatgattcaacagaagacgatggaaacagcgaattggctcgagtttcttcttctgccaattctggcttagatgaggctctcatcaaatccatcacggtttgcaagtacaacaaacgtggtggtttggtggaaggtcacgattgttcggtttgtttgatcgagttccaagagaatgaaaacttgagattgttgccaaaatgcaaccatgcttttcatctcccttgcattgatacttggctcaagtctcatgctacttgccctttgtgtcgttcttctgtcaccgcttgtccaaatccgaatccaaattcttccatggaacccccaccaagagtcattgttaatgccttgggacaccaacttaggagtaaccatgttgttgttgttgagagttctgaggaacaacagaaagatggttagttttgatgctcatactttgaatgacagtgaagggtatcatacataggggaagctaatatttggggaacagatctgcttcaacaagtacacagagatccatgttcacaaggcatatactatacatatatagtaagtgaatgaattctgttcttccaattatttatttgcatctaatcaaaataatttgtctttttt

SEQ ID NO: 29616 - DNA, 837 bp, Glycine max
  unsure (1)..(837): unsure at all n locations
  Clone ID: TF_GmC154097_1
cccggngtcgacccacgcgtcgagcactcttatcctctcaatttgaaatgcctattaccaacaacacttctcacactatgaccaacaacaggttttccggaatgatagaaacagtagcaatgtgtaagcaactttgttttggcggttctgcacttggactattcacgaaaattatcaagaaagttctatttgctctatttacttgcattctggcactaggagggtcaatagtaggaacaattgcaggaggcatcaaagggcagaccacagaagctggttttcttgatggtgctggaaaaggagcaattacaggagccattgcagcattggaattgatcaattttgatgcttttgatgagccaatttccaaggttgccctgttgagcagtttattaaatgggaaaatctttatggaatggatatgtccggctgttgcaagactctatcagttgcatgtaactgttaacacactggaaacaatttaccaagaagtatcggacatttatgatatcaggggagtcagagggataccacataatgtaattctgaagcttccttttcagccattcaactccagaaaaatgttgaaatcatacaacatgtcttgctgctcaatttgcttccaggattttgaggatggagaattggtcaggatacttccaaaatgtgaccacctttttcatctacaatgcatagacaagtggctagtccaacaaggatcatgcccaatgtgtagaacttatgttcctgaatcctgaccacattagtaattttgttgtaaagtaggttgagcatgttaataacaaaagaaaaagtaagttgttgagcttctgtcgc

SEQ ID NO: 29617 - DNA, 1139 bp, Glycine max
  Clone ID: TF_GmC2571_2
tcccgggtcgacccacgcgtccgatcccacgcgtccggttggttttggttttggagttgggtttagaatcttcaatcttgtttgggagagagatgtacatagcttccatgggaaggtctttcaaggactccttgaaactgcttgaagctgatattcaccatgccaataccctggcgtcagattttccaagggaatatgatggtgcgtgccttcagatgagaatgtcatatagtccagcagcacacctgtttctctttttggtgcaatggacagactgcaatcttgccggagcccttggactgttaagaatcctaatatacaaggtgtatgcggatgggacaactaccatgtctacccatgaaagaaaagcaagtattagggaattctatgcaatcatatatccctctttagtgcaactgcaaaaaagtgtggcagatacagaggataaaaaacagaaggctgtatgcatggagaggtatcgcaaaagagatgatgaggagcacagacagccttcagacatagacattgaaagagaagaagaatgtggaatatgcatggagatgaatagtaagattgtgttgcctgactgcaaccatgtcatgtgcctgacatgttaccatgaatggaggacaagatcacagtcatgcccattttgccgtaacagtcttaagagagtaaactcaggtgatctctgggtgttcactgataatagggatgtagtagacatggcaacagcgacaagggagaatcttagaaggcttttcatgtacatagataagttgcctttggtcattccagactttctctttgacacatatgactctcacctaagatgagtgtttgcaacagccagattttactgtctctggtgtgtggtcttggagggttagttcctttcaatttagcaatgtaaactcaaaaatgtaatttgataaatttagtttatataaagttgtattgttgcttcccacgtcttccagaagtatccagccctgtgtttactgtgggttggtggtgaagttgagatggtaaattgtatgtaggtcatttgtatatcctgtacagattgaattacttattaagaagagttttgcttattctgtgcctctaattattgttaaaaatgtgaatctcttgag

SEQ ID NO: 29618 - DNA, 1358 bp, Glycine max
  unsure (1)..(1358): unsure at all n locations
  Clone ID: TF_GmC907_1
cccaagacacccttcagaaccttcctcactctttctctcttccttctttttcgctcggtttttctataaacctaacctaaccaaaaaacccttgtcattcttcttcattcatttattcttattcatcttttcattcactcactctcactcatggctgaagatgggaacaacaacgatgtacccttacacaaattcaaagacagcaatccaaaccctgaagagttcgatgcaaagggttacagcctcagcggaaaaatcatgctttcagcaataatccttcttttcttcgtcgtcgttttgatgttgtgccttcatatctacgcgcgctggtacctccggcgtgctcgccgccgccagctccggcgccaacgcgagctccgccgcacccagcttgtcttttacaacgacgacgccacccccgcagccgtgtcacgtggcctcgacgccgccatccttgccacgctccccgtcttcaccttcgacccggaaaaaaccgggccggagtgcgctgtttgcttgtcggagttcgaacccggtgaaacgggtcgggtcttgcccaaatgtaatcacagtttccacatagaatgtattgacatgtggttccattctcatgacacgtgtcctctttgtcgcgccccggttgaacgcgcgccggaaccggaagttgttgttataacagtacccgatccggtttccgaaaccggttcaggcgaaaatgagaaccgaaccggttcttcttcttcttcctcttcggttggattgagtaagcctaagccttcgttggttggtgtgacaattgaggtgcctccgagggacgagaattttcaaaacgagttgcaaccgagttgcgactcatcctcctcgtttcggtcgccgatgagtcgcatgctgtcgtttacgaggatgctcggcagggaaaagaaggggaacgtgtcgccgtcgtcgtgcggcggcggcgattgtagctccgccgcggagcgaggtgagcgagaggagactcagtgagtcggtgactcgggtgctgacgtggcacttgttggaagcggaaaaacttgggttgttggcgcgtggcggtgtgtaatagtgacgtttctggattttaatgtaggcggtgagcggcgcgtgagttaggtggcgcgagatactgacgtagaatggttttgggatgaacataaatgatgtacttattcgttgatatatatattttttctttatttgtttcttatcttcgggttccaaaaatagttaaatagaatacgaaaattgctaattgtaatgcttgcttacatagaaatgaaaccaattttaaagaataaaatattttttaaaaaaaaaaaaaaaaagggcggccnccgcct

SEQ ID NO: 29619 - DNA, 1204 bp, Glycine max
  unsure (1)..(1204): unsure at all n locations
  Clone ID: TF_GmC759_2
gggtcgagcttgttcttcttccttctcttcatctgtctctacccttctacgcaactttccttcttttctattgagcttccaaatattctcacggcttgctatagtagttgcaccctccaaacacaaactgattcccttgtcttttcatctaattgcttggtctttaatggacgcgctttaactttacgcacggaaactgataaggttcaggtacttgtaagagaacatactgtaaaactaaaaggaaaaaatggccttagatcacttcgaggagagtgtgcaccaaaaaggaaattggaaatcttccagtgaaatcattgcagattctggtagaaatgcctctggtagctttgactgcaacatctgcctggagtgtgttcaagatccagtggtgacactttgtggtcatctttattgctggccctgcatatataaatggcttcattttcaaagcacctctttggataatgaagagcaacagaagccacaatgtcctgtatgcaaatcagaagtttctcaatcctcccttgttccattatacggccgcggccaaaccacaataccttctaaagggaagccacatcaagtagggactgtcataccacaaagacctcatggtcccagaacacacaacattagnaagtgtttcccaaccgatttctcaaagttaccatccctatagtaatccttatcatcctcaacaacacttcaactcgattccaagcggttacacctcacctatgattagaacaactggttcaatagacaacacatttggaatctttggtgagatgatatatgcaagggtctttggtaaccacgtgtcaaacattcatacatacgccaattcgtacaatctttcggggaccagtaacccaaggatgagaagacatttaatgcaagttgataaatcactcagcagaataagttgtttcctcctttgctgcctagttttgtgtctgctcttattctgattgctacttcattttcatcattagttatagtgcatccttacatagaatacattcactcattgatccagatgtattctatgttagagaagctgcaaattgatgctgagttatgtgtaaattaccaatctctctacgagctatatgaagtgaataatgatattctcataccatttttagaacaaaaaagaaacccacgcgaccgcccacgcgtccggttatagatcgcgagc

SEQ ID NO: 29620 - DNA, 1437 bp, Glycine max
  Clone ID: TF_GmC324_2
ccagtctctaatactactaactataggtaaagctcctgcacgtacaggtaccgaatcccagtttcgacccagacccacgccctctatccctaaaatgaataacccaaatggaggaatctgtttccttctctttctcttcctctttccttttgcggcggcgcaacctgccaccaaccaaaaccaatcctattacaacaagttcagcccttccatggccatcataatcgtcatcctcatcgccgccctctttctaatgggcttcttctccatctacatccgccactgctccgactccccctccgccagcatccgcaatctcgccgccgccactggacgctcacggcgcggcacccgcggcctcgagcaggcggtgatcgacaccttcccgacgctggagtactcggcggtgaagatccacaagctgggaaagggaactctggagtgcgctgtgtgcttgaacgagttcgaggacaccgaaacgctgcgtttaatccccaagtgtgaccacgtgttccaccccgagtgcatcgacgagtggctagcttcccacaccacttgccccgtttgccgcgccaacctcgtccctcagcccggcgagtccgtccacggaatcccaatcctcaacgctcctgaggacatcgaggcccaacacgaagcccaaaacgacctcgtcgagcccgaacagcaacagcaagaccccaagcctcccgttcccactgaacctcaagtgctgtcattaaaccagacgctgaaccggaaccgcaccagaggctcccggtcgggccggccgcggcgattcccgcggtctcactcgaccggtcattctttagtcctgccgggcgaagacactgaacggttcactttgcggcttcccgaggaagttagaaagcagatattgcagaacccgcaactgcatcgcgcgagaagcctcgttatcttaccgagagaaggtagttcgcggcgggggtatcgaaccggtgaaggaagtagcagagggagatcgtcgaggcggttggaccgggggtttaagtcggaccggtgggttttcaccatggcgccgccttttttggtgagagcgtcgtcgattaggtcgcccagggtggccaataacggtggcgaaggaacttccgctgctgcgtctttgcctccgccgcctgctgtggagtctgtttgagttttgattcccccttctgcaagatttcaatattttattgtatttaccaattattttttgctgccacgatttttttacgctagaatttgtaagatgtgtataatatttggcacacttgttttgcgtttgaagataaataactgaaatcctgaatcacgatagattcttaaatcataatcttggtcatcagttcagatatgaatccaacggaaatggagatatatatatatataaaaaaaaaggacgacgggcggccagtgagc

SEQ ID NO: 29621 - DNA, 1501 bp, Glycine max
  Clone ID: TF_GmC166328_1
ccacgcgtccgaaaaaacaaaaactccatggggtggggtcgtctcggaaggcatggctcagattccgttgacggcgcggtggccggtcctagcacctccgccaccgaaccacggcggttccctctcgcagctcagccggaaatgatgcgcgccgccgagaaggacgatcaatacgcctccttcgtttacgaagcctgtcgcgacgcatttcgccacctctttggtaccagagttgcggtggcttaccaaaacgagacgaaacttttagggcagatgctttactatgttctcactactggctcgggacagcaaaccctgggagaggagtactgcgacatcactcaggttgcaggaccttatggacttcctcctacccctgcgaggcgtgctcttttcgttgtatatcagactgctattccttatattgcagaacgaattagttctagaattgcttcgcgaggcattgtccttgctgactatgagtctgctgagggttttggtgaaaatgcccacaggagccatagtgctcagatttctggcaccagtccttcatcctcgtctggccaatctgttactactctgtcaaggttgaaggggaaaatgagtgcattttggttgcatttggttcagagatggcctacgatgctcccttttgtccgtgagttgttgcagttggttctccgtgctaacctcatgctattctactttgaaggtctctattatcatatatccaaacgtgcggcaggcattcgttatgtatttattggaaaagcatcaaatcaaaggcccagataccaaatactgggagtatttttgttgattcaactttgtataatagctgctgaagggctgcgtcgaagaaatttaacttcaattactggttcagttcatcaagcatccttcgcaacccacgatagatcagcaggacatggtttgcctgttttaaatgaagagggtaatttggcaactccagatattgacaaaagaagctgggtctctgaatcttcatcttctgagtatcatgcaaccagtggggttagcaaatgcacactttgcctgagtaatcgtcagcacccaactgctacttcatgtggccatgtattctgctggaactgtatcacggaatggtgcaacgaaaagccagagtgccctctttgtcgcacgcccataacacactcgagtctagtttgtgtatatcattcggacttctagagtctgctcctctttacgtacatatatagaagatagcattaaaggcagcattttcctcatcttggatcttacaaggactgtatgaacatttaagcaattcaattttgtattaggatttcaataatcaatctgattacactattaggtccgtgtttcatctcttttattatgcaataatgatttttttttttttttggaaaaagataaccattatagcacaacactggatggtgattctgcattaattatttctctccagtgggtggtgctaatgaggtttatgccagta

SEQ ID NO: 29622 - DNA, 668 bp, Glycine max
  Clone ID: TF_GmC25364_1
cccacgcgtccgctctgaactctcaatccacaaaaaagcaacatggcttcaattcgcgccttcttcacagccattgcttttgtggctcaatcatttcaaaactacatgatccagagtctgcacaaactttacaagcattatggatatgctgctgaagtgaaggacaatgaagagaaagaaagtgattattgttctgtgtgtctaagccaaatttgtaaaggggaaaaagctaagtctcttcccgtgtgcaaccacagataccatgttgattgtattggtgcttggttgaagaatcataccacatgccctctttgtaggaacaatatcactgatcatatcacccaaaaacataaacaggtgaagagcttaggagaatctttgttcaatctcattcagagtttctctgatctattggtagctattctctacatgatgcttccatctaccatcactgagagtttccctttggttcattaatattgctttctgctcacacaatactagtatgagttgtatgcaattatgtatgtaatatgtagaatagtaaatcaggattcctgccattcattaaattgctaatattttgagtttttgcttgtttggcactaggaaatatgtaattgtgcctaattacgattgattccttcaatacagaatttgattagtgc

SEQ ID NO: 29623 - DNA, 792 bp, Glycine max
  Clone ID: TF_GmC1100_1
gataaactaagggatgagctttcctgtgctatttgtttggagatatgctttgagccaagtaccactccttgtggtcacagcttctgtagaaaatgtctaagatctgctgcagacaagtgtggcaaaaagtgcccaaaatgcaggcagctaataagcaatggccgaccatgcactgtgaacacagttctctaacacaatccagcttctgtttccacaagaagttgaagcaagaaaagaagccagtgccttgaatagtctccaacaagctcaaaatctgattctggactcagattttgagctaatctaaggaatgacagacgacagccttttaggggggcatcaacaacaacatcatcaacacagcaggatgaggatgctgcattggctagaatgttgcagagacaaattgatgaacaaagaagcccgggaacaactcgaactcggtttgcaagattgagggcaagaagaggaggggtttctactagccaacatgaggatgcagctttggctctaaggatgaggagagaagagttcatgcaaacttatagagggagcagccagtctagcaggctaccctcatcattattagctagagaaaaattgagggctatggtatctagagccatgaacagaagagaagatcttagacaagggtgaatgttgttaacaactaaactttttttttctgaatgtcattttatggttatattcgtgtctcataatttgtgaggtgtgcattgttttgattttcaaggtacaaattgaattattcaaaactgaactggcattctg

SEQ ID NO: 29624 - DNA, 503 bp, Glycine max
  unsure (1)..(503): unsure at all n locations
  Clone ID: TF_LIB4281-017-R1-K1-D11
ccggnnccggcaattcccggngtcgacccacgccgttcggggagtatgaagggatggaaacaacatgcgagtactaccgtgccatcatgaatttcatagaacatgtatagacaagtggctgaaggagattcacaggtatgtgaaaataggaatttgagttttcttcttgttaactataaaacttcgaatttatgcaaactcccaatttactggtgtactgtatctatgcatattttttctttacagcctcactgtatctatgcataagggtttatggcatagataaatgagctctacattttttgttcaagaagcacaactaatggaatttaatgctggcagaatttagatattttcaaaattatgagctggttaaattgtacattggcaaaatatggtgaatgttgaaccatcttatggtcatgtgccttagtctatggcagttatcgacctgataagatcttagtatcactagaatgactatctaactgtcattagacatt

SEQ ID NO: 29625 - DNA, 1858 bp, Glycine max
  Clone ID: TF_GmC836_1
atcccaaacccgagtaaaattctggtaaaaattgatgtggcaaaaatacagctctatttttgtgtcatcaatcaaatattagggatatgtttgaaggataaaggtaaaagagtattgataatatagggaaattatgacagctttgattgtgaatagtataaatggaatgatgacccggaaacactgatttttactgccatgttgggtcccttggggatgattattattactgtgtatgaccattttatatggtatatgaagaccttaaactatactttctatattagctgcccagtacactttcacctgccagtttctattattgacttaaaatgctagttgaaatggaaatttagcccttcatctggaaattttatggagtctatatatgcactctaaataaattggcgtcttttttgtttaacaaaaatctaataagaaacgaagaaaccaaagaaaaaaagaaaaactatatcagcgattctcgtgatcttcggcctcgaatcgagaggtaaaagacccaactccgcctctgtttttgtgatcgaaaaccataaaaaagttgtttccgatcactgccttaatcggattcagctgttgttcctcctcctcaatttcgaatattgaaaggctttagttgttgattttggtcaagtctctagtcaacctgtgaattttttattcaagtttaaaaatatatagagcaatgagttttgtttttcgaggaacaagagcagatattgaaaatgggtttccaggatttatacctgagaggcgagcattgcgcgttcatgcaacacgtcctagtaattccaattcactcacttttctcgtgacagttcttctgttattcatgatactgaactctcaccagatgtccccaaactttctgctctggctggtgcttggtgttttcttgatggcaacaatgttgaggatgtatgcaacatgtcaacagcttcaagcacaggcccaagctcatgcagctgcagccagtggcattcttggccacacagaattgaggttgcatatgccaccatcaatagctcttgcaagccgagggcgtctgcagggtctcagacttcaacttgcacttcttgatcgggagtttgatgatctagattatgaaactttaagagctctggattctgataatgtttctactgcaccctctatgacggaggaagagattaatgctcttcctgtccacaaatacaaggtttctggtcctcaatgtggtggttcctcaatgcaacaagcatcatcttccactcctgctgagaagaagcaagataattcaaatgctgttgggagcatgaaagcctctgatgatgacctcacttgcagtgtatgcttggagcaagttaatgttggtgacgtactgcgaagcttaccttgcttgcatcagtttcacgcaaattgcatcgatccctggctgcgccaacaagggacatgccctgtatgtaaatttcgagctggatctggttggagtgacaatggacataatgatatcatcgcggacatggtctgaatacctcgtctaattttatttatggacgtgtgattataaccttgtacaactgtaacttactctcttcatgtatcaagattagtatctcatgactagcattcgtgtaattaccccgacgtgtatgtagggaacagaagaacggcctagtgccgtgtaacaaccatacaaattatacaatttgttgaccattaaacttacatttcttgggtcgctgtgcttaacccaacagcatgtacaaaaattttcttttctgctatggtgttctctgtgtcaaaatgcttgtatatctgacgggattggatagttagcgcatgtttattaatgttt

SEQ ID NO: 29626 - DNA, 685 bp, Glycine max
  Clone ID: TF_GmC836_3
ttcaactgtgcacttcttgttcggaagtttgatgatctagattatgaacctttaagagctctggattctgataatgtttctactgcaccctctatgcgggaggaagagataaatgctcttcctgtccacaaatacaaggtttctggtcctcaatgtggtggttcctcaatgcaacaagcatcatcttccgctcctgctgagaagaagcaagataattcaaatgctgttgggagcatgaaagcctctgatgatgacctctcttgcagtgtatgcttggagcaagttaatgttggtgacgtactgcgaagcttaccttgcttgcatcagtttcacgcaaattgcatcgatccctggctgcgccaacaagggacatgccctgtatgtaaatttcgagctggatctggttggagtgacaatggacataatgatatcatcgcggacatggtctgaatacctcgtctaattttatttatggacgtgtgattataaccttgtacaactgtaacttactctcttcatgactagcattcgtgtaattaccccgacgtgtatgtagggaacagaagaacggcctagtgccgtgtaacaaccatacaaattatacaatttgttgaccattaaacttacatttcttgggtcgctgtgcttaatccgacagcatctacaaaatttttcttttctgctg

SEQ ID NO: 29627 - DNA, 1432 bp, Glycine max
  Clone ID: TF_GmC41583_1
gctcactgtcctttttgaccttgaatttaatgcacttccactttcacctcactcacatcattttctccctcattttcaacctttctaaagcacaatcctccatggagccagttcccgcctacatcacccaccacagctgggagccttccgtcgccatcaccgtcgccgccatcatcttcgccctcctcctcatggctatcatctcagtctacctccgccgttgcgcccagtctcacatcatcatcaccaccaccaccttaccctgctcctgctcccaggggatcaacaaggacctcctcaacacgttcccaacgctcttttactccaacatcaaggacctcaataaggccaaccaaacgctcgaatgcgccgtctgtctaacggatttcactcacaaagactcgcttaggctgctgcccaaatgcaatcacgtgttccaccctcattgcattgattcctggctgacatctcacgtgacatgtcccgtttgtcgcgcgaatctcagccaggaatcatcatgccatgtttccataaccgtccctcctcatggcgaggagggaagtttgggaaacatgacgacgacgacaacaacaacagaagccacccaagttgagcaaaggccaagcaatgacatcaaccaggattgtgttggagatcccacatcaactagtgatactaccaaaataatatatataagcgaggaacaacattcgtctagtgagctagcttgtgaggttgagttaggttcaaagacgaatgttaggaattctactatcactaatattggtgatggggttgttgcgtcggagagaaacctttcgaggtcgaactcgacggggcattcccttgtggaggagcaagggaagggtgtggagaggtacacgttgaggttgcccgaagatgtgaggaggtacattctagtgaaccatggaagaagtgttcaacgttccgcgagtgttaaaggggggtgttggagtgacagcgaagagagttacgtggggaagagggtggagaagaggtgggtgatctgcacgccgccatttgtggcgcaacatgattgaagaatttcgtcgaacaattggtctgcgttctgcgttgcgccttctataaagggtcgttgtcaattcttgcaagagattgtgagagtttggtgttacagagatgaagcagaggactgaaatggaagaagagtagagttctcaatgatcgagtcaactcgttatgtttcaaccctattggcttatgagtcaactcgttttctttctttccttttttttgcttattttttggggtgagagtgtgtgggatcagtggctcatttgcacattgtgttatttattcatttataatatacctagtattgttagtctaattattttcttatcatcttgactatatgaatttaagggcacttggttttgtcggactttgt

SEQ ID NO: 29628 - DNA, 708 bp, Glycine max
  Clone ID: TF_GmC342_4
ccggggatatgcgacttgatgttgataacatgtcttatgaggagttgttggctctggaagagcgcattggaaatgtgagtactggattgagtgaggaaaccctatcgaaactcttgaaacagagaaagcactcggttgaaaaagggtctgagactgatgcagaaccctgttgtgtttgtcaggaggattatggtgatgggaatgatattggaacgcttgattgtggccatgatttccatagcagctgtatcaaacagtggctaatgcaaaagaatctgtgtcccatttgtaagacaacgggcttggcaacatgatgtatgtgactctctgtcctcaggcaaataccatgaccatgaaggaaaaaaaaaattggcacaatttacccaggaaattctggtgcttggtgccttgtcttctgtttctagcctagtaaattgtcgtacctgactgacagaggtttcccctaccctgcctccctcccccgaatttgtttatttattatctaaatccaaaggtctcccggtttaggtgatgaaggagcgcttcttaactcaagttgacaaggcttggtttacatttatgaaattttttaatattgttcggattggagttatgctgaacggaaaactaggtacaaaaagaaatgattacaatataagaatcattggtactggatttaagaaaaaaagaaaagaaggggggggaggg

SEQ ID NO: 29629 - DNA, 1246 bp, Glycine max
  Clone ID: TF_GmC871_2
ggtccggaatcccgcgtcgacccacgcgtccggttagagcttcttcccacttcctccgccgccaccgccaccaccaccgatggcggatccgaaagcctactggtgccacgagtgcgacatgagcgtgtccctgacgctcccaccctcccctctcctctgcccgcactgccacacccacttcctcgagctcatggactccccaaccctctcccaaaacgacaccgaatcctccctcttcgacgtcgttttccaagacgctctcttactcctcaaccccccttcctcaaaaccccgccccctcccctccctccacgtcaccccctccctcctctcctccctcgaccccaacggcgtcgttcgctgcgccgtctgcaaagaccaaattaccccccacgccgaagccaaacaattaccctgcaaacacttataccactccgattgcatcacgccgtggctcgaactccacgcctcgtgtccgctatgcaggtttcggttggaagaagaggaggaagaaggcggtgacggcgttatgacgaagatcaggagggagattattgccaggctgacggtgctgacggaagaggatttctacgggctgaggaccacgctcaaccacattgcctcgcgccacgcgctcatccaagagaacgagaatcgcggcgcccagattggggaaactcaaggtggcgattcggcttgctgatcatattggttcataaggtatatagtgtattaaaataatgctgaagttgtatcaccatagatcgtcttttcaagtgtaaatctgcaccgacgattatgctgctgttcttttccctccttttttgggaatctccaactagctaggtctagtgctatagctaaaaaatacaataaattgatggagtgcacgggtaatgtgcacttctctacccatcttccactctctctatgttggtccttgtaactggatttccttagccaaatttcttgtgtaaaacttagctttcttttatgttgtgtctgaattgcccaagtggatgatggatccttcccaatgaatcatttcgttcccaatttttttgctttggctttacagtagatgctattttttcctgccaatgttgctgtagttacggtatgagatattgagattgttgagggattgaatcatttgagtgttgttgtgtccatggaagagccttaaaatgcataatatattgtggtgtgtaaaaaaaaaaaaaaagggcggcaaatgactagtagc

SEQ ID NO: 29630 - DNA, 1058 bp, Glycine max
  Clone ID: TF_GmC127299_1
ttatcttattatattttatcttatcatgtcatgagaaggagaaccaattatagtccaataccttcgcctcttcaccaaccagtcccactttcaattccgtgggttcctgccatcaatgatagagatcacatgtatctaaaccttgcacctatcattataattgtcatagctggcacaacttgcataattttttttctcatcaccttgttcaaaatcctaaggtactattatccaaatagatacaacgttagcagaagtaacccaccaatattatttgacattcgtggagattctcccttttctgatgatgaggaacatgatcaagccattaggcaccccatatggttcatccccacagagggtctccaacaatcaatcatagactccatcacagtctacaaatacagaaaagatgaagggttggttaaagaaactgagtgtcttgtttgccttggtgagtttcaacaagaagagagtctcagagtattgccaaagtgtaaccacgcttttcacatcccttgcattgatacttggttgagatctcataaaagttgtcccttgtgccgtgcacctattgttcttgatgttgctacagtgttggtggtggcaccgagtctgccccatatgtttctgacatgaacgaatacgtagaagaaagtaatagtggtggagtgagggttggagatgaagaaaattctagtgaagaggggagggatgatggaattcatgttttgaatgaatgtgtcgaggtgagtggccattctacaattctaattggttctgcttctgatgttagtgcacaagaatttgatgatgaaattgaactcaaaatgaagagatctgtctcggtggattcatcttctgcttcaatagtatttagtgatgtgttggaattaaattttgatatagaaagcttagacaccaacaccaacttggtggttgaaaaggtttcaatttcaagtaacaaggatgttgctattgctaaggagggtagcgaaagttcaaccaataacaaactggcttcagagccagagtttaactcttccattgtgaactag

SEQ ID NO: 29631 - DNA, 1572 bp, Glycine max
  Clone ID: TF_GmC723_1
tgttatttcttccttctgcccactttcccggccttgtctaattcttttctctgactctgtacacactcactactccaatcctacggaccctttcttcttttccttttccttcaccataaaactcttctccatcacacacacacacaccactgtgctgctaaccatggcaaatttcacttctttttcttcatctctgtcacaccttcttcccctttcttctccttcttcttctgcagctttcgacgattcttccgaagactcctgcagtatatgcttagagcccttcagcgttcatgacccatctactgtcacctgttgcaaacatgaatatcatctgcattgcattattgaatggtcacaaagaagcaaagagtgcccaatctgttggcaatcacttgctttgaaagatcctgccagccaagagcttctagctgcagtggaagatgagaaatgcatgagatcaagaaacattgctaattctcgtgccccccttggacaacttaatgaaagccacgatgattcttgctcagatgactctgattttgatgatcagattatgaagcgcctagtttctgctgcaagaagagctcattttgttcagagacaggaaaggaagagatcacctagtgctggtccatcagaggctcttggtgttaactcttccatgcatgtttctgaggtgcaaacaactcttacaacttcatcatctgggggtagtttgccagcttctggtgtaccatctactgttagcattcaacctccagcactaaatactactcctgagagtgcaaggagaccaaacacttctgagatttccttccctgagtccttcaaatcaaagttttctgctgcttcagccagatataaggaatcaatttcaaaaagtacgcttggtcttaaagagaagttacttgctcataatgtctcggttaaagagctgagtaaaggtgttcagcgcgagatgaatgcaggcattgctggagttgcacggatgattgaacgccttgatcttagctcaaaacggtccagtgctcctctcattgctgtccatagtgtggctacttcagacttcccttcttcagggaagtctgttgaagagaatggcattgggggttctcctagtaaagagaatggaggtgcagttcatgatgttagttcagatgttcccccacttgttactaacatgcaatcttttcgaacaaaaactcctccatttcttcagagtggacatggaatggtatgaagacttagcttgtggtcatcatcaacttgactatgctgtctcaattgtcctagaagagtgcaagagacgccctctgataaccaatgtactcattggtatgcgtcctgcattgttatcaatggtaaattacgcgtaggaattaaaattatgtacaatcaattgataagagccagcggtttcatccgttggacgattattcaatgcatctctgatatagtttcatggtttcttatccatgtttacacctttatttttttcgattaaagtttacatcttttacatgccagtccttttaatgatataaaataaaggctctctgttttcctttt

SEQ ID NO: 29632 - DNA, 1052 bp, Glycine max
  Clone ID: TF_GmC12959_3
agatgaatcaaataagtagttaaaaaaaaactataaagtaccaagtcaattaaattataagtattgccttcactttcaacccgtactttctctgtttctaaacaccccccacaaaattttctcactcgagaattttcccggaaaatctcacctttttcgatttctcagtcaagacaaacaacaacaaaaactctaaattctttcttaattcttgccaaattcgaaggagagagaaagagaaaaagaaaaggaaaaaaggttaatggcatcactgggatctccgtcttctttctggtgctaccgctgcaaccgcatagttagggttccacaaaaccacgccgttctcctctgccccgattgcaactccggcttcctcgaagagctccaaacccctccccactcgcgccgatccacgcgcggcggcggtgggtcccccttcaacccggtaatcgtcctgcgcaacgcaaacgacgtcgtctcgcccgaaacgcggaacttcgaactctactacaacgacgccgtttcaggttcctccggcccaagcagtctccgtcctttaccacagggagtatccgagttcctcatgggctccggcttcgacaatgtactcgaccagctcgacgccgccgcggggggcgccggagcactgccccccacggcagcgtcgaaagcggcgatcgagtcgatgccggtggttaagatcctcgcgagccacacctacgcggaatcgcactgcgcggtctgcatggagaatttcgagatcaactgcgacgcacgtgagatgccgggcggtcacgtgtaccattccgagtgcatcgtgccgtggctctcggtgagaaactcgtgccccgtgtgccgccacgaggttccttcggatgaagttgaagaaagtaataacaatactgtggggttgactatttggagacttgctgagggaggattcgctgtgggcaggttcatcggagggagggagctcccactggtgtatacggagatggacggcgggtttaacggcgctaacggcgttccaaggagagtcgcttgggatagct

SEQ ID NO: 29633 - DNA, 694 bp, Glycine max
  Clone ID: TF_GmC43458_1
gatacaaatgttgtcatgatacactcggtcctgttatgtgctgtcatttactcactcgggttgaactccatcataaagtgtgtcctaagatgttcaatcatagtcatcaataacaatgacccttcttcttcaagtgtgagcaacaacaagccttcaccgagattggccaacacaggaatcaagaagaaagtcctcaagacttttcctactgtgagctactcaacagagatgaaacttcccggtttggacatatagtgtgtgatttgcctctcggagtttgccaatggtgataaagtgcgcattttgccaaagtgcaaccatggtttccacgttcgctgcattgacaagtggctaagttcacactcatcatgccccaagtgcagacagtgcctcattgagacatgtaagaaaattgttggatcccaaatacaaccagtgccacctgtgccagaaagtaccattataaggattcaaccactagaacctgaaggtttggagcgtaactatagggaagtatgttagctaattaattactttaattagtactagaatgtaagacaaaccaatcaaccatcaacaatgcggtggttattgggggattttcacttgctttttgttttgacctcagatgtaagataaactagttcaatttttgtaactgcaatattattcttttcagtaatattctaaagtt

SEQ ID NO: 29634 - DNA, 1701 bp, Glycine max
  Clone ID: TF_GmC258_1
gtgggctcggacccacgcgctcgcttgtttctctctcttcaatggccgagccccactccaccgccgcgattcttcctccctccaccgcccggttggaggaaactccgtccgggagctctcagactcccctccgctccggaagaggcggctggagtattgtcgatggctccttcgccattgttagggacaatacctgctcctgcttcgtcgtcgtcttcagcttgtggttcttcgtgtcgatgactatgatactgggggtttatgggtccatgaccatcgtgctgggtccaaaatcttcaattgttttccaacctagtcccgtgttcgttcaatctgtgaaggtagaaaacttaaaggcaaaccctggcccaggacccattctttatgggacatatcggtatcccccacttgatgttgttaccacttggggagaaagtattaatgtttctcttccctctggctcatacaaggaatggaaatattatctgaattgtgggtcttcaataaatatttcgtatcacgtgagctctaagagctcttctgttttccttataatcgccgaaggggacgtgagcctcacacggtggctggaggacccaacagaacctaatacaactctgtcatggaatgtgatccatggaactggtatgatcacacaggacatattctggtcgtcgagctattatgtggcattgggcaatttggatgaggatgtggaggtagcattaaacctcagtataagggcctccttgcataatacaacgaatgctttctacaaatgtgatcttgccaatggtccatgcagtttgaatcttttgttttctgatggaagtgcagctgtcttagttactcctggtccacaacagaatgcatccaatgagtggtatgtcaaactgtcctatggaccaagatgggtgacctatatttttggaattggtggattgactttgcttgtgtttggggccttcaacttcttgaacaagcttcagtgtgctcatgaagatagagcaggagttagatctgagggaacagaacgtcagagagcccctttgcttcctcacaaagatgatgatctttcaagttggggttcatcgtatgagtccttgccacaagatgagaaggatcttggctttcttccaggaggccccattgatgggaagactttagttgatggtgaaaccagtaataacacacggcatctttgtgctatttgctttgatgctccgagggactgcttcttccttccatgtggacactgtgtggcttgctttgcttgtggaactaggatagccgaggcagctggtacttgccctgtttgtcgtaggaacatgaagaaggttaggaagattttcactgtttgatcagtgcacttcctagtgtagagattaaatgagtagtcaccagaatcatagaataccttttatgtactcaactatacattattttcttgccaatcattaacaatgatcaagcaaatggtgtctgctgatgagggtcgtattggccattgcagcattgcctactgtaatagtgactagatgaatagccaccggaatcatagattactttttatgtattcaactacacattattttcttgccaatcaacaacaataatcaagctaatggtgcctgctggtgagggtcgtattcagcattgcagcaaaaaaaaaaaaaaaaaaaaaaaaaaaaaaaaaaaaaa

SEQ ID NO: 29635 - DNA, 1486 bp, Glycine max
  Clone ID: TF_GmC121969_1
ggtttaatcaatcataaatatatgtagtttttagtcttttcctttggtctcaggtgtttccattcatggtgcacaacttgtgaaggttttattaacttaagagccttgcaaacaaatgtgctgaacaggttttggaaatcaagtctttaaaaacattgactgaaaagttacagaaggagaatcaggaattagagtttgttctggatatgcatggcctggagaattatgataaaagatattcggaagtaagagaatctgaaagtaaagctcactctcaagctgaaatgctgaaaaatgctttagatgagcatagcctagagttgagagtaaaagctgctaatgaagctgaagctgcttgtgaacaaaggctttctgccgcagaagctgaaatagaggacttgaggtccaagctggatgcatctgagagggatattttggagctgactgaggctgttaaagttaaagatgctgaggcagaggcatatatatctgaaattgagactattggtcaagcatatgaagatatgcagacacagaaccaaaatctgttgaaccaggtgatcgagagggatgactataatattaagcttgtatcagatagtgtgaagacaaaacaggcgcacaacactttaatgtcccagaagcaggccttagctaagcaacttcaacaaatcaatacatcaatagaaaattcaaagacgaggattacacacagtgaagagcagatgaaagctattctatccgatgccattaaatgtaaccaagaagaaaaacaccttgcagtcaccctggaatttgcaaaatgggaattggctgatgccgagaaggaattgaagttgctcaagtctgctgtttcctcttcagagaaagaatacgatcaaattcagaaagatacggaagctattgaaatggaattggagagtgaaaggagtttacggaagaagcttgaggaagaactaagagaattgaactgcaaaattgatgagctgacttctgaaactggagaaaccacgatacaaaaactcgaaaaagaaataaggatttgcaagaacatgatcaagtgtactgtctgtactgatcgtccaaaggaggttgtgattgtcaagtgctatcatctgttctgcaatccatgcattcagagaaatctagagcttcggcaccgcaaatgtcctgcatgtggaacagcatttggacagagtgatgtccgctttgtaaaaatatgagacaaatgttaagatagacaacttgtagataggtggtgattgtaatgttttggatcctgatcatagtttcaaacaagcattcctacccgaaagaaacctatgcattagagatatcagtattggttgcacttgtttgtgtatcatctcatactccctcccccactcttttgggtcttgactaatctaaagtcaacttggatgtacttattcaccgagacaactttttcaagtttcaattttaaacctgaaatctagtttagaag

SEQ ID NO: 29636 - DNA, 996 bp, Glycine max
  Clone ID: TF_GmC67144_1
ggacttccgctcgagtacggctgcgagaagaccacgcgtccggataatcaccccaccaatatatatcttgtggcaagaggtttatgaatgcatgttaggaggcagtgctgcacagattaatcatgagtcttccacaaactgcaactagccctcctccacatctgtatccacaggaacttcagctgaagctttaccaaaccttcatattctcaattccaatactcttctccatcattctctttctcttgttttacttgttctacctcaagagaagggcttcctctctctcttccactcctcacttgcttcctaggaccattgccaatccacccaccacctctccctatcattcctcaccttgtcgtttggatctgaccctccatttcctggataaacttccaagaattttgtttgatgaggatttgctagcaagggattcactatgttgtgtatgtctgggggaatttgagctgaaggaagagttggtacagataccttattgcaagcacgtgttccacttggaatgcatacatcattggctgcaatcaaacagcacttgtccactttgtagatgttccatcatccccactaccaagttcctcaacccagcaccccctattaacattatatcaacagacccaccccagcagcatggtgctatcatttcggacttcccattacaaattctatcattgccacctcagccacaagaccatcaagaagttgttggtgcttcctcaaatgctgctaatttgtcaagggaatgatacacattaattaattagcttgattataataatggtcattaattaatttcaagggagtattcagctacacatcaagattatggagtagttgtttacattttatgatatcaaaattttcttttgcccttttattaatttctacattggaatattcagccagtttgtggaatgtactactataacacagcttctcctgtcaattgtcatgacctttctggattggctattc

SEQ ID NO: 29637 - DNA, 813 bp, Glycine max
  unsure (1)..(813): unsure at all n locations
  Clone ID: TF_GmC96_2
cggttgcgccacgcgtccgctctctctctcactccaaaatcccaaaaccgaattcacattcacaaccacacctccgcaataaaataaaaaaaggtaacctccctcagtccctcgctcatggaagagctctccgcggggcctctcgtccccgccgtcgtcaaaccggaagcgtccaaaggcgccgccgtcgccgccgacacctccgaaggccgcggcctccggcggcacgttcccggcctccacgtcggagccggacaaggacttcctctgcccgatttgcatgcagatcatcaaggacgcgttcctcaccgcgtgcggccacagcttctgctacatgtgcatcatcacgcacctccgcaacaagagcgattgcccttgctgcggccactacctcaccaacaccaacctcttccctaacttcttgctcgacaagctactgaagaagacttctgcgcgtcaaatatcaaaaaccgcttcacctgtggaacatttccggcaggcattgcaaaagggttgtgatgtgtcaattaaggagctagacacccttttgtcacttcttgccgagaagaaaagaaaaatggaacaagaagaagctgagagaaatatgcaaatattgttagacttcttgcattgcttacgcaagcaaaaagttgatgagttgaatgaggtacaaactgatctccagtttataaaagaggacattaatgctgtggagaaacatagaatggaattgtatcgtgcacggnacaggtactctgtaaattacggatgcttgatgactctggtggaagaaaatcatggcattcatcaatg

SEQ ID NO: 29638 - DNA, 771 bp, Glycine max
  Clone ID: TF_GmC57441_2
gccctcacccgaagaagatgtgtttcccctggttatatgtgctgaaactactagtaattccgtaatagatgcatctcctcacatgcaaattactcaagctgtcttagagaaaagcaatggtattggtcctttccaggtaaaagtagttaggcagattctgtggattgatgatattcgttatgagctgagagagttatatggaataggaagttcaacagtagcagattttgatgataatgatcctgggaaggagtgtgtaatatgcatgactgaacccaaggacactgctgtcttaccctgccgacatatgtgtatgtgcggtgattgtgccaaagctttgcggcttcaatcaaataaatgccctatatgtcgtcaaccaattgaggaactaatagagatcaagataaacaatggcaacgagtgacaggtttttgcctgatgcgaagctgaatttcatggtatttttattttgtctttgtaaattgcagtcaataatctgtttatagttcatatgtttgtgatcaaagagaaaaaagatcatatgtgcttttactattattgaatgctactctcgtgtcatcaatattgtacagattattattttttatttttctgtgtgagtgatatttaagataggatcatttgtaggtctgatttggttagccggaaaacattcattatgtatcttgaggctaaaggttcctctaatgaattatgtttgaaaattatatatgaaggttaaatttaatcacataaagttatagtgttaaa

SEQ ID NO: 29639 - DNA, 1619 bp, Glycine max
  Clone ID: TF_GmC342_3
ggctcgagaatatggttggctgcttactatttggcttaatggatatttatagcaagcttgtaaatgccggtgtaagaaccgtgttttcattttgtgacaggatgttgtgatccttgagcatcaatcatttctttctggaatagctgatgttcatgatcgacacggggatatgcgacttgatgttgataacatgtcttatgaggtaaaatctcatttctgcatctggatgcaaatattaatatatctatacaaccataatgtcagtttatcccttgcttgtctttcaagatagtacttcattttagagagttagtttctcatgtgaagtttgactataacaggagttgttggctctggaagagcgcattggaaatgtgagtactggattgagtgaagaaaccctatcgaaactcttgaaacagagaaagcactatccacagttagagcttcaagttcaagtagtgaaaatttaagtattcccggaaatgttgcttcttcatcacggactggatcaaatccagctaccaatccctcatctgccacaactttttctcgttctaatcctccacagcatccacggaggttatctgaatatgttcgtctcgtttttctcccagttctgatgctattggaagtccaagccataattattcttccttgcgctctggtctttctacatctgaaccaagggcgttatcatctgggagtggggcaaacccgagatcagcttcatggttggagaggcaaggtgatagtgaatttggaattccttattcactacgtactttggctgttgcaagtgaaggaggaagtagtagacttgtatctgagctccgcaatgttttgggccttatgcgtagaggtgggaatgtgcgatttgaggatgttgtgatccttgatcatcaatcatttctttctggaatagctgatgttcgtgatcggcacagggatatgcgacttgatgttgataacatgtcttatgaggagttgttggctctggaagagcgcattggaaatgtgagtactggattgagtgaggaaaccctattgaaacacttgaaacagagaaagcactcggctgaaaaagggcctcagattgatgcagaaccctgttgtgtttgtcaggaggattatggtgatgaggatgatattggaacgcttgattgtggccatgatttccatagcagctgtatcaaacagtggttaatgcataagaatctttgtcccatttgtaagacaacgggtttggcaacatgatgtatgtgacgaatctgtcctcaggcaaataccatgaccatgaaggaaaaaaaattggcgcaatttacccaggaaattctggtgtttgttgccttgttataccttgttttctatctgtagcctagtaaattgtcgtacctgactgacaaaggtttcccctacccttctctcccgaattattaactcaagtttacaaggtttggtttacgtttatgaaatttttttatattgctcggattggatttatgctgaacggaaaactaggtacaaaaaatattattcaaatataatcgtaggttctggatttgcgcgtttaaaatggttttatttgtttattattaaactaagctctcgtaattgct

SEQ ID NO: 29640 - DNA, 1483 bp, Glycine max
  Clone ID: TF_GmC23452_1
catccctcatcttctctgttctatagcaaaaaaacagtaatcataacttgatttagatctcaaaaatcttgatcatcaccatcattacctttagatctttctcccttttgctcactatcactctcagtctctcacctatccacccaacatgccttctagggtttccattctctgtgtcactgggacaatacaacagtcccaattctcaccctttcacaccaccattctctgattcaccctccaccctcatatccaccaaaaaagcatgcatctttggtgccactgcctcaaacccacttcagattctcctctgaaacccactgagggtgttgttggcggtgtctcttagtgttcattggtgttcactgttcaatttgggggttttaatctggaatctgaaattggatcaatttggagtttatttttggttgcaaaatgatttcttctgggattaacttggtgatgactgtgattgggttcgcggtgagcaccatgttcattgttttcgtctgcaccaggctcatatgtgcacgaattcacctgaatgctgcaaggagatcctttcctattgcctccagatccaatctcagcatgatggagcgtggttgccatggtcttgaacgcgtaactgtagccaaatttccaacaaagaagtacagtgacaagttttttgctgcagcagaaaattctcaatgcacagtctgcctctcagaataccaaggtgaggatatgctgcgtatcctcccctattgcggacactccttccatgtgacctgcatagacttatggctgcagcagaattccacttgtcctgtttgtcgaatatcgttgcgtgaatttcctgatagaaagcggttaatgcaacccctgttcagctctgctttgcaacctcactatgacatagaatcctttgacaatcgtcattatcactgtatgatagctgataatggattatcatcaagaacccctgacaaccatgcggtgaatcctatagaagaagatcattttccatccgagggtgatggagcagttgctatggacaatatcacctgtttaagtgagggtgacttcattaaagatgaagggaagaaacatgtagagagcccttcaaacttccggatttgattggtttcatggaagttgaagcctcaatatgatactttgaaatcacaaattgagtataaagttaatgttccaaaattggagtgaaaatgtgaaatgcattagcatgctgaaggatggttgatatcttttactgtatatatagctgagaacaccccccaccccccgaactgcactttactgtcttctcctttgttcttttcttgatcttcaatactagatagtatttgaaactctctctctctctctctcccttcctaattgtaattgttgtaagactagaattagttgaataccccttcaaaactttgtattaatgcaaatccgtacagtgcaattaatgtatcttgtttttttgtcc

SEQ ID NO: 29641 - DNA, 1077 bp, Glycine max
  Clone ID: TF_GmC170148_2
tgtaattgttgcatgtcaaagaaattggttgatcacatatgccgggaaaagggtttagaaacaaactgccccatctgctgtgattttttgttcacatccagtgaatctgtcagagctctcccttgtggacatttcatgcattctgcttgttttcaggcatacacatgtagccactacatctgtccaatttgtagcaaatctatgggagatatgtcggtttactttgacatgcttgatgctctactggcttctgaggaactcccagaagaatatcggaatcaatgtcaggatatactttgcaatgactgccatgagaagggtactgcaccatttcattggctataccacaagtgtgggttttgcggatcttacaacacaaggttaatttgaattgaactcgagtttcgattgctctaatatcaaacttgtgatgactctatctcaagtgcattttgtgtaaacaaaatatgtgcatgactctcttgatcagaacgaaaacaattaaccaactgatgagtaacaacaaagagctacaagcagcaaagcccaatgtgagtaacagcaaggagttgcaaacagcaaggcccaagaggcaaagccacactcctagtcatttgaaggattacgtattagttgcataatcattcacgtgcgcatgcaagttagtaacagctgcacttgtatcttcctcaagctttgggactaagaactattattaaggaatctaacttccctctattgcatcgttattatcctccggcttttctatacataccataatccttgaaaacacaacagctgagattgcacccaacattccggctctttaccacgctcactttgagattccaatgtcagggcctgtgatcaaccctattaatattatgctaaatgcatacacagtagcttttattcttgtgcattgcacatctgcagcaacaatagtgaatcaagaacttctttctttgacacaataagctctgaaaaaacgtctgacaaggccaacaccttctaccctccatttttaatagtcatcaatgatgaatattgcaaccctacggcacttaactatgctct

SEQ ID NO: 29642 - DNA, 1779 bp, Glycine max
  Clone ID: TF_GmC1361_1
ggtgtgtgaaattgagtgacttggttttgtagatgtctggtatcccaagtgggcgatcctacagcgatattctcttctctcctcctatgcgccttatctcatcccaagtggtcattctctttttctctatcactgctgcctgcaaacaaaagatatttatattgcattaaaaagatgaaaaaaaagggcaagagtgtgtggtccttttaagttgaacatgatggaatggctcccttcgcgtctttctcttttgggtatcacgccacacgtcttcccaaatcaggaaacactttctcatcttccctttcccagtctcacaccctaacctcatggaaggctctgtcaacgaacgtcttcattttgggaagatgggatatggatgcaatcattaccggagaagatgcaggattcgtgctccctgctgcaacgagatctactcatgccgtcactgtcataacgatgccgcgagcttgttgaagaatccctttgatcgccacgagctcgttcgccaagatgttaaacaagttgtttgttcattgtatgccatttatttgcctatttcggatacgggcacaatcagtatcgaagaaattgcagaattagagcaccatgttgccatgatctctacttatgatgtcattttcgtaccaagtcactgtgctgactgagcgacctgctttgttggggacgaacttgtctggccacgatgttcaacatgtggtctttttagtttgtgacactgagcaaccagttgctcaagtttgcacaaactgtggtgtcaaaatgggagaatatttctgcaagatctgcaaattcttcgatgatgatactgggaaaaaacagtttcattgtgatgattgtgggatttgtagacttggtggtcgtgagaattattcccactgcagtaagtgtgggtgttgctattcaactagtctgcgtgataatcatttgtgtgtggagaactccatgaggcatcattgtcccatttgttatgagtacctttttgactcattgaaagacattgctgttatgaaatgtggtcacacaatgcatagtgaatgttacctagagatgctaaagcgtgacaagtattgttgtcccatatgctccaagtcggtgatggacatgtctaaggcatggaagagaattgatgaagagattgaagcaactgtcatgcctgatgattatcggtacagaaaggtttggatactatgtaatgactgtaatgacacaactgaagtttacttccacattcttggacaaaaatgtggtcactgcagttcatataatactcgtgctatagctcctccagttctttctcaatgactagattcttgcggttttggagacagattttttagggcagaaaattaaaattatgactcaattatgcagagccttatttgattcatcatcaagattaatgatgtactgtgccctgaaacttttctagggttactcttcctccaccatttggagtaggactagtggtgttgttatgagccactaattgagttgatataaacatgtgtatattgtaatatagggtaatgtggtttagccatcatgagctgctagtaatcatgtttgctagtgacgtgttgatgttggaggttgcatggattggcttgtctttgccattattgaatttaatcaacacaacagactcaatgatttcttccctgcataaatcaatcatatgctattacctttatagtgattgaaaaaaaaaaaaaaattcctgcggctgcgaattcttccctcgtgccgaattcttgg

SEQ ID NO: 29643 - DNA, 1019 bp, Glycine max
  Clone ID: TF_GmC1701_1
cgacccacgacgtcacagcaagagggaaaataagcctggaaacgatggaagatgatgacccgcagcgattgaggtgaggaaccatgtttccccagaaccagagccagagtcggaggaggattccagttgttgttgcccaatctgcttgggaccattccttcaactttcctacctcgacaaatgttttcataagttttgcttcaattgcattttacgctggaccaaggtggttgctggcaagcaccgttctccaccttcttctgtaaaatgccccctctgtaagttttatcttatcaagagcgcacagatatagattacaatgctattacactgaacaaggtttcttagatgacatattcaatatatcgcaatattggagatctctaaagtacaatcagccaaactgttggcttgaaaattggttaagaagagaaattcaagctcttatccaggaggaggatgttgacatcattttgcaccatatccttgctgtggtcaaagcagcattatggactaggagagagcagaagtcacacatgaatgcacctgaaaagaaacaggaggagttcaagatgtcagtctctgaagccgcaaggccttttctggcagcaagaacggacagatttgtatatgagattcaactatttcttgcttcgggaatgaatattgaagcttatgatgctgcttacatacaacggttaggttggagctcacctggggtaaacactgaggtttctcatagtgaattggttgatcgctcaactgtgattccatacatgcacctatttgatggtgactttgatgaaaatgagtagattctttgttctgtttttctcatgtatttgctgtaattgctacccgaatgaattgtataggagaaatttgctcacacaccaatgagtgctattgattctttccagctactgcagaagttgcaaattctccacccaagggtgtaaagttgtttaacatatgtttgttatcaatatcatattatattggttaaataaaaaaataaa

SEQ ID NO: 29644 - DNA, 895 bp, Glycine max
  Clone ID: TF_GmC122884_1
tgttattgaattattaaatgctgctaaataatgacactggcaagtggcaataataatgggaatgaacaaaaccacaaaagaaacttgtaatatgtaacacgttcgttggttaagactctcaagtggtggttgaaacctagcaaatatggataataagcaatgtccaatgaaacacgcaacgctacagtttcatcttcttcttcaaagttcttctaatccaaatttagaaccacttcttcttgtcttctcgctgacaccgaccccaccacctcttctccacatagcagctcactgcaccggcacacggcgcacgtgacatgcttatcgagccacgtgtcaatgcagtgcgggtggaacacgtgcttgcagtacggaatcatcttcaccgcgtccccctctcgcagctcctccaggcatatcgcgcactccgcgcacccctccccgcagtgcgccaccaccggcaggcacttctttgcctccgccgccgctgccgcgccctcctcccagcggcggcggtaggatccggcggcggcggcgtcggaggcgaactggcggaagtagaggaagacgaagccgacgaagaagaaggtggtgaagaggatgaggaagacgtaggccacactcgatgaaaaaactggaggaatcgaaacctgcagtgggctttggaattggaaagccgaagattgcggcggcgaggatgatgatgcgttagtggcgtgtttggtgtgagtgtgagagagaggtggcatcgagaggggaacgtcctcgttctgtagtagcaatctgcggttccagaattccatgtttttaattctctgctaccaaacactgccttatactctaatgtgtttgttgtgataactgagaagagaataataaattaaagttgcagtgt

SEQ ID NO: 29645 - DNA, 1396 bp, Glycine max
  Clone ID: TF_GmC938_1
cccggctgcgagaagggaaaccagattaggggaaagaaagaaggaaagcaaagtagacgagtgattgcgttgcgattgacgacgacgaggaatcatgtcttccggcggcggcggtggtaagccgttcttctgccacgtgtgcagtcagaggattacgtgctccgatgagtcggaaccattctgcccgatgtgtatggaaagtttcgtagaagaatgcaaccctaacaatcccaaccctaatctcttccccgacagtgatgaatcttcggatcccgaactccccttccaccgcttctcacttctccctctcttgctctcatcagtctctaggtcccgatccgaacccgacgtgttcgacccgatggtcttcctccagaaccaccttcaggaccttcgcgccgacggtgccaacattcaagttgactttgaccatccttccaacgagaatcaaggctttcgccttgcgaacatcggcgactactttatgggccccggcctcgagcagtttattcagcagcttgccgacaacgaccccaaccgctacggaacgccgcccgccgccaaggacgccgtcgagaatctccccaccgttaccgtcgacgacgacttgctgaactccgagctgaaccagtgcgctgtctgccaggacgagttcgaaaagggttctaaggtgacacagatgccctgcaagcacgcgtatcacggcgactgcttgattccgtggcttcggctgcataattcatgccctgtgtgccgctatgaattgcccacggacgacgccgattacgagaacgaggtttcacggtggtgatgctgggtcgaggacaggtgggagcgacggtggaggtgggagtaatagaccttttcgcaggactgttaggatatatttgcgccatcctgatgctggtgactctgcgcaggacggtgctgaaagggaatggagatggagaagttgagattgaaatttatgttttgtttcatgttgaaaaactggaaactatcttgtgcagctctgagcttccgtgaatagattgtagcattgcaatgtttacagaagtccttgtgaggaatgcaagaaatgttatttcccgtggcaaggaactttgttcgatcaaaggtctttgtttgttatggtagtagatagctggaacatgggaatgcacgaaaacacaactattgagattttaggtactgtgttaatgagcgttgataagaaacttcccgttacttttgtacagatcatcttccaaacatccaatattgattatcgtccttttgtacaatatgaactagtcatggtctatattgctcctgtgtgtgtgtataaaacgttttaatttagaaaaatgttcttttgacctatttagaaaaggtttaatgttacttttgattcatt

SEQ ID NO: 29646 - DNA, 1296 bp, Glycine max
  Clone ID: TF_GmC10535_2
cgagaataaaacaaacaaaaaatattcaaagatacagagaaccataaccaaagcccgatgagccaccttcctgaaacccaattcctcaatagtttctcacccttctcttctcttcatctactctttccaaaagaattgatgtataaagtctggtggcctctgatgtgatccccttttgatgtcaaataccagaagagaatgaaactatgattgattgatttgattaagtaaaaagaattagtggaaaatgggaggttgctgttgttctgccagaaaacctcatctgcaaggggcaccagtgtattactattgcccaccaacttttgaagagcgtgagtctttaacatctaatgatggcttgaatgcttcagtcaatgctggatttcttattggtttgaacctggaagcatccatgcctgatactttccagccccctcctgtgcctctaccttatgatatggtcttgggaggttctgcatcaacagattctgaatctggcagagaaacagttagtagttttgaaacttcaattacacgtgaagatgttgaagaatcagattgtaaagctcaagccaattctgctcttacatcgccaaagaaggcacaactaccaaaatcaaatgtaactcaagaattagtgacagaagaagaggatgtctgtccaatttgtcttgaagaatttgatgttgaaaatcctagaaatttgacaaaatgtgaacaccattttcacttatcatgcattcttgagtagctggaaagaagtgactcatgtcctatatgtgatcaggagatgatattttgaccagacaatgaattagtttgattgttctaaaatcaagcttgtaaaatgaatggaagatagatgaagatcattttatgataattggttagatgatggtagctacagattcattttcaattcgtggtgcattgacaaagtcatcattttagtaggcccaacctttggtcacgaggttttgacggaatgccataccatatgatatagcatatctgttcaaatgcaattcctttggtcagaatttgcccgttattattagtggaaaaaatgcggcaattctgtagatgccaacatttattttcacagatgcttttctatttatttactgctctccattctcttttgtaaaaaaattctcaatatttatttgtcatgcctgatttacattttcattgtatatatatacactagtggatttttggggttcagtgtttttgcaataagtacttaattatcaagtatacaataagacccttttcctattaaattttattcct

SEQ ID NO: 29647 - DNA, 1607 bp, Glycine max
  unsure (1)..(1607): unsure at all n locations
  Clone ID: TF_GmC260_1
aagggccaatcgctagtgcanttcgantgncnnnctncntnnnttnnttnnnnggnnaccnncccnnnntnatatatcctccccctaaagcttcaacctttgggacgccctactttttttcttctatcttcattgatcatcacttctctttcttcattttccttttcggtgggaattaggataaccctcctcaatttttcaactctaaatttgatcatcaccttcacccactttactcttactaggaggaacccttctctctgtgtgtgtgttctgagttgattctgtgcttcagctttccacaaagtaaagtagaaagatggcaatgattccttaccacctttgccgtttaccttaccaggattccctcaaagcacttgaggctgatatacagcacgccaatgctttggctgctgcaattcccagagccaagggtgagactcttcttcaaatgaaattggtttacaatcacttggctcctctcttcctgttatttctacaatggatggattgttcttgtgcaggctttctccataggtatctcgacctcttccacatacttatttacaaggtacataatgatggtagatcaatcatgcctactcatggaaggaaggctaccattggggacttttatgctgttatattaccatctctccaacggcttcatggtagtttggagaagttggaggttgttaaagaagaaggccagtcaagcatagaaggtccaagttatggcaagaaggtcattgaagaaggtgtgaaactaaccgccaatgttgatttgcaaagagaagatgaatgtgggatttgcttagagccttgcaccaaaatggttttacctggttgctgccatgccatgtgtattaaatgctaccgcaagtggaacagaaagtcagagtcttgtcctttttgccgtggtagcttgaggagagttaattcggaggatctatgggtattaacttgtaatgatgatgttgttgatgctgaaacagtttctaaagaggacttgttgcgtttttatctctatgtcagcaagctgcctaaagatcacccagatgcacttttcctaatgtattatgaatacctcatttaattttctactaaataagaagaagaaaaaaaaaatgtacagataggaaattccggactgcaaatgtgaatagagtctggtacaaaaagaaaatactctggtaatttaatcacagttgttatggtaagagaaatttctggttttttagtccagaaaaaccattcttcttactcccgtgatatatctccattgtagacattgttcttgcaattaacttggaattccttgcataaaggatccattaagtttattaaatgctaccgcaagtggctacctttatatcaacagcttacctaaagatccccctgatgccctttttttaatgtattatgaatacctgatttgatgttatttttactaaataaggagagagagaaattgtccagatagggaaatccggcctgcaattgtgaatagagtctggtaaaaaatatttttaatttgtaaggcccagctctgctaaaataaatttttgttattctagcccagaataacccccctcttgccttgttat

SEQ ID NO: 29648 - DNA, 453 bp, Glycine max
  Clone ID: TF_LIB3242-254-Q1-J1-B6
ggctcgagccgtttcggttcgagcacttgttccacccttctccaattctcttatctgtattcaggcactcttcaaagaacactttgtgagtcaaaagagacatggccttagaccagtattttgaggaggctatgccccagttggattccttcgaagataaatcgtttctcgaaacatggaaatgtgacagtgacgatatcgcagattctgatagaaatgcctctggtgtctttgattgcaacatctgcctggagtgtgtgcaagatccagtggttactctttgtggccatctctactgctggccctgtatttacaaatggcttaatttcctaagtgcctcttgtgaaaatgaagagaagcaacaatgtccagtatgcaaatcagaaatttcacagtcatcccttgttcccctatcccggccgcggccaaactgagttaccttctaaaggcaaa

SEQ ID NO: 29649 - DNA, 1800 bp, Glycine max
  unsure (1)..(1800): unsure at all n locations
  Clone ID: TF_GmC631_1
cacgcgtccgctcccctctgtctctgatgcggtggggagtggggacagggagggtttgatggatttctagcattcaacccttccttttctccttgcctctgtcctgacccgttcttttcttctccatgcattcccagaaagttgtagagatggaagacaagacagaaagtcatatgagttcagctgcggcctttgttgaaggggggattcaagaatcctgtgatgatgcttgcagcatatgccttgaggagtttggtgcaagtgatccttcgacggtcactacctgcaagcatgagtttcatctgcagtgcattctcgaatggtgtcagagaagctcccagtgtcctatgtgttggcaacctattagcttgaaggatcctactagtcaggaattgtttgaggtagtagagcaggagagaagcttgagggctaccccatcaagaaatgctgctatttttcatcaccctgcctttggagattttgagttgcagcatttacgcatgagtctaaatgatgctgattttgaagagagaattattcaacatttagctgctgctgcagcaatgaggagagctaaccaacttggttggagggaagggcagcgagctcgttcatcagctcatggtcatccacaattcttagtgttctctaatcagcctattgcaccttcatcagttgctggaggagaaaatgacccaactgcaattcctaatagaagtccatctaccccaataacatccgttggaaatgaagcatcgcagcagatcctgcaccttcaaactcaaagttcttcttcagcttctggatctcctgtcatggctacaaatcctcgaggaatttactctaatgaaagaggctctactgcttgttcttcaccagcaaaccaagatagagcagagccatcagagttgcagtcattttctgattctctgcgatccagacttaatgcagtgtccatgagatacaaagagtcaatctcaaaaggcacaaggggatggaaggagaggctgttctctcgtagttcttccatgtcaaaacttggttcagaataaaggaggagagagataaattctggaattgctagtgtatcccgattgatggaatcccttgaaactagtgaaaataatagagttgtgggtacttctttgtcaaatcatacggagggttgttccataggaggggtgagcaaccagaacaatgttgaagctagaggggagaactcttcacatgatgacaatactccagctgcttgttctgctaactcacatttaaattgagctcttttttggtttccgttaatgcatctctcctcagcatctcatatttggaggtaactttctcacgacatgacatggtgaggagcagatgctttggaaatagtcgtgtggcatttacgtcgtggtttgcaataaagattaagatctgaaaaacagctgtgcttatagctaaaaagttaatgtttctatgtatataaattatgcctggaacagtgaagagttgtgcgtgtctgggtgaacggatttttaaactggcatgtactctggacatcaatctatccatgggagaaaaatgctatgaaattcaacagaacttatgccacagttgtgcttatagctaaaaagttaacgtttctatgtatatatattatgtgcatggaacagtgaagagttgtacgtatctaaagtgtctgggtgaacggatttataaactggcatgtactctggacatcaatctatccgtgggggaaaaatgctatcaattgcgaaggatcttgtgtccgtgacccnnnnnnnncccccc

SEQ ID NO: 29650 - DNA, 668 bp, Glycine max
  unsure (1)..(668): unsure at all n locations
  Clone ID: TF_GmC67144_2
gacaaacaagtgtagaagaagtttttcattatagctccttttgtacttaaaatgaaattgtatcattttacggctgcgagaagacgacagaaggggatgaatgctaggaggcactactactgcacagattaatcatgagtcttccacaaactgcaactagccctcctccacatctgtatccacaggaacttcagcttaagctttaccaagccttcatattctcaattccaatactcttctccatcattctcttcctcttgttttacttgttctaccttaagagaagggcttcctctctatcttcctcttctcacttgcttccaaggaccattgccaatccaccaaccaccactccgtatcattcctcaccttgtcgtttggatctgaccctccaattcctggataaacttccaagaattttatttgatgaggatttgctgacaagggattcactatgttgtgtttgtctgggggaatttgagctgaaggaagaggtgctacagataccctattgcaagcacgtgttccacttcgaatgcatacatcgctggctgcaatcaaactccacttgtccactttgtagatgttccatcatccncactaccaagttcctcaacccagcaccccctattaatattatatcatcagacccaccccagcatggtgct

SEQ ID NO: 29651 - DNA, 1664 bp, Glycine max
  unsure (1)..(1664): unsure at all n locations
  Clone ID: TF_GmC871_1
ggccggaaggtgttttgagccccactcaaagtatgtgccttctaacttttaagtgtggcgtatgcttttggtgtancatcttttatccattcgctatttgctgcgggatagtcgttactaataatgctttttgctctagcagctttaaccattttctattttgaaagagtctcaattggtgcttatgaactaatgttgctgttcggaatgatgccgttgaactattgaagtcggtgcgggcccgagcttcttcccacttcctccgccgccaccgccaccattcttaacaccgatggcggatccgaaagcctactcaatagtagtgcttcttcacttcttccctcctccgccaccgccaccacaactaccaccacggatggcggcgacggcgacggcggaagcgaaaacctactggtgccacgagtgcgacatgagcgtgtccctgactctcccaccctcccctctcctctgccctcactgccacacccacttccttgaactcatggactccccaagcctctcccaagaaaacgacgccgaatcatccctcttcgatgtcgtttttcaagacgcactcttactcctcaaccctaaccctaaccctaaccctaagccacttccctccaaaccccttcccctcccctccctctacgtcaccccctccctcctctcctccctcgaccccaacggcgtcgttctctgcgccgtctgcaaagaccaaattaccctcaacgcccaagccaaacaattgccctgccaacacctctaccactccgattgcatcacgccgtggatagaactcaactcgtcgtgtccgctatgcaggtttcggttggaggaagaagaggaggaaggtggtgacgccgacgctgacgccgacgccgttatgacggagatcaggagggagatcattgcgaggctgacggagctgacggaggaggatttctacgggctcaggaccacgctcagccacattgcctcgcgccacgcgctcatcgaagagaaccagaatcatcgcgcgcagattggcgagcctcgcggcggcggcggtggaggtggcggcgattcggcttgctgataacgacgtttacaataaggtatatagtttattaaataatgttgaagttgtatcaccatagatcgtcttatcaagtgtaaatctgcaccgacgattatgctgcttttgttcttttccctccttttttgggaatctccaactagctagttgtagtgctatagccaaaaatacaataaatttgatggagtgcacgagtaatgtgcatttctcctccatcttccactctctctatgttggtcacttggtcttggaactggatttccttacccaaatttcccttccaatttaggcaataaaatcttgtgtaaaacttggctttcttttgtgctgtgtctgaattgtccaagtggatgatggatccttcccactgaatcattttgttcacaattttgttttttgttatggatttacagtagatgatattttttcctgccaatattgctgtagttatggtatgagattgttgagggattgaatcatttgagtgtggatgtgtactattgaatagccttaaaatgcatattttgttgtggtgtgtaagttttgttctgatctttactcatgtaatgaatgcagctggttaatt

SEQ ID NO: 29652 - DNA, 1218 bp, Glycine max
  Clone ID: TF_GmC292_1
ggctcgaggatcaaggtgaagtgctatgctacatggtgcggctggcgattcagcggttccgttccctcttcagacaccaccactgaggagtttctcaatgagaaccaagttgaccaccccgtgtggctcattgccactgtggggttgcaagaatcgatcatcaactccatcacggtttgcaagtacaagaagaatgaagggttggttgaaggaaccgagtgttcggtgtgtttgaacgagtttcaagaagaggagacattacgactcttgccaaagtgcaaccatgcttttcacgttccttgtattgacacttggttgagatcacacacaaattgccctctttgtcgtgccggtattgtttctaatagtgtcaattctgaagcaccagcacccgtgtcgaattcggagcaagaaaatgcaaatttggggaggaatcaagatacccttttggacaattcacggattaatgaaggtgggttaagcagcaacatggttgctggggaatcaagtgaagcaatagatgaatcaaattctaaggatcgggtaaatgatgaaactcagaacaatggggttctgatgaatattgagattcaaacagagatggggtctgtttcaactacagaatgtgaaagtcatcgtgttgttgatgatcataaacatgatgatgacacaatgttgcacacggataatctagggaagcaagatcaagatggtgattactactactcaaaaacgtgtaaaacagtgcgtcgttcctctattgaagagtgtttgcatttaagcccagtatctatgaaaaggtcattctcctcttgcaatggaaggactctaacttcgagaggttacatgagtctaaactctaaactcaattcatccctactagagttctcattttatgaaagatgaacatattgatgagtaacatgatgatttgatgtccattttactctcagaattttgagggcaccctaggttggagtttgaacattgacaatggtataaacagcaaattgtgaaagagaaaagaggtcaattttaatgaagaataaaatgtaaaattgtaattgaagttttaccaagtgctcgggcattgaaaataactctggtgtatcatgtatgcaattgtatcacacatcacaatgcccagtgttgcactgcagaacaggtttgctcccacaaaagggaataaggtacattaaatgctctattttttgcttc

SEQ ID NO: 29653 - DNA, 577 bp, Glycine max
  Clone ID: TF_LIB4164-019-Q1-K1-G8
ttccggtccggaattccggtcgacccacgcgtccgtttatttggtaacctgactttcagaactagttttttacagtgatgaatttatatatgtattcctgcgtagactgttgttgacaggtacgctttggtttacttgtttggcagaatttgtgtgcaatatgtttagatcctctgagtcacaaaagcaaaggcagcaaagctatattcactgctcagtgctctcatgcattccactttgcttgtatctcctccaatgttcgccatggtaatgtcacttgcccgatttgccgtgcccaatggacccagctccctcgcaacctgaacagtggttcaactatttctactaaccgaagtgatcccatcctgcaaattcttgatgattctatagctaccttccgagtacatcgccgcactcttttgcgctccacccgctatgatgatgatgaccctgttgagcctgatgatgcacctgagatacacaagctgcgtttctctcttgcacctattccaccaaaggcacctactagccatctatcccctcatcccttatcctgcgggtcctcatcactgttaca

SEQ ID NO: 29654 - DNA, 1471 bp, Glycine max
  Clone ID: TF_GmC1275_1
ctcgagccgattcggctaaagaacatctcttgctcttcccactttctctctctaaagaatataatactcaaaattcatccatttttattttatttttcttaaaaaacaaagcgcgtatagtctcacgcgcccgacgatgggttttcccgtagggtacccggagctgctggttccgaaaatgttcctccacgcgctctccctcctcgcgtggctgcgctccctcgtcttcgccctcttccgcctcctccgcatctccgacctcctcgacaccgattccgccgcctctgacctccctccgccgcctccgccacgcgagccgactctctccgccctcctcatccgcgagttcctccccgtggcggcgttccgcgacctggcagccgccgacggggatcctccgccgtcgggctgcgccgtgtgcctgagcgaattctcctcggaagaagaaatccggtgtatggcgaactgcaagcacattttccaccggtggtgcgtggaccgttgggtcgatcacgatcagaagacgtgtccgctctgcagaactccgtttgtgccgcatcacaagctcgaagaatacaatcagcgactgtgggcagcttctggagtttcacagttttactaccaagacgattacacggcttctctctgattttttttttctctttctttttccacttatatatttataattatatagcactatatctttttttcatattattattatggtgggggacttgacagctagtgtagcgaaatgtatatagctaattaaaacaaaaacattgtatcaataaaaaaaatcagaattttttggattggtatatacttttttccaacttttacttctatcattctgtgtactacgtacaaattttcattatgtttttaggtttcataaaatgaaattgtgtcagtttttaacgtggaagtaggttggagtcaatcgatccatacttgcaatgatggttttttataacaattatgtatataattgataattaataaataatataaatgtgatattttttttattaattatgtatctaattgatatgaaatatgatattttttatattgattattcatttaattaatataaaaaaacaatgcacataaattcatatgtcttgaatcctattttgaaaaaagaatatattttaattttatgagaataaaaaatatactaaaatttttacactaataaattttaaatatttttatatttaagaaaaggaaaaacaaattttagttatttaataataaggtggatttggattaagtgtttttaatttgtattgttatgatatgtgatggcaatattcttgttatgttgctagtgatattgggtcttcctaaaccggggcatagaaattagagttattcttttttactagtaatatttatagtgtgaaatagtagtattattttaacgatgcttgttaacttgaaaaattaatgtgtggttgtt

SEQ ID NO: 29655 - DNA, 1328 bp, Glycine max
  Clone ID: TF_GmC1703_1
actcaccaactcaacatcatgtcaaataccaatgaaagcaactactggcgcattttcttcttcgtcttcgtctcctctttctcaatttcgatttctcaattctcaattctcaatctcaaggtgaaatgatgcactcagtggcaataattacttttggatgctggagataaggcgtgatgggcggttgctgttgttgttgttcttctaaggagactgtgttgagcgctccacctgcgtactactattatccaagagcatcagaagagcatgttcctctatcttctcacccgggtgctgcttctgctttctctgggcggctattggttgatactaatctagatacttcatctcctgatacttatagacctcctcctgctcctatccctttcaatgttaccttaggtaccactcaaactccacctgcggctcaagaaattcgtagtgacaagaataatacttccttgccttctacaaattctaatgcaattcaagaaccagttgctagagacattcatgggacctcagctaagttggaagagccgaaggaatccgagtgcaaagttcagactgatctggagctagattctgcaaagggttccgaaattgaacttgctaagtcggggaaacctatagatttagtggaagaggaagatgcatgcccaatctgtttagaagaatatgatgcagagaatccaaaactcgcaacaaattgtgaccatcattttcaccttgcatgcattctggaatggatggaaagaagtgaaacttgccctgtgtgcgatcaggatttggttttcgaccctcccattgaataatacatcaacataggagttcaaatatactgtgtagtgtttgagaagcgaggttacaaagtcatgagtttaatatgatagcaacccgaacttatggctgtattttgattgtttcgttttctgagttttctgggtttattccattttttactcagagtccctgcgttgcagcatacaggaaattaaaggaaatattctctgtttataatttcatcatttagaatgtttttaagtgatagccggatactacatgcgaaaacagcggtcgatatgatttctcttgtggattgtaagacttttgttacattgtcaaagaatggtaggatgttctcactctggttgtactgctttcatgggaataggagtaattcttgtttgagttattactttcaataacttttttgtatatattaaatttcaataatttaacagttgcatattttgatattatctcaagatttcatgcacagaaaaattgagataaattgaacatttgtagttaaaaaaaaaagaaaa

SEQ ID NO: 29656 - DNA, 1315 bp, Glycine max
  Clone ID: TF_GmC1703_3
ggctaccaacgaaagcaactactcacgcagtttcttcttcttcttcttctcctgcgcttcgtctcaatctcaagcgtcaattctccatcgccaatcctctctttctgctgatttcggactcgtcacttacttgtgaaatgatgctctcagcggcaataattacttttggacgctggacataaggcgtgatgggcggttgctgttgttgttgttgttctgctaaggagactgtgttgagcgctccacctgcgtactattattatccaagagcatcagaagagcatgttcctctatcatctcaccagggtgctgcttctgctttctctgggcggctcttggttgatactaatctagatacttcatctcctgatacttatagacctccccctgctcctatccctttcaatgttaccttgggtaccactcaaactccacctgcggctcaagaaattcgtagtgacaagaataatacttccttgcattctacaaattctaatgcaattcaagaaccagttgctggagacaatcatgggacctcggctaagttggaagagctgaaggaatcagactgcaaagttcagaccgatctagagctagattctgcaaagggttccgaaattgaacttgcaaagtcggggaaacctatagatgtagtagaagaggaagatacatgcccaatctgtttagaagaatatgatgcagagaatccaaaactcgcaacaaattgtgaccatcattttcaccttgcgtgcattctggaatggatggaaagaagtgagacttgccctgtgtgcgatcaggatttggttttcgaccctcccattgaataagacatcaacgtgggagttcaaatatactgcgtagtgtttgagaagcaaggttacaaagtcatgagtttgatatgatagcaacccgagcttatggctgtattttgattgtttcgttttccgagttttctgggtttattccattttttactcagtcccctgcgttgcagcatacaggaaattaaaggaaatattctctgtttatagttttatcaattagaatgttttaaagtgatagctggatactacaagcgaaaacagctggcgatatgatttttcgaatagattgtaagacttttgttacattgtcaaagaatggtaggatgttctcactctggtggtactgctttcatcttatatatatgtatagggtgggaataggagcaattcttgtttgagttattactttcaataacttttttgtatatattaaatttcaataatctagtagttgcatattttgatattatctctatttcatgcacacc

SEQ ID NO: 29657 - DNA, 1577 bp, Glycine max
  unsure (1)..(1577): unsure at all n locations
  Clone ID: TF_GmC1254_1
ggctcgagtttggagaaaagtagtaatcctatctttaccccatcaaacaattgtcttctcaaaagaaaaatccagattctctgcattccacataacttgttagttcctttgcttccaagaccagtttcggattattgttcactcatctcattctcttgttaatttctctacacatattctctctctcaagtctaaaccatgcctgttgtgacagaacacatgaaatggagaagaccaagaaaccaatttaggaaccccatttcagaaaccgatgatccaatcactcaaatcccttccataatccaatcctctcacagcaaatccaccatctcctctctcttgtcttctttctccacctccggtgaaaccacacatgccagagaccaaaacagaaccaacaacaacaacaaaagcaacagaaaattctctgcagcaaccttcaggggcttcggctgcactgccggttcatcgcagaaggtgtcggtgccggcggtgattcgctcctcagcagattgggaagggaagaggaacagaaagaagaatcacagaaggaagagtaacagtaacggtaacagtggctacaacacatgtgatgatgatgataaaacttgatgtggtggaggactgggtaacactcagggagcgttcatcttattttggaaggcgcactgtaaagccagaaagcttctcctttctggaagatgaacctgacatttttgcagcacgccctggattagagccttttggaactgctagattctatcgccatgttccacatccttcccctgatggtcttgctgacataatgatacttcaaggaagaataatgatgggggacagatttgaagcacgccaccaatttagagcctttgactagaggttgataacatcgccatgttccacatccttcctgtgatggtcttgctgatataatgataattcgaggaagaataatgatggggggacgatttaattcacacgaccaatttagagactggagacttgatgttgataacatgtcatacgagcaattgcttgaactgggtgagagaatcggttatgtcaacactgggctcaaagaagatgagatgggactcaacataaggaaagttaagccttcaagttcaaatgatacatcaaagcatcaactagacaaaaagtgcagtgtttgtcaggaggagtatgaatcagatgatgagctggggagattgaagtgtgaccacagctatcattttcagtgtataaaacattggcttgagcataaaaatttctgcccagtttgtaagcaagaagttgtggttcgacactaagtggcactatcctcatgttttttacccttaaattggtgtatagttttttcttatgcaatataagcaatattcattactttacatatttttaaacttttggcttccttaaggaggagtcggcaatattatacttgtaagttttatattatggtctcgttattggacaatgattttgcatattatacgcaaggttttgaaactatcttgatccaaatctaccatacgttntttgatggggacccagcaacctaccttttgatgcttgct

SEQ ID NO: 29658 - DNA, 1928 bp, Glycine max
  Clone ID: TF_GmC1038_2
agttcgggtggagagagaagttcaattttcctaactgaaattgtgacaaaattatagacatttcgttagtatttttctacttgtttattggagaaaatgaaccgttaaataagacccactaattacattatcaaaataacaaaaaatgagaaagatcctttaccaatttgaaggataatactaaacaagtagtattattatcgattttattgtaccttccaaacaaaccctgcagcgatttgtttccttccatctccgccgtaccatgtcggaagcaccaccgcctccaactgccgatgcgtcaccgcctccgtactggtgctaccactgcgagaagcgcgtctccgtcgaaacgctcgcgaatctccccgacgtcgtctgcggcgagtgcaagaacggctttgtggaatccatgcccacgccgtcgcgctctcgctccccctccgcctcctccgacgacccctacttcggctcgcagttcctccaggtccttcgcctaatcgctcagtcggcgcgtgacgacgacgcgtcgcctccgccgccgccgagccgctctccggagaacgatttcctcaggatcgagctcggcggctgggacaacgacgaggagaacgaaaacgacgacgataacggcgacgaggagttcgaggaacacgaggaggcggaggatcgctccggcaacgaagatccgcacggaggagacgacgaggatctgagaagaaggaggcgcgagctacttcggcttcggattagggatttggcgactcgtacgaggagcatgcggaaccggatcttggattgggccgagattctgatgggcctcgaggacaattccatcgagttccgcctccagctgccagaatccgaccgctacgtcggaaatcccgaggattacgtcgacgcggcagagtacgaggcgctgctgcagacgctggcggagagcgacgggggaggcaggaggggagcgccgccggcgtcgaaggccgcgctggaagccttgccgacggtgaaaattgcgtcggaaagcgaagccgtggcgtgcgctatatgtaaagatttgctcggtgttggagacgcggcgaagaggttgccgtgcgggcatcggtatcatggagattgcattgttccttggttgagttctcgaaattcttgccctgtttgcaggtttgagctaccaacggatgataaggaatacgaggaagagagagtggttatcgctgcttcttcgaattcgaacggagcttcgagttccggtggaggtggaagtgccattgtttgattccgcttggtatgttccgtcatgctctgctctgctctgttctgttctgccatttgtgtaatatatttcgtggtttctgaatttctctttcttttttttttggtattagtggatttaaatcaaagcttgcgccatgttattatttattttatttgaagcttttattatgtagttggcttcttagctctcggatgatgctaagatacttgtatatagcatttgaatcaatgtgaatgtgatcatatcacactatctcaatggaatttacactttctccctgtgattaatttatttgaagcttttattatgtagttggcttcttagctttcagatgatgctaagaaacttgtatatagcatttgaatcaatgtgaatgtgatcatatcacattacttgaatggaatttgatggattaagctaattatgtcattgttgctactttggcatcatgcctaattggtttacttgatgcatgctcttcttttttcaggctgtgtcctttgtgtaataaattggaaagattgttgtttcttttatggtgtgtttggtagagaggagagaaataatattggagagaaaatttgtatttttttatattcatcctcagatatattacaagtgattctaatagtactcttttatttaaaaa

SEQ ID NO: 29659 - DNA, 2461 bp, Glycine max
  Clone ID: TF_GmC1008_1
cgaagctcggaattcggctcgagctttcttccccccttttttctctgcgccagcaaaaatggatgattctggaagtaaaactaaactgttgaatccatggatgctccacttccagaaactcgctctcgaactcaagtgccctctctgtttgagtttgttcaagaggccggtgttacttccatgcaaccacttgttctgcaattcatgtttggctgattgcataacggctgggcctggatgtgctgtttgtaaggcaacgtatgctcaaacagatgttaggcatgtgccttttgtggaaaacgtggtggcaatatatagaagcttggatgccactttttgtgctagtttgtttcagccatgttcttctggtgatgggagggttttggagccgtgccaagcaattcttaattcaacttctagtagtttaaaagctgccaagcttcctcggaatttaactaattcaatgaggttggggttggcaagaatttcaaatccaagagtgtggtgcatgacaaagcagaggagtttgagttgtctcgtgagagagggaagcccaatccaatgcaatcttcccatatgggacttgggggccgagaacagtgtggagttatggaaatggatgtgaatcaagtaacacaatcagcacctgatagcccgcccttttgtgataccaaaggttcagataatgactgcagtgatcaagatagtgagcatccattacctcctggcagattggaaaattcttcactaaacagagcaagcacaggaaatggaaatttgaaagaaagaatgggacagcttaggtctgaaagttcggcctctgaaactgagggtctggcaagggatctcaagagacagaagaatctggactttaaacctggaaaggaccctggtgcaccattgcccacaaatgcttcaattgacttgtgtccaattggaaggatctgctcattttgccaatcctctaaaatctcagaggttactggaccaatgctgcattatgcaaatgggaacttagttaccggagatgcagcaatgaaaccaaatgtcatacctgtgcatagaatttgcattgactgggcaccacaagtgtactttgttggtgaagttgttaagaatttgaaggcagaggtggcaaggggagcaaaacttaaatgcagtaaatgtaatctaaagggagctgctcttggttgctatgtcaaatcctgtagaagaacgtatcatgttccttgtgcaatggacatctcagattgccgttgggatcatgaggattttctcttgctctgtcctgtccattcaaatgtcaaatttccatgtgagaaaatcaggtccaagaaaaaggcaacacagaagcatcccactttttctcatctgccatctcatcactcaaatcgtcttgaagcttcccaggatgctagtaaaaaattggtattttgtggatctgctctatcaaatgaagaaaaggtatttttgatcaattatgcaagcaaggttggtgctactgtgaccaagttctggacctcaaatgtcacccatgtaattgcagcaactgatgcacatggagcatgctccaggacgttgaaagttctgatggcaattctaaatggacgatgggttctaaaaatggattggataaaagcatgcatgcaagagataaatcctgtagaggaagaaccgtatgaaattaatcttgacaatcaagggtgtcaaggtggcccaaaagctggcagacttagggcattggccaatgagcccaagctattcagtggcttaaagttttatttttctggagattacgtgtcaacttataaggaagatcttgaagaattaattgaagtggggggaggtactgttttgagaatcaaggaagaattggaagcacacagacatgaatgcaaaggggattcttcaaagttgctagttgtttacaaccttgatcccccacaaggatgcaagttgggggaggaagtttcaattctttggcaaaggctaaacgacgcagaggatttagctgcgaacactttacaagtcattggtcacacatggattcttgaatcaatcgctgcatgtaaattgcagccttttgtttactaaaatgcattaggtagctgatattttgtcgatcacttgatagggcgttctctgcaaaagttgatcaatcgtgtacaggatttagcttgaatttatttgaagtcttgttcgagtcactggatgttagggtgtaatgcttatgtaacattaagtagttatttacttagttttgtctgctcttgcctcgtcttaatgacttcacgctgaatgtacttatgttttaaaattaaccggatcctcagagttgagattgaccatgatgcctcgtacatgctaaggcaaattctaccacgcaacaagctagatgaggtgcatcggtgtactaaactatttatcattaattaaatgagtaatgctatgttttcgtatt

SEQ ID NO: 29660 - DNA, 757 bp, Glycine max
  Clone ID: TF_GmC25542_5
ctcgagccgctcgagccgattcggctcgagattattttcattgtatgaaatgcaatgggtgcctggggataaaatgggcatctcacaagtgcctggagaaaggtttagaaatgaactgcccaatttgctgcgacgacttgttcacatcaagtgcaacagtgagagctttaccttgtgggcattacatgcattcatcttgctttcaggcatacacttgtagccactacacatgtccaatctgcagcaaatcactgggagatatggcggtgtgcttgagagagggagttcctttgggaaccattttgttgggagctcacttctactcttgggggctcacttagctgtttctttacctatccagggttactttggtatgcttgatgccctattggctgctgaggagcttcctgaagagtacaaggaccgctgtcaggacatactctgccatgactgtaatcggaagggcacttcacgcttccactggttgtatcacaaatgtggattttgtggctcttacaatacccgggttatcaagtgtgagacgtcaaactccagctgctcttagtgtgcttcttttgtcgggaggtagacagagtttgtaaatacttgtatagcaaattaggaatccaaatttttccatgaataggagcccccttatcttttcgtcttatacttgaacagatgctcctaatcagtcttatagcaattatgtacagatcaactttctattaatgcaacatatattgttgcagctcct

SEQ ID NO: 29661 - DNA, 2568 bp, Glycine max
  Clone ID: TF_GmC1166_1
aaaacgcgtgggtacacataactttttataaaataaatatatataatatagaggtgtctatatatatactatgacttatactatagcctgacgcgtccgcgacaaatgggctcctccttctctcttcatcttcacctctctctctctctctctctctctctctctctctctgtgtgccttttcctttgcctgtgcgtgtgaaagatcgcagcaactccaccaccatcacaacaggaccgtaaccgatttccaaggttgagttatttgctggtctaacttaaccatactgtctattttgactcctgagattgctagtgagtcatggggcatagacatttatatagctcatctccaatatttgagggtgaacctgaccagaactggaatcatatgcatatggatcaacaatatgtgaaccatggtagggagtaccacttcagacaatggttcttttatttatcctttggaaaatatgtccatagatagcatttcttttcaatgctcattggaacactgccccaaggtcaaacggatatgcatccacaagtctcaacattgaagcaccccctcatcaaacagatgtatcaggcacttctcatgatcattttctgccttcatcaagttgctggaatgttttatgcagtgcctgaaaattatgtacaccagccttctaattctaattatgacagacaagcattttcggctgctgatgggggtattattgatcttactatggtacatggacgagggcctcaaaagcgtaagatccctggaattcctccagtctgtgaaagaggcagtacaagcagatatttcaatgctacaaatgcagctgatcgtcctacatcttcagaattgtggccagagaagcccaatatggattctctatatatgccttgggaccatgttaatatgacacccacatttagaggtagaggcctttctataaggggtgagggtcctttaaggaatgtgaggagccgttctgcacttgatttggaatccaacctggctaggacccatttatcaaatactcatccacacaactcatactctactggtctaccaattgaccattctaacatggtcgatctttcaactcaaacttctggcactttgaccagggattggagcccaatgagtatatgtcctcctcatggaagggtgtcatcatcagatgcaaatgcttttaatcacgaggcaagtcatttccttattggaagcagttctagtaatgctcctgtagatgttggaggttttcataatgaatttggaactagtagaaatcctactgctcctcaaagttttcataataatctgactcaaactgcaagaggagttcacagtaactactctcaaagatccactccaacttttagggcttcttctagcttacgtttgggacgtgtggcaccttctgatgatggattgcatatggtgtccgaaagttactcttctagacagccaaggccattgaccaccgttggctggcagaacaataatagaaatggaagatcaagaatacctagtgacagatatcggtcattggatgatgagggtttcatgattgttgatcgcacttcactgtatggacctaggaatatgcttgatcgacatagagacatgaggatggacatagacaacatgagttatgaggaactacttgcacttggagagagaataggccatgtgagcacaggattgtctgaggatttgatttccaagtatttgacagaaacaatatactgttcatctgagcaaagtcaagaagaagaagcttgtgcaatctgcctggaagaatacaagaacatggacgatgtcgggacgctgaaagcttgtggacatgattaccatgtgggttgcattaggaagtggttgtctatgaagaaagtatgtcctatatgcaaagcttctgctttgcctgaggataagaagggcaaataaacaatttattcattatactttagtttaacgtatatcatcattctgtacatatatttggatattccttgaagtggagaaaacagacttccatttggatatgttgttgtaatagctaatgctatactctatctatatgtctatgaattcgttctctttggcttcactcttaatttcgtgaagccttgaaattaaattatcgtacttcaatatttgatttaattcgattgacccttgtttggttatggaagtgaatgaattccttcatttcttcaatgtctgaatcacagatgaaatcttggtgctaagaaatgacttatgagttgtatttattattatatgccaggagatgctcgttatggaagggtgtcatcatcagatgcaaatgcttttaatcacgaggcaagtcatttccttattggaagcagttctagtaatgctcctgtagatgttggaggttttcataatgaatttggaactagtagaaatcctactgctcctcaaagttttcataataatctgactcaaactgcaagaggagttcacagtaactactctcaaagatccactccaacttttagggcttcttctagcttacgtttgggacgtgtggcaccttctgatgat

SEQ ID NO: 29662 - DNA, 1049 bp, Glycine max
  Clone ID: TF_GmC1166_3
ctggtctaccaattgaccattctaacatggtcgatctttcaactcaaacttctggcactttgaccagggattggagcccaatgagtatatgtcctcctcatggaagggtgtcatcatcagtcatttccttattggaagcagttctagtaatgctcctgtagatgttggaggttttcataatgaatttggaactagtagaaatcctactgctcctcaaagttttcataataatctgactcaaactgcaagaggagttcacagtaactactctcaaagatccactccaacttttagggcttcttctagcttacgtttgggacgtgtggcaccttctgatgatggattgcatatggtgtccgaaagttactcttctagacagccaaggccattgaccaccgttggctggcagaacaataatagaaatggaagatcaagaatacctagtgacagatatcggtcattggatgatgagggtttcatgattgttgatcgcacttcactgtatggacctaggaatatgcttgatcgacatagagacatgaggatggacatagacaacatgagttatgaggaactacttgcacttggagagagaataggccatgtgagcacaggattgtctgaggatttgatttccaagtatttgacagaaacaatatactgttcatctgagcaaagtcaagaagaagaagcttgtgcaatctgcctggaagaatacaagaacatggacgatgtcgggacgctgaaagcttgtggacatgattaccatgtgggttgcattaggaagtggttgtctatgaagaaagtatgtcctatatgcaaagcttctgctttgcctgaggataagaagggcaaataaacaatttattcattatactttagtttaacgtatatcatcattctgtacatatatttggatattccttgaagtggagaaaacagacttccatttggatatgttgttgtaatagctaatgctatactctatctatatgtctatgaattcgttctctttggcttcactcttaatttcgtgaagccttgaaatt

SEQ ID NO: 29663 - DNA, 898 bp, Glycine max
  unsure (1)..(898): unsure at all n locations
  Clone ID: TF_GmC705537_1
gcggtagacttacaccgtaattattaatttttttgatttacaaataacataacaggtgtacttgttctgaaaaaagcaaaaaaaaaaaaaaaagtgtgcccatgttgggataacatgtggtaattgtcattgcaaataacaaattaatatttacagcgtacccattgatataacatggtaaccaacaaatatggcaatttgacatgggatctttttggggtaacatgtatcctcaccctttctaaattatacatgggtttatctatggagggaaatacaagggtaggacgacaagtggcagtattatacagatctcgaacttcgtagaatctggtgatgaattcaatttttaacgtgattgaaacttgaaggccattaatttttgaatcgcaagccaatgacagcctcgtgatcgtgacatcttaatctactgcctttacatgcaagttacaatcctaaccagttgacgagcctcagatgtaaaccatttgagagcttaaagaatgcaacaagagggctgcctccgattagctctagagaataatgtgggactgttagatggagaatatcctcttgcgccgtcaccaacgcattcatcaccctccgacgacgacgacgacgacggcaccggaacctcgtgccggcacacggggcaagaattgtgcagcctcagccacggaacaatgcaatcggagtgatatatgtgcttgcactgaagctccctcgcttctccacccacttcgaactcctcctgacaaacaggacactgagaattctccttcagatgcgcgctctcgattttcaccgtcggaatagcctcgatagcccgttccggcgccggcgccnnnnnctgccggtcgttttctgttatctgttcgatgagttcgttangccctgg

SEQ ID NO: 29664 - DNA, 2631 bp, Glycine max
  unsure (1)..(2631): unsure at all n locations
  Clone ID: TF_GmC279_1
gtaaaatctcgccgccttcacataaaaataatctttaatgaaagaatttcatatcaggtgaaattaatttatgatctttgaggtagacccgtattatctgacctatgaaaaaatccctgcttatccacgcacgatttggaacttctgaaaacacgctgaaatagatttttttttttgggtataatattgattgtagtagtatttattttatcttctgatattatatttccaattttgctgtcaaaacattattagcgatcaatttgaaattgatacagagctgagagcatcaaggaatcgaagaatagaagattcatttttttttctttttgatatggaagctgatgtttctattatttttgttgcgttttcaaaaccctaaattggagaaatcccaatttctccttctgtctttctgctttggatgtttttcaaccaaaaaattgtgcttttcaaatcttttgctctgatgggtacttcaaatcttctcttgtttttctctctgatgagcctgtgtgctatggcggcttccaaggtggtgcttattgggaataatatcactctctcctttgatgatattgaagctaattttgccccagcagtcaaaggttctggaaaatatggggtcttatatttggcagaaccactggatgcgtgtgcagaattgacaaataaagttgaacaacttcccaatgcgagttcaccttttgctttggtggttagagggggatgtagctttgaggaaaaagtcggattagcacaaaaggctggcttcaaagctgtaattgtctatgacaatgaagagggtggcatcttggttgcgatggcaggaaattctgctggtataagaatacacgctgtatttgtatctaaagcttcgggtgaaatactaaagaaatatgctgggttgactaatgtggaaatatggctcattccaacttttgaaaactcagcatggtctatcatggcaatttcatttatttccctgctagctatgtctgctgtcctggccacttgtttcttcgtccgcaagcatcgcataagaagagaaaggcctcgagcttctcttgttcgtgaatttcatggtatgagtagtcgcctagtgaaagcaatgccgagtttggtatttacttctgttttggaagataactgtacatcaagaacatgtgctatatgccttgaagactattgtgttggtgagaagctcaggattctgccctgctgtcacaagtttcatgctgcctgtgtggattcgtggcttacttcatggagaaccttttgtccagtttgcaagcgtgatgctagaaccggcttaactgatccaccaccttcagagtccacacccttgctctcatcaaccccagcatctatggcatcctctgtcttatcttctgcaagatcatcactagcttcatcttcagcaatacaaattgcccggacagcatctatggcatcctctgccttaccttctgcgagatcatctctagcttcatcttcagcaatacaaattgcccggacagcatctatggcatcctctgccttacattctgcgagatcatcactagcttcatcttcagcaatacaaatttcccgggcagcttcacagaccccatctgtttcccgtaaccactccatagccagtacaccttatgttcagccatctcttaggtcctcctaccatcaatccccctccctaagcatcagccgaagctccgtagatcttaggaatgcatcccaaagatctctagcttctcacttgaattcaccatgttccatgggatacccatctttgtcatctcttaactcaaggtacatgtctccacacattccaagtccaagcaatgcttcagtaagctatatgggttcatccagtcatcaacaacatcctctccgttatagtgagtcggctgcaagcttctccccatttgcatcgacacactcccttccagaatgttaaattgttcaattgattatatcatatgattgagacgtccacgcagttgaactagtaattgccaagtcttgaactaaaaggtggccatgtgatgaccggtggtctagttgaatagtcctatgtgatgcttggggcattccctacctctgtcatttgacttccgtcttggcacctggtgtacattgtagcttctctctggtgttagtttcgtttacatgtgctggttgaggttcttacatttataggttggagagcttgcatacagtaacttgtgcgtattgtttgtactttgaatgttgacgttttcatggccttgatgtccaagtatagtcaactgctaacaagagaaatgttgggctgtattgacactagacacattgaagtaagaagagttctttatgctctgtctagtggatttgtccaactgaatcatgagagatcatgtgatgtatcactctagtgttatctatacttgatcatctaattgcaactctgagtatcaataatacttgtaaaattttcgtaaaaaaaatagctaatagataatgctggtaagtgttatcaattttaaaccatgggggcaaattagatatcctatttgatccgtggaaaattcatcatctagatatgttaaataccttctgtggcatcttcgatttatagnnnnnngnatnnnt

SEQ ID NO: 29665 - DNA, 1074 bp, Glycine max
  Clone ID: TF_GmC6770_1
tgacgccacgtaagctcggaattcggctcgagcaataatttccacctgaagccggacaatatattccgtagaaacaaaataaattaaccaaaaccatatctccatataccttagattgaaattgaaaccaatcaagcatgtctaaagacaaagatggtgaggagccacttggtataggccttcaggtgatgctagcagcagctttctcattatttggtatgatcttattaatcatcatcttccatttttgtgtaaaatatttcattagacgccaacaaaggagacgccaaaacgaccttctttatcaaatcagcactcaaattgcaccaattgatgtgagttctgtggagccacgcaactctggccttgaccctttgatcatagcttccctgcctaagctcttgtacaagcaaacggaccaattcaagcaaggtgaagaagttgtagagtgctcggtttgcttaggcactattgtggaagatacaatcagtagggtgttaccaaattgtaagcacatttttcatgttgattgtgttgataaatggtttaattctaacaccacatgcccaatttgccgcaccgtggttgacccaaaggtgcaaccagaacatggtcatttaggtgccacacggcttcacaaccaagtccaacccacagcaccaccagctgagggtggtgatgagctaccagatggtaatgaattggagagggtgggatgttcaggtttgagaataggatcttttcataggatggttagtaacagggaaagatccgggagaaggactcagagctgtgatggatctaccatagtagatatagaaagaccctaaattaagtagtgaatatattgttaattatttgttaattttctcctttcatttggatatattccttagtttaaattagtattggtatgttttcatttggatatattccttagtttgaattagtattggtatgttttttgtaatgagtgttggattgtttacgtcacaattttctcgcttgtttgtcaatgcttgtatttcaatttatttacttaggataccaaataatattatgtgaaatttgatt

SEQ ID NO: 29666 - DNA, 1358 bp, Glycine max
  Clone ID: TF_GmC37985_1
gaaggagtgagatgggtgagttatgaagagtgacgaagccattttcgacattatcactcctctcgcaccaaaagcgatgaagctctagttgctgcttttctcgttttgatccgtacattttccctctactcgttgcgatccccgaagctgcgagattcttctgcttcgattgcgtgcttcatgtgattctgcttctctctctatgcaaatttcttttataggagtagctgaatcatatgaggtggatggtcctttgttgatgaccacaacttagactgcagatttctcgtctaccaaaaaggatgcaaaatgagttggaactcacgcatggaggcccattacaataccattagttatccctataatacagcaggaagctttattgaatattttgaaggtctcacctatgaacatgtcaacttcattttttctggtgcatcacatgctcaggagagttcttacccttcaaattcaagcttttacaagtttggccactgtgaaccagagaataattcatactatcgttatagtcatggttatgaggtaaatcatcatgaaccactggtggatgagtacaggagaccttcagagaactcattgacaatcaatgaacagtcaccagcagtaagcacagaatgggttgaaggtggaaacactgacacacaagacaattctattgaatgtcctcgaagacatcatagtaattcaaatgattatcaggttatttggcaagacaatattgatcccgacaacatgacctatgaggaactacttgaattgggtgaagctgttggaactcaaagccgtggtcttacccaagaacagatctcctcgcttccagtgtcaaagtacaaatgtgggttcttcttgaggaagaagtcacgagatgagagatgtgtgatttgccagatggaatatagaagaggggacaagcgtatcaccttaccatgtaaacatgtttatcatgctagttgtgggaacaagtggcttagcatcaataaggcttgccctatatgttacacggaagtgtttgccgacaagtcaaaacacaaataatctcaagcggataagttacctgcatatgtttctgtttctccttgagtgtgggggtctttcatagaaatacatttttatttgacttttcccttttcgtagtgaggtcagccctgggtttagcaaaaatacagagagaatctaaagttttataaaaggatatgggacatgtctcaattatcattgttgtactggagaggttggattacggtttgttttcataatatctaatacagtgtgctatgatttcacgtaattagtatctcgtgctactgatacagtgttctcgagacccgttctccagc

SEQ ID NO: 29667 - DNA, 1264 bp, Glycine max
  unsure (1)..(1264): unsure at all n locations
  Clone ID: TF_GmC635_1
atttttgcctcttggaactttgtcgaaaaaaaaagaagaaaaaagaagaaagtgattggattagggaagaatcgcagacagtgttgggcttcttcatggaacttgctagttgccattgacctctctttcttttcctttcctttttttctccatctctcgcaactcttcacctcaccgcgtcattcgcagcaaccaccgaacactgaatcgtgattcgcagtgtatgacgagcgcttcggagctattccactccagaaggcatcgattgggacgaaatgctctcgatctagggctcgacaccgaactccacgccgccgattctctccgccaactccgccttcgccactactacctccgccgccaccacccggagcgtgcatctgatagaattgatgggaggtatcggcggtctttcgtaagtgagagcgtggattctgaagaaaacgtgagaagtagtcttagagggagtagcagcgagagactacccgtaggtgtggttcttgcacgggcaagactccttcagaggttgagaggggaacctctatccacaaacaggcaatatgatagagattcatttggtgaggatccagaaagtgaatcatcaaacgaagatcctagcggggcatctctagttactgagttgacttctcaaatggcaaggtcccagttcttgcaagaactaagcacaaagccacctggccttactcaagaggccttggactgtttgcatcaggaagtttttagcagcaatgccagtgagatagggttggattccagggtactgcaggactgcagtatatgtttggagtctttcacagacggagatgagctgatacgtttgccatgtggacataagtttcactctgtttgcttggatccttggattcgctgctgtggagactgtccatactgtcgaagatgtatagttgtaaatactcactcatcattaaacgaggacgagtaattgatttcttgattgactttgttttgttctgtggttgtatgacaggataagaatgctgtaatggagctggttttttgtaacgatgctgaatacttgtctcttaccttgatatcgtattttttttttatcttttcctggtgacaatgggaaagatgtgggtagctaaatttggtattgtaagacgtgttataaaataataacagtcacgtgaatagtaaatagtatttttaatatttgtattcttatcgggaaaatacctattcatttttatcaagattcatgtattacattttagttnnn

SEQ ID NO: 29668 - DNA, 1181 bp, Glycine max
  Clone ID: TF_GmC635_3
gcaacctccgaacactgaatcgtgattcgcagtgtatgacgagcgcttcggagctatttcactccagaaggcatcgattgggacgaagtgctctcgatctagggctcgacaccgaactcaacgccgccgattctctccgccgccactaccacctccgccgcctccgtcaccacccggtacgtacatttccttttctttccgccgctattccactaattacaatttgaaatttcttatatttattaaattattattattaggagcggaaattgaaattgatgttagtgtgttgaggttgtggctattaattttgtggtttttaggagcgtgcatctgatagaattgatgggaggtatcggcggtctttcgcaagcgagagcgttgattctgaagaaaatgtgagaagtagtcttagaggaagtgacagtgagagactacccgtgggtgtggttcttgcacgggcaaggctccttcagaggttgagaggggaacctctatccacaaacaggcaatatgatagagattcatttggtgaggatcgagaaagtgaattgtcaaacgaagatccaaccagggcatctctagtttctgacttgacttctcaaatggcaaggtcccagttcttgcaagagctaaacacaaagccacctgggcttactcaagaggccttggactgtttgcatcaagaagtttttagcagcagtggcaatgagataggattggagtccagggtactgcaggattgcagtatatgcttggagtcattcacagatggagatgagctgatacgtttgccatgtggacataagtttcactctgtttgcttggatccttggattcgctgctgtggagactgtccatactgtcgaagaagtatagttgtaattaactaaatactcccttaccacagaacgaggatgagtaggttggttttctagattgactttgttttgttctgtggttgtatgtcaggataagaatgctgtagtggagctggtttttttgtaaggatgcttaatacttgtctcttatcttgatattatgtatttatttttatttttttcccttttcctggtgacaatgggaaagatgtgggtagcttaatatggtattgtaagacgtgttataaaataataccagccccgtgaatagtaaatagtaattttaatatttgttttctt

SEQ ID NO: 29669 - DNA, 1111 bp, Glycine max
  Clone ID: TF_GmC340342_1
cttcaatcttcttcttccacatttcactctcgtccattgtttccctcataatcattttctcttctattacaattctctttccctttgaaaccactttttttcttcttctcttgtttccttttatccattgcgttcttcatttgcacttgaattttccttagtttgtaaaagggtgtaaattggggaagaaaattccatggaatctaaatactttgactccaatggggaggtctcactaaagcaaaaatcaaaatccatttcagcagagccaacaatctctactagtgaatatgattgctttgattgcaacatttgcatggaatcagcacatgaccctgtggtcactctctgtggccacctttactgctggccatgcatatacaagtggcttgatgtccaaagctcctctgttgaaccgtaccagcagcagacatgcccagtttgtaaatcagagatctctcacacttcagtagtccccctctatggctgcggaacatcgaactcggaatccaatgccaagaaacttcagatgagcctgggaatacctcacaggcaacctccttgcagcttgaatgctatgttaacttctcctcgctcgcggatttcgcatcctagtcagcaactgcatccaagttatttccagacacaatcaagaccatttcattatcagcagttttatggaagttatggtaccaatggattaccttatcttggaggtgcttctatgactagtttctttaatactgtgattgatatgtttggggagatggtcttgacaaggatttttgggatctcagatgcaaatttgtttgcaaaccctcttaatggaagtggaagttctaggatgagaaggcaggaaatgcagattgacaagtctctgaacagactatctattttcctcctatgttgcatcatgttgtgtcttctcttattttgaggacatttcatttcagactgtataggcacttatgtgcagctctgaatgttcatgctgttagggatctactgtaggttgtaccattatgtagatagtagactttggcatatattatgattatgttgatattggtcttgttattttatgattaactattgcatgcatgtaataact

SEQ ID NO: 29670 - DNA, 734 bp, Glycine max
  Clone ID: TF_GmC6834_2
tttgaaactcctcagagccaaagctgttctcttttttcatctgggtatgcaatttccttcttgttatcctctttggtctcctggattccataatctgtgttaggaaaacttccacatccaaggtctaaagaaccactggtgaccaaaattgtgaaaaggggttccttgattttcaccaattcatggcatttcagcactacatttcccgggatttgaaaaccatcccaaatgctgtgactgaggcagaaaaccccaatggttgttttgattgtaacatctgcttagactttgcacatgagccagtggtgacactttgtggtcacctctactgctggccatgcatctacaagtggctccatgtccaaagtgattctcttccacctgatgagcatccacaatgccccgtttgcaaggctgatatatccaacagcacaatggttccactctatggccgtggccatgccgctaccacagctgaaggcaaaacagcttcttgtgatgtttttataccaccaagaccatctgcttcatgtgctcaagcccttttggcaacatctcaaaggggtcagcaccttccatatcgtaatccttatcagggtcactacttcacctctcatccataccaagaagaggatgatgccacttcacaaatgctgcaatcttggatcccatcaccaccctgtgactggggatgtttgggggagatggtttatgcccaggggtgtttggcaacc

SEQ ID NO: 29671 - DNA, 479 bp, Glycine max
  Clone ID: TF_GmC37342_3
tgtttcatttgtagaaacacttttgtggatcctgtagtaaccaagtgcaagcactacttctgcgagcattgtgcattgaagcatcatgcaaagaataagaagtgttttgtttgcaaccagccaactcttggcatttttaacgttgctcatgagatacgcaggaagatggccgaggataaatcataaaaatgtctctctaggatccatggatctctttacttcatggaagttatcttttctcccccattttagtttcatgttaaagattgatgctatgtaatgagttgaaaacataccagaagtttgcacagtggaattagttgattcattttgttgtatttctttgccttatagattccagaatatctaatggtgagagacatttatgatatacccgtttgtatatagggtcatactgtggttctttttacagtagtttgttaccaaataaattttgaatagagcgccctttactttaa

SEQ ID NO: 29672 - DNA, 1025 bp, Glycine max
  Clone ID: TF_GmC5679_1
ggaagaagaaaatatccattagaaaaagaccgtagactttggccattttttcactccacacggagccaaagccaaatccaaagccaacaacaacgccaccaactcaacaacaggaaagtcctcataaaccccataacccaaaccaaaacccattgtctccttctcctcccattgaactccttctctttccccctctctctctctctcacacacaaagaggccatggattacctcgaccatgatcatgatcatgacccattccacgaccacgacgacttcaacagaaggatactcatcatggccatagtttccttatcagtggtcttggttcttgtctttgcacttcacctctacgcaagggttttcctccgccgccaaactcgccgcagagccgccatataccaactgagcctcaacgtggcacaagcacacgccgagccacacaacaacacagggctgaaccctgccctcatcaccacccttccctccttccccttcaaacaaaaccaacaccatgattctgctgagtgtgccgtgtgcttgagcgttctagaagacggagaacacgtgaggcttcttcccaattgcaaacacagcttccacgtcagctgcatcgacacgtggctttcttcgcactccacgtgtcccgtttgtcggaccaaggccggaccggtccagctcgaaccggtccgcctcgaacctcagccccgtgagggccccactggcttggttcttgctgatgttgttgcacccacggctcctctattgtttgaaaacgtggaaggaacctcggatggtgctaataataatgggtcacctaaggttagtggttcgaattcgaggttgagttcgttcagaaggattctcagtagggagagatcgatgaggaggattctaccttctagccatgatgatgttgaacatgacttagagaggcagtgagaactgagaaattaattattgaggtaccaacaccatgtatctggttttgattatttgtgtgaagtgtctctgatttttatttt

SEQ ID NO: 29673 - DNA, 1061 bp, Glycine max
  Clone ID: TF_GmC7726_1
ccgcgtccctcccggaaccctctctctctctctctctctctctgttcactctcactttttgttttcacctcctcctaatttccaagcacactttctttgtttcttatttcttcctgtctcaattataagtaaaagaaaaacatatttttaaggagattactgggacagctagatgacgcgagcgttcagaattctcgggtccgcggacaacgccacctcgctggcagcggtagcggcgccgccggaggcggtggcgcttgagtcggacttcgtggtgattctcgcggcgctcctctgcgccctcatctgcgtggtggggctggtggccgtggcgcggtgcgcgtggttccggcaaggctccggcggcggaagctctccccggcaagccttggcgaacaagggcctaaagaagaaggtgctgcagtcgctgccgaagttcgcgtacgtggacagcaaccccagcaagtgggtggcgacatcggaatgcgcgatctgcctcgccgacttcgccgccggcgacgagatccgcgtgctgccgcagtgcggccacggcttccacgttccctgcatcgacacgtggcttgggtcccactcttcttgcccctcctgtcggcagattttggcggtgaccaggtgtcagaagtgtgggcgttttccggcccccggggccggagcttccagaacgcctgcgaccgaacccgaattgaagtccagagaagacaacaatgtcgctagttacagcaataataatattaataacaacagcgacaggggtggcaataacagtaatagtaattgtaacatggaacatcatcatcacagccatcatgtgaatagtgggttcttgccatgaaaatagtagctactatttattagctttttttttttttttaactttgtacctttttatcccttcaagttgttcaagaagatcagaaattgggcatttttttcccctctctttatagatttttgtttatcctgcaaatattactaagtgcgtatgatataatgatgtataaaaagatgtaatcagtcgaaatgtaaaaagtttaaagtgt

SEQ ID NO: 29674 - DNA, 1263 bp, Glycine max
  Clone ID: TF_GmC166463_1
tgctttaccgttcctcttaaggattcatattattctttctcagactctttcactctgtgttattgtttctgttggaaaacatgaagttctgcaaaaagtaccaggaatacatgcaaggccaggagaagaagcttccatgcgtaggattcaagaagctcaaaaagatattgaagaagtgcaggagaaactcttcatcccagaaaccccttcatgcatcccttgccgccaaaacctgccccgaccattgcccagtgtgcgatgggaccttcttcccttcccttctcaatgaaatgtcagatatagtggggtgctttaatcagcgtgctcagaaattgttggagctacatctcgcttctggggtcagaaagtacttcttgtggatcaggggcaaattacaagggaaccatacggctctgattcaagaaggcaaagatcttgttacttatgcactcataaatgccattgcaattcgaaaaatactgaaaaaatacgataagattcattattccaagcaagggcaattgttcaagtcgcagatccagagtatgcacaaggagattcttcaaagtccctggctttgtgagcttatggccttccatatcaatttaagggaaactaaggtcaagtcaaggaaggcacatgctttgttcgatggatgttctctcacattcaaggatgggaaaccggcacttacttgtgagctctttgattctatcaaagttgacattgacttgacttgttctatatgcttggacaccgtgtttgatccagtttctctgacttgcggccatatattctgctatatttgtgcatgctcagctgcatcagtatctattgttaacggacttaagtctgcagatcctaaaatgaagtgtcctctatgtcgtgagggagcagtttatgaaggtgctgtgcacttggaagaattaaatattctgttaagccgaagctgtcaggaatactgggagcagaggattcagacagaaagggtggagagggttaagcaaataaaggaacactgggattcacagtgtagggcattcgtgggcgtctaagtacagcatgcaattttcttagtttcttttgtagagtttaaggtttgtagttttggctgaaatgtgaatatgcatctgtttaatagtttttgtgtatataatattctgaataaggcaaagccgcttttaaactctttggaagttttctagtgacaatgttattacttctttcctgatttatgaagggattctaattctattttagact

SEQ ID NO: 29675 - DNA, 763 bp, Glycine max
  Clone ID: TF_GmC1667_2
ccccctttcccctttcttctctatcagttccttgattatagctttcaatgggattctacgctgaagacactctctcaggcttgacaataggccaggccatatacgaggtagctctgatgattgcggttctgagatgggtcttgtgcttgatcttcagagtgatgaacgacagaagaagaacagaatccgatgagaccccagccgcagaagcatgttgtcagaaggagtacaacaacactcttgtgctgacgacgttcggagagattaaggagaggctgccgcagacggaggagacatgtgcggtgtgcctgagccagctgagcgtggaggacgaggttagggagctgatgaactgctaccacgtgttccacagagagtgcatagagagatggttggagcacgagcatgagaatcacatccccacgtgtcctctctgcagggctcctttgctgagttcttgctgccaccacagctccaccacttgtgtccctcctcctcagcctagttgggctgtggagagacttctatatctctttggggatgatctcttgccttgttagttctttattagattctgctaggggattcattatttgttatctttatcatcctatatgtaattgttgcttgctgctacaaaataactaaactaggacacaaactagcttccagtttgtgtgtgtatatatatatacatttaatctcttcaatttttatgattatctgtttattgtaaaaggaacaagggccttctcttctcttc

SEQ ID NO: 29676 - DNA, 1760 bp, Glycine max
  Clone ID: TF_GmC999_1
ttcgcccggattcatagtaattgacagcaacaacactttccacttgtctccgaattagttatcttgagaaacattattccctttgctatatctaatcgctcgaatgaaggtttcatgggtgtttgtgatcatgtgtatggaagtggtcggtgttccgataatggctcaagcactgacatgcatcgatgagacggttatcctcgctctgtctctatcttacttgatgcagcaacaaacaccttacagccacaacactttccacttgtctccgaattagttatcttgagaaacattattcccattgctatatattatggctagcatgaaggttacatgggtggttgtgatcatgtgcatggccgtggtgggtgcaccgatgatggcgcaagccatgacatgcaatgatgtgacggtgaacatggcacagtgcctatcctacctgatgcagggaggaacaccttcaacactttgctgcagcggagtcaagaacattcttggctctgctgtcaccaccgttgacaaacaaactgtgtgcaactgtctcaaggcggatgctgctaggtacaacatcaatgaccagtatgctcaggcactccctggtttctgcaaggtcaatgtcccttacaagatcagccgctccactaactgtgcaagcatcaggttctgaacaagccatggacagatttgctcatttctgcagcgggatactgaggcagcagtgaagcacttactatcagaataagagaaatcgagtgtgactgtagggcttcacttatgcgagccttttattgtattagtttctatttcttcagacacttcatagtctttgttgttgggtgtgagtgatcactagatgtatctaagttgattgttgcatgtaacaatcacgtatttgatataataactccatatgctattttgattattgcataccaaattgttcttaaattggatttttatctgcctaaattggcttgaagaagacacattcgaggatcccaatatagagacaaaatgttctcatcattttcatcttggttgcatttatgagtggatggaaagaagtgacagctgtcctgtttgtgggaaggtgatggtatttcaccaaacgactgattgaaaaggtttatgtcgtcaattatacccataccaaaggaaaggaaataggtagtattgatattgtgagtacttcagattaagcgcttatcatgtatagtaagtatataacatttttattacccatcaatgtaagttcaatctcatccaagttgttcctatatttgcccttttaagcccttgccgcttccctggtctgcctctgacttcaagcagcctattaatgatactatcaagaaccccacgttccattctcagtctcacgtttcaaaagtcaagataacacaaacaaacaacaaagtgaaaggaaaagaggtagtaggtagccaagataataaaggaagtctgatgttgtctatatatcggcaatgatcatgttgaaaacaaaatagagaataaagagagaagtagctttaagtcaaattcaaataagaagagaagacccttttgtttagagttgtgtgtctagtagaagaggttaagaaaggaaaggagtggagagcgttgaaaagaggaaagtgaagaagaacatattcgaacgcgtagagagaagaataaagtggggcgtgttgagttgaggtcccagcagcccctatgaaacataataaccacccatgggaagatgacgcggtttgaataaacaa

SEQ ID NO: 29677 - DNA, 730 bp, Glycine max
  Clone ID: TF_GmC999_10
aaggcccttgccttatgatgcagacctcaggtttttccgttcacagcgtgaaggactagtgtcaagacgtgagaagggttctagtcatttgaatgaagagtcagaacctctaagaggtgatgtagatgctgactcagaatctttaaattctggtggcaaatggaatgataccagtgaagatggatcaaaggaataccgttccaagtcctctgtaagactctcatcagcaaaacttacaactggagctggggttgtctattcatcctcagaagaggaggatgtctgtccaacttgtcttgaagaatacactgaagagaatccgaagatagtgacaaaatgctctcatcattttcatcttggttgcatttatgagtggatggaaagaagtgacagctgtcctgtttgtgggaaggtgatggtatttgatgaaacgactgattgaaaaggtttatgtcgtggatgataccaacaacagaggaaaggaaatatacagtatagacattgtgaatacttcagattaagcgcttatcatgtatagtaagtatataacatttttattaaccatcactgtaagttcaatctcatccaagttgtttctatatttatacttttctcccttgccaaaacatccaagattaaaaaaaaaaaatgccattttagatggcaactttgtcatggtttcaacagtttgccatttaatagaatgatttcctcctctctttttcttttt

SEQ ID NO: 29678 - DNA, 929 bp, Glycine max
  Clone ID: TF_GmC56608_1
cactctttacatctctctctctctctctctctccaaagcaaacagaaacagcgacaatcacatgactcgtgccttgagatatttaggcgagcgaaactcggccacggactccgccgtcgtcgattccgacttcgtcgtcatcttcgccgccctcctctgcgctctcatctgcatcctcggcctcgtcgccgtcacccgctgcggctgtctccgccgcctccgcctctcctcctccaacgctactccccagcctcctcccgcctccgccaacaaaggcgtcaagaagaaggtcctccgctccctccccaaggtcaccgcctccgccgaatccgctgtcaagttcgccgactgcgcgatctgcctcaccgagttcgcagccggagacgaaatccgagtgcttcctcagtgcggacatggcttccacgtcagctgcatcgacgcctggctcagatcgcattcctcctgtccatcctgccgtcagattctggtggtttctcgctgcgacaagtgcggcgggatcccggctccggcgagttccagctcggcgccaccgctggcggactcgggggacagattgaagggaagggaggaggacgcgaatagattcttgccttagctactgctttcggtttatatcaactcaaaattcatgaatccttctaaaaaagaaaaacattgtctatatagtgtggaaatagcaggtggtgtgtaatttgattttttataattctgatatggttagggctgtatgtattattgcatttgtgggcatcagttggatcagctgaattcgccatgtctcatttgtggaaactacttcattttttttttaatcatatatttttctgtataaagaaattaatttgttttaactagtaaaccagtagtatgtatgcctgtgacttttactttgccgtgtgctaatcgct

SEQ ID NO: 29679 - DNA, 1953 bp, Glycine max
  unsure (1)..(1953): unsure at all n locations
  Clone ID: TF_GmC5631_3
ccacgcgtccggtgacttagaaaagtaacagcaacgacggcaacagaagctggtcactgctgaattttgcagagctctttgtctcctctctcttttctctctctctctctctctgcctcacttgtggcctcatctcaggcacaaaaaacaaaagctttgaagctcagagggtaacacaacaaacacactaacactacaaagtttgagtctttgacacaaaaaattgagatagctcagagaaaaagaaaagagagaatgggagaaggaagaagaggagggacttcaaagctgagagaagcagcaaggagggtggctgtggcagcagcatatgcatgtggctcattctcaagaagaaaggctttggtggatccagtttccattgacaactcttgtagtctatctgccactgcctcaaattcctcatttttgtccccatcaacaacaaaaaattcctcagaggagttaacggaagaaacatattctggtatcactaccaacatcaacaatgagcttcatagtaagaatttgtgtgcaatatgtttagatcctctgagttaccacagcaagggcagcagtccaggccaagctatattcactgctcagtgctctcacacattccattttgcctgcatttcttccaatgtccgccatggtagtgtcacttgccccatttgccgtgcccattggacccagctcccgcgcaacctgaacaacaaccttggtcctttcacttctagtaaccaaagtgaccccattcttcgaatccttgatgattctatcgctaccttccgtgttcatcgccgntctctcttgcgctctgcgcgctatgacgatgatgatcctgttgaacctgatgaaacacctgagagtccaaagctgtgtttctctcttgtgcctattccaccaaatgcaccaaccagttacaatccagctttgcaagtgactaaacatgcctcatgtccttgccatctatcccttcatcctctaacctgcagctccttgtcattgctacaatctccaccaatgcaaaaaccttatgtcatgtgtccctcttccaatatgagcttatctctctgtgaaactgagccatgaacgtgccactgacttggtcttggttgctagtccaaatggaccacacctaagacttctcaaacaagcaatggctcttgtggttttctccctcagacacatagaccgcttggccattgttacatactcctcagccgcggctcgtgtcttccccttaaggcgcatgacatcctatggaaagcgcacagcccttcaagtcatcgaccgtttgttctacatgggccaagctgatccagttgaagggttgaagaaaggcattaagatacttgaagaccgtgtgcacaagaacccggagtcatgtatcctgcacttatcagataatcctacaagaccataccatgcagtaagcatggaactgccatctacaccaattcatagatttcatgtggggtttggctttggcacttctagtggatttgtcatacaagagtttgaggagttcttggccaagatgcttggaggcattgtgcgcgaaatccagctaagaatatgtggggctggggaagaagttggaagtggaagagtcataagaattggagagataagaggtggagaagaaagaaggattcttttagaccttggtgactgcactcatgtgtatgttgagtatagctacattgaaggggaaatcgatgagtgtgttaggaggacaggggaaactgttgtaggtgttggagaacataaaggtgatgtttcagaaaatggtgaaaacacaggtggtggtggtggtggtaggagtagcagtgttgaaagctgggactttcatgatccttacatggccagaagatgggccaagcatttgcatggttatagactttgaaattgctactattattttatatagaccaatgcgtttttgaggct

SEQ ID NO: 29680 - DNA, 875 bp, Glycine max
  Clone ID: TF_GmC747027_1
gctctatcacttctttcccaacccatcaattcttttggctaatcagtaattacccttaattttttggtccttcaatggaacgtgaagaaggcaaacaacctccccaaaaaaccccattacacaatcaacatgagcaagctaattctgacaacaattttgttcaacaaaataacttgcaagagcaaagtgggacattcacaacttttgcatcatttgaaagtgaaactgagggtgagtcctcttttgatgacaatgattatgatgctgattttttcctgagccaagagttcgaatcagaacttcaatttcttgagagtgaacgaagcaatgacaacggcgatgattatgataatgaagatgacgaacatatggaagaagatgagatcgatgtagatgaattgacttatgaggaattgattgagttgggagattttataggacaagagaagagagggttgtcagcacatgagatctgttcatgcttgcattctcacactttccattctgctgaaaacaaaagtggaattgatcgttgtgtgatttgtcaggtcgaatatgaagaaggtgaatctttggtggcaattcagtgtgagcacccttatcacacagattgcataagcaagtggctccaaattaagaaggtttgcccaatatgtaacatcgaaatttcagctcccaagatggttagttaagaatatatagttggtttttagatagtgtaaaatttatgcttccttactttgtgcaatcttaattaatttgaaatacttgagaaaataaaagctgctctggagcttaatttgtaacattgtaaataacagaaatttgatgttccaaggtataaaagtgattgaaaatcaaattatactttaaaa

SEQ ID NO: 29681 - DNA, 1035 bp, Glycine max
  unsure (1)..(1035): unsure at all n locations
  Clone ID: TF_GmC18_1
catccggctcctgctgctgcactatgtaaccatctatctaatactacatggatgcattttttgggggtccataactggtaggttgcctggtgttgggttgcttgcaaggaagagaacagagcagaaccatagatatgaacaccaacaccatgccacatgccgacaatcctatcaccttggagaatcatcattggaaccaccatggataccactcactgtcttagatgaaactgctctcaaggccagacaaaggcttcacaagaagcttggacacttcttttcctcatacaggtcaagtgagaatccaagaaaagaaggaaaagtaaaccaaagcagctacgagaagaaggatggaggaataggtcggaagttgttagagagttcatggttgttgcgtggcaacaagtttaagaaagatagaaaagtgtgtgctgtgtgcctagaagatttggggcaagagcaacaggttatgaacctttcatgctcccataagtaccattcagcatgccttcttccctggcttgcagcccatccccattgcccttattgtcgaaccccagttcagccctgacctcatattcaagggtcaagactcagtatatggtgccttgtagaaaggacaaaaatatcaaagttttatctagtattgcaatttgccgcacatttttcttgttactgattgcctaggaaatttgattgctcttctcaggtattggtggatatcccctattgtaatacaccatgctcttcaaaagattgaaattatacactatcccccaagaaggcaataactatcccttcttgcttgcatgaaaaaaaaggaccatgtttctaactcacaaaaacggtgaactttgaccacgtttcttgagctattttctcttcacaagcaatatacttatcgggcaagggcaaacctaacctaacctaacctacagcaagttaaacatttcctttgagtccaaggttcccaaaaatttaccttatcaatattttttcttctacagaatgtaataaaaaaagatgnatattaac

SEQ ID NO: 29682 - DNA, 1853 bp, Glycine max
  Clone ID: TF_GmC12124_1
cctttctctctcttcggtcaaaaacctgtcccttgtttctctctcttcggtcagaaacatgaatttggaaacgcaaccaggaacggcgtcgtattggtgctacagctgcacccgtttcgtgcacctctctgtccaaagcaccatcgcctgcccccactgtcaaagcggtttcgtcgaagagatccgtgccggcgccggagccgaagcctcgccacgccatcgactaagtcctttccccgatgatcctcttttgctccggcgacagggcttccgccgccgtaggagagaagcttccggcaaccgctccccgttcaaccccgttatcgtcctccgcggccccggcgacgactccgccgccgccgaccacgacggcgtcagcacgttcgagctcttctacgacgacggcgacggcaccggcctccgccctcttcctcccaccatgtcggagttgctcctcggctctggctttgacagacttctcgaacagttcgcgcagatcgagatgaacggattcgggcggccggagaatccgccggcgtcgaaggcggcgatcgagtccatgccgacggtcgagatcggagaaacgcacgtggaaaccgaagcgcactgcgccgtgtgcaaagaagcgtttgagctgcacgcggaggcgcgtgagttaccgtgcaagcacatctaccactccgattgcatcctcccgtggctctcgatgcggaattcgtgcccggtgtgccgccacgagcttccttccgatttggaaactagggttcccagccagatcgacgaggagacgatagggttaacgatttggaggcttcccggcggcggattcgccgtggggagattctccggcggccggagaacaggcgagagtcatttcccggtggtgtacacggagatggacggtggactgaacacgaacggtggtgctcctaggagaatttctcgttctgttagaagcaatagggttagggaaagtcgagggtttggtagagttattagcaatttcttttcattctttggaagaattggttctagaaactcttcttctggacatgggtctgtaagtagaagccgtagtcacgtgagttcaatcttcaatagaagctcgcggagacatagcaggacttgggttatggatgattaattggtgaatggtgatggcaattttgcaaagaatagtaatactttcttttttttcagctttgggttatgagattcatttcatactgtaaatagcatgtaactagcaactatagaagcaagttttttagttttccctctctgggaatctttaatatggtttgattcaacatcaatggaaggaagagtgctattttttagctttgtggatcaaacattgtgcgttggcaccagtaactgtagcagtggaccgggcatgcattgggaaacaagaatgatgctttgttccccgtgaactgaattatttgatttgtttatattatatctttcatgttagtcttattcttttattggtgagtatcctttcgggattatgttttttgagatgcctctttcaacttgcagcaccataatgttttgaccaatatgcttgataatgatgataagtataagtcactttttcctgtgtgatccacctttgaactgattgggaatgggaataggatgctgcatactgcataggaaatgcaatttgaatgaacagcagctgctaaattattgctgtggcttggtaatcataattcatctgaactctgattcacaaattgatttgtgccattgtgcaggacttttattctattattgagctagttgttggttaatggttgcatgatgaattcccaagtttcatgagttcctttttcacttttctc

SEQ ID NO: 29683 - DNA, 470 bp, Glycine max
  unsure (1)..(470): unsure at all n locations
  Clone ID: TF_GmC739933_1
gttaagcgatatctcnaactacaattcaactgcaaactcataaatctgaaacaaaaattctacacatggggcatgatccttgttggactagccatttgtctatgcagagagtgaaaaaagtggccacatttgggaagtgtcctcacaaattcctcatactcaaaatcctggaagcaaattgagcagcatgagtcgttgtataatttgaacattttactggaattaaattgttgaacaggaagcttttgaatgatattccaagccatccctttgactgtgattcccctgacaatatcgtcattgtaaatatctgattcttctccgtaagatgttgcatgtgcaatgacattgataggcttgtgcaacagctggacatatccattccacaaatatctttccatttaataaacttctcaacagggcaaccttagaaagtggctcatcacaagcagcaatgtttggcctggtgc

SEQ ID NO: 29684 - DNA, 1255 bp, Glycine max
  Clone ID: TF_GmC54233_1
aacctatctacgcattttacctggaactcattatatgaatgcttcacttccctatgtatatgtgcttctttcttatgatttttgtaaactatggtattcccttcctccttatacggcaactttcaaggacattttgtgacttcaaagtccgtgttgcagattacatacgttatcgtaaaatcacttcaaatatgaacgatcggtttccagatgcaacccctgaagagcttaatgcaagtgatgcaacctgcattatttgtcgtgaagagatgacgacagccaagaaacttatatgtggacatctttttcatgttcattgtctccgatcatggctggagcggcagcacacttgccccacctgcagagccttggttgtaccacctgaaaatgggacaactgcggctgcagggcagcaaggatcacagtgtgtccacaacggggaacaactgggacaggcagtggaagcacagctcctggactgatttgatgacatcaagctagctgctgctgctgtatattcctgtatgctctcctcgctacactcttcatcccccagttcaaatatatatggctgaatcttctgataaggaccgtaatggagagcaaacttccagtgaagaagcacaaaggcagtttcttatcgctggtagaccaccaaatctatcctttcctccaatgcaaaacttccattttctaccttcccaagcacatgcatcccctgtgaattatggagaggggtttgaaaatgatccaaatatcccaaactctcagcttgaagcttatagaaaacttcttcaatgccagattcagaacctacagattctgcaaaatcagctcgagatgctgcagaggataaaggctgatagaagtgtagatgagggcacgccatcatcagatagcagaggcaagagtgtcatttcctcatcatctggatctggtcatggttatcgtgaggatattcgagatggaaaagcataaagtctgctgtttctggtttatgccaggagcagactgcctaatgtagatataggaagaggaaaatacagaaatcacagcattgctctaatgtgacatctgttattcgtgatactaatcttgtaaatgcatagtgccccttaaaaatgatttattttggcttccttttttttgtttccatgtggattgtacgcatatattagcttttataaaagttaccttttgatcagaaacagaaatcacagcattgctctaatgtgacatctgttattcgtgatgg

SEQ ID NO: 29685 - DNA, 529 bp, Glycine max
  Clone ID: TF_GmC54233_2
taaaatcacttcaaatatgaacgatcggtttccagatgcaacccctgaagagcttaatgcaagtgatgcaacctgcattatttgtcgtgaagagatgacgacagccaagaaacttatatgtggacatctttttcatgttcattgtctccgatcatggctggagcggcagcacacttgccccacctgcaaaaccttggttgtaccacctgaaaatgggacaactgcggctgcagggcagcaaggatcacagtcagatgtccatcaacggggaacaactgggacaggcagtggaagcacagctcagactgaggctactgatagtttgagtcgacatcaagctagactccaagcagctgctgctgctgcttcaatatatgagaagtcttatgtgtatccctctatgaattctcttgtatggtatgacatttttcccaagatgctttcctttacaattttctcccttttaactccaaaaggaacctcttgtagttgtaacccactcattagtcactagtcacatattaactcg

SEQ ID NO: 29686 - DNA, 1064 bp, Glycine max
  Clone ID: TF_GmC98_1
aaatcaaactggccttatttgtcctgatcaattctcccttcataataaacccactgatcgcttctctttcctcttctctctctcagtagaaagcctacaaccttcttttatctgcgtttcctctctctctctctcgatcagtgctagacaaggactggtaaccaaaaattccaagaagggtacattaattcatggcctttgaggagcactatgtttctcaggaattgaaaaccatccccagctccatgacagtgacagaaaatttggatgggtgttttgattgcaacatctgcttagattttgcacatgaaccagtggtcaccctttgtggccacctatactgctggccctgcatctacaagtggctccatgtccaaagtgcttctcttgcaccagatgagcacccacaatgccctgtttgcaaagatgacatatgccacaccacaatggttcctctctatggccgtggccagggcatagctcatagtgaccatgatggaaaggcatcatcctatagaggcagttgtataccaccaagaccacctgctttgggtgctcaatcgctcattgcaacatcatctcaaagtgttccatatcgcaacacttatcaaaatcagcatttataccaagaagaggatgcatcatcatcacaaatgctgaaccctggtgccaccattttggcaccagggttcccccaccttgtgtttgggatgtttggagagatgttttataccagagtctttgggaactcggaaaatttatacacccacccaaattcttatcacctgggggaaagtaataatagtcccaggttgagaaggcaagagatgcaagcaaacaaatcattgaacagaatttcaatttttctgttttgttgtttccttctgtgtctaatcgttttctgagcaagaaattggattattattctctattgccctgttgtataattttaaagaaacacgggtgttagcttgagaatgagatagattgagcaattgtatgtagggtaaaagaactggtgttcttcatcatttactataatatatttgagctcgatttttccc

SEQ ID NO: 29687 - DNA, 468 bp, Glycine max
  Clone ID: TF_GmC1701_2
ggctcgagcgcagcagagggaaaataagcctggaaacgatggaagatgatgacgcagcgattgaggtgaggaaccatgtttccccagagccagaggtggaggattccagttgctgttgcccaatttgcttgggatcattccttcaactttcctacctcgacaaatgttttcataagttttgcttcaattgcattttacgctggaccaaggtggttgctagcaagcaccgttctccaccttcttctgtaaaatgccccctctgtaagactgaaaatttttctatcatatatgtagttgatgggagttgttttcaacgtcattatgtaaatcaagattttgagaatagttttatcttatcaagagctcacagatatagagtacaatgctattacactgaacaaggttttgtagatgacatattccatatatcacaatattggagatctcaaaagtactatcagccaaact

SEQ ID NO: 29688 - DNA, 384 bp, Glycine max
  unsure (1)..(384): unsure at all n locations
  Clone ID: TF_jC-gmst024166b09b1
catgtcttgatgttatctacatattcacattagcagctgaaacccctgacctgttatatattgaagcttagctcgatattatatatctgagatcgcctgatagatttagncacacctgtgtcatttgccttgagaatactggacttgcaaagaggacaaggtgcattcatctttaaccatttgactatgcacgtatagtggaaatgatggtgacaagggagaacgtgaatatcacctccatactcataggacgagatgcatattcagcattatgcattctcaagtgaaacgtgtcgttgattcaccgagtaaccattgctgacctacataggaatcatggatgctccccgtcactgaccaggcgtagcctcattgcttaacatt

SEQ ID NO: 29689 - DNA, 2026 bp, Glycine max
  Clone ID: TF_GmC7715_1
atacagtcttctagtctgtgtttgatgagttaaagttgcactttttttactgttgaatattgatactctgattttgaagtctgtagatatggacatttatttgctaacatgctcctgttggggttcacaaatattttatatacatattttcatatttcttccttgtcttgtggtttattctttaatttcatgaacttcttgtcctggagaaaaaaaaatgttggtatcaagggaaaaagcattggctaaatctgtgctcgtcgacacaatccaattgttgtctgaatcacttaacaatatttggaggatagactttgtattcaattctaactcttatgttgtacccactccgcgcccgcgagacttctctctcacactcactttctctctctataactctttctcacccgctagggtttccttttcatcgcatcttgagtttgcaacctcgtcttgtgatttccatggagggtgctgggatggaagagaataatattattaatgatgatgataataataacaagtctgaggcgcatttgacttctgccgctgcttttgtggagggtggaattcaggacgcttgtgatgatgcttgcagtatatgccttgaagctttctgtgatagtgatccttccacggtgacgagctgcaagcatgagtttcatcttcagtgcattctcgaatggtgtcaaagaagctcccagtgccccatgtgttggcagcctatcagtctcaaagatccaacaagccaagaattacttgaggcagtggaaagagagcgaaactttaggttcaatccatctagaaatgccacaatatttcatcatccaacactgggggattttgagttacaacatttgccagttggagctagtgacgctgatcttgaagagcgtataatccaacacttagcggctgcagcagcgatgggaagagcacgccacattgctagaagagaaggccagagaaacaggtcatcagctcaaggtcgcccacattttttggttttttcaactaatcctaattcacctcccatggctcctgcttcttcctctccatctcagaggggggatgatgaaccaattcctacaattgctgttgccaatctgtctccaactcctgcaactggagaagaatcatcacagctgactttagttccgcctattcaagcagaacaggtgtctgcttcaggatctggatctactgctcttgctacagatcatcagggatcatcttacaacaataggagatctcctaatcagtcatctccaagtagtcaagacagagcagggccatcagaattacaatcattttcagaatctctgaaatctaaactgaatgctgtatcaacaagatacaaggagtcaatttccaagagcacaagagggtggaaggagagatggttctctcggaacaacactatgtctgaccttggatctgaagttaggcgagaagttaatgcagggattgcaactgtgtcacgcatgatggaacgcctggagaccagcgacaataatagaagcaatagcaattctgcccccagtaatatagaggatggttcagttcaggaatataatggtcaaactttaacaccaggcaatgaaggggacggtcttttgagagacaataacacaaaagcttcttgtgctgcaggctctagttcgaactaggcatgtagaaggaattgcttgaactctgaatttgttttgtccaaaaggtagaaatagaattgcccattggggatgtgaaattccatggatgtgatgcattgcctattggctggcgcagaccaggcaagtgataatccattggcctgcagaagaagaccaacaattgtgatattggaaataaaaaaacttaaaaaaggaagcagtggtctctttcgtttgaaacctaggaacctatatatgattgtatattcacattgtaaacttatttatggatattcctcagataatctttgcataaagtactgtgtttctttcttctacttccagagataaatcactgtttttggcttaacgtt

SEQ ID NO: 29690 - DNA, 764 bp, Glycine max
  Clone ID: TF_LIB5118-039-A1-PF1-E1
ctgtcttccttggctcagcaacatcagtggctatagctatggcataggaatttccattggaattctcttgctcattataaccatcactttaacttcctacttctgcaccagatcacaggtgtcatttgctccagccactaggaataggagacgcaccccaaatgtccttgaaccacagcactctatagttgatgtaagtttagatgaagccacaattctgagttatccaacccttttgtactctgaagccaagctcaagaaatctgattccactgctacatgttgctccatatgtctggcagattacaagggtacggatatgcttcggatgctaccagattgtgggcaccaattccacctcaagtgcatagatccatggttgaggttgcatcctacttgtccagtttgcagaacttctccgattccaacaccactctcaactcctcttgctgaagtggttcctttagctagcagacaggattcataggtagggcaatagcataattttgactcaagttgatgtcctcatcacaagtcatcattgattcacaaaatatatcagatttggcaatttgataaaggtgcttgtttgtattcataggggattttttttgttgtcaattgcttgatcctttacttaattttttcttgtatacccttcgcatggtaaaagttaaagttgttgttcaaatattggccctatcaagagtacaaactctgtggggatgcctcatttcctaattttccggagggtcctgcatacc

SEQ ID NO: 29691 - DNA, 2781 bp, Glycine max
  unsure (1)..(2781): unsure at all n locations
  Clone ID: TF_GmC273_1
tccggaattttcccgcggtcgaccccacgcccgtccaccactttcaagtgcacaagcttttccccattgcaacccgtctccacaaaacaaaaccatcaaaatcctcagctagtgagtgagaaaactcagaaatatggtttcgggatggagaaggacgtttcgcacatccaataccattccccaaaacacgcaagaaccagaaaattgtaattattgttacgacaacaacaacatcaattcaagtcccaaaatcacttccaccaatttctcatcatcaattcccaccctccattcccgaaccaattcaccactttccaaacacaataataataatgcaagaactccctctcccaccaaacgcaatacccccgtgtcgtttcatcaatccactccctcttccccaaactcaccctcaaccttctctcttctcaaatccaccttacgcttatccaaaggctcatgcgaaatctgcatgcggagtgtgaaaaccggcgaaggaaaagcgattttcactgcggagtgttctcacgtctttcacttcccatgcctagcaggtcacgtgaaaaaacaccgaatggtcacgtgccctgtgtgcaacgctaactggaaacaactgcagcaaaacgcagacgaaaacaaaggaaacgcagaactcaaaacgacgaggtcgtttaagctccacaactacgacgacgacgagcctctcatgtcgcccacgtcggtctcgcgtttcaatccgattcccgaatctagtgagaacgaagaagaagaagatgaagaacaaaacgacgaagaaacaaatttcaatgtgtcgtcgatgatcagaaccaaaaacatcgacgcgttcttctcgccggaggctgcggttgtggcttccaaccggagttccgagacgtacgttgcggtgttgaatgtgaagtctcagccgcgtaacgcggcggcgaatcggccgccggcggatctcgtcgcggtgatcgacgtcggagggagtgtttccggcgaagagtatcggatgctgaagcgctcgatgcaggttgttatctcgtcgctcggctccgctgatcgtctctctgtcgtcgcattctccggcggatcgaaacggctgtttcccctgcggaggatgaccggccgcggccagatggcggcgcggcgagtagtcgacgcgctttccaccgttgagctccgccgcgatggaacggcggcgaggaacaacgcgctgaagaaagccgcgagggttctggaagatcggcggcagaagaacaccgtcgcgaaaatcattctcctcacaaacagccacgaggatcagcgattatcctccacgcgcttcgacattcattcactgagatactcttacgatggcgcgtgtaaccacgcgcaacacgaccacgagttagcgaagcgcgtgggcaatttgttgagcgtggcggcacaggacttcaaactcgagttaaaactcacgtctcgctcggctccggcggagatctccgccgtgtattctctggccaagggttgcaccgacgctctctcgccggaatccgtcgcgctcggcgatctctacgcggcggaggggagagaaattctagtggagttgaaagtgccagctggcacagcttcgcgtgggtcccaccaacgtgttatatccgtacggtgttcccatcgtgaccccttcactcgagagcttgttatttccaaggagcgtgagttaattgttccaggaccccgcacggttcgatcatgcgaccccagaatcgaacagttgagacgttgccaggtcagcgctcgcgccgtagccgagtcgagaaggttgatggctcgtaacgacgtgtctggcgcgcttgagttgctatcctcggctcgagcatctgtgagccgcgaacagggtgatgagtgcttgcgctggctcgaatccgaacaagccgagctgaggagccaaaagttaagaagtagttgtaataataattgcttcgatgaaaagggggagccacttacgccgatgtcggcttggagagtagctgagagactggctaaagtggctattatgagaaagtctatgaacagagtcagtgacttgcatggcttcgaggatgccagattttaaatgtattttttctctttttttcagtatagttctaaattttgtagtttgtaaagggagaaaataaagtgtcaataaaatttttttccgatttatgctcaaaaaaaaaaaaaaaaaaaaaggatactgaatgggtgaattcacggcacatttgggagcttgtattttgttgatgcctgaattatgtaagcatagctatagttaccgcactttagttagctaggcatgaaaatattaagaagttatggctctaatcatgaaacctgtgcacaaaactcatcactatacctcatttcttggaaagattaagcaatatctgcaggattgggaagtctggatatctcatacttaaggaaatgaaatgcagttgcagattggttggctaacaatagaggcaaatttagtgtaggggtttgttttaaaaacaatttactaaataaggtctctttttgtaacgcgctggcaatgacgggagcgtggatgtcgctattggcagcaacggggcaaagagagaggaaagagncgcccttggtaaagaaaaaacagggagagaggagagagacccgtcattggcactggcgagacatgccaacgtggacaatcctgtcattggatttgcggcacacatgattggtgtgtgataaaattacccgcattgatagaagaattggaagcgctaattagag

SEQ ID NO: 29692 - DNA, 415 bp, Glycine max
  unsure (1)..(415): unsure at all n locations
  Clone ID: TF_7042560
gcagcgtcagaggcagcgaccgagtcatgctccaattcaggtaactaactatgcaggagaattgggaacagtagctgatctaccagccgaagaagaaaggttgcatcaagagtttggtggtattgatgttggaggagagatggtgggagatgggagaacgtgtnnaaggaaggctagctntttggttgctaaagcattgggtgtggaaaccagtcagggtgagggttttgcagcaaatttgtttcattgtaatgtatgcttggacacggcaagagatccgggtttgacctgttgtggtcacttgttttgctggccatgctttcataagttgtcgtatgctgattcagatgtcaggaaatgtccggtttgtaaaggagatgtcccgtgagaaggagtggtcgcagtatatggcagt

SEQ ID NO: 29693 - DNA, 2673 bp, Glycine max
  unsure (1)..(2673): unsure at all n locations
  Clone ID: TF_GmC278_1
cgacttccgtttattcgtttccctgcttctgtgagaattttgctgacgatcatacgctttctctttctttggctttcggtttcttggtgctgtttgagtgtttgtgcattgtacattattatctctacatgttctgatgttattttccttgcaggttgtgaattatttgcaaatctgattcaactacagtgtctattttgactcccaagattgcaagtggcagttatggggcataggcagttacataacacatcttcattgttcgatggtgagcctgaccagaactggaatcatttgcatactgatcaacaatgtgtgcaccttggtaggactaacacttcagagaatagttcatttatttatcctgctgaaaatatgtccatagatagcatatctttcccctctcattggaattcttccacaaggtcaaatggatatgcatcctctagtcacaacattgttgtacctcctcacagtcagatgcatcaggcacttataatgatcaatttcatgtatttgtctaggacggtaagcctgtttagagcgtcggaaaattatttacaccaaccttcttcctccaattatgacagacaaacatttcatgttgatgctggttttattgatcttacaatgggaagtggacaagggcatcacaagcgtaagagccctggaattccttcagtctacgagggaggcagtactagtagatactttaatgctgggagttcaactgatcttcctatatcttcagaattgtggcaggagaagccaaatattgattctcaatatatgccctgggatcattttactatgacacccacattcagaggtactggcctttcaattaagggtgagggttctttgcggaatgtgaggagccgttctacacttgatttggattccaatctgtctaggacccatttatcaagtaatcattcacacaattcctaccctactgtcccaccagttgaccattctagcatggcggatctttctggtcagacttctggtacattaacaagggattggagccaaatgaacatgtctccagctaatggaagggtgttattatcagatacaagttcttttggtcttgaaacaagtcacttccttgttggaagtggtgctactgctagcaatgcttctgtagatgttgggggcttccatcatgaatttggtgcaagcagaaatcctactgctcctcaaagttttcataatactcatactcagaccgctaggggaattcgaagcaactattctcagagatccacaccaacttttagggcttcttcaagcttgcgcttgggacatgtgacatctgatgatggattgcctatggtagctgaaagttactcttctagacatccaaggccattgagcaccattggctggaggaatggtgatagaaatgggaggtcaagaatttctagtgaaagatatcgatcattgactgaggagagtggtctccatgatcgattttcctctgagggtttcatggttgttgagcgtgcatcagtgtatggttccaggaatatgcttgatcagcaccgagacatgaggatggatgtagataacatgagttatgaggaactacttgcacttggtgagaggattggctatgtgaacacaggagtctctgaggatttgctttccaaatgtttgacggaaacaatatattgttcatctgagcaaagtgaagacgaaggaaactgcgtaatatgtctggaagagtacaagaatatggacgatgttggaacacttcaaacttgtggacatgactaccatgtgagctgcattaaaaagtggctatctatgaagaaattatgtcctatctgcaaagtatctgctttgcctgaggatacgaaggataaataacttctgtaatataaattaatcccattttgtgtatatatttggacatccctaaaaaatgaggaaacgaacctgtttttggaaatgttataacaggaatgctactctatatcaatgtatttgttttcggcttcgatctcaattactcgaagccttgaaatgcacttggtgaaagaattggctatgtgaacacaggaatctctgaggattcgcttaacaaatgtttgacggaaacaatatattgttcatctgagcaaagtcaagacgaaggaaactgcgtaatatgtctggaagagtacaagaacatggacgatgttggaacacttaaaacatgtgggcatgactaccatgtgagctgcattaaaaaatggttatctttgaggaaattatgtcctatctgcaaagtatctgctttgcctgaggatacgaaggataaataactactctagtataaaattaatctcattttgtgtttatatttgaacatccctcaaaattgaggaaacatattgcttttggaaatgttgtaacaggaatactgctttatgtcaatgaatttgtttccggcttcgatctcaataacgcgagccttggcgctctctctcaagatgtggatgaattctacggactctgcgatccagataaggagaacttgtgcctctatggacatnnnnannaaacatgngaagngactttgncggagaggaagttccttcggagctttcggagcctgcactcggaaataattttgctagggatggcatgaaccgcaaggactggctttctctggttgctgtgcac

SEQ ID NO: 29694 - DNA, 2180 bp, Glycine max
  Clone ID: TF_GmC278_2
ggccggattcccgggtcgccccgcgtccgcatttccctacacctttcttcttcttcttcttcttcctctgcaactctctctctcatcttgcgtgtttaagatcgtcactcaaacggcgccgtctcctctccgattcctcagccacgtttatcaggttgtgaattatttgcaaatctgattcaactacagtgtctattttgactcccaagattgcaagtggcagttatgggtcataggcacttacataacacatcttcattgttcgatggtgagcctgaccagaactggaatcatttgcatactgatcaacaatatgtgcaccttggtaggactaacacttcagagaatagttcatttatttatcctgctgaaaatatgtccatagatagcatatctttcccctctcattggaattcttcctcaaggtcaaatggatatgcatcctctagtcacaacattgatgtacctcctcaccagtcagatgcatcaggcacttctaatgatcattttgtgcattcgtctagtgctggaccatcattgtttataccgttggaaaattatgcacaccaaccttcttcctccaattatgacagacaaacatttcatgttgatggtggttttattgatcttacaatgggaagtggacaagggcatcacaagcgtaagagccctggaattccttcagtctatgagggaggcagtactagtagatactttaatgctgggagttcaactgatcttcctatatcttcagaattgtggcaggagaagccaaatattgattgtcaatatattccctgggatcattattgtactatgacacccacattgagaggtactggcctttcaataaaggtgagggttctttgcggaatgtgaggagccgatctacacttgatttggattccaatctggctaggacccattcatcaagtaatcattcacacaattccgcaaagaaccctcacccttcattgagaggtactggcctttcaataaagggtgagggttctttgccgaatgtgaggagccgatctacacttgatttggattccaatctggctaggacccattcatcaagtaatcattcacacaattcctaccctactgtcccaccagttgaccattctagcacggcggatctttctggtcagacttatgttacattgacaagggattggagccaaacgaacatatctccagcttatggaagggtgttattccacgcgtccggtgcttttggtcttgaaacaagtcacttccttgttggaagtggtgctactgctagcaatgctgcttctgtagatgttgggggattccatcatgaatttggtacaagcagaaatcctactgctcctcaaagttttcataatactcaaactcagactgctaggggaattagaagcaactattctcagagatccacaccaacttttagggcttcttcaagcttgcgcttgggacaagtgacatctgatgatggattgcctatggtagctgaaagttactcttctagacttccaaggccattgagcaccattggcaggaggaatggtgatagaaatgggaggtcaagaatttctagtgaaagatatcgatcattggctgagagtggtctgcatgatcgtttttcctctgagggtttcatggttgttgagcgtgcatcagtgtatggttccaggaacatgctagatcagcatcgagacatgaggatggacgtagataacatgagttatgaggaactacttgcacttggtgagaggattggctatgtgaacacaggaatctctgaggattcgcttaacaaatgtttgacggaaacaatatattgttcatctgagcaaagtcaagacgaaggaaactgcgtaatatgtctggaagagtacaagaacatggacgatgttggaacacttaaaacatgtgggcatgactaccatgtgagctgcattaaaaaatggttatctttgaggaaattatgtcctatctgcaaagtatctgctttgcctgaggatacgaaggataaataactactctagtataaaattaatctcattttgtgtttatatttgaacatccctcaaaattgaggaaacatattgcttttggaaatgttgtaacaggaatactgctttatgtcaatgaatttgtttccggcttcgatctcaattacgcgagccctt

SEQ ID NO: 29695 - DNA, 1938 bp, Glycine max
  Clone ID: TF_GmC665_1
cccacgcgtccgatttcttgattaagatatcaagagagagggagagaaagagttgtttgtttcattgcgatccctcccaagaacggctctgatagctctttggtgcagcaagcggcgtaggaatatcaaagacaaagccattcgtgcctcatacctcatttcatcacacccattcatctccatcacaacacaacatacatacgaaccagttttgtgattgaagctgcgatggaggaggagacctccgatgcaatgaaccttgatttgaatctgggcccaggcccagagcccgaaactgggcccatgagcaatgaagctgtgaacttggacgattggataggggagcctcttcagagaattagcgaagctgtgaggagggcacggcaaaggtggagatggcgccaccttccgctaccgcatcctgaatttcatgctcactttccaactgaagctacccggcattttcaaataccacctgaggctcgtaatatctccgtggaattgaaccactttttggtcaattctggcaatggaagcgccttgcaggccggcgaagggagcgtggcggccgaggagagaatggaggaggtgccaaaggcgtgtgacaatgtcaatggtgtggcagaggatgaggacttcacagaagaaggaggatgtagaaaagggtagtggcaatgatggggacttttttgattgtaacatctgtttggacctggctagggatcctgttgtaacttgttgtggtcatttgttttgttggtcatgtttgtataggtggctgcatctgcattcggatgcgaaggaatgtccagtttgtaagggagaggtgacacttaaaagtgttaccccaatatatggccgtgcgaacaatgtccgtggtcctgaggaggattctgcacttaagatccctcccaggccccaagcgaagagagttgagagtctgagacaaaccattcagagaaatgcatttgcactccctgtggaagagatgattcggcgtcttggaagcagaattgagcttacacgcgatttggttcagccacctgaaccggatgctgcccgtgaaacagctgagagaactacttccttgctaaggttcttgactgcgcaagggatacgtagagagcatcagaatctagtggcacccccagaggatgtaatgggtttggcacaaaacaatgttaatacttctgaggcaggggatccccggactagggtgcagtcccatttgcttcgaagaacacaatcacacagagcaacactttctactctttcatcagcactaacttccgctgaaaggttagttgaggcatatttccgtagcaatccattaggtaggaaccaagaacaacctcctcctccagttgatgacagagattccttttcaagcattggtgctgttataaattcagagagtcaactggacactgctgtagagattgattccatggtatccttgtcaacatcctcttctaggaggaggaacgatgcttcaagagtgtctgatgtggatagtggagattctcgtgctccaaggcggagacgtttgaactgataaaagtctgttagatgctcaagttttactattctatcatgtatcacatatgataataatcttccaacacctatgtaagtgcttcatgctttcttgttaccttatattatgaagttttcaccatttacgagttttggtagattaacaccggtttcagaagtgcttcggttcttgtttattaatctcctttgacgattgagccatttatagagtcttgtcatccaggaactgatttttgctatagaataaccaagctactttagcatttaggggcatttggaagagattacaagtagcatattagacttcatggaattggcttatgattttttaacgtttttttaaacttatttcaataaaattcataatgaaatttattcatc

SEQ ID NO: 29696 - DNA, 2310 bp, Glycine max
  Clone ID: TF_GmC187_1
cccagagtcgacccactcttctggtggcagactttgctggtgaagcgaattttgtttcctagtcgttggcctttcactgtctctctctccttctcctcttatctgaatcatcctctctctgtgagtgaggtgactcgttgttgtttgtgacccggcgattcgttcctttgactccattcgaagcaaccctttgtctttcttaagcagtttcctgtgatgggctttggatttttcttttggattccctgtgatcacctgggaactgggttgttcaaattgaattttttgtgaggtatgctgtgtttggggtttgacatggttgaggttgactctgaaagattgaaacttgagagtagaggagtggggatttggctgagaattgcatgtgggtggttggtgtttatgctgtttttcagtcctgtggcaggtttgagacccttgagctacagaactaattcatggggtgatgagtgggtttttacaagaaaagacgaaagtgacttaggtccattttcacaatggaacataagtggaacttacagagggaattggaagtttttagatactacaaatggttctaccgggatttccagacatcagaaaaataaatggaaattctgtaattgaattagttagtatgcccacaaagataactggtgtacattatgtgcagggggtagtcatattccatgatgtatttgacaatgaatacaatgttggtggagctcaaatcagagtagaaggtgtatatatatggccttataggcagcttcgaatggtagccaacagtggaaaagaggtggggttaaatcaggatggagattatattttatccaatccatatcatctgcttggagttttctcatcacaagtattccaagagtcttcacaacataagatgtggagaagaaagcattctccattacatggcatggagaaacattgcaatgtagaaatcgctgcacatgtttcacgcctgtcatcatcaaaacatgaaggggagcacgattctttccagctagaagggttaatggagagtccgtccgtggatgacgatgggtactcggtttgcaatttaattatatattctacattgaccaaaattgatcatacgcatataaagcattgaactatgcttgatgtttacgtttatctcatttttgcatgttgctgcaattcttctacttcaggagtatcgcaacacccaatctggggctgctaaggtttcaatattaatgattggtcagcaagccatagtagatgcttatctttgccttacacatttgactgcaggaatactagttgaatccctgttcaatgcttttgcaactgctgcatttttcaagtttgtggttttctcaatatttgagatgagatatctccttgccatctggaaggcaagtaggcctttgagcaatggtgaaggttgggagacaatgagacgtgaattgtcagttttatacagccgtttctatgggatcctattgggaggcatactgctcatgtatgaattccacaatcatttgagacctattcttcttcttgtatactcattttggatacctcaaataatcaccaatgttattcgtgactcgcgcaagcctttgcatcctcattatatcttaggcataactgttactcggctagcaatcccattatatatttttggttgtcctaacaacttcttgcacatagaaccagatcagagctggtgtgtttgtttggctatatttgttggacttcaagctgcaattctcttgcttcagcactattttgggtccttgtggttcattcctcgtcagtttctacctgagaaatactgctattatcggaggtttgctcaagatacaaatcatgccacagactgcgttatatgcatgacagccattgatctttctccgcgatctaatgattgcatggtgaccccttgtgatcattttttccactctggctgtttgcaaagatggatggatataaagatggagtgccctacttgccggggccctcttccacctgcataaagagatttctagtgttcatatcaagagaatcaactcacactgcccaacaacataattttggttgggatagaatccatattccgtataattgcaccttcagtacaatactgaaatacgatacttctcacaattgtatcatgcagcattgttataattttagactctttttttcctctcctttttatttcactggttatgtatcaatatcaagttgtacattagaaattcaatatgatgatcttttgacatccaaaaaaaaaaaaaaaaaaaaaaaaaaaattttaaggca

SEQ ID NO: 29697 - DNA, 1339 bp, Glycine max
  Clone ID: TF_GmC1777_1
aaggatgaaaaatgtaatttaaaggttgcattaacggcaaagtcatttggccaaaatcttggttgccgtgccggcttcaacggcttttgactttagttgtaaatccggccaacagaacactgatacgtgttcgatttagttacaacttagtattgtacttactaatattaatatatgatgatgtttagcttggttagcaaaactgttgaaataaatatggagtaaattgcttttgaggggaaaaaagaaaagaaaaaggagaattattgtatgcgtgagagagtgttactcaaattacgagactataaagaagcatcacagtctgtaaaggaactaggtttcttggatcttcttcttctattctggagtaaataagggaggttgcaatggacactagtattagtattagttaaagaaaaccccattgcattccatttggcaactattcctatccaattttaaatgctcttccacctcacgagatctccgtggccctagcctaccactactcacttcttcaatgtcctactcctcttcgatatgagtcaactcggcgccgtgttgcggactcagagggagcccaggaggagtaccattctgggtttgttgacggagcaaatggacggcgttgatagtgggacccgcaggaggcgcagcttcaaggaacgcttcggattcatcggcatggggtgctgtggggccacctggggcttccgttccgacgcgctaagtgtcacccaaggagaacagcaacagcaggaaacggatccagagtgcgtgggtccagcaggtttgggttcgggtatgaatctcgcggcggcgttagcggcggagaggcagctccgggggccgcaggaggaggcagtgagagcgccggggacgccgtggagggtgtcgctgatgaggctgctggaggagaccgaggcggagaaggagaaggagaaagagaaagaggagaatgttgtggggaatgattcggtgtgctgcgtgtgcatgggaaggaagaaaggcgcagcgttcatcccatgtggacacactttttgcagggtgtgttccagggaactgtggcttaatcgaggctcttgtcccctttgcaatcgctccatcctcgagattctcgacattttctagaatttcttctaactactttttattattcttgatccagaaccaaccacttcatccctccgcatgtgtaatagtatcatactatgaatctcatcatgtatttgttaccgcgctaaatgtttctctcttgtatgtactatatactactatatgcctgtgactttacaccagacaacattcaacaaagtcggctccattattttgttaaaaa

SEQ ID NO: 29698 - DNA, 678 bp, Glycine max
  Clone ID: TF_GmC101798_1
tgcaacaaatgcaaaaataataatttctattaactcgaggtaaactttgtaaatatacttttccatgatgacctgttcaacaagttgaataaccttcatagtcattctcagactaatgacaaccattgaaacacaagggccaaaaaataaataaaattttaggatacaacacaagggccttttatgaaccttcttttaccttttgtcctctcccttaagcaggtcatttttatctctaccatggatttgatgtttattcagccataatagtaaataagcattgatagtttcagaaaaaaaggagtgaagttctgatatttacagaaaaaaaggcaagtgacaggacgtttcaaagcagatattcatcaaccactagtcactcgagttctctgttggcgttgaatcaaatatgcatatgtcccctcgacaaagtgggcataccctgtgaatctccttcagccacttgtctatacatgttctatgaaattcatgatggcacggtagtactcgcatgttgtctccatcctcatactccacaaggcatatatagcatatcactagcttcttagtaattggacaacaaatggacggccatggcattttaattggaaacaatggaggatttgattgtgtgcagcatcctcttgatgcttatgcaacttctcatataatttgaca

SEQ ID NO: 29699 - DNA, 997 bp, Glycine max
  Clone ID: TF_GmC263823_1
actgcaagccaaacactgccctctcttatttctctctctctctaaaatattgttatcaaaaccctaacttgatagtatcttccatcacacatgacacgagggctgagactcctccaatccgcggcggcgccaccgccggaggccgccgcagccgtcgagtcggacttcgtagtgatcctggcggcgctcctctgcgccctcatatgcgtggtgggcctcgttgccatcgcgcgctgcgcctggctccgccggggacccgtcgccggctccggctctggtgccggagaatcgccggcgacggcgaacaagggcctcaagaagaaagtggtgaattcactgccgaagttcacctacgccggcggcggcgaccggtgcaagtggtcggagtgcgcgatttgcctgacggagttcggcgccggcgacgagatccgggtgctgccgcagtgcggccacgggttccacgtggcgtgtgtcgacacgtggctcgcgtcgcactcctcgtgtccctcgtgtcgcgcgccgtttgccgtcaccgcgcgctgccataagtgcggccattttccggcggtttccgcagccgccgcatcggagtccaaggccgtcggcggcgacaatgctgccgatagcactgcgaatgcgaatcgtaataatgttattattacgaatggatttagtaattacggtttcttgccttgaaagctgttttagtaattacgagttcgcatgtaagtatagataaaattaagtgcttctttcgtcatagtatagtgttcctcatgtgttatgtattaggaatttacgagtaccctctttcttttgtaatttgtatagagtcagctttttgcgcggcatggataagaaattaagaattgatagtataattatgtaaaagtttttttttttttccttttctttactttttcttagagaggaattctcttttctcctactccttataattacaaggggaaaaagataatgtcaccaggtttttatc

SEQ ID NO: 29700 - DNA, 632 bp, Glycine max
  Clone ID: TF_uC-gmroLIB3259P159g12a1
aattatactatcaattcttaatttcttatccatgccgcgcaaaaagctgactctatacaaattacaaaagaaagagggtactcgtaaattcctaatacataacacatgaggaacactatactatgacgaaagaagcacttaattttatctatacttacatgcgaactcgtaattactaaaacagctttcaaggcaagaaaccgtaattactaaatccattcgtaataataacattattaccattcgcattcgccattgtcgccgccgacgggcggctgcggaaaccgccggaaaatggccgcacttatggcagcgcgcggtgacggcaaacggcgcgcgacacgagggacacgaggagtgcgacgcgagccacgtgtcaacacacgccacgtggaacccgtggccgcactgcggcagcacccggatctcgtcgccggcgccgaactccgtcaggcaaatcgcgcactccgaccacttgcaccggtcgccgccgccggcgtaggtgaacttcggcagtgaattcaccactttcttcttgaggcccttgttcgccgtcgccggcgattctcccgcaccagagccggagccggcgacgggtccccggcggagccaggcgcagcgcgcgatggcac

SEQ ID NO: 29701 - DNA, 1725 bp, Glycine max
  unsure (1)..(1725): unsure at all n locations
  Clone ID: TF_GmC57441_1
agcgcctccagagcaaagatagcatctttttcccacacaacacgcttccgattcggagctacctcttttttgtttcatcttcttctttctttctttgtttctgattctgatgggtatctcatggagtggcagaagaagaaacaattacctccaaaaccgaccaccacctccacccccttcttactactaccatacagaatcccaccctgcaccaccaccgcagccgcaaggttactttctcccttcagcaaccccttacgcccctccccctcccatgccgccgccgccaccaccacaaacccactcaatttctttctattacagctccaaccccaattcctacggcactcccactctcgcccctcgctttcactacccgcagcattactaccacccccagccccagccccagctcgccgcgtggcccgtccctcgtcctgctgcccccactcctccgccctacgtcgaccaccagaccgccaagaagataaggaactacgtcaatgtccacaaagacaccctgcgcctcgaggtcgacgaccacaaccccgatcttcatcttctctccttcgttttcgatgctgtctacgatggcagcattactatcttatactttgccaaggaagaagaaaaatgtaggtttgttccattatatcccgaggcatttcagccggtcagaatcccctttcagaaaggagttggccagaaatttgctcagccttcaggaacaggaattgacctaggcttctttgagttggatgatctttcaaagccctcacctggagaagatgtctttcctctagtaatatgtgctgaaacaagtttgaaaactacctcagaagatgaaactcctggtgattccttgctagacgcatcccctcacatgcaaataactcaaggtgtcttagagaaaagtaatggtgctggtccattcctaataaaagtagttaagcagattttgtggattgatgatgttcgttatgagttgagagagttatatggaataggaaactcatccgcagctgattttgatgataatgatcctgggaaggagtgtgtcatatgcatgactgaacccaaggatactgctgtcttaccttgtcgacatatgtgtatgtgcagtgagtgtgcaaatgctcatcgacttcaatccaataaatgccctatatgccgtcagtctattgaggaacttatagagatcaaggtgaacaatggcgatcattgagattttttccttcggatgctaagttgcatgacagtcccaataaattccttttaagaaaattcaccccctttttacatgtctgcagtcagctattatatagcaatttgtttttttcttttttgtaaattgtagtcaataatctgtttatagattttgtgtgatgtgtttgagggaaaattagatcattagtgatcgaatgtttttcctcccgtatcatctattgtacaggtgatcatttttccatagtttttgtcttaatggtgtttaagagatcatttacatagtaatttgccaaacaagggagaaatgaaataacacctggtttgatgcataatggattatgtttgaaagttatctcacattttatcatctataatagatgtttgaaacaaattccaaaaaaaaaaaaaaaaaaaaaaaaaannnnnnnnnnaaaaaaaaaaaaaaaaaaaaaaaaaaaaaaaaaaaaaaaaaaaataaaaaaaaaaaaaaaaaaaaaa

SEQ ID NO: 29702 - DNA, 549 bp, Glycine max
  Clone ID: TF_20075430
ctggaatgcgccgtgtgcctcaacgagttccgcgacgacgaaacgctgcgtttgatccccaagtgctgccacgtgttccactccgattgcatcgacgcgtggctggcgaatcactccacttgtcccgtttgccgcgccaacctcgcgcccaagcccgaggacgcgccatcttccgttgagattcagctttcagatccggcccggcccattgggcccaatgagcccggtcatgatccgaattacatcaacccggtggaggagcgcgaaggtgaacaaaacagaatcgttacggagcctccacgtgttttagatgatcccaaccgggcccgtccggttcggtctaaatcgaccgggtttggcattgcaaggctgtttccgcgatctcactcgacgggtcactcgttggttcgaccgggtgaggattgtgagcggttcacgctgcggttgccggaagaggtgcgggaccggctcgtgcgatccgcgacgctgaaccggacgaagagttgcgggatgacatggcagctggagagcagcgagagaaggggttac

SEQ ID NO: 29703 - DNA, 1276 bp, Glycine max
  Clone ID: TF_GmC759_1
ttttacggctgcgagaagacgacagaagggggtactccatcatttccttgttcttcttccttctcttcattctgtctctacccttcaacgcaactttctttcttttctattgagcttccaatattctcacgccttgcaatcgtagttgcaccctccaaactccttcccttttctttcatctgttcaggtacttgcagtaagagaacatattgtaaaactaaaagggaaaaatggccttagatcactttgaggagactgtgcaccaaaaaggaaattggaaatcttccagtgaaatcattgcagattctgatagaaatgcctctggtgactttgactgcaacatctgcctggagtgtgtgcaagatccagtggtgacactttgtggtcatctttattgctggccctgcatatacaaatggcttcattttcaaagcacctctttggatgatgaagaacaacagaggccacaatgtcctgtatgcaaatcagaagtttctcaatcctcccttgttccattatacggccgtggccaaaccacattaccttctaaagggaagccacgtcaagtaggcactgtcataccacaaagacctcatggtccaagaacacttaacactagaagtgtttcacaacctatttctcaaagttaccatccctatagtaatccttatcatcctcaacaacacttcaactcgattccaagcggttacacctcacctatgattagaacaactggttcaatagacaacacatttggaatctttggtgagatgatatatgcaagggtctttggtaaccacgtgtcaaacattcatacatacgccaattcgtacaatctttcggggaccagtaacccaaggatgagaagacatttaatgcaagttgataaatcactcagcagaataagttgtttcctcctttgctgcctagttttgtgtctgctcttattctgattgctacttcattttcatcattagttatagtgcatccttacatagaatacattcactcattgatccagatgtattctatgttagagaagctgcaaattgatgctgagttatgtgtaaattaccaatctctctacgagctatatgaagtgaataatgatattctcataccatttttagaacattttctttttctgtccctctatatcacattgttcatcttatcccatttctttgctaattgtaaaagttttgggggagtagagttatacatttgagagaatagattgaagtcctatgggtaaacaaataaaaaaataatgtca

SEQ ID NO: 29704 - DNA, 382 bp, Glycine max
  Clone ID: TF_LIB3138-015-Q1-N2-E3
cgccaacgcgcgacgattacatcaaccaaaatctcacgccatcacccgcatcagacgaaagggcgtgccccatatgctacgaaaactggaacgcagatacagagcaaattatccggacccattgcaaccacactttccaccgcgaatgcttcatcgcatggcttggcaaggaaaacgtcaacagcgcgaactcgtgccccagttgtcgcgcaatctgctaccccaaagttgagcaccaaaaagagacaaggttgacgctggatatgtcgtttttgtaccggaccatgcgctcggagtacattacgcgaatttcgttggcgcgtcagtcgagggcaaagaaacacaccaaccagcgacgatatgatgatgaggatggcttttg

SEQ ID NO: 29705 - DNA, 1997 bp, Glycine max
  Clone ID: TF_GmC857_1
cctctcgcgttcgcccacgcgtccgtgtccatgttgaggcagagagagcgtaatcataaagtccgtccgaaacaaaaagtccctccctccctccctcccaccagcttcactcccgaaaccggcttataattcataaacaacgtttcatcattaatacggcgccgattccaagatgttcaataacatagagccacgtggttggcgacaagctaagacatgactacgcggtttcgctgttatttttgttcacgcgacacatgagcctgctccgtcgtccctccctcctcctctcatggaagaagaaatctgaaaccctcagagagaaagagaagtaagaaacattctgaacaacaccaccccatccacgatcttctcatccttaaactgtgttgtgcggatctcagatgatgatgtcttccgggacatcctcgtactggtgctaccgcttgcagccgcttcgtccgtgtctggccccaccacaccgtcgtctgtcccgactgcgacggcggcttcatcgaagaaatcgaacacccgccccgctccgtccacctcgacccccgacgccaccgccatcgcttccccgctgccgccatgtacatgatcggacaacgaccctcctccgacccccgccccgcctcatccctccgccgcacccgccgcaacggcggcgaccgctcccccttcaaccccgtcatcgtcctccgcggcggcgcggaggacgaaagtcgcggctttgaactcttctacgacgacggcaccggttccggcctccgacccctgccaccaagcatgtcagagtttcttctcggatctggcttcgataggcctttggaacaactctctcagattgagatcaacggtattggaaggtacgagcaccctcctgcttcaaaagcagccattgattcattaccaaccatcgaaatcgatgacacccatttagccatggaatcacactgcgcggtctgtaaggaagcttttgaaacaagcactgcagttagagaaatgccatgtaagcacatataccaccctgaatgcattttaccatggctcgcacttcacaactcttgccccgtttgtcgccacgagttacccgctgataccccgaatccaaatcaaaatcaaaatccgtctcaaaatgttgccttgaacgaggaggagaatgtggggttgacgatttggaggttgcctggtggagggtttgcggtgggtagattctccggtgggagaagaggtgctgagagagagcttcctgtggtttacactgaaatggatggtgggtttaacaatggggggggtgagccgaggaggatttcttggtccagagggaatagagggagggagagtggagggttgactaggtttttccgcaatctgtttggttgcttcagaggaagtagtactcagcgttctgcttctagtagagagtctatgagggcgagttcctctcgttctagtactatggatccttcgttgcggtctcggaggacttggtctatggatgtaaacagtgggatgagagcgtggtagtagtagtaataggatcgatgactgatgagggtaaaaggctaaaaatctcaactttgtttctgggttcctctgtgtaccgtgtcattgtcaaagtgtacataatgggattgatcgatcgagagtcgtcgaggatgcaatgtcttgtgattgattctcacattttcaggatgttggatggggaaaccgttgtgttagcaataggggattggggcagggagtggcatcaacaatgggagaaagtgaaaccaatggggaggaatgaggttgaaggagggactcgggccgtgattgtgaagtattatctttggaatttttggggggaggggggacatgatgtgatgatgatcatgaacttcattttactttgataatgaactgaagcaccttcgtattgttttttcattccatgctttatctttctcgtcattggtatatgatcctctaaattcatggtgtcgttttttgtc

SEQ ID NO: 29706 - DNA, 653 bp, Glycine max
  Clone ID: TF_GmC4135_1
ctctaccaatctttaagttcaaattgaagaacaatgaaaatggtgatgaccaggatgccaattcagctatagatgaaggtggaattttggctgcagggacagaaaaggagcgaatgatttcaggagaagatgctgtttgttgcatttgcttagcaaaatatgcagatgatgacgagcttagagagttaccttgctctcacgtttttcacgtcgaatgtgttgacaaatggttaaagataaatgcaacctgccctctctgtaaaaatgaagttggtacgagtaatggagggtccccttcagcctgagagagactccagtacgtagccgaagtttatctctgctgaaggcacatatcccccatgaagttgcagcttttcaagtgtacatcatcaaacttttggattctgctttgaaggtgagatccaaagatagatgcaaatcaatatcttaaacatgtgatgcaaatcaaggttgagaatttgtttctacccgccctagtcacctctctttttacgcttttttcaccggttttacatactcaccaagtattgtttgtagaaaataggatgtttcaaatctttcttctgtttatcagttctgtatatataacaaaatttagttaaaatgttgattttttaaaatttaaaactgta

SEQ ID NO: 29707 - DNA, 1421 bp, Glycine max
  Clone ID: TF_GmC6815_1
gtccaaatagagattattacctaattggtacttgaatttgaatgccttaaaatgacactctaactctctctacatcggcacttgtcgagtttgcataagcatggcttattttctccaataaacaaagtttcaatatcaaaaaaagtaaacaaaacagattcaacaagtgtcaactggagcaatggttaactgaaactgaccatatgataatcacatatggcaaatgtataatatgtcaatcatggacaacgttttttgggtcagaagatactctccaataaacaggactccaagctgatgcatgcttttgttttcatcgaccagaagatattctaattaattgtccaagacaaagcactacaaaaaccaacaaacattaaaagcgtgcagggtggggactgttatagtaaaatagaaagacaagattgaaagctttccaagttgtctgcattcgttggactaacaccagtggagagatgctatgatatgttatgccaatcaagtagtagcagccatttctgatttccactcacaaatgtttatttagtaagaaaagaatcaaaaagagagaaccaaaatctggtaattaagatcttctcttcagaagatgtgtaacaccctcaagttcaacccctttaagaaccgtttgctaataatgttcatgctggttctttctctccccttcaatgttcaatcccaagccaaagatagtgaagaacagaacctggcagaactccctcaaacggttcatccaagcaagggaatagtaatagcagttctctccacaatgtttgccataacattactcttacttctctatgttaaattctgccgaactatccctcatgaactccttaggcaaaactcaaatctccaaaactttcagggcctaactcgatcaaggtctagagtttctgggattgacaaacaagtagttgaaacacttcctttcttcaagttctcttccctcaagggttccaaagaaggcctagaatgcaccgtttgtctctccaaattcgaggacacagagactctaagacttcttccaaagtgcaagcacgctttccacatgaattgcattgacaagtggtttgaaagccactctacgtgccctctttgtagacgcagggttgaagcaggggacattaaaaacctcaacttttcattaagctcgcggttcctccgagttccttcaaatctcacggaggatccaaaccttgaaatctttgttcacagagagccatctcatggagggtcagcatcgatccaaaggtaaaataattaaaactcaaactttaaatttaccgacaaaattaatagttttcataaagcaaaaaaaaaaaaaaaaaaaaacttatgtctgaaaaaaagacctcaattaataaagctcacatttaaattaataaaaaatctgttaaaat

SEQ ID NO: 29708 - DNA, 1717 bp, Glycine max
  Clone ID: TF_GmC1738_2
ggctcgagatcgataaaagcaaagggcatctgtccatagaatagaattgcaagtattctaccaagaagtaagaagcacacccatccaccgttcaacgccttctactaatacttctcctttctctttcccaaacacaaatcactcttctcttctaattcttatcacaccactcccctctttataatcatgcaacgctctcactctttccctctctagagacctcgccctgccatgtcatcacaaaccgcgcccacggaggcgccggagccttatacgccgcttctccgctcccgcaccgatgccggccgaggtcccgcccccacgctggcgctccttctcggccgcgccggccgccgtggcccatccatgctggtacgtgagacggcagcgcgtgagctcgaggagcgccgcgctgactggggctactccaagccggtggtggcgctcgacatgtcgtggaacatggccttcgtggtcgtctcggcggctatgctcgcatgcaccacctccgagcacccgaccacgccgatccgcgtgtggatcgttgggtacgcgctgcagtgcctcgtgcacgtgttgctcgtgtggctcgagtaccggcgccggagccggagggactctcgcagcggcagccagagggcgcgggacgtggagagcgacgccggcagcggcgacgatgacgactacagtgacgacggagatgggagctctggcaacacgtctcgctccagattcgcaaaacgatgtgagtcgttaaataccggggtttcattcctttggtggatagtgggcttttattgggttgtctctggtggcgatatacttctgcaagatgccccacgattgtactggttggctgttgtctttctggcatttgatgtcttttttgccatcttttgtgttgtcttggcatgcttgattggcattgctctctgttgttgtttgccctgcatcattgctattctctatgctgttgcaggacaggaaggtgcgtcagaagcagatcttagcatgcttccgaaatacaaatttcgaatattaagtgatgtggataaacctagtggtggagctggatcaatggttcccatagaaaccagcagtgcttacttggaaaatgaacgaacacttctactcgaggatgcggaatgttgtatatgcctctgttcatacgaggatggagcagagctgcatgctcttccctgcaaccatcatttccattcgtcgtgcattgtgaaatggctgaagatgaatgcaacttgtcctctctgcaagtacaatattctcaagggaaacgaacaagtgtgacagaaaacgaagaacctaccaagtcccaactgggtgtttcaacaactgttgtgtaatatgtatatataatttcaagacaagaaagagtttacttccctactcgctgggttttgatggttgtttcgtttagctgtttctgtagagaaaagatatatagagcatttattgacgaataagttagcaactgtagtctacttagaattatttcgtcctttgttagattcagagatgtccaatttgtaggttgttcatttcttttctgacggaaactggattgtttcatttgctactggttgagtaatcgtaggctttattaagttgattgtgttacattaatccatctatgtatcttgtttatttatggactatggtatgaactttcttattttaagatgtgagttttttgattacg

SEQ ID NO: 29709 - DNA, 860 bp, Glycine max
  Clone ID: TF_GmC288365_1
tattcattgattcttagagttcttccttccttccttccttatttgtttgtttctttcttaatgctccaagagatcaataggtctaaacaaaaatgagttattgcaacaactttcatcatttaacttcaaggaattaatgagttattacatgcatgcgtaaataagaaaaatgagcatgcaaaaggagagtcctcttattagactccacagtttcgaccaaggccatgcatggctagctctactgcaccttctcattcacatctcaccggcagtaaccggtcagccggtaaccccgccggtgcaacccgacagcaacaaatccgtgatcgccatcatggccatcgtggtcatcatgttcctcatctcagccttcctctccctctactcccgcaagtgctccgaccggccggtccagacacgtggcatcctcgacctcgcgggccccacgggcgcagccggtaacccgttgcaagccgaatccaacggcctcaatcaagccaccatagaaacgttcccaactttcctctacgccgacgtgaagggtctcaagattggaaaagacacgcttgcatgcgcggtgtgcttgaacgagttcgaagacaacgacaccctccgcatgatccccaaatgctgccacgtgtaccaccccgattgcattggtgcgtggttagcctctcattccacgtgcccggtgtgtcgtgccaaccttgttccacaaccagaagacatgaacacgaacacgaacacgaacatgccttcaatcttgtccattcagatacccaatgaagaagaacgtgaacatgaacatgaacatgaatacgaggctgttattgttggtgagcacataagaggatgttgac

SEQ ID NO: 29710 - DNA, 3134 bp, Glycine max
  Clone ID: TF_GmC689_1
tggccatagaactcaaatgccctatctgttggagtttgctcgattctgctgtgtcgcttacctgcaatcatcttttctgcaactcgtgcattttcaagtccatgaaatcagcctctgcttgtcctgtctgtaaaattcctttcactcgtcgagaggttcgccctgctcctcacatggacaacttggtcagcatatatataaacatggaagcttcttcaggagttaatacatttgtaacccagaatgcccctgttactaacttatcagatggagaaaaggaatgtgaaggtgatgctgactctggcaagatgaaagctggtggaactcatgaaggtcgtccgcaggagaagaaaacccggaagaaaaagaagtctaagaagacggttcaggccagcatggaaagttcaggttctgagtttgcaaagccttcttttccagcaaagaaaagggtacatgtgccgcaaaatcttctttcagaaactccaatgaagaatttgaaaattggagactctctcagtgaaattaacaaagagaaagagggaacggaaaaggtcccagtcaaggaaagtgaaaggcccctccaaagtgaaaaagataatcctgttctttcgcctttcttttggttgagagaggaaaaagatggtgaaatgttaagtcaacaaactgatgaggatcaaattattgatggctcaacaccaaatcctccttcattcagtgatctcaaggactctgatgatgaagtccattctaatgttgatctaatggatgaggtgcaaaataaaagctctgttaatttatttgacagtgaaatgtttgaatggacacaaaggccttgctctcctgaattgttttcaagtccctctaaaatgcaggtcatggatacttatgaggatgatgaaaatcaagaggaattggtggcttcctcactagagctggaggcaaatctgccaagagttgatgctgacaacatggaatttgagaatcccaaagaaggaaatagaatggctgatgaagtacctccgagtgtatgttttcctcaaatcagaagttctgatgatctaaatggaataaagaagtctacaaaaagaaggaaggctagagataaaaataaacaagagcagattggagaaccaaaaaattcatttgatgaaatgtatgttgaggttactcaggaacaagcattggacaattcttctaatctggggaagggtagtagaagaggcaagagggtttgtttcaataccagtccaattccaacgcctataactgcttgtacagtccccaatacattaggagttcaaagcattggtgaaatgaagaaggctaagaatatagatattttgccatgtaaacaagaaaatgagaagcattatgctcaggaaatttctggaaaaagccagatgaaaatatctggaaaacaaaatatcaatcaaatgaatgagtttgctggttctgattcatccattttcagtctgcgaacagataataacgggaaggactctaataggaggcaatgcaaaagcaagtattccagaaaaactatatattgcagtaaagaattggaaactactaaaaggcaaaaactttcctcggcttgtatctctaagactaaaaacaatgaagaaattctacctattgaaagtattcatcaaggtcctgatgtcagggatttgaatgatacatcaaaagagaaacattgtcccttgatggatcaaacagtgttaaggaaatgtgagaatcttgtaaaaaattatcaatgtgttttctgtctctcatcagaagaatcagaggcttctggccctatggtgcattaccttgatggcaggcctgtaacatcagattatgaagggggatctaaagtcacgcattgtcacaggaactgcacagagtgggcccccaatgtatattttgatggtgattattcaataaatcttgatgcggaaataagtagaagtcgaagaattaaatgtagtttttgtggactaaaaggcgccgcacttggttgttatgagaaaagctgtcgcaggagctttcatgttccttgtgccaagtggacttctcaatgtcgatgggatacgcaaaactttgtcatgttatgccctctgcatgcttcctccatgttgccctgtgaaggttcaggatcccaaaaaaggagcaagaaatgcacagctagtgagggaaaagcccatggtcctaaacatgacacaacaagccaaagtcgggctgcttatttatcatacaaaaaaattgtactatgttgttctgctctatccgtgcaggagagggaagttgtttccgaatttgaaagagtatcgaaagctacagttttgaaaaattgggactcgagtgtcacccatgttatagcatcaacggatgaaaatggggcatgcagaaggaccctcaaagtattgttgggtatactggagggaaagtggattctcaatattgagtggatcaaagcttgcatgaaggaaatgggtcctattgatgaggagtgttatgaaattaatgttgacatccatggaattcgagatggtcctcgtcttggacgactaagagtattgaacaagcaaccaaagcttttttatggctacaagttttattttatgggagattttataccttcatacaaggggtatctgcaaaaccttgtggttgctgctggagggataattctgcacagaaaaccagtgtctggtgaccaagaatcaacttcaccagatatgcatacataccaaacccttataatttacagcctcgagcttcctgataaatgtaagccttcgaaaaaggatacaatttgcagccaaaggcgtcatgatgcagaggttctggcaagttctacaggttcaaatgtagcaagtaatacatgggttctgaattcaattgcagcctgcaaactgcaataccttgctcaatgaatgtgaaaattgaggtcatttacatgcatatgatctcaaattgatgtttttccttttcatctttaattatcatgttaagaataatattgacaatattattcaacaaaatatttagacctcataatatatactgtgaatgtatccccgatggagcgagaattgtgtttgaaaccgtcttatatcaatggtaaaatctcaatccttggcaatttt

SEQ ID NO: 29711 - DNA, 1886 bp, Glycine max
  Clone ID: TF_GmC1038_1
atctcggtatagggctggagccagggaaacttcactttttgtaaggaacttgtcaagttcataaatttcctttataatgtcatcaccaatagcatttttttaactatattgatatatgatcgatgatgaaacaaaatttgcaccagtgaggcgctgatgcaccaacacaatttgtttccgtacaccgtcaacacctgtgtaacccacccatgaatctgtgcaacttctgtgtcctctctgaatctgttaacaccaaccatgaagacagatcatcatcaggtcattgcctcatcacaactaagccacaccatttcacgaatcagcaaccatcctacgatcatcaggaggaggagcactgtccaaaggtttggctctgatttttgccgaaaatctcagggcaagagaactttggaaacacaaaatgtttgatgaggttctgattgaagacattatgcgtaatggacgcctgaataacatcagtgttgatggcagccaataatgccttccaaacacaaacaaaccctgcagcgatttgtttccttccatctccgccgtaccatgtcggaagcaccaccgtctcagccatcgcctccaaccgccaacgcgtcaccaccgccgtactggtgctaccactgcgagaagcgcgtctccatcgaaacgctcgcgaatctccccgacgtcgtctgcggtgagtgcaagaacggcttcgtggaatccatccacacgccgtcgcgctctcgctccccctccgcctcctccgacgacccctacttcggctcgcagttcctccaggtccttcgcctaatcgctcagtcggcgcgtgacgacgacgcgtcgcctccgccgccgccgagccgctctccggagaacgatttcctcaggatcgagctcggtggctgggacaacgacgaggagaacgacaacgacaacgataacgacgacgaggagttcgaggaacacgaggaggcagaggatcgctccggcaacgaggatccgcacggaggagacgacgaggatctgagaagaaggaggcgcgagctacttcggcttcggattagggatttggcgacgcgtacgaggagcatgcggaaccggatcttggattgggccgagattctgatgggcctggaggacaattccatcgagttccgcctccagctgccagaatccgaccgctacgtcgggaatcccgaggattacgtcgacgcggcggagtacgaggcgctgctgcatacgctggcggaaagcgacggcggaggtaggagaggagcgccgccggcgtcgaaggcggcggtggaggcgttgccgacggtgaagattgcgtccgaaagcgaagccgtggcgtgcgctatatgtaaggatttgctcggtgttggagacttggcgaagaggttgccgtgcgggcatgggtatcatggagattgcattgttccttggttgagttctcgaaattcttgccctgtttgcaggtatgagctaccaacggatgataaggaatatgaggaagagagagtggttaactctgcttcgagttccggtggaggtggaagtgccattgtttgattccgcttggtatgctccgtcttgctctgttctcttctgccatttgtgtaatatatttcgtggtttctgaatttcttctttttttgttgttggcattagtggatttaaatcaaagcttgcgccatgttattattaatttatttgaagcttttattatgtagttggcttcttagctttcagatgatgctaagatacttgtatatagcatttgaatcaatgtgaatgtgatcatatcacactacctcaatggaattttcactttctccctgtttctactttcgcatcatgcctaattggattacttgatgcatgctcttattttt

SEQ ID NO: 29712 - DNA, 896 bp, Glycine max
  Clone ID: TF_GmC787101_1
cactctcgaattcatattctaattctagagaaataaaacaagagcacaataatgtcactctgttatattgcaagtaacaaatcctatgctaagatagaaacgcagatccagcaagttgcttcttcactctctgctcaatcccctgatctcagacaccactccctctgccattccaactgtccctcatcattatcatctccgacgtcagatacagcaggtccgaagcctgcaagtcgctccaccgctgctcgagcccacacggacctgggcctgggcctgggcccgggccctggcccggggagacaataatccggtgctccaacctccgttccacgcttgccctctccgtctcttgcgtcaacaacatcccgtcttttctgggacgcacaaaacaaccaaccccaacgctctcgttcttctttctcgatgtggcgctacggccgcccggtgaccttctaaacgacgtcgtccacctccgactctgctgctgctcctccgttgtttctccttcccccaccccaagcggacgaatgcctccgtcgagactccactatctcctgcttctccaggtccaaattcaaacgcacgcgttcctcttccttgttccgttgttgttgatgactctggcggaaaggctttgcgtcctccaccaggagaatgtcctccggatccacgcggtagcggcagagaggacacgtggaatgcgcgtccagccacgtgtccacgcactccacgtggaacgcgtgcttgcatttcggcaacagccggagaacctccgcggcctcgaacttgttcaggcacaccgcgcaatcgagtccttccttttgcccccgcagcgctccgaatctgaagaccggcaacgattccaccacggaccggtcaatgccggagttttt

SEQ ID NO: 29713 - DNA, 1607 bp, Glycine max
  Clone ID: TF_GmC255_1
gcaaatagtccatagtgaaacttccaacctctcctcacctaacctaccattcatccaattcttcttccatattcccttattcccatgttgttttgatgtatgctttctctctaaacatggtgctgcatcacagaaagcttttattgtttccaccaccaccaccaccactctgtagaagtgcctgtcctgagaaatttaatgaccctctacccccacctaactccccagatgattatttgacccaaagtcccaccaaaaacatcaaaatctccaaatacttgatcataagtttctccattgtagcaaccgctttcattgtcctcagcttctacgccatctacgccaaatttttctctcctcggaacaggtcaatacgaagaacactatcacgcccagaaacagaacaagatttcttggacgaggaagaacaacaacaacatggtcctgtcgttgaccatcccatctggtacatccgcaccaccggtctccaacaagcagtcatcaccgccatcaccgtctgcaattacaaaaaagacgaaggcttgatcgaaggtacagaatgttcagtttgcctcagcgagtttcaagaggacgaaagtctcaggcttttaccaaagtgtaaccacgcttttcacttaccttgcattgacacgtggcttagatcgcacaccaattgccccatgtgtcgtgctcctattgtcactgacccaacaagggttccttcttccatggaccctactgcgtttgaaacaagttcttttgtggaggagatttttgaaaatagtgcggagaatactcaaaatagtagtgatgatttgttgaggggtgaggaagaggaaagagtgcaagaagatgaagcgtgtgaagagaacttggcttctgaacttgtggtgactgtgcagcagccgagaagatcggtgtctctggattcttcttctgctgctaagatcagtcttgctcttgctactgttgtgtcaggggaatctcacggggatcattcaaagagggttggtgggaatgggaatttggctactaaaggtggttctagttcttgttcttcgactagttcagtgaaaaggtcacgatcattcaatgccaaacacttgctatcatggtatagccgtagtcagagaaagccaaatgctcctttgagaagcttctgattgatttcgagttggaacccagccttaggtcggttctatgaaaaattattaggtggtctgacaccattactaagtatctatagtctcgatactccatcaatctctatgtaacatatgtctaagttttttcaatttaccagaaagaattaataaaactcaaatatatgttatacagagataagtgaagattatgatggtcatggaccatcctaataatttctctggttcttgccaattagagtgtcttttgaactctcaacaaaggtgagggtttgaagggtttatgtgtgaattgatgtaataggtcatgtgatgatcaagtgtatataaagtatgatagcaaagcaaaaaggttatgaatgaattgaaggttgatatccttgccattttggctgatcaaaaataaaaaaacaataaaaacggcgcggcccgccgtacctgagt

SEQ ID NO: 29714 - DNA, 946 bp, Glycine max
  Clone ID: TF_GmC765_1
ccacgcgtccgcttttggccacactctccacaacacaattatgccaacccaaccagattcaccacccaacaacaacacgttgacccaaatgtttcagaacatcttctcagacaacagtaacatcatgctggcagccatcatttcccttctcttagtaatcctctttgtccttcttcttcacctctacgccaagtggttcctcgctcaagcacaggctcaggccaacgcccgccgccggaggcggcgccgtcgcacgacggtgaccgtctccgacgtcctaggcccggcaaggttccaccacttccacagcttcaccatagaagacagttcacccctctcaacaaaagggttagattcttcaaccattagaacaattccactgttcatctatgaacacaacaacaacaacaacaaaaaggtcgaagaagaagaagaagaacttgaatgtgtgatttgtttgagtgcatttaagaatggtgaagtgggaaggtgtttgccaaagtgtggccatggcttccatgtggagtgcattgacatgtggttgagttcacactccaattgtcctatttgtagaacctcaattgtagcaagtattgtggaaaataattctagtgatgatcatcatggtggagatcatgatttggttgagattgtgactgaaggtggttctgctgctccaagttttgagactagagagggtgaacatgggaatagtaataatggaaatggaggagcaagaacaagtgtttctgttgtgtcagaaaattcttcttctgagttctttggatgctctttggagagaatgcttggcaagggtttcccaatatcaagtaatgttaattaattaatgaaatcacatgcttgagatgtatatgaccatcgaagtatctattttctctatacaattataaccatgaaatgtgcaacaacaactatagttctgtgt

SEQ ID NO: 29715 - DNA, 1383 bp, Glycine max
  unsure (1)..(1383): unsure at all n locations
  Clone ID: TF_GmC248_1
ggctcgaggttgattgttgaagtttctcttctcttgctctgactccaatatttcctttaaaataaaaatagcattctcttccttcttccttcttccattcattcattcacattccacgctttcttcagagcctgcacttgttccacccttcaacataccactcctcctcttccccaattctcttatccgtaatctggcactcttcagagaagactttgtaagataaaaagagaaatggccttagaccagtattttgatgaggctgtgccccagttggattccttggaagataaatcgtctctcgaaacatggaaatgtggcagtgacgatattgcagattcggatagaaatgcctctggtggctttgattgcaacatatgcctggagtgtgtgcaagatccagtggtcactctttgtggccatctctactgctggccctgtatttacaaatggcttaatttacaaactgcctcttctgaaaatgaagaagagaagcaacaatgtccagtctgcaaatcagaaatctcacagtcgtcccttgttccactatacggccgcggccaaaccgtgttaccatctaaaggcaaaggccaccaagtaggggttgtcataccaagaagaccccttggtcctacacttgattccgcaactgtttccccacctatttctcacgtttatcatcgccattatccgaatcatcctcaacaattcaactcaattcctggcagttacacttcaatgttcaacacaggtggttcactagcaaatgcttttgatacaacatatggagtctttggtgagatgatatatgcaagggtctttgggaaccagatgactaacacatatacatacccgaattcttatgatctttcaaggaacagtaatccgaggatcagaaggcatttaatgcaagttgatagatcactcaatagaatcacttttttcctcctttgttgcattgttttgtgccttctcttattctgactgctattgcatattttttgtgcaatacatccctgtatagaatacaagcagtatgcagattctgccagatgcatcatatactcagaagttgtttgatgatgagagagatatctgtaactaataggcccttttgggtacatagcttaattaaggacatattgagtaaatgcttatcatacgataatcgtttccgtattaaattgtttctataaaagaaaaaataaggttaaactattgtcatataaaaaactagaaaaaaaaaaaaactcgagactagttctnnnnnnnnnnnnnnnnnnnnnnnnnnnnnnnnnnnnnnnnnnnnnnnnnnnnnnnnnnnnnnnnnnnnnnnnnnnnnnnnnnnnnnnnnnnnnnnnnnnnnnnnnnnnnnnnnnnnnn

SEQ ID NO: 29716 - DNA, 785 bp, Glycine max
  Clone ID: TF_GmC119051_1
cactttcattgtgtttgtgtgcaccagaatcatttgtgggaggctaagagggggtgttgaatctcggatgatgtacgagattcaatcaagaattgatatggaacagaacatcatgttaatgaccctgaatccgatcctgttcttcttgatgcaatccctactttgaagttcaaccaagaggctttcagttcccttgaacacacacagtgtgtaatatgtttggcagattacagagaaagagaagtattgcgcatcatgcccaaatgtggccacacttttcatctttcttgcattgatatatggctgaggaaacaatccacctgtccagtatgccgtctgccgttgaaaaactcttccgaaacgaaacatgtgagacctgtgacatttaccatgagccaatcccttgacgagtctcacacatcagacagaaacgatgatattgagagatatgttgaacctacacctactgcagccagtaactctttacaaccaacttcaggagaacaagaagcaaggcaatgatcttagagaactaaaggggttgttctgctcaaaaagagaagaatgtagaatttctgcttctatagaggaatgcttctaattatagattggattcaaattctttgtctgtaatatggccttcatattcacttggtggtgtaaatatgtttccttttgtagcatatgcgggccaaggttttggtggaatttcttgcataccgatttgaagttcttttgtctatggtatcgcttactcaagcaagcacactgcgcttgttatgcta

SEQ ID NO: 29717 - DNA, 3278 bp, Glycine max
  Clone ID: TF_GmC281_1
tttggcattgccaagggaaaaaagaatactttcagttaatgatttaagttttagtcttgtagagttttcaagcgaatatgtttattagttaaaaggctcaccagggagtgatgtgttgaatacaagtagagataaatttgcaatttactggggagtgatgtgttgaatacaagtagagataaatttgcaatttagcatagtgaaaggatggtatgttggtcatagataagtttttgagaatgtgctatatttcacagaagtaagaaaaccaatcatttttttattgtgggttgttacatatggcaccgtgggatttgcataaaaagtaaagcacatcccaagctattattgttcactcatattccactctaaatcccttttttttatagaacccaaagcaatggtcacaaaaagtgcttgaaaactatctcagatatcataatcttcttgagcattacacacaaccaacattgttatcgatagattaagaacataccttagagtcggatatcaaactaaaacgtccaatgcaatttttcatttaaagctatctgcttagcaaaattttcatccaattcaatgtttaaattagacataaacaccagaagcaagtaggaggaacaaggacccaaaacccaagaagactgaagccactgcaccagttgtcagctcctgaacaagtgaacgacttttcctagaagatgttgcttcataaatgaagaaagaggcggttaagacgaggccgatggcgagggtgaagacggagagcgtggggtaccacgaatcggggacgggactcgttatcggttttggagccatcacagaatgcagagattagagcaccggatcttgcacgttccaaaacccctctttcgctccacgaatcgggttcgggactcgttatcggttttggtaccatcacagaatgtagagactacagcaccggatcttgcacgttccaaatttcaactgcaatttgcagactacttacctctcgcctactcactccctcgaatcgaacctctttgcaaagattcgatttagtactaaaaagatattctgatgctcactataaatactgccttgattctctcaaacaataaaatcaaggccaacgtatttttacagttctcctgtggccttcgattattgccgaagctgggtagacgattactctctgtgaaattggtcattatgtttctcagggtacacgcaacaatatatgtataagcgtgagaagagttgtcttagtgaaaccctaaatagcagatgctatgctgtttataaacatgcgacctgatgatacacataatcaattaaatttagttggttgttgcccagttcttcaaggaattaaatggctttttatataagatttccctatttttttgtcaaatttatgaccgagtaattacacttgtgcaacgtagaaaagggtctttaaagctgaagatcttggatttgcttagtatgagttgtttgggtaaaatgtgttgacataagagactcccatggtgtttatgttttagaaatttgagtagctatattttaggtaattctgtcaacttggatgttttagcccctggacaattgcacatccttttctcgagtctttacatatgcctctctgccctacttctttgttatgatggtgctcatgttgaatgtaacttgatatgatattgtattaaattcacagttagagaaatatgaaaaagcccgggatgttattctttcaggccttcaagttgatccttttagtaattctcttcgggcttctcttcaaaatttggaaagtgtttcatctagttcaagagggatgagtacacatggacatccagaacgtaatgatgattttgattgcactctctgcctgaagttactgtatgaacctgtcacaaccccgtgtggacattctttttgctgttcgtgtctatttcagtcaatggatcgtggaaacaaatgcccattgtgcaggactgttctgtttattagtcctagaacatgttccatcagtgtgacattgaagaacatcatacaaaagaatttcccagaggaatatgctgaaaggaagcaagagcacgacagtttaatcaaagctggtgtagatttactccctctttttgtcatggatgttgtcataccatgtcaaaggtttccactcaatatatttgaacctcggtatagactcatggtaagaagaataatggaaggcaatcatcggatgggaatggctatacttgattcaacaggttccttagctgagtttgcctgtgaagtggaaatcacagagtgtgaaccacttccagatggtcgtttttatatagagattgaaagtcgcaggagatttcgtatcatccattcctgggatcaagatgggtatcgtgttgcagaggttgaatggatacaagatattatgccaccagaagggacaagtgaaagagatactttacagcaacagacatataatgcagtcgaagatgctagatcatggatagcaagagctaaagaagcagcaagacatgatcaaagaaaacttgagagactcgccagtgttgaagtaatgatgccctcaccaaaagaccctgagcgctttagtttttgggctggctactctttccaatcggaggcctgcggaaagattggatctcctacgcataagagacactgccgagaggattagacggggcctgatatttctccgccaggaggaacaagggtgcagaattcagtaagacaagctgaggagggctgccactattattgcaattgaatatttgtttattgcaaattcatttagaagtctttcaacattcttcggcctcataaacaaccgttgatgaggtcatttttgctgtaacatagggttgaacagtttttctaatatatataatcatctacaacacattttttattggccaaaaaaaaaaaaaaaaaattcctgcggcccgaattcctggtgccgaattgtctgtaagttaaaattttgtgaatgtgtttgtaagctcagtgtcatgttggatagaatgctagtttatttgactataggcatgcatatgagatttttttttgggtgtataatggtggtaatggggcttaagattccatatactatcttccactgtttggtcgaccctagttgaataatgagatctttgtttgatcccctccagtgttcgtgtaattatttttattattcaaccatgtgttgtttattcgtttaaatagtccatgtttatgtcattattatagtctatctcatttgattatatgactat

SEQ ID NO: 29718 - DNA, 2143 bp, Glycine max
  Clone ID: TF_GmC281_5
ccacgcgtccggaaggagccacgctcgaacacgatgcccctaaccaatcatcttaacataaaaacattttaacattaaaactcttttccatttctcactctcttctcttctcttacactctctcccaatccaatcaatggcttcttctctttccccttctccctcttccctcgaccaaacccttcgcgacgtcgacgactacgttctggaaaatgggtcagaaggtttgtcaagggacacacttcattatgtgtacgagcttgtgaagaatgggaatgtggcatttcgagagaacagaatggaagaggcaatcaacttttactcaagagccaataacatcaaatcaggtgatccaatcatcctcagcaatcgaagtgcagcttatattaggattagccaatatttcatgcacagaacaccatcatcttcagaacgtaggccattgagtgggcttgaacccacaacacttgctgaactgggtttgaaggatgctgagaagcttgttgaactccaaagtaattcagcaaaatcatatcttttaaaggccaatgcttttctactgttagagaaatatgaaaaagcccgggatgttattctttcaggccttcaagttgatccttttagtaattctcttcgggcttctcttcaaaatttggaaagtgtttcatctagttcaagagggatgagtacacatggacatccagaacgtaatgatgattttgattgcactctctgcctgaagttactgtatgaacctgtcacaaccccgtgtggacattctttttgctgttcgtgtctatttcagtcaatggatcgtggaaacaaatgcccattgtgcaggactgttctgtttattagtcctagaacatgttccatcagtgtgacattgaagaacatcatacaaaagaatttcccagaggaatatgctgaaaggaagcaagagcacgacagtttaatcaaagctggtgtagatttactccctctttttgtcatggatgttgtcataccatgtcaaaggtttccactcaatatatttgaacctcggtatagactcatggtaagaagaataatggaaggcaatcatcggatgggaatggctatacttgattcaacaggttccttagctgagtttgcctgtgaagtggaaatcacagagtgtgaaccacttccagatggtcgtttttatatagagattgaaagtcgcaggagatttcgtatcatccattcctgggatcaagatgggtatcgtgttgcagaggttgaatggatacaagatattatgccaccagaagggacaagtgaaagagatactttacagcaacagacatataatgcagtcgaagatgctagatcatggatagcaagagctaaagaagcagcaagacatggtaatttttaaactataattatatgatgtttacctaggactactttgtactttggtgatagtgaaacccaagatatattggtaatttttaaaccatcatcagatgatgtttacctactacctaggacttctttgtactttgattataatgacaaccaagatatattggtcatcgcctttttcttttcccattttttttgggggggttgctgaacatatatttccagcacttataggaatctgttaattctgatgatgctttagtttttgttatcctatgtttctgaatgggagtgacctttttcctctttgcacctttacaaatgacaatggactgctgcaatactaaactactggaatatcatacagatcaaagaaaacttgagagactcgccagtgttgaagtaatgatgccctcaccaaaagaccctgagcgctttagtttttggctggctactctttccaatcggaggcctgcggaaagattggatctcctacgcataagagacactgccgagaggattagacggggcctgatatttctccgccaggaggaacaagggtgcagaattcagtaagacaagctgaggagggctgccactattattgcaattgaatatttgtttattgcaaattcatttacaagtctttcaacattcttcggcctcataaacaaccgttgatgaggtcatttttgctgtaacatagggttgaacagtttttctaatatatataatcatctacaacacatttttt

SEQ ID NO: 29719 - DNA, 1222 bp, Glycine max
  unsure (1)..(1222): unsure at all n locations
  Clone ID: TF_GmC7141_2
gaagtgcgttagaacagaaaagaagtgcaaacaaggcgcacataataatagtacccttcttcttcgtttcttagctctccactcgcctattaaccctcaccggaatctctgattcgatcttggttttcccatatagcacaagacatagagccgtgtgaatttgcgatatgctgggtaattgtcgccaatacccaatctcttgggtactcctttaccaacccccaccgccgcattaattatttttctcttggaatcggacaaaggttccactgagactgaaactttttaaggccaaaaaaatgctcgattcggttcttctggcgcttttcttgccgtgccttggcatgagcggggtttttatcgtctacatgtgccttctatggtacgccactacccgccgcaaccaaccccccattgacggtcaaccggtgaagcccgtaactgataagggtctatccgctttggagttggagaagcttccaaaaatcaccggcaaagaactcgtcttgggcaccgaatgcgccgtctgcctcgacgagatcgagagcgagcaaccggctagactggtccccggttgcaaccatggttttcatgtccattgcgctgacacctggctctccaagcaccctctttgccccgtttgcaggaccaagctggaccctcaaatcttcacttcccaaagcccttgctgaacaatgaaacattcgttattcaaggaatgaatgagggaggccaaattcttaattatctttattgttttctttcttagcgttctttctagttttctagaactcccgttacttatttttaatttattattattatatttatatttatgtgtcgtgtattgtggttaagtggttgttgtgtgttatggcctagatgaatttagctttagtacacgaaaaatcagaagccatggtttaatttatatattatgtggtttggactttggagatgtaattgtgaagcttatttgaatttttcgctttgtttcgtaaagtattgcttgttgcacgtaaagaaggtacgaatggaggagaagacaaaggagtggggaattgacgctatcacgtaaatcccagacacgtangtgagggatggttgaagcaagtgcgggtcgtgaactgaacgttggttacgtttgctttttccatggggagtcacagagtgcgcatggtgattttgattttgatcttatcaccccaaaacactatacagc

SEQ ID NO: 29720 - DNA, 1305 bp, Glycine max
  Clone ID: TF_GmC111084_1
tacggctgcgagaagacgacagaagggggcagcacagcagtgagtgaacccaccgtcaccacaccacaccacaccacaccaacaaagtagaaatacttgtaacatttgctgcaattacaactccatttgtggacaatttgatttgggtggtgcctttgcgaatagttggttgaacgagctcctttgcaaccatgagttttgtcttccgagggagtaggggagatattgaaagtggcttttcagaatatgttcctgaaagaaccttgatgcgggttcatccagctcgaccagttaatggcaattctctagcttttcttatcacagttattttgatattcatgatattaaactcccctcagatgttacatcattttttgctctgggttgtactggctatctttgtgatggctacaagtctgaggatgtatgcaacttgtcaacagcttcaagcacaggccagggctcatgctgcagcagcctctgggttgcttggccatactgaacttcgtcttcacatgccatcatctattgcgattgctaccagaggaagattgcagggacttagacttcagcttgcacttcttgaccgtgaatttgatgagctagattatgacactttgagagctctggattctgatactgcttctagtactcgttcaatgaccgaggaagagataaatgccttgcctattcacacttataaagttccagtcccaccaaaagatggctcagctggtttggcgtcctcttcaggtgcagctgagattaaacaagcctctggaggaacagaggcaggtgccaaaggttcagaagatgagctgacatgtactatatgcttggaccaagttaagaggggagagcttgttcgtagcttaccatgcttgcatcagtttcatgcaaactgcattgatccatggctccgacaacaaggaacatgtcctgtgtgcaaattaaggatagggtcggtaagtgggggaaacagggaaagcgagtccgatggttcagatattgcctagtttatggttcagatatggctgtaaactgcatgatgtgaggccttgagttatgtacaagtatatatgtatgtgtattattcggtattggcgtatataatgagattggcatgagcataagattgtagtccatgtttagtcccttctcttcaaaaagtatagctagtctccatatcccaaaactatgtgtaccgcttgatatataaatagcattaaaaatgttattaaagtggaagttgataatggtgtgattgtgatacatcttattttgtatacacttcaccaaaaagaa

SEQ ID NO: 29721 - DNA, 949 bp, Glycine max
  Clone ID: TF_GmC1390_1
ttcattcttataataatcattattttcttccacaccttcgtccgcttctgccgccgtcgccgccgtcgcctcttctctcgttcgcttccgaccaattcctccgccgccgcctctctcgacgacccgtgcctcgacccttccgtcatcaagtcccttcccacttttactttctccgccgccacccaccgctctctccaggactgcgccgtttgcctgtcggagttcgccgacggcgacgagggccgcgtgctcccgaattgtaagcacgctttccacgcccattgcatcgacacgtggttcgggtctcactccaagtgtcctctctgccgaaccccggtcctaccggccacgggttcagctgacactgaaccgggttcggtttccgaagcgggtgagggttgctcctcatcgtctttgcctccgccgattgggtgtccgagaaagccattggatataaatataatcatagagattccagaggtggaaagagggtctgattctgtaaccggagatcaagggttcagatggtcattgaagaggttttgcaacgtttaagtgagtgagtgcttttgcaacgaatcacaaacaaggcatagcaactcatggatgctaaaacaaatggacgacattttcgttttacaggcaaatgttattagttttttattaaggaaggaaatcaaacttgtaacttttttctccctatcttcttcttacccaactaaacttataactccccaaacaataggattgtatgataaacagaatatctattgcttgcaagagttatcacttttggtaggtgttactctatctatagaatctcaaatctcaaatctcaatctcaattgtgtttcaccttaaccattggattggtgtatttagttttaatctgtgtatgtttggacgcaagttcaggtgttacaatggtaatttttcactttttcattta

SEQ ID NO: 29722 - DNA, 459 bp, Glycine max
  Clone ID: TF_6964406
ctcactccactaaggcacgtacactaaatcagcacgagagtgtgctaagatgaatagatataagatgaagtatgggcgtactctgtggattctcgatcgtgacctattggttgccgcgcctggcagagctccgtctgagcagctgctcggtctcttcattccagagaagctccaagctgcttctgagatcatatatagtggaacgctcgtctgctcttctggggcttggtgacatgcgttgtcagataacctgtgcatatctgccaggaaccacagtcatggattctctgcatcagagtgccaagccaaccaggctagcgccactagcgaggaatgcactgtggcttggggagtttgtaaccatgcttttcacttccattgcatcagtcgatggctcaagactcgtcaagtttgtcctctatataacagtgagtgggagtttcagaaatatggccacta

SEQ ID NO: 29723 - DNA, 639 bp, Glycine max
  Clone ID: TF_GmC63868_1
cgaagcttctcttcctcgccactctctctctctctctctaagaccccaaaacaaaaccgtgtctcctatttattttccgatgggttttccggtgggttacgcggaggtgttcttcccgaacccgttcctgcacacgctggccctcctcggcctcctccgaaacctcgtattcttcctcctccacctcctcggattctccgacttcctcgaaaccgaggtcgcctggccggaccacccccacccctccgacgaggctgcggcggcgcggcccccatccgcgtcggcgctcctgatccgcgacctccttcccgtcgccaagttcggagactccgacgttggcgcccaacaaaacggcttgtgcgcagtgtgcctgttcgagttctccgaggaggaggaggttcggtgcctgcgcaactgcaagcacattttccaccgcacatgcgtggaccgttggatcgaccacgatcagaaaacgtgccctctctgtaggaccccctttgtgcctgatgatatgcttgatgattataatcaacgactctgggctgcttttggggttaacgagttttacgccgattacactttttccttttgaactctgaatttttgaatttcaatcatgaaagtgaattgtatataacc

SEQ ID NO: 29724 - DNA, 1087 bp, Glycine max
  Clone ID: TF_GmC646_1
tcggcagtgagcagttaagtggtgttatgcctgtgtctcctgctgaagatgacatcactcattctctaataaatagagatagctttggacattacaatatgggtggtattgcagaggtattattggcacttgagaggattgaacaagatgcagaactaacccatgagcaaattcttttgttggagaccaacttattcctcaatggattaaacttttatgatcaccacagaggcatgcggttggatattgataacatgtcctatgaggaacttttagctctagaagagaggatgggaactgtgagcaccgctttgccggaggaagcatttgctgaatgtcttaaaagaagtatatatcagtctgcatatacacatgagtgttgtaatgaggataaggatgatatcaaatgctgcatttgccaggaggaatatgttgttggagatgaagttggggatctgcaatgtgaacatagatttcatgtggtttgcatacaggagtggttgcggcataagaactggtgccctgtttgtaaagtatctgcagcactgtccaattcatttttacctcattgattgcattgttccttttcttttacttttcattttgtacaaaatacagatacagatgctcctcacctcatcttattgatccatatgtacatacatagccaatgtctccatccataaaaactaataacctaagcccccggcttgatggacactggaacttgctatcctgcgcatgaaaatagtcccatctttttgttttgtttttgtttttgttttttttgtttttatcggcaagtattagttagttttagtcccatctaagtacatctttttctttctttccttttcttttattgaaaagaaattgaaagagaagaaatgatagatgatgtatatataaaagcattgataccttggaagttattagctcgttgacttgaatgttcttgtaatggttggttaaataggtacgatacgagctaattatgccctgggttggggaagtaatcaatagcgtttagatgaatggttgtaaacttaatttaaatgttttttatgttgcagaattggttttggat

SEQ ID NO: 29725 - DNA, 697 bp, Glycine max
  Clone ID: TF_GmC2052_1
aaaccaggttcaaaggcgacttctagatgagtccatcgccgacgaaccttctgcagcagtttcaaagccgtggattgaactttattgtggtgcagtctcttcccacgtttcagttcaagaaaaacgagagagaacaagacaagacaattagtgtggagtgtgccatctgcctcggagagtttgaagaaggggagtggctgaaacgtcttccacactgcagccatagtttccatgtttcatgcattggtacgtggtttcagtcgcattcaaattgtcctctttgtagatcttttgtgcatcatcacatcctacagtgttctatagcttctcacacattgctacagcctttgaggagggaggactttgaaagggttcagagataaaagtagctaccctttttgttgtttgcttttagttttgatattttcgtgaggtgaagccttgttggaaaatagaatttggatgcaaagctaacagctaaagaaacctcattttaggtgggttataagagtgtctaagcgtacataacgaagcttctattgtgttttgtgagtattgtcaatcataaggcgtaggatgattatacaagatgtttcggagttcaatctcaaatttgtagatccacgaatcatgatcaacataactgttgaaatcaagatttagcatactttatagttacaacataaaaaggacgacc

SEQ ID NO: 29726 - DNA, 1418 bp, Glycine max
  Clone ID: TF_GmC324_1
tatcagtctctggtttggtggaattgttgttttcacaatgaagacgcacattcacatagccctattcctccttctggtgtcaccgttaatccccatcgccgtcgcgcaggcccaatcccagcccaatgacttctccgacgcaaacctcaaccagttcagcccctccatagccataatcatagtcatacttgtcgtcgcgcttttcctcatggcttttttctccatctacgtacgccactgcgccgattccccttccaccaccgttagccctctcactaccgcacgctcccggagggccgcgcgtgggcttgacccagctctgatccaaacattcccaatcctcgaatactccgatgttaagatccacaaaatcggaaaagaagcgttggaatgcgcggtgtgtttgtgcgagttcgaggacaccgaaacgctgcgtttgatccccaagtgcgatcacgttttccaccccgagtgcatcgacgagtggttgggctcccacaccacgtgtcccgtgtgccgcgccaacctccttcccaccgactccgaggatgctattgctaacggtaacgccaacggcgttgttccagttccggagacgtttacgcgagacattgaagcccaaaacgacgccgtgcaagccgcgccagagcagcagaacgcggaggctgacccagtcttacccgaaccggaagttgtttccctggacaaaacactgaaccggaaccgcacgcgagggtcgcggtcgaaccggccgcggaggtttcccaggacactgaacggctcactttgcggcttcccgaggaagttagaaagcagatattgcagaacccgcaactgcatcgcgcgagaagcctcgttatcttaccgagagaaggtagttcgcggcgggggtatcgaaccggtgaaggaagtagcagagggagatcgtcgaggcggttggaccgggggtttaagtcggaccggtgggttttcaccatggcgccgccttttttggtgagagcgtcgtcgattaggtcgcccagggtggccaataacggtggcgaaggaacttccgctgctgcgtctttgcctccgccgcctgctgtggagtctgtttgagttttgattcccccttctgcaagatttcaatattttattgtatttaccaattatttttttctgccgcgatttttttacgctagaatttgtaagatgtgtataatatttggcacacttgttttgcgtttgaagataaataactgaaataagaatttgtaaaatgtgtataattaataaggtagcatgtttatttttgtaggccggttttagaagaactgggtcatgatttcatattctctttgaggttgttaagctagttagttgacctcggattttaacatacagcatgtgaagaaaaaaaatgcaaaattatcttgttt

SEQ ID NO: 29727 - DNA, 1099 bp, Glycine max
  Clone ID: TF_GmC322738_1
cccaaaggaaacttcctagccttcattccattttaagccagtagctcaaatcggccccaagtttcattacaattacaattcaagggttcaatcactgacaattcctatttatcctctttttaaacattctaattccactttcccattactaaacattcatatttaaaggtcattaaaatcctctagaagttcctactttattccgtaagaatgaaagatagtaatataatacaacactcaagcacattgttttcccaatagctagatccccttgatactccgtattctacttataagataataattggaatttattgtataaaaattaaaaacttaatatttatagaaattaaaaataaaatgaaaatcaaaccaaatttgtcgcatcgggctcacggtgactcaggtgcgagtcaccgtctccggttttggtggtggtgacggcgatggtagcacgacaaatcgggcaattggagtggttgctgagccacaagtcaatgcaagaagcgtggaacgagtgtttgcacgcgctcagctgccggacttcttcgccgttggcgaacaccgacaaacacaccgggcactcgccgccgatttccttcgcgtgcgcctccttccggtacttcacttcggtgtcggcgacggcggcgatttcgaattcctggtggtgggacacctccgacgctacggagggctcgccgtaggagggttcccggcggcggcggcgcgacgggcagccgaaggcgaagatgaaagtgtaaattagggccgggatggtgacgacggcgaggagcgcgaggaggaattcgagaggggagagatcgacggagctgggaggtccggcgaacggcggcggcggcgggaagggtaggaaggtgctcgggaagacggagtttggagctccgtcgaaggacggtgggatggggatgacgtttatttgagtggcggggcgcggcggcggaacagcgaggacggtgggtgagttttgcattgtgacagagaaagagggtgaagggattataattattaataatattaatattaataatgtcatgtgtgtgtggttttgtttgggaacttttttcaattttctcgagcc

SEQ ID NO: 29728 - DNA, 1885 bp, Glycine max
  Clone ID: TF_GmC480_1
attggttcctgtatattaaaatggtttctcatgaaaagttagaacttgaagtctaataaatgcattgttttggacaaggtgctatactaaccacctacaaaattggtagcagctctaaacgaaagcaaaatagaaataagaactttttctttatcgctcaattcaattgggatctcttgaactctctctctctggtgtctaaaacaaggtcttgatcttctctccactggggttccctccgtttcttgagccccttttttttcttttccgggcctttgccaattctcaatggaggttccagaaatggaaggcaagactgaaagtcatatgacatcagcagcagcctttgtggaagggggggttcaagaagcttgtgatgatgcttgcagcatatgccttgaggatttttgcaaaagtgatcctgccactgtcactaattgcaagcatgagttccacctgcagtgcattcttgaatggtgtcagagaagctcccagtgtcctatgtatttcctacctatcagcaaccgagatgcttgagggatagtacaagtcgagaactgcttgaggcagtagagctggaaaggatcttgaatgatgaaacacttcgaaatttcgtcattcttcatcatgcagattttgaatattaggatttaccccagggtgtgaaggaggccgatattgaagagcgaataaagccgaattaaactgctgcagccccaatgaggagatctcgtcacctcagccggagggaaggccatcgaactaggccatctgctcatggccgtccacacttcttagtatactcaactcagcctagtgcaccaccatcagctgcaggagggggaagtgaaccagctgcaattcctgtaggaagtccatctaccccacttacatttgatggaaatgagcaatcatcactacagcagatcccccatgttcaaactcagagttcttctttaacttctgcctctactgtctcaacaacaaatcttcaaggagttcactctgatgatagaagttttgcctctcattcttttcctgcaagccaagacagagcacagccatcagaacaatcattctctgattctctgcgctccagatttaatgcagtatccatgagatacaaagattcaatttcgaagggcacaaggggatggaaggagaggctcttctctcccaattcttctatgtcagaacttggttcagaagttaggagagaattgaatgctaaaattgctagcgtgtcccgattgatggagcgccttgaaacaagagaaaataatagtgctgcaggaacttctttatcaaatcatttggtgaaccgttccattgcagagacaagcaaccaaagcaatgtggaagctcgtggagagaactctttgcatggcaataatactccaactactttttctgcaagctcagattcaaaatgatctctagtttgcttctgtgaaggcatctttgctcaacgtatcatgtttgaaggctaactgtttgctcagacatgacatgatgaggaatatatgctcatggcagttgttggatttcaattaaaaaagtagaatctgacacccgtgtgtagagctaaaaactttttcttttgtgtatatattatatatgcggggaactgtagggagaaagtatttaaggagtaatccaagggagaaagtgttctgaaattccatcagacttgtgtccacaatctgtccctgtgatttactttttggagtcaatggaaatatagatcaaggtggcaactgtagttcttggtgtttctaagctaaaacttcaagcttgattaggctaaaactttgttttgaaattcacattagggaatatgtgaagctatctcactgttggaaattaaaagtaaaatcccgctagt

SEQ ID NO: 29729 - DNA, 1315 bp, Glycine max
  Clone ID: TF_GmC5808_1
gaagcgaacaaattacgattttcttctatctataaagcaaagagagaagaaattacggattttccatcattccagaaccgtaatctccaaaccccacttcgtcagatactaaaaagaaaccaacagtttccatacttagtatttcttctctgactgactgatcaggttgacatcttgacattgcaatcctgccttttggttccccatttccatgtttgtggattcttcctgattcaaaggcaatatattgtgtcttcatagctcagtttttgagcctcatcagttgcaacttgcaacacaaactttatctataacttggtatctctaaaggactctcagcattgatcaaaatgggcctctctagtctcccagcaccatctgaaggagtattatgtgtccttctggtgaacactgtattgtcaatttccatattcaaaggcattgtaaggacaatcctgcacattgttggcatccatcttccatcatcctccacttcaccctcttcaccagatccctcccaagccgcacctgagtcatttgaattgcatcttagtccctcggagagttacattgaagagttcagaagccggacaccgacacttcggtttgacagtgtgtgctgctctaaacgacttgaacatgactgctctgtatgcctcactcagtttgaacccgaatcagagataaaccgcttatcgtgcggtcatctcttccacaaagtgtgcttggagaagtggctggactactggaacattacatgcccactttgccggactcccttgatgcccgaagatgacacaccttgctttcagtaagcaaaacaagtgagcatgccaataagagagagtttcatgtacagtgtagtgtacatattcttgagggtttttgatgttcatgcatctgagttctgccacctttttaagttttaacctttttgccttttatggtctagagtttgtggagggttttgctttcccttcttctgtctgtgctctttagcacaaatgaggggtatactttttgcttgcatgttatgtttgttcacaatgcccaccttgtttggacctcagagccttaattctatatttgggcattttgatcctaatttggaagcatggattgcagaatccatttgttttgcctttcaaactctcctcaccatgtatatattgtgtgtaaatagctttggttgccacataatagagtatattttgtttaatttattttttacaccattaaaaaagtgtataatgagtatgtattgaaagaatgaaataattttagactattattcaatttaaaaaaaaaaagaagg

SEQ ID NO: 29730 - DNA, 797 bp, Glycine max
  Clone ID: TF_GmC134317_1
atttagatataaataaaaaagcaagaaaagattggtgcattatagaaatccctttagactttagtttagtgttgcataatataattagccatcatcaccatgaaacctctctctaagctcttaaacaagctttgtgggaaaatgataatgctattagcatcccttctaatagagcttatcattctcattcagaagctaagggaatcacgtcccatcagcacccgccaatacatcaaactcatcgagaagaagaaccccacaatttgctacaccaaaagatttaacttgaaggcagagcacgctacagagtgcagggtatgcttgtccgaattcgagcaaggggagaagctgaggaagctcaaatgccaacacacgtttcatagggattgtttggacaagtggttgcaacagtactgggctacgtgcccactttgtcggaaacaggtgttgcctgatgatgttgtgttcaagcaccgtcagcatcagaatcaaccagaggctgcttctaatgggaatcatgacaatcttctctatcttttttcagcatttcgtggtggcaacacttaatttgaacagataacaaccctctctcaatcaccttcaacatatatatatatatatatatatagtagtttagtactatatagctaaaacaaaaccacctaattgttttttatttttagaagaaaaaggattaatttgttattcttcctttactaggattcctcggaagaatattactatggatgtacaccatatatatagttacagatattgaaagattgatgttaactttg

SEQ ID NO: 29731 - DNA, 723 bp, Glycine max
  Clone ID: TF_LIB5118-055-A1-PF1-D5
ggtggctgtagtttagtggtaagttaaacctcgtaaatcaccaaattaagaatcacattaagcaatttcattccacaaattaaccccaacccattccaaattttcgatccaagatgaacaatagcaccaacaacaaggggaacaacggttttgacccaagtgagttcacatatggagtagcttttgtaattggcttgatcttcttacttgtcagcatagctttggcatgtgtgcgtctgcgcatggctcgtggtcctaacatgctgaacattttggctggtattccaccatctcgccatgcaagatcatcagaagaagacaactcagctgaacaagggcttcatcacattgacaaaagttttgagaggtatccaaagctgctatactctcaagtagagaagggttcaagttcatcaagtgttgtttcttctagttgctccatatgcttaggtgactacaaagaaagtgacacgttgaggttgcttccacactgtgaccatcttttccatcttgcttgtgttgatccttggcttaggttgcattcaacttgtcccatatgtagaaaatcatctattcatgcttagtattggggatcacatctctcctttgttgttgtagaagatttgttatattagttaaatcagtatatatatatatataaggttgtaacttaggaagattaattaaccatatatttgatcgatcaattgttctgctgaattg

SEQ ID NO: 29732 - DNA, 1298 bp, Glycine max
  Clone ID: TF_GmC410_1
tacggctgcgagaagacgacagaaggactgttttcctttgtcccttttgtatcacagaatcttcctcgcatctctcgtattccttctccttctctctctcctcctttcccttcatttcctggttttggtttttctatggtcctgcctttccacacaatccactatagtttcttctataccttccttgtggatctgtcactatgacttcctcactcgtgaagatccaaggcgaacaggtcctcaccaacgattttcaggacctttcaatcaaagatctgagtgagaaagggactgaggcagagattcacaaggtggggtcttatggaagccatgggggaatctgtgctatctgcttggataagatagtgctgcaggaaactgctcttgtaaaaggttgcgagcatgcttactgtgtaacatgcatccttcattgggctacataccgtgagaaagttacctgccctcagtgtaaacatccatttgagttcctcaatgtccatcgctcacttgatggcagcattcaagattacatgtttgaggagagtgtgtgcctgctacttcgggcctcatggttcacacctttatctgttgaagaacatgtggttcatgaagatgcatatgaagacctagaagattattatcagtacgaggatgatgatgatgatgatgatatggatgaagtttactatggtggttcgtccagtcttcgggttattggcaaccgtagatggggagataatggttatgtcagggctggtcgtcaagaagctcggccagtccatcgtccaaactttcaggattcaggagcaagttcttcttcgcatgagccgaagaagaaagaggctgggaaaattatcacaggcagaagggcaaagagggcacagaaaagggaagctgctgacaaggcggcggaagcaaagcatcagcagcatttagtaaggttgggtaggaagtgattctattttatttatgtcaggccatggccttgaactttccttcccataagttaaatattttctttttctttacattttttttttcttgtacattgtttctgtgctctttactctgaagcatgtaatagatcttggggaaggtgttttagaataatggcttggtggggtggttggattatggaaactccgaactcactatagcattgaacaatttaggttttagttgttattatgctctcaatgcaggtctaagttgtacataatttccatgtgatgttgatacctcaacaatgttgatatctatctcaaagttaaaatttcaaacacaagaatagttaaagg

SEQ ID NO: 29733 - DNA, 732 bp, Glycine max
  Clone ID: TF_LIB5119-032-A1-PF1-B9
gttttattgttttccttgatccctttggcataacagcattattcttcagcatctctcgtattccttctccttgtgtgtctctccttgctttatctctcttaatttcttcagattttagttttctattgtatggttctgcgttttcgcacaactcactatagtttcttctataccttcctggtggatctgtcactatgacttcctcactcgtgaagatccaaggtgaacaggttctcaccaacgactttcaggacctttcaatcaaagatctgggtgagaaaggaagtgaggcagagattcacgaggtggggtatggaggccatgggggaatctgtgctatttgcttggataagatagtgctgcaggaaactgctcttgtaaaaggttgcgagcatgcttactgtgtaacatgcatccttcattgggctacataccgtgagaaagttacctgccctcagtgtaaacatccatttgagttcctcaatgtccatcgctcactcgatggcagcattcaagattacatgtttgaggagagtgtttgcctgctacttcgagcctcatggttcacacctttatctgttgaagaacatgtggctcatgaagatgtatatgaagacctagaagattattatcagtacgaggatgatgatgatatggatgaagcttactatggtggttcgtccaatcttcgcgttattggcaaccgtagatggggagataatggttatgtca

SEQ ID NO: 29734 - DNA, 1059 bp, Glycine max
  Clone ID: TF_700873011_FLI
tagagccgtagaggaacctggaaacttccacgaggttttcggtgaaaaccaaatttggggctttgcatcgcaagatttaccctttccaatcaaaattcttctgccttccccaaccaattgtctttctcactatcgatttggtttggttggcattgtaattgattttgtttgtgaagatctgagtgaggggttaggcaaatgacgagtggttttggtgaatcaacgagagcatctgcaccgagcccatcatgctcggggaacagttcaaacgatgctggcgatttcgaatgcaacatatgcttcgatttggcgcaagatcctgtgatcacactctgtggtcacctattctgttggccatgcctttataggtggctccatcatcactcccattctcaggagtgccctgtttgcaaggcccttgtgcaggaagagaaattggttcctctttatggaaggggcaaaacacagaccgatcccaggaccaagttatatcctggaatggagatcccccaccgtccttccgggcagaggccgcaaaccatgccgcccccgccgcctcccgaggtcaacccatttgggagttatgggtttggactcatgggagggttcattcctatggcaactgcccgatttggaaacttcacgctttccactgcctttggtgggtttatcccgtccctgctcaacattcatttccatggttttcaggatgccactgtctatgggacaacgtctggttatccctttgggtttaatggctttcatggagggaatgcgcggggttttatgcaggcaaccggtcaagtgcagcggcaggaggacaatgttttgaagaatctgcttatgttgattgggtttctcgtccttcttacggttatttttgtgtggtaatggtcgttttgtgttgaggttacaatgcttcttaaggagttgttgtgtgtaaatattttagctgacttcgtatgagggaattgtatgcttgagaaggttgccactttggctctttattaactgtattataagcattgcagtaaacttgaatgctgcctgtttgtcttt

SEQ ID NO: 29735 - DNA, 1110 bp, Glycine max
  Clone ID: TF_GmC543_1
gttcgcgaaccccaaaatactactagtaccttaataaacaaataaataaataaggtgagagaaaaaaaaaaatgtagaggaacctggaaacttccacgaggttttcggtgaaaaccaaatttggggctttgcatcgcaagatttaccctttccaatcaaaattcttctgccttcccctaccaattctttctctcaaccgatttatctgagtgaggggtttggccaatgacgagtggttttggtgaatcaacgagagcgtctgcaccgagcccatcatgctcggggaacagttcaaacgatgccggtgattttgaatgcaacatatgcttcgatttggcgcaagaccctgtgatcacactctgtggtcacctattctgttggccatgcctttataggtggctccaccatcactcccattctcaggaatgccctgtttgcaaggcccttgtgcaggaagagaaattggttcctctttatggaaggggcaaaacacagactgatcccaggaccaagtcatatcctggaatggagatcccccaccgtccttccgggcagaggccgcaaaccgcgccacccccgccacctcctgaggctaaccctttcgggagttatgggtttggactaatgggagggttcattcctatggcaactgctcgatttggaaacttcacgctttccactgcctttggcgggtttatcccgtccctactcaacattcatttccatgggtttcaggatgccactgtctatgggacaacgtctggttatccctttgggtttaatggctttcatggagggaacacgcggggttttacgcaggcaactggtcaagtgcagcggcaggaggataatgttttgaagaatctgcttatgttgattgggtttcttgtccttcttacggttatttttgtgtggtaatggtcgttctgtgttgaggttacaatgcttcttaaggagttgcttgtgtaaatattttaactggctttatgagggaattgtatgcttgagaatgctgccactttggctctttattaactgtattataagcatctgcagtaaacttgaatgctgcctatttgtctttaacgcttgcctgttgttttttctgtc

SEQ ID NO: 29736 - DNA, 1269 bp, Glycine max
  Clone ID: TF_GmC25299_1
tacggctgcggaagacgacagaaggggatatacatatacatcaaaacacgcagaagaagaagaacaacaacaaagggcttctgaattatcgtgttttgatcagaatctgaggagaaaatcacataatttcgaatttgagttttcgtgtataaaaaggaagagaagaaaatggaatcggaggatttggtcaaacaggaattggaggaattgcagaaacaattggggaagaagcaaaagtttgaagcttctgtttcgtctcttaaaacccttctccaacgcacttacccatcagcttccccggcgcttcgtaaatccttttattcagttctatgccgagttgctactgtgttgaagaccaggtatacagcaccaggtttctggaatgctggactgggcctttttgagcaggctcatttgcttgtttctgatccttctgagaaggagcacttgaaggcttgcattgctcaggccagggaacatttgcatctagaagacaacccatcacaaactttacgacctgcagataatcaggcaaacagagggtatctttttgagggccaccttacggttgatcctgaaccacctcagccgcaatggttggtgcagtcaaacctcttgacaacagctgctacactctttgctgctgaatcctctcaagcttcagaagcaaatgaaaccactcaagatgatgccacaaatatgcttgaagatcttctaaatagattggaagaagttgtgcccttgatggtggatgtaggtcctgtagccccaaaagcccctcctgccagtaaagaggttgtggcaaatcttccggtcattactctcacagaggaaatcctggctaatttggggaaagatgcagagtgtgctatttgcagggagaacttggttttaaatgacaaaatgcaagagttgccatgcaagcacacattccacccaccatgtctaaagccatggctggatgagcacaattcttgtcccatctgtcggcatgagctgcaaactgatgatcatgcctatgagagctggaaggagcgtgaaaaggaagctgaagaagagaggaaaggtgctgaaaatgcaattcgaggtggtgaatacatgtatgtttaaatgaccattcaatgtatggtttaataatatggttgttcgtgtaacaatggatttgaaatcttcatctggtgaatagttgtgtattctttattgtttcatgttatggagatatctcaaatttttagggatgctcaagggaaaaaaaaaaaaaaaaaccac

SEQ ID NO: 29737 - DNA, 1408 bp, Glycine max
  Clone ID: TF_GmC285_2
ggctcgaggcgagaaacggtgtgtgggttcccggtaatccggaggcgacaaggcacggacatctaaataggggtatttccttcatttcactcctcaccctgttcgtccgcactttccatccaaccaacaatggcagatgtaaccacctacctccgccaccaccccgactccgaccccaaccccaaccccaatcccaaccccaaccccaaccccgacgacgaccaaaccctaattccctttccctattgggatttggacttcgatttcgaccccgaattcccctcaaacactctctccttcaccgaccgcgaaaatcaggtcaatttcatcatggatctcttccaccagagcgtggagcagtcgcaactcaccgatcctctctccaacgacgccgttttcggcgccatcgatggaatcgatttaggtttccccgccgctgacgacttcttcgtcggacagagattctccgtcggatccgacgaatcgcacactcacccacacacgctcgcggcgaacgacgacggcgtcctagggttctgcgcgcattccaacgaaaacgacgacgttgcaagcatccctctctgctgggacgcgcttcaattagaagaaaacaacaacaacaacaacacctacgaggatttcgagtgggaggaagtgatggacgagagagacgttatcagcatgctagatgacaccgtttccgtttccctcggaattgaagaggaaacagaagcagcagcagcagaagaagatgcagaatctgaagtcagcattttggagtggcaagttttattgaactccaccaatttggaaggaccgaattcggagccttatttcggagatagcgaggatttcgtttacaccgcggagtacgaaatgatgttcgggcaattcaacgacaatgcatttaatgggaaacctccggcctccgcctccatcgtgaggagtcttccgtcggtggttgtgaccgaagctgacgtggcaaacgacaacaacgtggtcgtcgtctgcgcggtttgtaaagatgagtttggtgttggggaaggggtgaaggtgttgccgtgttcgcatcgttaccatggggagtgcattgtgccgtggttggggataaggaacacttgtcccgtttgtcgctatgagttccccactgatgatgctgattatgagcggaggaaagcgcagagatctgtaatgtgatgatgatgatgatggggttattattagggtcagttttttgactttcagtaatagggtaatggatgaaaacttgaaaaagtatagattttttttttgctgccgaagaaattgtgctttttaattttaaaaaaaattgagtctagggaatgatgtttctctttgaattgtactttttgggatacatcacagaaatgaatcatttttccatcaa

SEQ ID NO: 29738 - DNA, 1533 bp, Glycine max
  Clone ID: TF_GmC342_1
cccacgcgtccgcccacgcgtccgccaacgcgtctttcaactcgtccgaaaggccaaacctgggctgcgggtttgttttgatatctccaccatcctacgtcttcccttctcttctcaccttgttcttgcctttatcaccaggaggaaagaaagggaacaataaatcgaataaaaagcaccccatatccaagataggagctttctttccctgtttattctgagtcacgcataccgtgattctcctattagatcggcctttttccatttccatttcattcgggggtcgcaaatttctgggactaatcaattgacaatgctgcattagtgggattggtactgccgggttctttagctgatgaaagaggattgagcggtggtgcttgtggcttgggtggcttacctgttctatacgctaattcagaatggggagcgcattctatcgaaactcttgaaacagagaaaacactcggttgaaaaagggtctgagactgatgcagaaccctgttgtgtttgtcaggaggattatggtgatgggaatgatattggaacgcttgattgtggccatgatttccatagcagctgtatcaaacagtggctaatgcataagaatctgtgtcccatttgtaagacaacgggcttggcaacatgatgtatgtgactctctgtcctcaggcaaataccatgaccatgaaggaaaaaaaaaattggcacaatttacccaggaaattctggttcttggtgccttgtcttctgtttctgtttagcggacagtggcagtgatgatagtcaacatctggagctccctaacttaaacaagtctagtgggtcagcaaacgagtgtataccacctaatgttggatctggttcttttctgcttccttctggaaataatgccttcctggtagaagatactgatggtaggcctagttgttctcttgatactcggcgggtctcttgtaaacgaaaggctgttgaaggaaataatggacaatcgtcagatgctgggagttctagctacagtcagcatacggatggtagtgcttggcacaccattcctactcaggataatgctggaagcagttcgagaagatctattccctcagaagaggtaaacgcaagacttggcctgggtatcggggatgaagcatctgaaaatgtttctgattcaaaaactgcaggatgctcagaaagctttcacaggaatttccgtttgaggttaaatccttcaaacccagcaaattctgttcctcccaccgcattctcaactgggagcatgattaggcattctggtgtctccatcctctcaagtatcccaaagacttcattttgttgataattctctgaacttgaggtcagcaccaccgatagataatgtggttcctcaaagccagccacttgtaatccatgttcctgctttgcctaggaatagacaatcatttagatgctctgtcaaatttagtgcctgacttactgctttattgacggattcatttcatatatttaattatattgagttgggaaaatcaatatatt

SEQ ID NO: 29739 - DNA, 636 bp, Glycine max
  Clone ID: TF_GmC989417_1
atgaaggtgagccaatatatgctcctggtggtcctagtttggcattcttcattatgtgcgaatgcacagtggaataacccaataaactactctccattcgacgagacaaacaaaggtggaaactactccaaggtcacatggagtgtgtcgctgtcatgtgtcttcgttagcatcctggtgtttattttgtttaagctccgcgcgtgttgttgttgttgttattcttcttcttcttcccaacgccataacacaaagctcgtggcagccacagaagctattgaaaagtgccccatctttgaatactcgacggcgaaggagcttaaagtggggaatggggcagaggagtgctcggtgtgcttggtcgagttcgaagactccgacaccataaagatgctcccaaaatgccaacacgttttccaccagaattgcatcgatacatggttaccctctcgcatgacctgtcccatttgtcgccagaaactcacgtctcaggataccgtaatcgacattgatgatgatgatgtcgtcccaatggaacaactagaacatgatattggtacagagattacagagtcagaggtggcagtaactgatgaaactgacactggcactgttgtggaacaggttttggtttga

SEQ ID NO: 29740 - DNA, 558 bp, Glycine max
  Clone ID: TF_GM651B23rgnG1.C1.o45.ma
atgaaggtgagccaatatatgctcctggtggtcctagtttggcattcttcattatgtgcgaatgcacagtggaataacccaataaactactctccattcgacgagacaaacaaaggtggaaactactccaaggtcacatggagtgtgtcgctgtcatgtgtcttcgttagcatcctgctcgtggcagccacagaagctattgaaaagtgccccatctttgaatactcgacggcgaaggagcttaaagtggggaatggggcagaggagtgctcggtgtgcttggtcgagttcgaagactccgacaccataaagatgctcccaaaatgccaacacgttttccaccagaattgcatcgatacatggttaccctctcgcatgacctgtcccatttgtcgccagaaactcacgtctcaggataccgtaatcgacattgatgatgatgatgtcgtcccaatggaacaactagaacatgatattggtacagagattacagagtcagaggtggcagtaactgatgaaactgacactggcactgttgtggaacaggttttggtttga

SEQ ID NO: 29741 - DNA, 1916 bp, Glycine max
  Clone ID: TF_GmC3662_188
tcctctagagcggccgcttttttttttttttttttttttttttttttggaagcaacaaaattctggaattagggaaagaggggcaaaagggaagaaaagtccttttctatagtaccatagagaagagtctttattacacttgaatcaaaacttaacaagaaaatcaccatcagtatcagttgcaccaattaaaatcattctggtctccctaagagaaccaaatcaaatataaatgactgaagttattcagttccatctcatcttcatcctagaaataactgagataaaaagtttaaatattgttaaaacccaatcaactggtctttggatcaggcattggaaagaggccagcaccagcaccagcacctcttggcggtgcaaaacccaagaacttctgcaaatttgttctgatgctaatggaacacaagaagtacagaaatgccatggaacaatcagttgggtcattaccctgcaagcctcgatggctcatcttcataataagcccaaaaggtttgaagggcaatttggcaacaaccttgccttcgaagagtgaattcagcaacccaaagaccacaaagagaaccagagccaccacacccccagacttgaacttgaagagagacaagtcgcgactcgattctttgaggcttgtctcaacacggtcaatttttttggtcttggacttcttgatgttgattttattgctgtctgtcttcatggtctcaagtttcttggaggctttgtcaatggaggacctaaggtttttgtaagaattggtccgatagataagaacccatgagatagcctcacagacaatagctgtgcagaaggagatacccactacagtgaggccatctgagtacttgaaatctgagaagggatacgccatgggaagaccgttacaaaaaaacgacgagaaaatgggaaggcaaaattggatcttgatcggaattgtttaagcgtccaaagccagaccaattataaccgcttcccttcaagtctcagttttcaatataaaagcctatctaacagccttctcggactcaattcgaagtcgaacacggtggctgggctcgccggtcgcggtggtgcttctgggtcttgtggactgtggtctcgtcgctgccgaacgcgtgggcgaacgcgtgggcggacgcgtgggtgcagaatcccgtgaaccatcgagtctttgaacgcaagttgcgcccgaagccattaggccgagggcacgcctgcctgggtgtcacacatcgtttaaaaaaagaaaaaaaaaaaaaaaaaaaatacaatgactctcggcaacggatatctcggctcttgcatcgatgaagaacgtagcgaaatgcgatacttggtgtgaattgcagaatcccgtgaaccatcgagtctttgaacgcaagttgcgcccgaagccattaggccgagggcacgcctgcctgggtgtcacacaaaacatcattaaaacccaacaaccttgatttgtcacacacacactagttaaaaatccaaatgaaattaattgtactcttcttcctcgtagcatcatcatcatcatattcatacgctcaatcccctgcagcaccagcagtggctcatgtcccttccaccagagcaacgcttcccatgttactcgtgatcttcctcttcgccctcctcttcaccgcattctgctccatcttcattcgctactgctcccacgaagaacaaccccacgcgcttccacaagccacgcgcgccacgccgcgcggagtcgacccgcgcgtgctcgccacgtgtcccgtcacgtcctactacgcagtcaaaatgaagacgccgcaaaaggctgcgtttcagtgtgcggtgtgtttggcggagtttgacgacgccgacgcgctccgcttgctacccaagtgcggtcacgtgttccacgcgcactt

SEQ ID NO: 29742 - DNA, 1659 bp, Glycine max
  Clone ID: TF_GmC730_1
ctgtcgtgtatttgtagagagaaacaaagttctcttctacttctttctgtctccagcaggctcagaatccttttgtaactattctctgaatttccattcattctatttagtttcctcttttgttttctcttctttttccttgaagcaaagtgaacttgtggtgtatctttccaattgaagtgaaagagtaaggatgtcaagtgggacaacatactggtgttacacatgcaggcagccaatctggcttgaagggagggaagccatttgcccctactgtgacggaggctttgtgcaagaacttaatgagctgcgaggagttgcgcgccaacacggcttctcatcgcggatggaagatgctcatcaaatgcctgacattatggatgctgtaagagctgttatggagcaaagaggttctgaaccgagaattcgggttagagatgctgttgataactttatgaggcagagaatggctggaagatacacaaactttgatgttagaaggaggtctggttctggttctggttctggttctatccttattcctgatgagacttggggtgtctttagttctggtccttatttgatatttcatggtcaagcaccaggattcaccaattctaatggtagctcaagaggtggtcctaggcgtgttgattttggtgactactttctgggtcctagactagaaggactaattgaacaacacatttcaaatgaccggcttggtccaccccctgcatcgcactcttcgattgatgcaatgccaactattaagatcacacatgaacacctacagtctgattcacactgtccagtttgtaaggaacgatttgaactgggatccgaggccaggaagatgccatgtaaccacgtttaccactcagattgtattgttccatggttagttctgcataactcgtgtcctgtgtgccgtgttgagctgccaccgaaagaacatactagttctcgtggtagacgaatttggggtaatggcagtggtagtggtagtagcaatgatatctctaggggaagagagaatagacagatgaacaatggaaggagaaatctgctatcttatttgtggccattccggacctctagttcaagtacttagagtgtgtttgttttatcagaatcacactttccaaagcatgttgaacgtgatttctatgagattgattttgaaggtgattcaaagccaaaccaaaggcaaccttaatcattgtgctgagaccggggaatctactgttttatatctctttggccagaacaatgacagaagttaaaaagtttcctttcttcttcgagacaagtgtaattagctgtcaaaaaatgcttgtaatttaaatgacatgaagaaagtttctgtagattgtgctttgagcttgatctcatagatcatagaagtatgcgaatatctttgtaaatacaatattcttaaaaccaacttttgttttacattttcagtagtttagaagctttcactttggtgcataaggaatccaaggggaaggaaaggtgaatgatgaaagaaaactatggataaatcctttcccatatttagatattaccaatttataaggaaaggaagagttaaacgtttgataataatgtaatttaggaaaaaaattatttggtaatctagaactaacacaaaaa

SEQ ID NO: 29743 - DNA, 824 bp, Glycine max
  Clone ID: TF_GmC107734_1
gcattttattggttctattgacatatcacatatctatccgagtcttacactgtctatacattgagaacctcacttgttgtacattttatctatccatccactcatttggccacacaatcatacccttcgccctctaccacaggagtcccgccctctaccccatgactccctctcttcagtccaaaacccaaccaagcaccacgtcatctactcatcacaaaaaaaaataaatcacaaggccccgactctgggcccccctccccccctcctcatcgcgtgtgaggtgactacagtaagaaacaaaataaataacagtacaacattaactcacatttaaagtaacgttgtttctctcccgctaaggtacgagattaatcaattagaaagatactctaaccatttataaccgctagatgtaaaaccaacggtggatatcattgttggatgcaatggtggttaaagaaacatcataacatatgtttaagacaaaaataattttatctactaatcacaatcattatttttgtattcatttttatccactgcaacattttcaactgacctatgaatcttttgcagtcattttaaccaagacttcccacagccgttggatctctccgaagacatcatcggacggcaaccgaaacctgcagcaaggacacgtgttccttttccccatccacggcaaaatacacatccaatgaaacaagtgttgacatggcaactcgcacacgtcccttcctattcccatctcctccttgcatatcacgcactccctcccgtcgtgcctcacctccaccgacggtagcgccaccattattgcc

SEQ ID NO: 29744 - DNA, 1572 bp, Glycine max
  Clone ID: TF_GmC1165_1
tgaaaacactgatgaggtgttactactgaatacttcttgaatatgattctattcttatttcagttcaagtttatgtaaatatatgctttgtcttattttgtttgcagattcgtgtatgttgaacttctggaaattcgtaaagatgtccaatgcccaatttgccttggcattattaagaagacaagaactgttatggaatgcttgcaccgtttttgcagggaatgcattgataaatcaatgcgactagggaacaatgaatgccctgcttgtcgcacacattgtgccagtcgtcgttccttgagagacgatccaaattatgatgccctcattgccgctttatatccagatattgagaagtactcacaagaggagcttgaatttcgtgaagaggagaagaaccgcaataagcagattcaagcttcaatagcaaaagtagttcaacggcaatctgaagcattggttaagagacgtaaagacacaccaggtgaatttgtaactagaccgcagcgtaatcagcgaaacattcattctaggagacaaactcaagcaattgaaggatctgaagataatgaggaggaaaatgacaataatgaaaaggactcatcttcagctgatgaacgaagtacagaacaccggcagagaaggagaaagagatgggctagagttcgcccctctcaaccctcatcatccatgacaagtcctgatggtggatgcaatgatagtgatatggatataagtaaagaaaatcgtggaatttcaaggcaggtgtcgaaacatggaaagcttacttggggaaggggtggttttagaagtaacactcggcatggtagtggtggtggtagcaatagcaaaagttctcgcagtagtcgattgtctaagtttgttgaccatctccgcaacttggatgaaaacactgatgagtttgatgtccatctcatgcttgtttctcttgaccaactaagtacaccaagtttgcagcaaccttacctttgctgtcgaccaactttgtctgtcaagcacctttatgaacacgttgctcgtcagacacctttgccggttgaaggaattgagatagtggcagtcaaaggatgctgcagtacgaactgtgacaagtcagctgatgagaattcggcccttgcatatgatgagctatcaaagctggttatagatccacacaaagatgaactggaaattttgcaaggacatgagactctggcagggcttagatccaaatgcatatccaagatggggcatttgattattgcatacaagcagaaggaggtatcatagtcttggtttcattggcgatcttgacattggctatgccataaatttctttgttatgtacataaaaagaacaattgccttttgcatcctcaaccccaaaaaaagaaaaaataaaaacctatggtatactagtgttatgcaagcattgtaatatctttatttttagatttaccttctaaaaatactagttaggtttcagttttacttaaaaaaaaaaaaaaaaaaaaaaaaaaaaaaaaaaaaaaaaaaaaaaaaaaaaaaaaaaaaaaaaaaaaaaaaaaaaag

SEQ ID NO: 29745 - DNA, 1301 bp, Glycine max
  Clone ID: TF_GmC1801_1
cgcccaggtagagtgagagagacagatctctctcaaggcagagatcttgtgcgtgtctgagagagagagagagagacagatctctctcaaggggtttaattgcagagatcttttgcgtttctcaatataagtgaaagagtagacagagagaaagagaagatcaaaagagctaaccctggctccctgaatatcttctcgttttttatctgaatcacgctttagtttgtctcttagctttgttttcgtttgatcccatgcccctctagctaaactcgtttgtcttctatgccaccttcagactgatcaaaacaaaacaaaacttgtttttttcgctatcttcttctccctttgaggaaagcataaataaaaagcgatagaaagggatcgatagaaagagtcttgtggagtagctctcactgtaaagatgggtactggttggagaagagccttctgcacccgcgaccctgcatctaccatatcggataaacatcccggaagcccaagcccgagcccaagaacctgcactcgattgggttttctctctggtggtagcaacccttccaccccacgcttgcgttgcacaacaaaagcggaaactgcttctcaaacagttacattaagtgatagtcccagagttcaaagcaagaacacccccagagcaacgaaatcaccatcagtctcaaatccaacttctccacgctcccctctcaagctctccctcttcaagaacagcttcaaattcagggtatgtcatgcttctttcatctttttaagattcccatgtatggagtattcaatgattgtgatttgttatggttgagcagagtagctgtggaatttgcttgaacagcgtgaagacaggacagggtacggcgatatacacagcggaatgcggtcacgcgtttcatttcccgtgcatcgcagcgcatgtacgcaagcatggaagcttggtgtgccctgtttgcaaggccacgtggaaagacgcggacgcgtgggcggacgcgtgggtcgcgccagaatccgccgaaaaagacaacgtcgtcgccgtccagagggtcacagaaagtccttaccccaatggccaacgacaaaaagccaacagagaataataatgcctcccccgttttcaaaacctacaacaaccacgtggagcaaccatcgaagcattccgattcaaccaggtcctacaacgatgacgagccactcctctctccacctccggcggccggattattccaattcccgaagccgacgagaatgccgaagacgacgaggatgaagaccccggcgagttccagggc

SEQ ID NO: 29746 - DNA, 664 bp, Glycine max
  Clone ID: TF_GmC1801_2
gagtagctgtggaatttgcttgaacagcgtgaagacaggacagggtacggcgatatacacagcggaatgcggtcacgcgtttcatttcccgtgcatcgcagcgcatgtacgcaagcatggaagcttggtgtgccctgtttgcaaggccacgtggaaagacgtgcctctactcgcggcgcacaagaacctcgcgccagaatccgccgcaaaagacgacgtcgtcgccgtccagagggtcacagaaagtccttaccccaatgccaacgacaaaaagccaacagagaataataatgcctcccccgttttcaaaacctacaacaaccacgtggagcaaccatcgaagcattccgattcaaccaggtcctacgacgatgacgagccactcctctctcccacctccggcggccggattattccaattcccgaagccgacgagaatgccgaagacgacgaggatgaagaccccggcgagttccagggcttcttcgtcaatcccaaaaactcatcctcgtccaaatcctactccgattcgttgcaaaccagtgacggtgattccagaaccgttcaggtgaaactgatgccggagtgcgctgtcatctcagcttcccgaacacacgagacctacgcgttggtcttaaaagtgaaggctccaccgccgccacct

SEQ ID NO: 29747 - DNA, 764 bp, Glycine max
  Clone ID: TF_GmC12487_1
aatttctagctagttgtctacaaaagactttcttcgaaacttgtgttctctcttcgaatttcaccaaaacactaaattataaccatcatgggtgatgttctaagccccttcaccatctcatcccctcctccaccctcctctccatcaaccaagagcaacagcatgcccatgttgtactacggtctcgtggtggtcggaaccgccgccatagtactagccatatacaacctcgtcctcctaagacggagccacacgcgccatgcgctgccgtcgcaaagtactgggcaaaatagagatattgtacgagtgcccgagatgagaacgaggagcttcgaggacagccaacaaaggaacttgttgtcgagcttcaagtacaagaaagaagttgtggccaaagaagaagaacaagaagaagaagagcaagatgatgatgaatttgagtgctccgtttgcttatcggtttatgaagaaggtgaagaggtgaggaagcttccacagtgcaagcactatttccacgttctttgcatagacatgtggctttactcccacttggattgcccgatttgtagaacgcccgttgatgttgttggccctttgtgtccgctggagaattcacctgatgggatgatggaatccggtggtggcataccatcatctctctagattatgtggttggggagaaattattagataattatctcacattaatcatatattcttcttcgattttcatatcacacctaattaaattgagcttaacgagg

SEQ ID NO: 29748 - DNA, 2106 bp, Glycine max
  Clone ID: TF_GmC1017_1
aaagacttgagatctcagattacaccctttctcggctcgtcttcggaaataaaaaaatcccaaagaaattcaatcttcttcatccccaaaccaaagacttgagatctcagattacaccctttcttcctttgttttctcattcctgtcctttctcagacaacaccatctctctctctcttgttccctttttagggtttttgtaatgggtctcggtaacgacgaagaagaggataacaataacaatgataaggttgtggatgacggagatgttggaggaggaaagtctttcggttcagtgtcgtgttccatttgcctcgaggttgttgccgataatggggatagatcctggtctaagcttcaatgcggtcatcaatttcacctcgattgcattggttcagcattcaacataaaaggagcaatgcagtgccctaattgtcggaagattgagaaaggtcaatggctatatgctaatggttgtcgctcatatcctgaatttagcatggatgagtggactcacgatgaggatctttatgatcttagctactctgagatgtcctttggagttcattggtgcccttttggcaacctggcacgacttccatcatccttcgaggaaggggaattttcatcatctgcgtatcatgatgtattgggacaacatgccatatttgctgaacatacagctgtgtcatctgccagccatccttgcccgtatattgcttactttggaccaatacatccatcctcctccaattctggtggaactgtatcagaagcttcaaacttcaaccattggaatggctcgtctgtgcccagtgacatgccaacttcctacacatttcctgctgttgatcttcattatcgcagttgggaacaccactcccctcctttctctacagcaagtagtcgtctagttgctgcagatcagccatcagtatcccctggtagtcaaaggccagccaggggtggttcggatgtaccaagatcaggatcttttatgcatcccttccttgttggtcacagttctgctgccagagcggggagctcggttgcttcctcaatgatccctccttatcctggtagcaatgctcgtgcccgtgatagagtccaggctcttcaggcatactatcaaccacagcaacctcctaattcaaccacaatgcggacacctatcgcttctggcacccgaagatccagtagtcataatggaccagctcaattagctccaatggccacatcgccagaccaaggtggtggcttctttcttatcccatcaagttcatcaggacgcaattttcaagaagaaaatcatcatctaccaaatcacttccatgcttgggaaagagaccacttgccttcattatcattgaaccatgttgatagagattcaggttggagagcataccaccaggctaccagccggtcagacccagctaccaggtccagcagctttcgtttaaggcacggatcagatagaatgccttcacaaaatcggtaatacacttgtatcctgttcactgtgaagcaaactaccattactatggaaagttatgtatgctttgaaaaatgttacatattgctttggcacttcggcctttgggtctgtcctgttatgacagactatatactctggctggccttggaattgatttttccatagccaccggtgtgatggacatttgcttcctctagtttatttgccccggtgggcataaaataagatggtatatctagttggggaaatcaggttttggaagaaatactgggacgttgtgatttcaagtggtgaatcaagtggacgaaagcagctgtggctggatttgtagtgggtcaactatttatgtttgataacaacgctcatgcaaatgctgtgtattgagaatacaattttacttctactccatggcaagagtgatttgtaaactgttgtgcaagaattgagccaaggtatatggtaatggaactcgcatgagaactaccatacctcggaataataggagttcaaaggctggttttaaaacaatcgtataactggtttttttataaaatattatttcaaaaccaaaaaaaaaaaaaaaaaaaaaaaaaaaaaaaaaaaaacacgcc

SEQ ID NO: 29749 - DNA, 1857 bp, Glycine max
  Clone ID: TF_GmC1017_2
ttcatttgtacgcccacgcgtccgctttttcgtttgttttctcatccctgtcctaactccatttcatttaaacgccgtcgttccctctctcgctcttgttccgattttagggtttttctaatgggtctcggtaacgatgaagaagaggacaataacaacaacaataataataataagaataacaatgataaggttgtggatgacggagatgctggaggaggaaagtctttcggttcagtgtcgtgttccatttgcctcgaggttgttgccgataatggggatagatcctggtctaagcttcaatgcggtcatcaatttcatctcgattgcattggttcggcattcaacataaaaggagcaatgcagtgccctaattgtcggaagattgagaaaggtcaatggctatatgctaatggttgtcggtcatatcctgaatttagcatggatgagtggactcacgatgaggacctttatgatcttagctactctgagatgtcctttggagttcattggtgcccttttggcaacctggcacgacttccatcatcctttgaggaaggggagttttcgtcatctgcatatcatgatgtattgggacaacatgctatatttgctgaacatacagctgtgtcatctgccagtcatccttgcccgtatattgcttactttggaccaatacatccatcctcctcgaattcgggtggaactgtatcagaagcttcaaacttcaaccattggaatggttcatctgtgcccagtgacatgccaacttcctacacatttcctgctgtggatcttcattatcacagttgggaacaccactcccctcctttctctacagcaagtagtcgtctagttgctgctgatcagccatcagtatcccctggtagtcaaaggccagccaggggtggttcggatgtaccaagatcaggatcttttatgcatcccttccttgttggtcacagagtggggagctcggttgcttcctcaatgatccctccttatcctggtagcaatgctcggacccgtgatagagtccaggctcttcaggcgtactatcaaccacagcaacctcctaattcaaccacaatgcggacacctattgcttctggcacccgaagatccagtagtcataatggatctcctcaattagccccaataaccacatcgtcagaccaaagtggtggcttctttcttatcccatcaagttcatcaggacacaattttcaagaagaaaatcatcatctaccaaatcacttccatgcttgggaaagagaccacttgccttcgttgtcattgagccatgtcgatagagattcaggttggagagcgtaccaccaggccaccagccggtcagacccaggtaccaggtccagcagctttcgtttgaggcatggatcggatagaacgccttcacaaaatcggtaatacacttgtatcctgttcactgtgaagcaaactaccattactatggaaaattatgtatgctttgaaaaatgttacatattgctttggcactttggcctttgggtctgtcctgttatgacagtatatactctggctggccttggaattgatttttccatagccaccagtgtgatggacatttgcttcctctagttttatttgccctggtgggcataaaataagatggtgtatctagttggggaaatcaggttttggaagaaatactggggcgttgtgatttcaagtgatgatgaatcaagtggatgaaagcagctgtggttggatttgtagtgggtcaactatttatgtttgataatgacactcatgcaattgctgtgtatttgagaatacaagtacttttacttctaccccatggcaagagtgatttgt

SEQ ID NO: 29750 - DNA, 1490 bp, Glycine max
  Clone ID: TF_GmC480_2
gatcactcaattcaattggatcttttgcattctctctctctggtgtctgatttcagggttgatcttctcttcactgggttcaagaagcttgtgatgatgcttgcagcatatgccttgaggatttttgcaaaagtgatcctgccactgtcactaattgcaagcatgagttccacctgcagtgcattcttgaatggtgtcagagaagctcccaatgtcctatgtgttggcaacctatcagcttgagggatactacaagtcaagaactgcttgaggcagtagagctggaaaggagcttgagggataccccatctagaaatgctgcgatttttcatcatccagcacttggtgattttgaattgcagcatttacccatggctatgaatgaggctgatattgaagagcgaataattcaacatttgactgctgcagcagcaatgaggagatcacaccacctcggccagagggaaggccatcgaactaggtcatctgctcatggccgtccacacttcttagtatactcaactcagccaagtgcaccaccatttgctgcaggaggggaaagtgaaccagctgcaattcctgtaggaattccatctaccccacttacatttgacagaaatgagcaatcatctccacagcagatcccctatttccaaactcggggttcttctttaacttctggctctactgtcgcaacaacaaatcttcaaggagttcactctaatgatagaaggtttgcctctcattcttttcctgcaagccaagacagagcacagccatcagaacaatcgttctctgattctctgcgttccagatttaatgcagtatccacgagatacaaagaatcaatttcgaagggcacaaggggatggaaagagaggctgttctctcccaattcttctatgtcagaacttggttcagaagttaagagagaattgaatgccaaaattgctagcgtgtcccgattgatggagcgccttgaaacaacaagagaaaataatagggctgcaggaacttctttatcaaatccaaatcatttggtgaactgttccattgcagagacaagcaaccaaaacaatgtggaagctcgtggagagaactctttgcgtgacaatagtactccaactacattttctgctagctcagattcaaaatgagttccagtttgcttctgtgaatgcatctttgctcagcatatcatgcttgaaggctaactgtttgctcaggcatgacatgatgaggaatatatgctcgaggcagttgttggattccaataaataaaaaaaagaatctgagacacctgtgtcctagagctaaaaactttttcttttgtgtatatattatataagccgagaaccgtagggagtatttaaggagtaatccaagggagaaagtgttgtgaaattccatcagacttgtgtccataatctgtccctgtgatttactttttggagtcaatggaaatatagatcaaggtggcaactgtaaag

SEQ ID NO: 29751 - DNA, 800 bp, Glycine max
  unsure (1)..(800): unsure at all n locations
  Clone ID: TF_GmC480_3
ggctcgaggatttcagggttgatcttctcttcactgggttccctccgtttcttgagcccccccccccccccccgtttttttcttttctgggccttttccaattctcaatggaggttccagaaatggaaggcaagaccgaaagtcatgtgacatcggcagaagcctttgtggaagggggggttcaagaagcttgtgatgatgcttgcagcatatgccttgaggatttttgcaaaagtgatcctgccactgtcactaattgcaagcatgagttccacctgcagtgcattcttgaatggtgtcagagaagctcccaatgtcctatgtgttggcaacctatcagcttgagggatactacaagtcaagaactgcttgaggcagtagagctggaaaggagcttgagggataccccatctagaaatgctgcgatttttcatcatccagcacttggtgattttgaattgcagcatttacccatggctatgaatgaggctgatattgaagagcgaataattcaacatttgactgctgcagcagcaatgaggagatcacaccacctcggccagagggaaggccatcgaactaggtcatctgctcatggccgtccacacttcttagtatactcaactcagccaagtgcaccaccatttgctgcaggaggggaaagtgaaccagctgcaattcctgtaggaattccatctaccccacttacatttgacggaaatgagcaatcatctccacagcagatccccattccccaaactcgggngtcttctctaacttctggctctactgtcgcacac

SEQ ID NO: 29752 - DNA, 3025 bp, Glycine max
  Clone ID: TF_GmC12020_1
agttattaaagtacatataatccatataacgttaataactctacactgaaggtccgcccgggtcgacccacgcgtccggcgacacagccagcacaataagtacattcgacatagtttggttaataaagtgcatgtagcccgtagaacgtgattaactccatactgaaattaaatagttcatacccttggagctttggccaatcgtccgggaagccgaaccaacgaaccaaccccaaacccctctttttccagaactttcatgtccatcttgccctcacaaacccaagccgcatcttcgtcttcttcctctgcgccatctcctaaccctaattcccaacatggaatcggaatccctattcctcaacccttcccttctctttccccctcaccaatcaacctcactttcggatctctccagatctccgataccccaggttcatcggcttcagctgctcaagattctggtggatcttccgaaaaggtgacagaagtagggtctccaagtggagtaatggtttcacctcagcaaaactctagaacaggttctaggagtcatgggggaagacggactggaatgggaacaggaacagcttcttatcatagaaatcaacaaactcctgggtccgtccattctcacggaagtgccccttcggcggggagaaaagctcagacggtgaacgggaattacttgctgaattttcaatatgacccgatatcccgttctcaaccacggggtcctcctccttcccctaccactacaagaaggcatcggaagaggaagccgtacaacaaagagtttgtttctgcaggcaaattacaagttcatggtgctaggtttgggaaattattcacctgagtcgatggatccagataaaatgttgcagtgggaagatattatatgtgtgacatatttgaccccattttcagttcagtgtccaatttgtttggagtatcccatgtgtccgcagataaccacatgtggacatattttctgtttccgatgtattctacagtacttattgatgggtgaagaggatcacaaaggtgatagctggaaaaggtgtcctttgtgctttgtgatgatatctgccaaggatttatataccttgcacatcacaaatgtaaaacagtatcaagtaggagataatgttgagttcacctttttaacacggaaaaaggattcctttactctgtcacttaaaaataaacgagagacaaataccacatcaggtgtcgatggagatatctgtgatcccttttctaagttcactcttatatcagatgtagatctctcagtgaagcatgcaatatccgatctagatggttggctagccagagctgattcaggtcttgttgatgacctggagaagcttccttatgtttgtgctgcaatgcaacaattagaacagaggaagaggtattggagtgagcacaggtctcatgacagtgaaaaatcttctatgattattgattgtggacaccagataccatcaacagttgcaaattctatggatactgatgatgaaaactgttctaatggatcaataacttcttcttctgatttccttgatcaaaataaggttatgatgttggataagtcaactgctggagcctgttcggatcaaaacttggatgtggagaaagaattaatagagcaggaaatgaatttatcttcttcatatgaggagaaaaatgataatcaaaggcattcagaaggtgttattggagatgtgaaggaaaatagttcatacagtttctaccaggctgctgatggtcagcatctaattcttcatcctctgaacatgaagtgtttgcttcaccattatgggagctatgatatgcttcctcacagaataagtggaaggattctacagttggaaacagttactcagactgaagccatcaggaggcggtatcgatttcttagtcattttccattaaccacaacctttcagctttgtgaagttgatttgagtgagatgttgcctcctgaagcattggccccatttatagatgaaatcaagaagcgtgcaaatcagaggaagcaacttgcaaaaaaggaaaagaaggaaaaaataaaggctgaagctactgctgcttattctcttcccatatcattaagtcatcagtttacttctcgcgatgatcctccaacattctccatggatgactttgaagctctaggaaattcaactatatcatcaagtcctcccctagctggggagagaaaatcattctcaaatgttactaggcttgggtttgctgctgctcatgattctccatccttacaaattcaagaaactagtggtctacataataacaacaggacctctgattcttctgtctcaacaggcttgagaaatggggagacacaatcatactccaatgttatatcaagagcagaatctaatataagctcgaatgcaccaaagacaaatgagttggggaagaagggaaagaaaccaaatcgagttcttctgtcgacagccggtggtaggcgttattgattacttggttgccgacccttacccttaccctagattatgtgggtgtcaaatgatacccaaccttctcccggctagtcccaagccaaactcttttggcagattatttcagtgtagagttattaacgttctatggattatatgtactttatgcgctcttaagtacttatagataagtagatatgtgtggagtgaataaatgtttttagcaataaacaagccaaaacagttagaaggtcagtatattgtttctgtggatctgtagaactgtgctggcgttgggtatgttaattaaatccagactatgagcattgactatacacaagacatttaaatttggaagcgggttttgttaactacagattgattttttaaacaaacaatgtgtgtaattgcttagtcgaggtgatgcgtgagatatcagtatgcccttatgcgtgaatggtggagaacagtgacctgtattcttactaaaaatcttaagaataatcaaaatgaactttaaaaacatactaaaactc

SEQ ID NO: 29753 - DNA, 1673 bp, Glycine max
  Clone ID: TF_GmC5879_1
attatccaaaacgccccagtgccttacgctactgctttttttgtaacagccatatcattaaatattaattaccagagtcaaaagaaaacaatgagtatgcatgtacggtgggtggctattattaattaagaccaaaaccatccaaattctttgcttgtacacctgaaccctaatgaccactttcacacactccattttccaccatgaccttctttttcttttctatttctttctcctcacggaatttccgccgcaggccaccgcgcagcctccgaacacgctgacgccgccgccgcagcaggaccgctttacgaggctgaagttcgacaaatccatggccatcgttctgctgatcctggtggtggtgttcttcatcctagggttcctctccgtgtacacgcgccagtgcgcggagcgcaggatgggagggaggttcgacctctccatcttgatctcgcgccggcaacgcggcctcggccgcgaagtcatcgaaacgttcccaacgttcgtgtactccaccgtaaagagcctcaagttagggcgcgccacgctagaatgcgccgtgtgcctcaacgagttcgaggaggtcgaaacgctgcgtttcatcccaaattgcagccacgtgttccactccgagtgcatcgacgcgtggctcgccaatcactccacttgtcccgtgtgtcgcgccaatctttttcccaaacctgatgacccgtcttttgatcctatccaaattccggatccggaacaacccgttatatcatcaccgacccgagccgaaactgggggctctaatcctcgttctccgaatttgattgatcagaaccctacgtcgcggtcaaggtcaacgggttttcgtatcgcggggtggtttccgcggtctcactcgacgggtcactcgctggttcaacccggggagaattgtgaacggtttacgctgcatttgcctgaggaagtgcggaaccagcttatgctgagtcgcaccaagagttgcggcgtgggcgtgacgttcacgcgcgagaacagtgaaaggaggggttatagggcgaggagcgttggtagtagcctcagccctcacgtgagggggtggttttctgtgaaggatgatgtcggggaaaggtcttcggatcggttattctccacgtcgacaagggatagtgaggtttagatgcttccttttggtttggtgggtaaaagtcaaatatcattatttcacactttcacaatggcttttgccattttaccaattaaccagcctttctggcctgtgctcctgtatataatatatactctagtaatatttacatgtgtatggttttagagtttggaaattttggagtcttctgttctgtgtggaacaaactacattgatagtaggattttgtaaacgttaataaatttgaaaatctgaaacatttacttattttctagtctacttctttggtactggtcgcaccaggagttgcggcgtgagcgtgacgttcacgcgcgagaatagtggaaggaggggttacagggcaaggagccttggtagcagcctcagccctcacgtgacaagaaacagcaccagtcctcacgtgaggtggtggttttctcggccacgctcgattaaggatgatgtcggggaacggtcttcggatcggttattctccacgacaagggatattagtgag

SEQ ID NO: 29754 - DNA, 414 bp, Glycine max
  Clone ID: TF_9903085
ggttgtgttagcagtcatagtgtgtgccttcctatgcgctcttggtctcaacacaatgctgcaatgtgtgttccaatgtgccaatcgcgttctcacggagccccttcagtggattgcctcaaggaggctcaattctggcctcaagaagagagaaatggtggctttgccaacctcaacttacactcattcttgtgcctctccatcttcgccctccaataatatttgtgccatttgcttaacggaattctctgatggggataggataaggttcctgccaaactgcaatcaccgttttcacgttgattgcattgataagtggctgctttctcactcttcttgcccaacttgtaggaacttgctcaagcccactgattcagtacactccttgcatactgtagtatcatagtttgatta

SEQ ID NO: 29755 - DNA, 621 bp, Glycine max
  Clone ID: TF_GmC3662_37
tcattcagttggcactacacggaactcgatgacagagacctcgagatccgaggtaggactctgttttttgtcatcgtactcttctccattattctcctcgtcactgttctcttcatctacacgcgctgggtttgccgctaccagggacgcctccccaccaccgcgttcaccgccgcagccgcccacgcgccgccgctcgcgcagcctcagggaatggacccagcttccatcaagaaattgcccataatcctccaccacgcgccgtcggaccgcgaggaaagcgcgtgggacgaaacggagtgctgcatctgcctcggcgagttcagagacggcgagaaagtgaaggttttgccggcgtgtgaccactatttccactgtgattgtgttgacaagtggctcactcatcactctagttgccctctttgcagagcttctctcaaggttgaatcttccttccctggggttcggaaaggtcatataattttcctcaacgccacttgttggataaaagtcctcaaagacgttgctcttctgagtcatccctgtgtttggtctactaattggatatgtggtcctgcttcttaggttatgttgttccttggatatacaagcagcattcat
